United States Patent Application Publication US 2011/0252501 A1 - sequence listing, part 4

SEQ ID NO: 13985 - protein, 480 aa, Azoarcus sp. EbN1
MKEYKLFIDGEWVGSSTETILDDLNPATSEVWGRVHQASAADLERAIAAAYRARESWGNTLANEREAILLRAADALQKRIPDVAAVLIDEAGSTYGKAMFEASFVVNLLRSAAGECRRITGETMPSDSPGVFSMSVRRPLGVIAGIAPFNFPFLLATKKVALALAAGNTFILKPASYTPVTGLKIAEIFEAAGLPKGVLNVVPVQGSVLGNTFVADPRVRMITFTGSTEVGRELSAEAGRHFKRITLELGGKSPMIVLKDADVDYAVNAAAFGIFLHQGQVCMANSRLIVEAPIFDVFCDKLATKIAGFKVGDPRDPQTVIGPLIDRKQCAVLDRHVADAVAKGAKLLHGGKSDGAFYQPTILAGVTPDMVVFREESFGPAVSVIRAADSEDALRLANDSCYGLSSGLITNDLQKAFDLSLRLEAGMVHINDSSIMDEPHVPFGGVKDSGFGREGGHHSMDEMTELKWITVQMGQRQFPF

SEQ ID NO: 13986 - protein, 113 aa, Streptococcus mutans UA159
MKKIEAIIRSDKLEDLKAALVQSGFIKGMTISQVLGFGNQRGYTEYVRGQKITPTLLAKVKVEIVAHDAAVEEMITTISQAVKTGEVGDGKIFVSPVDEIVRIRTGERDGDAI

SEQ ID NO: 13987 - protein, 417 aa, Mesorhizobium loti MAFF303099
MARIVMKFGGTSVADIARIRNVARHVKREVDAGHEVAVVVSAMAGKTNELVGWTREASPMHDAREYDAVVASGEQVTAGLLAITLQNMGVHARSWQGWQIPIKTDNAHGAARILDIDGAFLIKRFGEGQVAVIAGFQGIGPDNRIATLGRGGSDTSAVAIAAAVKADRCDIYTDVDGVYTTDPRIEPKARRLAKISFEEMLEMASLGAKVLQVRSVELAMVHRVRTFVRSSFDDPDAPGMGDLLNPPGTLICDEEEIVEQQVVTGIAYAKDEAQISLRRVGDRPGVAAGIFGPLAEANINVDMIVQNISEDGKFTDMTFTVPSGDVDKALAVLDRLKAEVGYDVVQSEAGMSKVSVIGIGMRSHAGVAATAFKALADKAINIRAITTSEIKISILIDGPYTELAVRTLHSVYGLDKQ

SEQ ID NO: 13988 - protein, 448 aa, Sinorhizobium meliloti 1021
MNVDEKLEPILAEVLRRNGGEHEFHQAVREVLESLGRVIAKHPRYAENALIERICEPERQIIFRVPWVDDKGQVQINRGFRVQFNSALGPYKGGIRFHPSVNIGIIKFLGFEQTFKNALTGMPIGGGKGGSDFNPRGRSDGEIMRFCQSLMTELHRHLGEYTDVPAGDIGVGGREIGYMFGQYKRLTNRYEAGVLTGKALFYGGSRARKEATGYGATYFVQRMIATKGLDFEGKRVTVSGSGNVAIYTMEKVIEFGGKIVACSDSNGYVVDEDGIDLELVKEIKEVRRERISEYARLKGAGTHYIEAGSVWDVPCDVAMPSATQNELTGKDARTLVKNGVLAVGEGANMPCTPEAVRIFQEAGVLFAPGKAANAGGVATSALEMQQNASRDSWTFEQTEARLATIMQAIHDRCAETAEEYGTPGDYVLGANIAGFVRVAEAMDALGVI

SEQ ID NO: 13989 - protein, 1102 aa, Oryza sativa
MAATAAALAVTDELALPLRAVGDLAAAAGFSREEVVVITQCASLGGKLPFDDASVGSVLAVIKKVENLGDLFITEISRVLKAGGMVLIQSSPSDQDPNNSIQRKLLLGGFVDVQASAASSQDSEHSVTIKAKKVSWSMGSSFPLKKATKGLPKIQIDDDSELIDEDSLLTEDDLKKPELPVVGDCEVGATRKACKNCTCGRAEAEEKVEKLNLTSEQINNPQSACGNCGLGDAFRCGTCPYRGLPAFKPGEKVMTSLPDRGVSSSSSDPLCEGNIAPCSSSSEQKEDCSLKQSKTSILSCVFNSPFNIFEAHQDSSANKSPKSSSGSYDWSRVLRRIVCSGSMWRFLGTSKVLTSSDVWFLGKCYKLSSEESSSDSDSESGHATFLEDFSSRIWITYRRGFDAISDSKYTSDVNWGCMVRSSQMLVAQALIFHHLGRSWRRPLEKPYNPEYIGILHMFGDSEACAFSIHNLLQAGNSYGLAAGSWVGPYAMCRAWQTLVRTNREQHEVVDGNESFPMALYVVSGDEDGERGGAPVVCIDVAAQLCCDFNKGQSTWSPILLLVPLVLGLDKINPRYIPLLKETFTFPQSLGILGGKPGTSTYIAGVQDDRALYLDPHEVQMAVDIAADNIEADTSSYHCSTVRDLALDLIDPSLAIGFYCRDKDDFDDFCSRATELVDKANGAPLFTVVQSVQPSKQMYNQDDVLGISGDGNINVEDLDASGTDAGGVGVTYGMRGTTMPPPADVARFLSRDTIFDRVRLLDADPRALRAFAGTGLAVDVTVPNADVPRLAASRASARRWVRASVAPYAEATNVSRVLVGDEVISQANRTLLLSLVPAMRNLHAALAAVLPPSPRRREIIKVSTPHSLGILAASTPPSAGRFHDGYDTAVVKPLLGFLRATGAPFMVNAYPFYGGLTNETLDYVLFRGLQQERHPPPRLPRGTPLMPNRTFELSIFSLFDENLKPGPVSERNFGLYHADMTPVYDAGILTAPQEIVGTKVTPAPAPALAPAEDGRRRWCVPKPAADEVALQVNIDFVCGQGGIDCGAIRAGGSCYDPNNVQAHAAFAMNLYFQSNGQHEFDCDFGQTGVITTVDPSYKSCKFT

SEQ ID NO: 13990 - protein, 251 aa, Brassica napus
  misc_feature (132)..(132): Xaa can be any naturally occurring amino acid
MASPSPPFPISLHATLHQTTTARSTPLKFSSTRVLTRPIKASTSETPPDLAVETRTGSGSKDLPIRTIPGSYGLPIIGPLKDRNDYFHKQKPEEFFKSRIRKYNSTVFRVNMPPGGFIADNPQVVALLDGKXSFPVLFDVDKVEKKDLFTGTYMPSTELTGGYRILSYLDPSEPNHAKLKSLLFHLLKSSRNRIFPEFKATYSELFDSIEKELAVNGKADFGGPGDAAAFNSLARAMYGKNPADTKLGSDA

SEQ ID NO: 13991 - protein, 441 aa, Pseudomonas fluorescens PfO-1
MARLQRTLSLGSVVLFGIAYMTPIIVLGTFGILAQSTAGMVPAAYLAALVAMFFTAMSYGRMAAAFPVAGSAYSYVRKAISPKLGFIAGWAVLLDYLFLPMAIWLIGAAYLASAFPSIPQWIWVLAFIGITSAINIIGLKLANGINALLMLVQFLVLIAFVGLCVHYVGGDASQPLWSIKPFFNGDMQMPLIMSGAAIACYSFLGFDAVSTLTEETRDPRRTIPRAIMLITLIGGLIFVGVSYFVQIAHPSFQFDSVDSAAYEIARNIGGDLFVSIFLIGLIVGQFASGLSAQASGSRLLFAMGRDGVLPKSFFGTLHERFGTPVNSILLCAVVALLALKLDVTTSTSFINFGAFLAFSLVNLSVIFHYWIGGEKKGLRELILFLIFPFIGLAADLWLMVSLDHLAVYLGLSWLAIGVVYLAVLTGGFRRQPPEMDFQEAA

SEQ ID NO: 13992 - protein, 68 aa, Glycine max
  misc_feature (17)..(17): Xaa can be any naturally occurring amino acid
  misc_feature (30)..(30): Xaa can be any naturally occurring amino acid
  misc_feature (38)..(38): Xaa can be any naturally occurring amino acid
  misc_feature (43)..(43): Xaa can be any naturally occurring amino acid
  misc_feature (45)..(47): Xaa can be any naturally occurring amino acid
  misc_feature (49)..(49): Xaa can be any naturally occurring amino acid
  misc_feature (57)..(57): Xaa can be any naturally occurring amino acid
  misc_feature (65)..(65): Xaa can be any naturally occurring amino acid
MREIQLPLSQTQKVRLXKALEQLESLSTKXNFDASVIXADSIXVXXXNXVLKGHGTXQLNGEVVXTLC

SEQ ID NO: 13993 - protein, 329 aa, Glycine max
MAAEPVSDGGAAAEKLISGREEFGDSSNLFSAILAMVLWLGAIHFNIALILLAVFFLPLSKSLLVFGFLFGFMVLPINEKSRFGRRLSRFICKHACNYFPITLHVEDMKAFDPNRAYVFGYEPHSVLPIGIVALADHTGFMPLPKVKVLASSTVFYTPFLRHLWTWLGLTPATKKNFISLLASGHSCILIPGGVQEAFHMQHGTEIAFLKARRGFVRVAMVKGKPLVPVFCFGQSNVYKWWKPGGKLFLKFARAIKFTPICFWGIFGSPLPFRHPMHVVVGRPIEVDKNREPTTEEVAKIHGLFVEALQDLFERHKARAGYPNLELRIV

SEQ ID NO: 13994 - protein, 424 aa, Mesorhizobium loti MAFF303099
MATEIRVPTLGESVTEATIGKWFKKVGDAIAVDEPLVELETDKVTVEVPAAAAGTLGEIVAKEGETVGVGALLGSISAGGSAPATKPQAVSQASSPDAASTSKQAAAETAKIAGDAGAVEPRSMPPAPAAAKLIAENNLSVDQLSGSGKRGQVLKGDVLDAIAKGAPSQPAETPRAAPAPIAVRAPSSGDDASREERVRMTKLRQTIARRLKEAQSTAAMLTTFNEVDMSAVMALRTKYKDVFEKKHGVKLGFMGFFTKAVTHALKEIPAVNAEIDGTDIIYKNFAHVGVAVGTEKGLVVPVVRDADQMSIAEIEKEIGRLGIAARDGKLSVADMQGGTFTISNGGVYGSLMSTPILNAPQSGILGMHKIQDRPVVVGGQIVIRPMMYLALSYDHRIVDGKEAVTFLVRVKESLEDPERLVLDL

SEQ ID NO: 13995 - protein, 473 aa, Pseudomonas fluorescens PfO-1
MPVGNHPPHGETAQGGPLKRELGERHIRLMALGACIGVGLFLGSAKAIEMAGPAIMLSYIIGGLAILVIMRALGEMAVHNPVAGSFSRYAQDYLGPLAGFLTGWNYWFLWLVTCVAEITAVAVYMGIWFPDVPRWIWALAALVSMGSINLIAVKAFGEFEFWFALIKIVTIIAMVLGGIGIIAFGFGNDGVALGISNLWAHGGFMPNGVTGVLMSLQMVMFAYLGVEMIGLTAGEAKNPQKTIPNAIGSVFWRILLFYVGALFVILSIYPWNEIGTQGSPFVMTFERLGIKTAAGIINFVVITAALSSCNGGIFSTGRMLYSLAQNGQAPAGFARTSSNGVPRRALLLSIFALLLGVLLNYLVPEKVFVWVTSIATFGAIWTWVMILLAQLKFRKGLSASERAGLKYKMWLFPVSSYLALAFLVLVVGLMAYFPDTRVALYVGPAFLVLLTVLFYVFKLQPKDSVQGAMRSAS

SEQ ID NO: 13996 - protein, 300 aa, Mesorhizobium loti MAFF303099
MSILVDKNTKVLVQGLTGKTGTFHTEQALAYHGTKMVGGIHPKKGGETWTGSKGESLPIFATVAEGKAKTGANASVVYVPPAGAAEAILEAIEAEIPLIICITEGIPVMDMVKVKARLDRSTSRLIGPNCPGVLTPDECKIGIMPGNIFRKGSVGVVSRSGTLTYEAVFQTTNVGLGQTTAVGIGGDPVKGTEFIDVLEMFLADDETKSIIMIGEIGGSAEEDAAQFLKDEAKRGRKKPMAGFIAGRTAPAGRTMGHAGAVISGGKGGAEDKIAAMESAGIKVSPSPARLGTTLVEAIKG

SEQ ID NO: 13997 - protein, 314 aa, Bdellovibrio bacteriovorus HD100
MTQDQKVENVIIIGSGPAGLTSAIYSSRANLEPLMIEGEEAGGQLMTTTEVENFPGFDHGITGPDLITVMRKQAERFGTRFITRNVTKVDFSQRPFKVWIGDKLHLAKSIIISTGASAKYLGLPSEKVYANRGVSACATCDGAFFRNQEIGVVGGGDTAMEEAQFLTRFATKVYLIHRRDHFRASKIMVDRALKNPKIEVLYNTEVIEVLGDGKGMTGAKIKGTLDGAVKELPITGLFLAIGHKPNTDLFKGVLDMNETGYLITQPNTTYTNIPGVFAAGDVQDHVYRQAITAAGTGCMAAIDAERWLEAQEAH

SEQ ID NO: 13998 - protein, 426 aa, Clostridium tetani E88
MFVKKEKNLKGRRSLIMFESKELNLPNGFKAVLVKKDTPIFSINLGVGIGSIFESEKEKGISHFIEHMIFKGTKNRTNEKLNEDLEELAGEYNAYTDYNCTIYSITALNDEFEKAIELISDMVINSNFQKEEVEKERKVILSELSGSRDDIEDFSFVKIKELAYRNSPLKYDTIGTKENIEKFTKKQLEDFYSRYYVPNNSYISIVSSYDYDHIEKILHKYFKSWTKKEFERKNLAFEQNIPGKYIYNKRDIEQSCILYLYTCNNLDKKEEMVLKVLNHRLGESNNSLLFRKLREEKGLAYDVYTLLDSINSFNSIYIYTAVSQNSVNETINTIDKCINDIKDGTIKFHINTIRLMKKNLKTAIAFILDDSSDLSNYIVHQIIEDRNIYEFTEDIKKLDEIKEEDIVRMANKVFNHPTIHILKNKQ

SEQ ID NO: 13999 - protein, 288 aa, uncultured bacterium 578
MSEEKPPSPSLLKKFFNKFFQQTLKPREQLMQALEEAEDNFVIDPYSRSVIEGAMQVESLRVRDIMVPRSKMTMISSEASTSELLKVMVSSYHSRFPIHNIEQDSILGIVLAKDLLAHFAGDNKDEFNYREYLRVALSVPESKPLGALLREFQQKKSHMAIVLDEYGEIAGLVTLEDVIEQIVGEIEDEHDKEEDNIIDYGDGRYLLQANTTLSEFNKFFETTIKSEDYDTVAGLVIAGFSYLPEQMSKINLHDFQFKVLKTDSRRLHLLEVKRIKTIVEAQAETSNS

SEQ ID NO: 14000 - protein, 119 aa, Glycine max
MTFASKIITCLLVLTIYIAAPTESHITCGTVTSTMTQCISYLTNGGPLPSSCCVAVKSLNQMAQTTPDRRQVCECLKSAGKEIKGLNIDLVAALPTTCGVSLSYPIGFNTNCDSISIAV

SEQ ID NO: 14001 - protein, 619 aa, Candida tropicalis
MSEQNQGQPDQQHSGDHQHHHHHHHHHHHSQQPAQPIPIDPNVNPANRIGRYQIIKTLGEGSFGKVKLAQHVGTGQKVALKIINRKTLAKSDMQGRVEREISYLRLLRHPHIIKLYDVIKSKDEIIMVIEFAGKELFDYIVQRGKMPEDEARRFFQQIIAAVEYCHRHKIVHRDLKPENLLLDDQLNVKIADFGLSNIMTDGNFLKTSCGSPNYAAPEVISGKLYAGPEVDVWSSGVILYVMLCGRLPFDDEFIPALFKKISNGVYTLPNYLSPGAKHLLTRMLVVNPLNRITIHEIMEDEWFKQDMPDYLLPPDLSKIKTSKIDIDEDVISALSVTMGYDRDEIISVIEKANREAAAGGATPTNQSKSTNEVLDAYLLMKENHTLVKDLKKSKSENIESFLSLSPPPSSSFPNPGSTSSAPGVQQSLTYQTLATVPDLSTLPNSTIAILPTSLPSIHRAYMMETKVNDPQQQIPAPQPTKKLKTRWHFGIRSRSYPLDVMGEIYRALKNLGAEWAKPTEEELWTIRVRWKYDSTPQLRVWQRTNLMKMQIQLFQLEPNNYLVDFKFDGWEQTSDESKNDASLDYKQQDLDEVGSFSAYPFLHLATRLIMELAVNSQSG

SEQ ID NO: 14002 - protein, 302 aa, Staphylococcus aureus subsp. aureus NCTC 8325
MSVFIDKNTKVMVQGITGSTALFHTKQMLDYGTKIVAGVTPGKGGQVVEGVPVFNTVEEAKNETGATVSVIYVPAPFAADSILEAADADLDMVICITEHIPVLDMVKVKRYLQGRKTRLVGPNCPGVITADECKIGIMPGYIHKKGHVGVVSRSGTLTYEAVHQLTEEGIGQTTAVGIGGDPVNGTNFIDVLKAFNEDDETKAVVMIGEIGGTAEEEAAEWIKANMTKPVVGFIGGQTAPPGKRMGHAGAIISGGKGTAEEKIKTLNSCGVKTAATPSEIGSTLIEAAKEAGIYESLLTVNK

SEQ ID NO: 14003 - protein, 548 aa, Landoltia punctata
MGVCFSKASKPSGNGYQPPPPQPYKPPPPPAARPAQPSVQIPQTHHTQQRQQSDHQSASQAAPSPAKQHLPSPRNSPAAAVSAATPATVLGKPFEDVKAKYTIGKVLGRGQFGVTYLCTCNSTGAKYACKSISKRKLVNRNDREDVKREIQIMQHLSGQENIVEFKGAYEDRHSVHVVMELCAGGELFDRIIAKGHYSERAAAAMCRSIVNVVNICHFMGVMHRDLKPENFLLSTKDPGAALKATDFGLSVFIEEGKVYRSIVGSAYYVAPEVLMRSYGKEIDVWSAGIIVYILLSGVPPFWGETEKKIFDSIMKDDIDFQSDPWPSISASAKDLVSKMLTRDPKKRITAAQVLDHPWIRVDGEASDKPIDSAVLSRMKQFRAMNKLKKMALKVIAESLSEEEIKGLRQMFQNMDTDQSGTITYEELKTGLARLGSRLSEAEVKQLMDAADVDGNGSIDYIEFITATMHRHKLEREEHLYSAFSYFDKDNSGYITRDELKQALEEHGMGDADSIREIISEVDTDNDGRINYDEFCAMMRSGTHPPGRP

SEQ ID NO: 14004 - protein, 115 aa, Triticum aestivum
  misc_feature (48)..(48): Xaa can be any naturally occurring amino acid
MARGAATQLVLVSMVAAMLLVACDAAISCGQVTSALSPCISYARAQGXRSPAACCSGVRSLAGAARSTADKQAACKCIKSAAGGLNAGKAAGIPSKCGVSVPYAISSSVDCSKIR

SEQ ID NO: 14005 - protein, 411 aa, Cryptococcus neoformans var. neoformans JEC21
MSVFTKSAFTMSALPSPNTSQPPSAAPSRRGSFANGLASGQLTPVTDPHIVSINVESVLFDMDGTLINSSPAVVKAWELFAEKYPLDLDDILRSAHGMRTIDVLKKWCKITDPELLASEVIRFETAILNAAEDIAKNSGKAGIEVLPGVAKLLADLGEEADKRDGEEKWAICTSSTYFYAGKAIPIAGLPTPKVFVTADSVTRGKPFPDPYLLGASGCNASPFESLVVEDAPTGIRSGKASGALVLATCTSHEREELERERPDFLVDDLSHVKATWDAATNTFNLIIEQPIDRYTPRPTPDVTPVITPAMSRSNSFSGVGQDRPSVRTSQAIMKGSDDLTGNDSVVGSPAASRPGSPGADDSIEKRAEMEFHRRASQSGQAGVTLDAFRRALAGNAAKRRAQSQGEMSQDE

SEQ ID NO: 14006 - protein, 190 aa, Arabidopsis lyrata subsp. petraea
HFLSFLLIPIMAIVAVELLRMGPEEILNVWNSLQFDLVQVLCSSFFVIFISTVYFMSKPRTIYLVDYSCYKPPVTCRVPFATFMEHSRLNLKDNPKSVEFQMRILERSGLGEETCLPPAIHYIPPTPTMDAARSEAQMVIFTAMDDLFKKTGLKPKDVDILIVNCSLFSPTPSLSAMVINKYKLRSNIKS

SEQ ID NO: 14007 - protein, 403 aa, uncultured bacterium 313
MKRLVVKFGGSSVGTIEKIKKVANIIKILSESNEIIVVVSAMSGVTDELKVKSDLISKNFDDKEQDVLLSSGEQISCSLLSGALIDLGVKARSWLGWQIPIITNDNHTSSQIIKIKTDEILNFISEKGVAVIAGFQGISKEIRITTLGRGGSDLSAVAFAKFFKADSCEIYTDVEGVLTTDPTIHEKAKKIDKISYEEILEMSSLGSKVLQSSAVQTAMIDNIPVHVRSTFSEKSGTKIIADSEIDYKKVVTGIAYSRGNAKVSIVGVEDKPGIAADIFEPIGKNNINIDMVIQNTSLDGKKANITFTIKREDLQKTLNLIEKNKQKLNYEKITHDDKLGKVSIIGAGMQAAPAVTYKMFRSLANEKINILAISTSEIKISVLIREDLTQKAVKALHKSFGLD

SEQ ID NO: 14008 - protein, 480 aa, Coxiella burnetii RSA 493
MSNQGYLETIVNKTYEHGFITDIETDVIAPGLNEEVIRLISAKKNEPNFMLDWRLKAYRHWVTLEAPQWAHVRFNPIDYQAISYYAAPKSKKKPKSLEEVDPKLLETYTKLGIPLYEQQRLAGVAVDAVFDSVSVATTFKEKLAEAGVIFCSFSEAVQKHPELVEKYLGSVVPYGDNFFATLNSAVFSDGSFVYIPKGVRCPMELSTYFRINAANTGQFERTLIIADEGSYVSYLEGCTAPQRDENQLHAAVVELVALDNAQIRYATVQNWYPGDEEGKGGIYNFVTKRGACRGVNSKISWTQIETGSAITWKYPSVILKGDNSVGEFYSVALTNNFQQADTGTKMIHIGKNTRSTIISKGISAGRGQNSYRGLVRVLPTAENARNYSQCDSLLLGNRCGAHTFPYMEIKNKTARVEHEATTSKIGEDQLFYCRQRGITEEDAVSMIVNGFCKQVFQKLPMEFAVEAQKLMEVSLEGAVG

SEQ ID NO: 14009 - protein, 324 aa, Methanococcoides burtonii DSM 6242
MVKVKDLKWKQNMTVSELVDSYEFIGFQSVELQRASDVIVKMKKDSAKVFLTFTSNMVTSGLRGFFAQLIDLGVADVIVTTVGGLEEDIMKATGEDFQIGSFHTDDVELHEQGINRVGNLLIKTESYMNFESLVDKILKELYEKQNRWAVSDMLREIGLMLDDESSILYQAAKNNVPIFCPAITDGAFGFHLYLFQQEHPDFIVDVVKDFGNILFASSHDDRKGVIALGGSISKHHAILSTLLNGGAEYAVYMTTAHRTSGSMSGANTNEAKSWGKVKDESDVATVIGDVSITFPLAMIRALDELAADGLLKGLQENRTTGVVK

SEQ ID NO: 14010 - protein, 410 aa, Agrobacterium tumefaciens str. C58
MATEIRVPTLGESVSEATVGTWFKKVGDTVKADEPLVELETDKVTVEVPAPASGVLTEIVAQNGETVGLDALLGQIAEGAAGAATSAPAAKPAAPAAAPAPAAAVAAAPGGSAMPPAPAAGKLLAENNLSADQVDGSGKRGQVLKGDVLAAVAKGVSAPAAAPAPVAAPRPVSAEQDQVREERVKMTRLRQTIARRLKDAQNTAAMLTTYNEVDMSAVMDLRNRYKDVFEKKHGVKLGFMGFFTKAVTHALKELPAVNAEIDGTDIIYKNYCHVGMAVGTDKGLVVPVIRDADQLSIAGVEKELGRLAKAARDGSLGMADMQGGTFTITNGGVYGSLMSSPILNAPQSGILGMHKIQERPVAIGGQVVIRPMMYLALSYDHRIVDGKEAVTFLVRVKESLEDPERLVLDL

SEQ ID NO: 14011 - protein, 430 aa, Rickettsiella grylli
MKGGPDVKKKRRIVITGIGMMTPLGLNAKTTWEAILAGKSGVSTITQFDVSTFPCQISASVKDFKAENYGISAKESRKMDLFIQYGLAAAIEAMTDSKLEITEKNADRIGVAVGSGIGGLPFIEENHSKLEQGGPRKISPFFIPGAITNMLAGQISIRYGLRGPNIAVVTACTTGTHNIGLGARTILYGDADVMVVGGSEMATTSLGLGGFSACRALSNRNKEPQTASRPWDKARDGFVLGDGAGVLVLEEYERAKQRNAPIYAELVGFGMSADAFHMTSPAPDGQGAMTAMLNTLHDANIDKEKIAYINAHATSTLQGDYLELRAIRRVFGDHVKKLAISSTKSMTGHLLGAAGAVEAIFTILALKDQKAPPTINLDNPGNPPELNIPDDDYVDLNFVPHVPQELKMNYALSNSFGFGGTNASLLFARL

SEQ ID NO: 14012 - protein, 300 aa, Agrobacterium tumefaciens str. C58
MSILVNKDTKILVQGLTGKTGTFHTEQALAYYGTQMVGGIHPKKGGETWTGSKGESLPIFATVAEAKEKTGADASVIYVPPAGAADAIIEAIEAEIPFITCITEGIPVMDMVRVKARLDRSKSRLLGPNCPGIMTPEECKIGIMPGSIFRKGSVGIVSRSGTLTYEAVFQTSNEGLGQTTAVGIGGDPVKGTEFIDILEMFLADDATQSIIMIGEIGGSAEEDAAQFLIDEAKKGRKKPMAGFIAGRTAPKGRTMGHAGAVVSGGKGDAESKIAAMEAAGIKVSPSPARLGKTLVEVLKG

SEQ ID NO: 14013 - protein, 286 aa, Erwinia carotovora subsp. atroseptica SCRI1043
MLEQQATIVDVNESNLNQVLEHSATLPVLFYFWSARSQHCVELEPVLDKLAQEYAGQFVLAKVDCDAEQRVAAQFGLRSIPTVYLFKDGQPLDGFQGPQPEEAVRELLKRALPKEEELKVAQAQQLIQEDKLPEAMQLLKDAWQLSQQRSDIGLMLAEVQIQIKRSEDAEAVLAAIPLQDQDTRYHSLVAQIELLKQAADTPEIQHLQQQLDADPQNADLAVQLALQLHQVSRNEEALELLMGFLKKDLAVANGSARKTLMDIMAALGTSDALAARYRRQLYSLLY

SEQ ID NO: 14014 - protein, 133 aa, Acinetobacter sp. ADP1
MRMLHTMLRVGNLEQSIKFYTEVLGMTLLRKRDYEEGRFTLAFVGYGQESDHTVLELTHNWDTSSYDLGNGYGHIAIGVEDAYKACDLIKERGGNVVREAGPMKGGVTVIAFVEDPDGYKIELIQQDENARNN

SEQ ID NO: 14015 - protein, 174 aa, Panax ginseng
MADNYGYGYGQQHHGGRQTDAYGNPIPQTNAYGNPVRQTDDYGNPVHHTTTGAATMGDYSTAGTVGAYGTGTPTGGFGAPNVTGTGTHEQFHLRRSGSSSSSSSEDDGMGRRRKKKGIKEKIKEKLPGGTGHKDTSTTTPGGYGYGSAAGGGEAHGHEKKGMMEKIKEKLPGHH

SEQ ID NO: 14016 - protein, 107 aa, Bartonella henselae str. Houston-1
MSCIKVDKSNFESEVLTSSTPVVVDFWAEWCGPCKMIAPILDEISMEMQNQVKIAKVNIDENPELATQYGVRSIPTLLMFKDGNIASNMVGAASKGRVSEWIKEGLR

SEQ ID NO: 14017 - protein, 445 aa, Bacillus licheniformis ATCC 14580
MKNETALKRSLTLGPLVVIGLAYMDPLVVFDSYGVVAQLTKGHVPAAYVFTVAALLLTALSYGSMVKAYPKAGSVYTYAYESIHPHAGFLAGWTIMLDYLFLPMVNFAIGSAYLTAAFPEVPHGFWVVLLALSITVVNVLGIRLTANITGLFVAFQVIVALTFAGFMIAGLAGGLGTGELISADPFFHSDIEPSLIVSGATILCFSFLGFDAISTMSEETVNPKKNIPLAIFLTVAIGGTLFTAISYLMQQIYPSYDNFRHADSASLEIALYTGGAFLKSFFLAGTMVAVISSSLSSHASASRLLYAMGRDSSLPKRFFGYVHPTLKTPVFNILFIGLISLTAMIGELEVIYSFISFGALIGFIFVHLSVIGHYYIRRQEKGFLKTLRYLVMPFLGASFCGWLLLSISKNALIIGAGWLIAGFIYFLFRIRSLPDVTFGFDRDPR

SEQ ID NO: 14018 - protein, 104 aa, Staphylococcus epidermidis RP62A
MAIVKVTDSDFDSKIESGVKLVDFWATWCGPCKMIAPVLEELAGDYDGKADILKLDVDENPSTAAKYEVMSIPTLIVFKDGEPVDKVVGFQPKENLAEVLDKHL

SEQ ID NO: 14019 - protein, 877 aa, Vibrio sp. Ex25
MNEKYAALKSNVRMLGHLLGNTIRDAHGEEIFEKVETIRKLSKSAQAGNQADRDSLIEEIKHLPDEQLTPVTRAFNQFLNLTNIAEQYHTISRHCEEHICEPDAINSLFSKLVQNDVSKLDTAQAVRDLNIELVLTAHPTEITRRTMINKLVKINECLSKLELSDLSSKERKKTERRLEQLIAQSWHSDVIRQQRPTPLDEAKWGFAVVENSLWEAVPDFLREMHDRLKSYLGEGLPIDARPVHFSSWMGGDRDGNPFVTHSVTREVLLLSRWKAADLYLNDINELISELSMTVSNDQVRELAGEDQHEPYRAILKQLRTLLNETKDILDAKIHGQKLAVKAPLQKVEQLWEPLYACYQSLNECGMGVIANGSLLDTLRRVKAFGIHLVRLDIRQESTRHSDVLSELTRYLGIGDYEQWSEQDKIAFLTNELASKRPLLPRDWEPSEPVKEVLDTCKIIAAQPREAFGAYVISMARTASDVLAVHLLLQEAGCPYRMDVCPLFETLDDLNNAESVIKQLMGIDLYRGFIQNHQMVMIGYSDSAKDAGVMSAGWAQYHAMESLVKVAEEEGVELTLFHGRGGTVGRGGAPAHAALLSQPPKSLKGGLRVTEQGEMIRFKLGLPDVAVNSFNLYASAILEANLLPPPEPKQEWRDLMEVLSEVSCESYRNVVRGEPDFVPYFRQATPELELGKLPLGSRPAKRNPKGGVESLRAIPWIFSWSQNRLVLPAWLGAGEAIQYSIDKGHQALLEEMCREWPFFSTRLGMLEMVYSKCNIDISRYYDERLVDESLRPLGEKLRAQLQEDIKAVLNVENNENLMQHDPWGLESIRLRNIYVEPLNMLQAELLYRTRQTEEASANLEEALMVTIAGIAAGMRNTG

SEQ ID NO: 14020 - protein, 259 aa, Triticum aestivum
  misc_feature (235)..(235): Xaa can be any naturally occurring amino acid
MAGLSLAACAVAFHLCLLVSSSASLRWLSDKPAAVTTAGGVRTRSAYHFQPAKNWQNDPNGPMYHNGLYHFFYQYNPDGVTWGNGNLSWGHSVSVDLVNWFALDAALQPSRSFDANGCWSGSATILPDGSPVMLYTGIDARGDQVQNVAYPKNASDPLLVEWVKPEYNPVIPVPADIKRDDFRDPSTAWLGADGVWRIAVAARVHDVGGATLIYRSWRRLDYGHVYASKSFFDPXARTGACSGAGPTSPTACPTISSGD

SEQ ID NO: 14021 - protein, 752 aa, Chlamydomonas reinhardtii
MALPGSTMNLTTRCSTTPRSAVVARAVAAPTRPTTKSAVPELLDSRPGERNLNFMEYAQATQMLDRLKGQASDLELLLDQLNALEASLDESVLAPPTVDDPKERAARQARRAAKRAERRAQATSATVAAAAGPAMSAVVSHSTPTKAAAAPATSTASSSSSDSGLLDLVSFVGGFDTRPIPATTSAPPAGASSSDVQHLEDLFKLSVGEPDIPRASASAAPAVLRPRKLTPKKPSAAPSAAVTAAPSPAPTLPSTPSTSARIAPAPGSLADELERLLGPTTSREAAESEDEDSFAGPSEDDLLALEQEVSRKSSRLPVLDEEDEEDEQQQLEDNEEDAVAGPGSLEASAMATRTSSQLSIMQTGPSLLSLVPASAAPGRSAKARASRRAARNGHASGRLGGATANAAGRGKVGSKDGTMNFLGKVESLSTLDVEKEREVTAVCRDFLFLEKVKRQCEKTLHRPATSEEIAAAVAMDVESLKLRYDAGLKAKELLLKSNYKLVMTVCKSFVGKGPHIQDLVSEGVKGLLKGVEKYDATKGFRFGTYAHWWIRQAVSRSLAETGRAVRLPMHMIEQLTRLKNLSAKLQTQLAREPTLPELAKAAGLPVTRVQMLMETARSAASLDTPIGGNELGPTVKDSVEDEREAADEEFGSDSLRNDMEAMLLELPEREARVVRLRFGLDDGKEWTLEEIGEALNVTRERIRQIEAKALRKLRVKTIDVSGKLMEYGENLEMLMDGSREMAARTSSGTRKT

SEQ ID NO: 14022 - protein, 469 aa, Methanosarcina mazei Go1
MSKNVQKIEKLLIVICMIFIVLPSPALAVTAEENAEAIEGLQTTLTFLWLLIASGLVFFMHAGFSLVETGLTRSKNTANILMKNFMTVVLGILVYWAVGWGVMYGADAAGLIGTDQFFLAGADNATWNSWFFQMVFAATGATIVSGAMAERTNFKAYLVYCVLMVAVIYPIYGHWVWSGADTALLSGADSPIVKAIGVAHHDFAGSGVVHSIGGYSALAGVLLVGARIGKFRDGKAIPIPGHNLTIAFLGTLILALGWLGFNGGSTLNANDPYMNLVVVNTFLAGAVGAVTTMAITWMKTGKPDPSLTANGLLGGLVAVTAPCGSISNWGAIAIGIIAGIIIYAGVMFNENKLKLDDPVGAIAVHGYCGTWGLISVGLFSIGIGNGILADASYAAAVPGLFYGGGVSLLLIQLVAVLITIVWGFGLSFIIFKILDAVIGLRVSEEEEIMGLDICEHGIRAYPEYLMREE

SEQ ID NO: 14023 - protein, 493 aa, Schizosaccharomyces pombe
MAPQFKRPELFGFDKSHAQSFVQGKWISSPNNKTFEVDNPATGEIIGKVADVSVEETKKAISAANEAFKTYKNFTHVQRSQLLERWAELIMENKDDLVKMLTLENGKPLSQAEMEVTTCSGYLKWYAAEAVRTFGDVAPSSLQSQNFLISIKQPVGVSALITPWNFPAAMIARKGGAALAAGCTAIFLPAFRTPYVCLGLVRLAQEAGFPDGVLNVITSSDASAHGKELTTNPIVRKVSFTGSTNVGKILMGQSASTIKKVSMELGGNAPFIVFPDFPIDQAVESFCTIKFNSCGQVCVCPNRVYVHKNVYDEFVSKLTEKVKTIKVGDGFDSSSAVGPLISQDGCKKVSKHIEDAVSKGAKITVGGKEISSSKGYFFEPTVLSGVTQDMLVASEETFGPLASVFKFDDTEEVIEWANDSDVGLAGYVFTNNLSTMIHVAKELEVGLVGANIEMVDEPFISFGGIKQSGFGKEAGRLGVQEFMVVKEINLKTL

SEQ ID NO: 14024 - protein, 910 aa, Mycoplasma pneumoniae M129
MAEAKRDYYEVLGLSRDADDNDIKKAFRKLAKKYHPDRNKAPDAAQIFAEINEANDVLSNPKKRANYDKYGHDGVDNEGGFAFQADVFDSFFEEIEKSGAFDNLSESNTKKKEKTKTKKKGWFWGKSKQEESTSDTTEYADVDAGLEDYPPQSDYPDDIPDVDARIEEVDQSAYADDIPDVDAGMDWEQNAEVANSASEIIPDVDAGLADEFNTSSAAPQASDWEAMIGNPEYGYFDAAGEWNWKGFFDEAGQWVWLEETEPSSVSNDETTTDSDAVTAATTVEETDQDSWTANSAPEPVDVETPVELQPETEPEPIITLSSEPVEAPASVVIEPTPEIEETTSAVEMDASVKADVSDEADATNEPTEQDTISEPEQETDAAALEEINHTTADLEPAEVSATNDLEQDVVEKVNFSEPESTVDTAATDPVVEQATETSTNGFKFFNFSSFVLSDQNPNPQTPTHHEEDAAAPEPTVDETSGESTAPEVTIAESTVELETAAEINNPATFVEEYLQPTKTTVVDKLDEPTVAKPTVSDSENSVAPEPEFVAGPEQTFSWKPAISETEEIPLTAVEPASETQTLIAEDVTSPVTPTATAIPAPSINAVPTAPVAETFEAAVDFLKEAAKIEAQLPLVPTVPEQIDGTDPSLLTQWDEYLEKTRKLFHKLFLTEQLPFIVKTDQFEIVDPNLDEHNVNLIYTEHVPQICFLNEQLKEIRYTRKLVDPQTQVTTTESITLEVQLSHKSQTEAIAIFKGFGHDYGSGCGDLKVVLKVIPSVFFQLQADGLHTAALVDPLVAYNGGLIDVFGPVNSFKVDIEGGIANNDLIEFNQLGVLRTKTKRGSLYVHLYYSSVAKKGTKTNCQVQQFFDLVHVEYKLLNYNLKQLHNYHSALTAQKKTLDRKSYQCLAVESH

SEQ ID NO: 14025 - protein, 316 aa, Rhodothermus marinus
MAQAVKDYYEILGVPENATEEEIKKAYRKLAREWHPDRNPDKPNAEERFKEIQEAYSVLSDPEKRRQYDMMRKNPFGAFGGFGPGNGSRFYRTPEGTYVHFETSGNLEDLLDEEFGFGGLGDIFSRFFGGFGRTGTRHDPFARARRPRDVEVRVQLPFEQALRGGKTDITLPDGQKVRINIPKGVRPGFKIRLKDGGPTIAGVPQGNVYIIFEVEPHPRFRREGDDLYTTITINPLEAMLGTTREIVDAYGRRIKVRIPPGTQPGERLRIRGHGVETDTHTGDLYVEVQLEIPRNLSAEQQRILREAAEKAGLIRS

SEQ ID NO: 14026 - protein, 848 aa, Flavobacteria bacterium BBFL7
MQDQNRIAEFKKSVQNKFNIYNSLFLNLPYSNIENVGMLIPLLMEQSQKGLKEGLNPKEIIEAFFNGFANLHTEQDRIDFMFRIIQYVERQVVLYDSVEDAAFPKLQQHSSSRSLKDYFQLVEENKSWDAIEKQLNNFSARIVLTAHPTQFYTPAVLDIITNLRTLINDNNIDEIDVALQQLGLTSLVNSKKPTPLDEAKNIIHTLRHVYYDAIGEMYTHIKSSVGNAQFDNHDIVKLGFWPGGDRDGNPFVTASITKEVMNELRVTLMKCYYNELKELQRKLSFKEIQEAITDLKNTLYEAMFDTSIHVTYKEIIAPLIHIRELLVAQYHGLYLKDLDLFIDKVKIFKTHFATIDIRQDHSMHTVVMQAVLKKYGYIKESIEELTQLQLIDILLQESISLDPNDYEEDIVKDTIVNISQLSTIQESNGEQGCNRYIISNSEDVYSVLYVFALFRWCGWENRDITFDIIPLFETMKGMDDSRSTMEQLFELDAYRKHVAFRNNKQTIMLGFSDGTKDGGYLKANWSILKTKETLSEVCSDHDVAAIFFDGRGGPPARGGGKTHRFYAAQTSKVANNEIQLTIQGQTITSTYGTKEQFKHNSEQLLTAGLSNSILDNEITISASSRSLIEELSEMSFKKYDALKHHDKFMPYLENMSTLKYYTKANIGSRPGKRGHKAKLELTDLRAISFVGSWSQLKQNVPGYFGIGTALQTMQQQGRFDEVQQLYKDVPFFKALMLNSMMSLSKCYFELTSYMKENEEYGAFWQILEDEYLLSKRMLLELSGMEILMEKETVSRESIKIREAIVLPLLVIQQYALQMIAQHNEHQPQYEKIVTRSLYGNINASRNSA

SEQ ID NO: 14027 - protein, 409 aa, Bartonella quintana
MTTEIRVPTLGESVTEATIGKWFKKLGEAVAVDEPLVELETDKVTVEVPSPVMGKLTEIIAKEGDIVEVNAVLGFVESGAAGISQSFSPSATSIPEAPSELEQSPSSSATPSGTMPPAPSAAKLMAENNIAKSDISGSGKRGQILKEDVLGALAQGTKASTSVATLTASSSSAAPIQEMREERVRMTKLRQTIARRLKDAQNTAAMLTTFNEVDMSAVMDLRKRYKDLFEKKHGVKLGFMGFFTKAVCHALKEFPTVNAEIDGTDIVYKNYVNAGIAVGTDKGLVVPVVRDADQMSLAEIEKEISRLGRLARDGKLAVSDMQGGTFTITNGGVYGSLMSTPILNAPQSGILGMHAIKERAMVVGGQIIICPMMYLALSYDHRIVDGQEAVTFLVRVKESLEDPERLVLD

SEQ ID NO: 14028 - protein, 222 aa, Hordeum vulgare subsp. spontaneum
MEYQGQQQQHGRVDEYGNPVAGHGVGTGMGTHGGVGTGAAAGGHYQPMRDEHQTGRGILHRSGSSSSSSSEDDGMGGRRKKGIKEKIKEKLPGGHGDQQHNAGTYGYGQQGTGMAGTGGTYGQQGHTGMTGTGGTYGQQGHTGMTGTGATGGTYGQQGHTGMTGTGAHGTTATGGTYGQQGHTGMTGTGMHGAGGTYGQHGTDTGEKKGIMDKIKEKLPGQH

SEQ ID NO: 14029 - protein, 439 aa, Clostridium tetani E88
MNNIIVTKFGGSSLADVNQFKKVKNIVLGDQRRKYVVPSAPGKRHKEDQKITDLLYLCHANVEQNVEIDYIFTIIEKRFKDLAKELGVNIDIDTELENIKKNIKNGATADYTASRGEYLNGLILSNYLGYEFVDPAEIIFFRRNGVFDSDKTQEAVSKRLCNIQKAVIPGFYGSLPNGDIKTFSRGGSDVTGAIIARGVAADLYENWTDVSGFLMVDPNIVENPKNIEKITYRELRELAYMGATVLHEEAVFPVRSAGIPINIKNTNRPEDKGTLIIDDLKPASYAGSITGIAGKKDFVVIAIEKNMMNIEQGYCRKVLSVLEENYVSFEHMPSGVDAVSLVISKNQLNGKLDGILEEIEMKCKPDSIEVYPNMALVAIVGRGMLRTVGMSAKIFDALAREKVNIRMIIQGSSEINIIVGVENEDFEKALKSIYDEFAK

SEQ ID NO: 14030 - protein, 935 aa, Mycobacterium avium subsp. paratuberculosis
MVEASEGTLEPIGAVQRTLVGREATEPMRADIRLLGAILGDTVREQNGQQVFELVERARVESFRVRRSEIDRAELARMFAGIDIHQAIPVIRAFSHFALLANVAEDIHRERRRAIHVAAGEPPQDSSLAATYAKLDRAQLDSAMVAEALRGAVVSPVITAHPTETRRRTVFVTQHRITELMRLHAEGHTETDDGRNIELELRRQVLTLWQTALIRLSRLQITDEIEVGLRYYAAAFFKVIPQVNAEVRNALRARWPGADLLDEPIVAPGSWIGGDRDGNPNVTADVVRRATGDAAYTALAHYLAELTACEQELSMSARLVAVTPELAALAEDCAEKARADEPYRRALRVIRGRLTATAAEILDRRPQHELDLGLPPYATPAELRADLDTVDASLRAHGSALLADDRLALLREGVRVFGFHLCGLDMRQNSDVHEEVVAELLAWAGVHPDYRSLPEDERVELLAAELGTRRPLVGDRAELSELADKELGVVRAAAHAIRRYGPAAVPNYVISMCRSVSDVLEAAILLKEAGLIDASGPEPYCPVGISPLLETIEDLHNGAAILHAMLELPLYRALVAARGQSQEVMLGYSDSNKDGGYLASSWAVYRAELALVEVARKIGIRLRLFHGRGGTVGRGGGPSYEAILAQPPGAVNGSLRLTEQGEVIAAKYAEPQVAQRNLESLVAATLESTLLDVEGLGDTAEPAYAVLDEVAVLAQRAYAELVHETPGFVDYFMASTPVSEIGSLNIGSRPTSRKPTESIADLRAIPWVLAWSQSRVMLPGWYGTGSAFEQWIAAGPQSRAERVDILHDLYRRWPFFRSVLSNLAQVLAKSDLGLAAQYAELVDDAALRRRVFGKIADEHRRTIAMHKLITGQDNLLADNPALARSVFNRFPYLEPLNHLQVELLRRYRSGDDDELVQRGILLTMNGLASALRNSG

SEQ ID NO: 14031 - protein, 274 aa, Glycine max
MWSALKRNYEVSEEIGRGRFGTIFRCFHPLSNQPYACKLIDKSLLLDSTDRHCLQNEPKFMSLLSPHPNILQIFHVFEDDHYLSIVMDLCQPHTLFDRMLHAPFSESQAASLIKNLLEAVAHCHRLGVAHRDIKPDNILFDSADNLKLADFGSAEWFGDGRSMSGVVGTPYYVAPEVLLGREYDEKVDVWSCGVILYIMLAGIPPFYGDSAAEIFEAVVRANLRFPSRIFRTVSPAAKDLLRKMICRDSSRRFSAEQALRHPWILSAGDTAELT

SEQ ID NO: 14032 - protein, 334 aa, Geobacillus stearothermophilus
AVKVGINGFGRIGRNVFRAALKNPDIEVVAVNDLTDANTLAHLLKYDSVHGRLDAEVSVNGNNLVVNGKEIIVKAERDPENLAWGEIGVDIVVESTGRFTKREDAAKHLEAGAKKVIISAPAKNEDITIVMGVNQDKYDPKAHHVISNASCTTNCLAPFAKVLHEQFGIVRGMMTTVHSYTNDQRILDLPHKDLRRARAAAESIIPTTTGAAKAVALVLPELKGKLNGMAMRVPTPNVSVVDLVAELEKEVTVEEVNAALKAAAEGELKGILAYSEEPLVSRDYNGSTVSSTIDALSTMVIDGKMVKVVSWYDNETGYSHRVVDLAAYIASKGL

SEQ ID NO: 14033 - protein, 857 aa, Brassica oleracea var. alboglabra
MKDVRIYHHSFLLVFVVVILFHPALSIYFNILSSTATLTISSNRTLVSPGDVFELGFFKTTSSSRWYLGIWYKKLYFGSIKNYVWVANRDSPLFNAIGTLKISNMNLVLLDQSNKSVWSTNLTRGNERSPVVAELLANGNFVMRDSNNKDASGFLWQSFDYPTDTLLPEMKLGYDHKTGLNRFLTSWRSSDDPSSGEISYKLDTQSGMPEFYLLINGSPDHRSGPWNGVQFSGIPEDQKLSYMVYNFIENTEEVAYTFRMTNNSIYSRLTISSKGILERWTWTPTSFSWNLFWSLPVDLKCDLYMACGAYSYCDVNTSPECNCMQGFMPFNMQQWALRDGSGGCIRRTRLSCSSDGFTRMKKMKLPETRMAIVDPSIGLKECRKRCLSDCNCTAFANADIRNGGTGCVIWTGELEDIMTYFAADLGQDIYVRLAAADIVKKRNADGKIITLIVGVSVLLLMIMFCLWKRKQKRAKAMATTIVNRQRNQNLLMKLMTQSNKRQLSRENKTEEFELPFIELEAVVKATENFSNCNELGQGGFGIVYKGMLDGQEVAVKRLSKTSLQGIDEFMNEVRLIARLQHINLVRILGCCIEADEKILIYEYLENSSLDYFLFGKKRSSNLNWKDRFAIINGVARGLLYLHQDSRFRIIHRDMKPSNILLDKYMIPKISDFGMARIFARDETEANTENAVGTYGYMSPEYAMDGVISEKTDVFSFGVIVLEIVSGKRNRGFYQLNPENNLLSYAWSHWAEGRALEIVDPVIVDSFSSLPSTFQPKEVLKCIQIGLLCIQERAEDRPTMSSVVWMLGSEATDIPQPKPPIYCLITSYYANNPSSSRQFEDDESWTVNKYTCSVIDAR

SEQ ID NO: 14034 - protein, 112 aa, Brassica napus
  misc_feature (46)..(46): Xaa can be any naturally occurring amino acid
  misc_feature (91)..(91): Xaa can be any naturally occurring amino acid
RWVVTWHCKTMSKDRSSICSSETLCIFPSHAQNCPFSYKPNGNQRXTVYVIVIENDKMTVEEFPASSTVSDLLSKARLRSSRWSIYSMPAXEELMLTLNHTSVSDPNCKLNM

SEQ ID NO: 14035 - protein, 144 aa, Escherichia coli CFT073
MLYESVSGEIKSTFSWLMLHQQRNQHARLIPVELYMSDKIIHLTDDSFDTDVLKADGAILVDFWAEWCGPCKMIAPILDEIADEYQGKLTVAKLNIDQNPGTAPKYGIRGIPTLLLFKNGEVAATKVGALSKGQLKEFLDANLA

SEQ ID NO: 14036 - protein, 115 aa, Methanosarcina mazei Go1
MTRMCKIEAIIKPLKLHQVKDALEEAGFASLTVTDVKGRGQQKGIVQQWRGKKYCVDLLPKTKIEIVVPEEKIEEIIQVIQSTAYTGEIGDGKIFVIPIETVVRIRTGERNGDAL

SEQ ID NO: 14037 - protein, 130 aa, Saccharomyces cerevisiae
MASLPHPKIVKKHTKKFKRHHSDRYHRVAENWRKQKGIDSVVRRRFRGNISQPKIGYGSNKKTKFLSPSGHKTFLVANVKDLETLTMHTKTYAAEIAHNISAKNRVVILARAKALGIKVTNPKGRLALEA

SEQ ID NO: 14038 - protein, 467 aa, Listeria monocytogenes
MTSVMWFRRDLRVNDNKALYHACKEDDLLLLFQVNPAQFITGSPSHQAFFASVAHFKQEVDKTALLQIMFGEPVECLKQLKETLPSWDKVYFNRDETGYGAERDEAAKTFFDEQEIEVQAFHDSYLHSAEEVKKSPTEYYKIFTPYYKKWREEIKETPFKVTLKADNIRKENLFPKYEEQFAEMTCDLPILDSGEKTANTRLANFIKHDVADYDKARDFPELDKTSHLSRYLRTGEISVRTIWQALQENEATEGRAIFEKELCWRDFYNMIYVSFPNQKNEPIQENYRFIEWENNREFFKAWQEGKTGFPLVDAAMRQLKETGWMHNRLRMVTASFLTKDLLIDWRFGEKYFQQMLIDYDPASNIGGWQWAASTGTDAVPYFRIFNPTTQSQKFDPTGKFIRKYVKELANLPDKFIHQPEKMSEIEQKEYGLLLGKDYPFPLIDHKERRKLAIARYEFSKEHYRGNI

SEQ ID NO: 14039 - protein, 180 aa, Spinacia oleracea
MASSVLSSAAVATVSRTPAQASMVAPFTGLKSTVGFPATKKNDDITSLASNGGRVQCMKVWPTQNMKRYETLSYLPPLTTDQLARQVDYLLNNKWVPCLEFETDHGFVYREHHNSPGYYDGRYWTMWKLPMFGCTDPAQVLNELEECKKEYPNAFIRIIGFDSNRQVQCVSFIAYKPAGY

SEQ ID NO: 14040 - protein, 983 aa, Synechocystis sp. PCC 6803
MPNLEPAVVVPTSEAIAVDLTKLEEKLAPADSFLDRHLGPGETEQRQMLQTLGFDTLGDLIDQAVPPAIRFPRSLQLPASQSEYGAIAQLKSIASKNQVFRSYIGMGYYDTITPPVIQRNILENPGWYTAYTPYQAEIAQGRLEALLNFQTMVMDLTGLEIANASLLDEGTAAAEAMALSYGVSKSKANAFFVAQDCHPQTIEVIKTRANPLGIEVIVGDHHTFSFSTSIFGALLQYPATDGAVYDYRSFIDKAHQHQALVTLAADPLSLTLLTPPGELGADIAVGSTQRFGIPLGYGGPHAAYFATKAEYQRKMPGRIVGVSKDAHGNPALRLALQTREQHIRRDKATSNICTAQVLLAVMASMYGVYHGSTGLKNIALRIHQLTVLLAIGLKRLNYSLNNDYFFDTLRVGVGEQSAPAILKAAEGRGINLRPLVPGEVGISLDETVTVQDLLDLWQVFAGKDNLPFTPEELWSEVKTSFPADLTRQSLYLQDAVFNQYHSETELLRYLHQLESKDLALNTSMIPLGSCTMKLNATAEMMPVTWPEFGKIHPFAPAGQTEGYQILFAQLEAWLGEITGFDAISLQPNAGSQGEYAGLQVIRQYHLSRGEEQRNICLIPESAHGTNPASAVMCGMQVVPVKCDGEGNIDVEDLTSKAEKYGDRLAALMVTYPSTHGVFEATIGTICDIVHRFGGEVYMDGANMNAQVGLCRPADFGADVCHLNLHKTFCIPHGGGGPGMGPIGVKSHLQAFLPRTSLNSTAELQAEDQSIGMISAAPYGSASILVISWMYIAMMGPQGLTKATEVAILSANYMAKRLENYYPILFRGNNELVAHECILDLRPLKKQAAIEVEDVAKRLMDFGFHAPTVSWPVLGTMMVEPTESESLGELDRFCDAMIAIYQEAQAITHGEIDPADNPLKNAPHTAQSLICGEWNHPYSQEEAAYPAPWTKQFKFWPAVGRINNTYGDRHLVCSCEGMEAYKEG

SEQ ID NO: 14041 - protein, 112 aa, Brassica napus
  misc_feature (107)..(107): Xaa can be any naturally occurring amino acid
MAAELVCCEANFFIHIAVIAFLVLFAGLMSGLTLGLMSLSLVDLEVLAKSGTPQHRKYAEKILPVVKNQHLLLVTLLVCNAAAMETLPIFLDALVTAWGAILISVTXILLFG

SEQ ID NO: 14042 - protein, 107 aa, Brassica napus
IEKTRVSQIVMKKRQVVIKQRSRNSNTSSSWTTTSSSATSSIRYVECQKNHAANIGGYAVDGCREFMAAGVEGTDDSLRCAACGCHRNFHRKEVNTEVVCEYSPPNA

SEQ ID NO: 14043 - protein, 1286 aa, Nostoc sp. PCC 7120
MGILKNKSRSFSMFNCTTSLTPSELKSAIIRDPLIIKPETTVMDAIAQMSGVRVMCDTAKLDEVHLEARSSCVLIVAAGRLLGIFTERDVVKLCSQRRCLENLAIREVMIHPVVTLRESEFTDLFFAVNLLQQYRIRHIPILDEQERVVGLLTNESLRHTSRSVDLLRLRLVSEVMTCEVICATPDSSMLAIAQQMTENRVSSVMIVQLGQFQDKPQEIPVGIVTERDIVQFQALGLNLETCQVQTVMSSPIFAVRPDDSLRFVQQIMEQRLIRRLAVTGDQGELLGIVTQSSLLQALNPLEVYKLAQMLEEKVVRLETEKVQLLENRTVELEQLVADRTASLKAKAGREQIVSDISRQIRSSLSLQTILDTTVEQVRQLLGCDRVNIWYFETEWESIVMAESTTSSTSLLGERIEELCFQQHSAEIYRQGRIRVVPDIYTIEMTDCHREFLIRLQTRAKILVPLLCGDELWGLLNVSESQHPREWQTEEVELLQGLSVHLAIAIHQATTHQKLQEQLIALQQRSDQLRGSEQRYITLSQNLEAKIEERTAELQAREAQLQKTSDRLSISLKSGAIGCWDWDIVENNIFWDERMYELYGVTKTSDSRLVYDTWANRLHPDDRANIEVLVQQAILGQAEYDTEFRVIHPDGSIHFIKAYGVVVRDAEGNPQKMIGVHFDISDRKKSEEIIRQQVEREKLLREITQRIRQSLDLQTIFDIACQEICQVIQADRVGIFKFYPESNFNDGEFVAESVVKEFPSVIAIRVHDHCFGENYSSLYALGRSYVVDDIYHSDMTTCHTDILAQFHVRANVIMPLLCGAELWGLLCIHQCATTRHWQQSEIDFTQQLATQLAIAIQQASLVEQLQQELAERHQAELKLTQSNQQLAISNQELARATRLKDEFLANMSHELRTPLNAILGMTEGLQEGVFGMINNKQFKALETIERSSSHLLDLINDILDVAKIEAGQIKLDCTTISVANLCESSLVFIKQQALQKRIQVEIKIPFNLPDLFVDERRIRQVLINLLNNAVKFTPEAGRISLEVTQLSPDISTVQNFLQIAVIDTGIGIMQENINKLFQPFIQIDSALNRQYEGTGLGLALVKKIVELHGGRVGLTSELGIGSCFTIELPCIPSTPASPDLIRDLLTTPTPELDSPTADEAVSLAPVILLAEDNKANIKTFSSYLSAKGYDILLATNGQQAIELATIHQPDLILMDIQMPGIDGLEAIRQIRLDPQLVNIPIVALTALAMTGDRDRCLQAGANDYLTKPVKLKQLATTIQQLLITTKK

SEQ ID NO: 14044 - protein, 383 aa, Thermobifida fusca YX
MGGEGTRAPAGGIADQEEGRGICMDQQHTASSDPSPATLRRWRRMLADEREEARAYRELAYRRDGEEREILLALAEAEARHVAYWERLLGDRVGKPRRGSWRMRALAFLARYLGWVLALALLQRAEHRIPYEAPDVPERIVADERIHAEVVRGLAVRSRSRLSGRLRAAVFGINDGLVSNIALVLGVVGGGATADTVLLTGLAGLLAGALSMAAGEYVSVSSQRELLAASVPDEAARESIPRLDAEDNELALVYRARGVPADEAQHRATTMLRLSRTGPPPELPGTTDPEVVGTGMSAAASSFVFFAVGAALPVLPFLAGMSGLAAVAVACTVTGIALLAVGAVVGVLSGSSPLRRALRQLTIGVGAAAATYLLGLLFNTVAT

SEQ ID NO: 14045 - protein, 399 aa, Thermus thermophilus HB27
MEGIASVKELLEELKAGRPVILVDDEDRENEGDLIMAAEHVTPEWVNFMLKECRGLLCVALTEERAKALDLPLMVERNQDPQGTRFTVSVDARGTTTGISAFERAATIRLLADPEVTAQDFRRPGHVFPLVARPGGVLRRAGHTEATVDLLRLAGLTPVGSLIEILKEDGTMARLPDLLAFARRHGLKVGTIADLIRYRLEKGDLYVRREAEALLPTRFGEFRILGYRDTLTGEEHAALVMGSWAPEEPVLVRMHSECLTGDALHSLRCDCGFQRDLALQRIAEEGKGVLVYLRQEGRGIGLVNKIKAYHLQDQGLDTVEANLALGFPPDLRDYGVGAQILYDLGVRKMRLLTNNPRKVRALSGFGIEIVERIPLRAGDNPHNERYLQAKKEKLGHWMD

SEQ ID NO: 14046 - protein, 416 aa, Arabidopsis thaliana
MTRKYIYIYIYIILKVRARVGANNKTLINNQSHLIEMRNTLMLSDLPGDLLEEILCRVPATSLKQLRSTCKQWNNLFNNGRFTRKHLDKAPKDFQNLMLSDSRVFSMSVSFHGIPSVEATCELSLIDSFSSFEDKFEISQVFHCDGLLLCTDADNTRIVVWNPCTGKTRWIEPNNRCYYYAFGSYLDKSYGNSYKILSYSGYGYENQELAIYEINSQSWRFLDVTRDCILERYTDYGVSLKGHTYWFASDEKEKNLSVFLVSFDYTTERFRRLRLPYQCPDYNTASLSVVREEKLAVLLQRENTSRTEIWVTSRIGETKVVSWSMVLAVDFPSELFILSGISFLVDAEKKFVVCCDNYFGEDEYDTKNLVHIVGENNKVREVNFGVSESSWPFLFNYVPSLIQIWEGVGGKRKRVE

SEQ ID NO: 14047 - protein, 395 aa, Cytophaga hutchinsonii
MAKENFDRSKPHVNVGTIGHVDHGKTTLTAAITKVLADKGLAEKRDFSQIDNAPEEKERGITINTSHVEYATATRHYAHVDCPGHADYVKNMVTGAAQMDGAILVVAATDGPMPQTREHILLARQVGVPAMVVFMNKVDLVDDPELLELVEMEIRELLSFYNFPGDTMSIIKGSALGGLNADPKWVATIEELMNAVDNDIPIPPRLTDQPFLMPVEDVFSITGRGTVATGRIERGVINSGEGVDIIGFGAENLKSTVTGVEMFRKILDRGEAGDNVGLLLRGIEKESIKRGMVICKPGSVKPHSEFKGEIYVLSKEEGGRHTPFFNKYRPQFYMRTTDVTGEIELPAGTEMVMPGDNITITVKLIAAIALEKGLRFAIREGGRTVGAGQVTEILK

SEQ ID NO: 14048 - protein, 353 aa, Zea mays
MRTLDSLSKTKQQSVAKETLEIFAPLANQLGILNWKEQLENLCFKYLYPENFDELSTKLIEIYNIDMIAAATRRLEQALQVRGLSYYAIYGRHKSMYSIYRKMARKKLVMDKIYDIHGVRVILENKADCFATLEIIHHLWPRIPGKFKDYINSPKPNRYQSLHTVVLTEQTLPLEIQIRTRDMHLQAEFGIAAHWRYKEGERSCCTSVSEIVEWVRWVTWHCQTLNTGYPSSLACDASSKETHTIPSHSEACLLSYSKQCDHKGPVLVILLENEKMSVQEIPQNWTILDLLKRSSNYGMPLRLRLNCHAVHNWNQELKMGDVLELIPSTPCKSRGRTRELHQKFDHRLAVSQS

SEQ ID NO: 14049 - protein, 855 aa, Mycobacterium avium
MSADGISRDGCAPRHIIVVGHGMVGHRFVEALRARDTEGRWRITVFAEEADAAYDRVGLTSYTESWDRALLALPGNDYQGDPQVRLVLNQRVTEIDRATKSVVTADGQRHHYDTLVLATGSYAFVPPVPGHELPTCHVYRTLDDLDAIRADAQRAAQTDHARAGVVIGGGLLGLEAANALRQFGLATHVVEMMPRLMAQQIDEAGGALLARMIGDLGISVHVGTGTEAIEPVEGPDGSTTVRVRLSDGQVIDAGLVIFAAGIRPRDELAVAAGLARAERGGVLTDLSCRTSDPDIYAIGEVAAIDGRCYGLVGPGYTSAEVVADRLLDGSAEFGEADLSTKLKLLGVDVASFGDAMGTTENCLEVAINDAVNRTYAKLVLSDDAKTLLGGVLVGDASSYGVLRPMVGSELPGDPLALIAPASSGGGTALGVGALPDSAQICSCNNVTKGDLKCAIADGCADVAALKSCTSAGTSCGSCVPLLKQLLEAEGVEQSKALCEHFSQSRAELFEIISATEIRTFSGLLERFGRGKGCDICKPVVASILASTGSEHILEGEQASLQDSNDHFLANIQKNGSYSVVPRVPGGDIKPEHLILIGQIAQDFGLYTKITGGQRIDMFGARVDQLPAIWKRLVDGGMESGHAYGKALRTVKSCVGTDWCRYGQQDSVQLAIDLELRYRGLRAPHKIKMGVSGCARECAEARSKDVGVIATEKGWNLYVGGNGGMTPKHAQLLASDLDTETLVRYIDRFVMYYIRTADRLQRTAPWVESLDGGLDHVREVVCEDSLGLAEEFEAAMERHVRNYKCEWKGVLDDPDKLSRFVSFVNAPDAVDSTVAFTEHAGRKIPVSIGMPKIRQG

SEQ ID NO: 14050 - protein, 576 aa, Vibrio angustum S14
MIDPEKHIALLKQKLEREHASRLAAEKLLEAKSHELYNANQMLNDSYEKLQMQAKFDSELLTYQNKMENLLLRYARLFLKHSATRESIQQLLDSLVDGHYISGCHITIYPADNINISGSYSSGRLQQWEPPEELESTNSLWDKSGHTLWINIINNRGKIGVLAVRIICTDDRLPAIQKHMALFGELFRSAIGRQITFNQAIDAKKRAEDSEQSTRDFLAMINHELRTPLNGLLGAAELLQDTPLDNDQQKLLTTLNHSGELLRAIINDLLDYSKINAGMLELIEKPFDCHLLAVKLEDIFTHRSHEKRLDFNIYYSNDLPKIFIGDEDRIKQIFVNLISNAIKFTPAGFVHAKLWWQNKHLQFTVKDSGCGIDHSDQHKLFKPFSQVDNTSKRSHEGTGLGLVICKQLCEQMGGSIRVESSLGRGACFNVSLPLAISDHAHFNAKVRKPNKTPIKHLKVLVVEDLKTNQMIIKLMLNKVQIEPTIVDNGQKALDILNIESFDVVFMDCRMPIMDGYTATKELRKQDYSKPIIALTAGTTSAEREACIQAGMNDILCKPYLASELHDILTIWGCEIK

SEQ ID NO: 14051 - protein, 161 aa, Ustilago maydis 521
MVSFYDLKAKKPSQEDYTFDQLKGKVVLVVNTASKCGYTPQFAELEELNKKYADQGLQIIGFPCNQFAGQDPGSDESIGEFCQRNYGVTFPMMAKSDVNGSNTNEVFQFLKKEKAGILGTEMIKWNFTKFLIDKEGNVIERYGSNTKPSAIAPAIEKLLSQ

SEQ ID NO: 14052 - protein, 581 aa, Bromus inermis
MVFSVAKKDTTPYEGQKPGTSGLRKKVTVFQQPHYLANFVQSTFNALPAEEVKGATIVVSGDGRYFSKDAVQIIAKMAAANGVRRVWVGQGSLLSTPAVSAIIRERIAADGSKATGGFILTASHNPGGPTEDFGIKYNMGNGGPAPESVTDKIFSNTKTISEYLIAEDLPDVDISVIGVTTFTGPEGPFDVDVFDSATEYVKLMKTIFDFESIKKLLASPKFSFCFDGMHGVAGAYAKRIFVDELGASESSLLNCVPKEDFGGGHPDPNLTYAKELVDRMGLGKTSNVEPPEFGAAADGDADRNMILGKRFFVTPSDSVAIIAANAVQSIPYFASGLKGVARSMPTSAALDVVAKNLNLKFFEVPTGWKFFGNLMDAGMCSVCGEESFGTGSDHIREKDGIWAVLAWLSILAYKNKDNLGGDKLVTVENIVLQHWGIYGRHYYTRYDYENVDAEAAKELMANLVKMQSSLSDVNKLIKEIQPNVADVVSADEFEYTDPVDGSVSKHQGIRYLFGDGSRLVFRLSGTGSVGATIRIYIEQYEKDSSKTGRESSDALSPLVDVALKLSKIQELTGRSAPTVIT

SEQ ID NO: 14053 - protein, 428 aa, Mesorhizobium sp. BNC1
MATEIRVPTLGESVTEATIGRWFKKVGDAIAADEPVVELETDKVTVEVPAPSAGTLQEIAVKEGDTVEVGALLGSIGEGAAAAPAKAAPAAREKKEAVAQAAGASGAGSTGEAIEKTANVGGEPPIEERKRPPAPSAAKLLAENRLSTDEVAGSGKDGQVLKGDVLAAIERGGRGAPSQPAELPKVARAPSAPEDEVREERVKMTRLRQTIARRLKDAQSNAAMLTTFNEVDMTAVMDLRKKYKDLFEKKHGVKLGFMGFFTKAVCHALKEIPAVNAEIDGTDIIYKNFCHIGVAVGTERGLVVPVVRDADRMTIAEIEKEIGRLGAEARDGKLALADMQGGTFTISNGGVYGSLMSTPILNAPQSGILGMHKIQERPMVVGGQIVVRPMMYLALSYDHRIVDGKEAVTFLVRVKDVLEDPERLVLDL

SEQ ID NO: 14054 - protein, 309 aa, Agrobacterium tumefaciens str. C58
MQTKPFRIGTRGSPLALAQAYETRSRLMAAHGLPEEMFEIVVLSTKGDRITDRALSEIGGKGLFTEELENQLLSGELDIAVHSSKDMPTVLPEGLHLSAFLPREDMRDAFIGRTAPKLLELPQGAVVGSASLRRQALIRRLRPDLNVIVFRGLVDTRLRKLEEGQADATLLAFAGLKRLGKDNVPTEILDPKEFPPAPAQGAIGVESRIGDARMDKLLAPINDRPTYDAVTCERAFLAALDGSCRTPIAGYATCEGDNLHFSGLILTPDGQTSHGVEISGNRRDALILGKKAGEEVRAKAGSNFFEGWS

SEQ ID NO: 14055 - protein, 152 aa, Haloarcula marismortui
MGISYSVEADPDTTAKAMLRERQMSFKHSKAIAREIKGKTAGEAVDYLEAVIEGDQPVPFKQHNSGVGHKSKVDGWDAGRYPEKASKAFLDLLENAVGNADHQGFDGEAMTIKHVAAHKVGERKPRAMGRASAWNSPQVDVELILEEPEVED

SEQ ID NO: 14056 - protein, 303 aa, Mesorhizobium sp. BNC1
MSILVDKNTKVLVQGLTGKTGTFHTEQALAYYGTKMVGGIHPKKGGETWRSGLDSAAELPIFASVAEGKEKTGADASVIYVPPAGAAAAIIEAIEAEIPLIVCITEGIPVMDMVHVKAKLDKSKSRLIGPNCPGVLTPEECKIGIMPGNIFKKGSVGVVSRSGTLTYEAVFQTTNEGLGQTTAVGIGGDPVKGTEFIDILEMFLADDETKSIIMIGEIGGSAEEDAAQFLMDEARRGRKKPMAGFIAGRTAPKGRTMGHAGAVISGGKGGAEDKIEAMERAGIKVSPSPARLGQTLSEAIKDW

SEQ ID NO: 14057 - protein, 967 aa, Zea mays
MAALGPKMERLSSIDAQLRMLVPGKVSEDDKLIEYDALLLDRFLDILQDLHGDDLKEMVQECYEVAAEYETKHDLQKLDELGKMITSLDPGDSIVIAKSLSHMLNLANLAEEVQIAYRRRIKLKKGDFADENSAITESDIEETLKRLVVDLKKSPAEVFDALKSQTVDLVLTAHPTQSVRRSLLQKHSRIRNCLVQLYSKDITPDDKQELDEALQREIQAAFRTDEIRRTQPTPQDEMRAGMSYFHETIWKGVPKFLRRVDTALKNIGINERVPYNAPLIQFSSWMGGDRDGNPRVTPEVTRDVCLLARMMASNLYCSQIEDLMFELSMWRCSDELRMRADVLHLSTKKDAKHYIEFWKKVPPNEPYRVILSDVRDKLYNTRERSRELLSSGHSDIPEEATLTNVEQLLEPLELCYRSLCACGDSVIADGTLLDFLRQVSTFGLSLVRLDIRQESDRHTDVLDAITTYLGIGSYREWTEERRQEWLLSELNGKRPLFGSDLPKTEEISDVLDTFHVIAELPSDNFGAYIISMATAPSDVLAVELLQRECHVKTPLRVVPLFEKLADLEAAPAALARLFSIDWYRQRINGKQEVMIGYSDSGKDAGRLSAAWQLYKAQEELIKVAKDFGVKLTMFHGRGGTVGRGGGPTHLAILSQPPDTIHGSLRVTVQGEVIEQSFGEEHLCFRTLQRFTAATLEHGMHPPNAPKPEWRALLDEMAVVATEEYRSIVFKEPRFVEYFRLATPETEYGRMNIGSRPSKRKPSGGIDSLRAIPWIFAWTQTRFHLPVWLGFGAAFKNVLQKDIRNLHMLQEMYNEWPFFRVTIDLVEMVFAKGNPGIAALYDKLLVSEELHPLGEKLRANYEETQKLLLQVAGHRDLLEGDLYLKQRLRLRDAYITTLNVCQAYTLKRIRDPDYHVALRPHLSKEIMDSTKAAADVVKLNPGSEYAPGLEDTLILTMKGIAAGLQNTG

SEQ ID NO: 14058 - protein, 268 aa, uncultured marine bacterium
QPNAMGGREVGGLANMLAAHMDIENPEHRQWVQEFWDSPTICTEPGLKAIDLFDSMEQGKVKAVWIMATNPLVSMPNRGKITRALENCDFVVVSDCVEQNDTLALADVKLPATAWSEKEGTVTNSERSISRQRAFKAATGGAKNDWQIICDVAQKMGYSEGFDFQTPHQIFVEHARLSGVNNFGDRDFDISALADLSLKDYQQLKPVQWPVNQRYPDGCKRLFTDGRFFTPSGKARFIPLHPELPQQQTCKDYPLILNSGRIRDQWHT

SEQ ID NO: 14059 - protein, 138 aa, Vibrio vulnificus YJ016
MSNGRILHTMLRVGNLDKSIQFYTEVMGMQLLRTNENKEYEYTLAFLGYGDESQGAVIELTYNWGKTEYDLGSAFGHIAIGVDDIYVTCDAIKAAGGNVTREPGPVKGGTTHIAFVKDPDGYMIELIQNKQASAGLEG

SEQ ID NO: 14060 - protein, 424 aa, Arabidopsis thaliana
MDFNAGVPMSSLSPLMNQDAMWQMNLSSDETMETGSYPERPGEPDCSYYIRTGLCRFGSTCRVNHPRDRELVIATARMRGEYPERIGHPECEYYLKTGTCKFGVTCKFHHPRNKAGIAGRVSLNMLGYPLRSNEVDCAYFLRTGHCKFGGTCKFNHPQPQPTNMMVPTSGQQSYPWSRASFIASPRWQDPSSYASLIMPQGVVPVQGWNPYSGQLGSVSPSGTGNDQNYRNLQQNETIESGSQSQGSFSGYNPGSSVPLGGYYALPRENVFPERPGQPECQFYMKTGDCKFGTVCKFHHPRDRQAPPPDCLLSSIGLPLRPGEPLCVFYTRYGICKFGPSCKFDHPMRVFTYDNTASETDEVVETSTGKSRRLSVSETRQAATTSSGKDTTIDIHSSEGNKGRRRRAFKQEKNKSFLIFQKRNL

SEQ ID NO: 14061 - protein, 146 aa, Zea mays
  misc_feature (68)..(68): Xaa can be any naturally occurring amino acid
  misc_feature (93)..(93): Xaa can be any naturally occurring amino acid
KVQLERGQMLMVAPYLVKRKKQHFHHLEKYNVDLILGCNGFIWVGEHVVVGEKPKTTGGQQGFSTEAXNFTPLETRKHICRLANSVRVLSALXFTLTIELIIETMEASASSNVEINDMLGAKFYVQTAEREAKRRADLLRKKNGAK

SEQ ID NO: 14062 - protein, 619 aa, Azoarcus sp. EbN1
MINRPWISSDMHRKVEGPRLLARITGAISRNAPLHGAGRSNSLSGLVEFRSGFCSHDGGVAVHRAGDLVCMALGSPRFEPGALHERASTAGIAAAWLDAFRERGARAPAAAKGRFAVVVLNGGEGSAWLAVDRFGTHPLCHAIEDGMLAFATRADEVPVVAKALDTQALFDYLYFHMIPAPRTVFAGVERLLPGHVLHWRDGKARSERYWTPRFAPDRSLDLEAGKLRFLEIVESAVARETSDGQPGAFLSGGTDSSTVSGMLCRVLGRPAPTYSIGFDAAGYDEMAYARIAAKHFGTDHHEYYVTPDDLIEGIPKVAAYYDEPFGNSSVVPSWLCARNARNDGITRMLAGDGGDELFGGNSRYAKQRIFGFYDAVPGVLRSSMLEPMLGLRGMDRVPVVKKAASYVSQARVPLPDRMGMYNLLLRLGPTHVLTADFLGLVQQEAPLAAQRTVWAETAGQPLVNRMLAFDWKYTLADNDLSKVLGSTALAGVEVAFPLLSDELLEFSLTLPAEWKLKGLTLRWFFKEALRGFLPDEIIAKKKHGFGLPFGVWASQHAGLRSMARDSLETLKQRGIVRGAFIDDLLTNLLPAHPGYYGEMVWILQMLELWLREHAPEYRL

SEQ ID NO: 14063 - protein, 447 aa, Azoarcus sp. EbN1
MRYKSLEEFLSHVEQRNPGQPEFIQAVAEVMESLVPFITEYPRYAEHGLLDRLIEPERAIQFRVSWVDDRGEVQVNRGYRIQHSSAIGPFKGGLRFHPSVNLSVLKFLAFEQTFKNALTTLPMGGGKGGSDFDPKGRSPGEVMRFCQSFMTELYRHVGSDTDVPAGDIGVGGREIGFLAGMMKKLSNKASCVFTGKGLSFGGSLIRPEATGYGMVYFAEEMLRHVGKTMAGMTVSVSGSGNVAQYGIEKAMALGAKVITASDSSGTVIDEAGFTPEKLAVLMDVKNVHYGRVSEYAERLGLHFEPGRRPWHVPVDIAFPCATQNELDGDDAAVLVRNGVSCVAEGANMPSNAAAVRVFEKNGVLYAPGKASNAGGVATSGLEMSQNAMRLSWTREEVDGRLLEIMQGIHHMCLQYGTKPDGSVNYSDGANVAGFVKVADAMLSQGVI

SEQ ID NO: 14064 - protein, 541 aa, Oryza sativa
MASPPTASASASEAAESGRRSAPGPIDVPSPRDHLHHLLDRRDTPRVVHVEGTTMQRQRGEAAGDAGAAAAAKPEVKLVTGDGGYVLEDVPHVCDYLPDLPTYSNPLQDNPAYSVVKQYFVNPDDTVCQKAIVHKDGPRGNHFRRAGPRQRVFFESDEVHACIVTCGGLCPGLNTVIREIGGYRGFYACNTIDLSPKSVNDIHKRGGTVLGTSRGGHDTMKIVDSIQDRGINQVYVIGGDGTQRGAGVIFEEIRRRGLKVAVAGIPKTIDNDIPVIDRSFGFDTAVEEAQRAINAAHVEAGSAENGIGLVKLMGRHSGFIAHYATLASRDVDCCLIPESPFYLEGEGGLFRYLEKRLKENGHMVIVVAEGAGQKLINETKESMGKDASGNSILLDVGLWLSQKIKEHFKKIKTTINLKYIDPTYMIRAIPSNASDNVYCTLLAHSVVHGAMAGYTGFTVGQVNGRHCYIPFYRITEKQNKVSITDRMWARLLSSTNQPSFLSKKDVEDAKMEEERASKFFDGPPPNPKVEDKVASNGKAVK

SEQ ID NO: 14065 - protein, 121 aa, Arabidopsis thaliana
  misc_feature (82)..(82): Xaa can be any naturally occurring amino acid
MESEGKIVFTEEQEALVVKSWSVMKKNSAELGLKLFIKIFEIAPTTKKMFSFLRDSPIPAEQNPKLKPHAMSVFVMCCESAXVQLRKTGKVTVRETTLKVAWGQAYDHLVAAIKAEMNLSN

SEQ ID NO: 14066 - protein, 120 aa, Gossypium hirsutum
MASSMSLKLACVVVLCMVVGAPLAQGAVTCGQVTNSLAPCINYLRGSGAGAVPPGCCSGIKSLNSAAQTTPDRQAACRCIKSAAAGITGINFGLASGLPGKCGVNIPYKISPSTDCNSVK

SEQ ID NO: 14067 - protein, 261 aa, Candida albicans SC5314
MGVHKLIILRHGESQWNHENKFCGWIDIPLSQKGKQEAIYAGELIKKNHLDPDILYTSKLMRSIETGLTILEVLHKPWIDHIKTWRLNERHYGQYQGRDKHEVFVELGKDKEKFQYIRRDYHGLPPLIEYGQDKSIDEKYKDVLNKDILPRGESLSMVMDRLIPFFKYEILDNQMIQLNKTVLIVTHGSIVRSLIKYLNHVSDDDISKINVPTGIPLVFELNDRGELIKPYYYLDQEKAEKGIAKVKMEGLERKGQTDEKL

SEQ ID NO: 14068 - protein, 407 aa, Flaveria trinervia
MESRVLSSGATAISGVPRLTKPAGRITTTTVAVAFPARLNATGGNVVWGRQLRPSLLNLDHSSPVSLVTKPVKRDVLKPCSATASDSAGDAAPVGFLAKYPFLVTGFFFFMWYFLNVIFNILNKKIYNYFPYPYFVSVIHLAVGVVYCLGSWTVGLPKRAPVDSNILKLLIPVGFCHALGHVTSNVSFAAVAVSFTHTIKALEPFFNAAASQFVLGQSIPISLWLSLAPVVIGVSMASLTELSFNWLGFISAMISNISFTYRSIYSKKAMTDMDSTNLYAYISIIALLFCIPPAVLFEGPQLLKHGFNDAIAKVGMIKFISDLFWVGMFYHLYNQIATNTLERVAPLTHAVGNVLKRVFVIGFSIIVFGNKISTQTAIGTSIAIAGVAIYSLIKARIEEEKRRMKSA

SEQ ID NO: 14069 - protein, 191 aa, Zea mays
MGSMSNPNPWSPYDSYNDCSQGVCNIYCPQWCYLIFPPPPPSFLDDEDSSSPSSFSPLLIALIVTLLTAFILVGYYTLVSKYCRRPRRETSSSELSGGVSSSSALAGGDGLNDALIKSITVYKYRKGDGHVDGSDCSVCLSEFEENESLRLLPKCNHAFHLPCIDTWLRSHSNCPLCRAFVTGINPTNQSN

SEQ ID NO: 14070 - protein, 292 aa, Clostridium thermocellum ATCC 27405
MKIRVGSRESKLAVRQAQIVIDSIKKYNPDIEIELVTMKTTGDKILDKTIDKIGGKGLFVKELDRALLDGKVDITVHSFKDMPMDIDDRLPIVAVSKREDPRDVLVLPKGKNEIDFNGPIGCSSSRRKIQIEKIYPGCTVEPIRGNVLTRLEKLDKGEYSAIALAYAGLKRLGLEERIWRVFSTDEIVPAACQGIIAVQARKDFDASILANFHDKDSWDVSVAERSFIKALNGGCSSPSAAYGVIQGEKIVLTGFYVDKNGKIYKMTKTGDRNQGEALGYSLAMEMLKGADA

SEQ ID NO: 14071 - protein, 498 aa, Magnetospirillum magnetotacticum MS-1
MCGIAATIGLSDATAFTSLFGAIGHRGPDESGIRESGDIRIGMHRLAIVGRMGDSVPLIGADGLVLAFNGEIYNHQALRADFPDYPFAGQSDAEVLFPLLKRHGLGGLDRLRGMFAFVLTDMESGEFLAVRDPFGIKPLYYAETGGGFAFASEMKAFAAMGITPRFLPPGHLLTRHGLRRWYRVPGRFRLSRRPNLRALLERAVASHLPPEGPCGVFLSGGLDSSLVAALAARSRPDMVAYSVVLPGSPDEEPAALMAAHLGIRHKVLRATADDIRAALPEVIGALESFNPIMVRNAVPLYLLSKMAAKDCKVVLGGDGADELFAGYDYLSRVPRRFWPQAMDYGFSNLHRTELQRVDRMTMAHGLELRVPFLDREVAEAAVNLPLSAKFGIKDGTPMPKLALREAAEGLLPPSIQWRRKLPLADGSGFGGLDLGAGRDKADPVPGWDVGDEDAVAFFPLWRVRFPLARPDSAIWRDCGRYHDFEECHGRPLLELFRR

SEQ ID NO: 14072 - protein, 368 aa, Brassica napus
  misc_feature (146)..(146): Xaa can be any naturally occurring amino acid
MALSAIGFEGYEKRLEVSFFEPSFFQDSKGLGLRALTRSQLDEILTPAACEIVSSLSNDHLDSYVLSESSFFVYPYKVIIKTCGTTKLLLSIPPLLKLAGELYLNVKSVKYTRGSFLCPGGQPFPHRSFSEEVSVLDGHFTKLGLXNSVAYLMGNDDETKKWHVYAASAQTSSDCNSNVYTLEMCMTGLDKEKASVFYKNETGGENGSMTDNSGIRKILPKSQICDFEFEPCGYSMNSIEGDAISTIHVTPEDGFSYASFEAVGYDFNTLDLSQLVTRVLSCFEPKQFSVAVHSSVGANAYKPEISVDLEDYGCRERTFESLGEESGTVMYQTFEKLGKYCGSPRSTLKCEWSSNNSCSSEDEKDEGI

SEQ ID NO: 14073 - protein, 408 aa, Flaveria pringlei
MESRVLSSGATTISGIPRLTRPAGRTTTTTVVAVASPAKLNTNGGNLVWGRQLRPSLLNLDHSSPVSLVTKPVKRDVLKPCTATASDSAGDAAPVGFFAKYPFLVTGFFFFMWYFLNVIFNILNKKIYNYFPYPYFVSAIHLAVGVVYCLGGWAVGLPKRAPMDSNLLKLLIPVAFCHALGHVTSNVSFAAVAVSFTHTIKSLEPFFNAAASQFILGQSIPITLWLSLAPVVIGVSMASLTELSFNWLGFISAMISNISFTYRSIYSKKAMTDMDSTNLYAYISIISLLFCIPPAIILEGPQLLKHGFSDAIAKVGMTKFISDLFWVGMFYHLYNQLAINTLERVAPLTHAVGNVLKRVFVIGFSIIVFGNKISTQTAIGTSIAIAGVAVYSLIKAKIEEEKRGLKSA

SEQ ID NO: 14074 - protein, 341 aa, Thermobifida fusca YX
MRVGVLTGGGDCPGLNAVIRAVVRKGIKEYGYEFVGFRDGWRGPLEGDTMPLDIEAVRGILPRGGTILGSSRTNLMKIEGGVERVKDNMAALGVDALVAIGGEDTLGVARQLHDHGVNVVGVPKTIDNDLNATDYTFGFDTAVNIATEAIDRLHTTAESHHRALVVEVMGRHAGWIALHAGMAAGANVILIPERPFDIDEVVAYIESRFKTNYAPIIVVAEGAHPKEGQLTLASAERDSFGHVRLGGIGQRLAEEIEARTGKEARSVVLGHVQRGGTPSAFDRVLATRLGLHAITAVHDKDFGKMVALRGTEIVRVDLSEATDQLKTVPVERYEEAEVFFG

SEQ ID NO: 14075 - protein, 338 aa, Flavobacteria bacterium BBFL7
MKKVLVTGISGYVGLHAAVELLKNGYAVKGSVRNLSKRDELTRAIRREVEPKGNLEFCELNLLKDEGWKEAMQDCDYVLHIASPYVASEPKDENEIIKPAIDGTQRALKFAKSNGVKRVVLTSSMVAMFGDANKSLNIEQDTWTNPNAKNMSAYVKSKTLAEKSAWDFIETQKGDNKLELVVINPGPIWGPTLSDKLSGESMNIVKDMITGKMPMLAKVRINMSDVRDIASIHVKALENEKANGQRFVVATENPYSFKEMAQILKSNGNDKVSTLEGPNFLLKFMSNFNSDLKGMKPFIGNTYDADVSKTKEVFNWKPISFEKSILDTVQSVKQRLNK

SEQ ID NO: 14076 - protein, 344 aa, Thermus thermophilus HB27
MLPKDLLEPLGLDALLVTRPENVRYLSGFPHPEDAQVLVTGEGAFLLTDPRYPEAERESRIPAKVLRREEREALLKTLKGRVGFEAEHLPYAALERLRELVPAEWVPTKGVVEKLRLRKTPEEVERIRKAQALAEEALAHVLPLLRPGVEEREIALEVEFFLKRRGAEGAAFPPIVASGERGALPHARASEKRLKAGELVTLDLGARLEGYHSDMTRTFALGRPKEELRRAYKAVAEALEAALAALAPGKPGKEVDAVARKVLEAHGLDRYFVHSLGHGVGLAVHEGPSLSPYGEEVLEPGMVVTVEPGVYLPGLGGVRLEELVLLTESGVELLSRFPRDFQEF

SEQ ID NO: 14077 - protein, 227 aa, Hordeum vulgare subsp. spontaneum
MEYQGQQQQHGRVDEYGNPVAGHGVGTGMGTHGGVGTGAAAGGHYQPMRDEHQTGRGILHRSGSSSSSSSEDDGMGGRRKKGIKEKIKEKLPGGHGDQQHNAGTYGYGQQGTGMAGTGGTYGQQGHTGMTGMGATDGTYGQQGHTGMAGTGAHGTAATGGTYGQQGHTGMTGTGMHGTGGTYGQQGHTGMTGTGMHGTGGTYGQHGTDTGEKKGIMDKIKEKLPGQH

SEQ ID NO: 14078 - protein, 85 aa, Synechocystis sp. PCC 6803
MTVSEVRGFGRQKGQTERYRGSEYTVEFLQKLKIEIVVDEGQVDMVVDKLVSAARTGEIGDGKIFISPVDSVVRIRTGEKDTEAI

SEQ ID NO: 14079 - protein, 152 aa, Brassica napus
LPIGIGLALFLCCSVYMMVSIVIVGLVPYYAMDPDTPISSAFASHDMQWAVYLITLGAVMALCSALMGALLPQPRILMAMARDGLLPSLFSDVNRRTQVPVKATIATGLCAATLAFFMDVSQLAGMVSVGTLLAFTMVAISVLILRYVPPDE

SEQ ID NO: 14080 - protein, 247 aa, Methanosarcina acetivorans C2A
MNESTVYECLKYGNENINRALEVLRAGKMIQIYDSDSREGETDLVIPAKAVTYKDVKWMRKDAGGLICVAVDPVASKQLKLPFMADLVREASRTSESLGEVVEKDGDLKYDSHSSFSIWVNHRDTRTGIPDLERALTIRKIGEITEKSLSGNGIRFGNEFRTPGHVALLRAAEGLLDERMGQTELSVALARMAGITPAMVVCEMLDDESGRALSKENSKDYGKDHGLVFLEGQEILEAYMLWTGSEC

SEQ ID NO: 14081 - protein, 761 aa, Hordeum vulgare
MAAMATALSTSLPHLPPRRLPSHPVAALSLAPRGFRRREAPARLAAVASASEVLDSTNGAAPAPTSPAPSGQQKYGREYFPLAAVVGQDAIKTSLLLGAIDREVGGIAISGKRGTAKTVMARGLHAMLPPIEVVVGSIANADPNIPEEWEDHLADQVQYDADGNVKCEIVKAPFVQIPLGVTEDRLIGSVDVEQSVRSGTTVFQPGLLAEAHRGVLYVDEINLLDDGISNLLLNVLTEGVNIVEREGISFRHPCKPLLIATYNPEEGSVREHLLDRIAINLSADLPLSFDDRVAAVNIATQFQESSKDVFKMVEEETEVAKTQIILAREYLKDVAISTEQLKYLVMEAIRGGCQGHRAELYAARVAKCLAAMEGREKVFAEDLKKAVELVILPRSIISDNPQEQQNQPPPPPPPPPPQNQDNAEDQDEKEEDEEKDEEEKEDDDEENEKQDDQIPEEFIFDAEGGLVDDKLLFFAQQAQRKKGKAGRAKNVIFSEDRGRYIKPMLPKGPVRRLAVDATLRAAAPYQKLRREKSLDKTRKVFVEKTDMRAKRMARKAGALVIFVVDASGSMALNRMQNAKGAALKLLAESYTSRDQVAIIPFRGDYAEVLLPPSRSIAMARKRLEKLPCGGGSPLAHGLSTAVRVGLNAEKSGDVGRIMIVAITDGRANVSLKKSNDPEAAAASDAPRPSTQELKDEILDVSAKIFKAGMSLLVIDTENKFVSTGFAKEIARVAQGKYYYLPNASDAVISAATKTALADLKS

SEQ ID NO: 14082 - protein, 510 aa, Cryptococcus neoformans var. neoformans JEC21
MATVLPEPEGIPCIRPAASYDPLTELSKPFTIDPASRSYKHQYANIYFVRLVEQRPAVEKKATEKWKDVKGNPPLLPRILNLTRSQLCYIVGTVYMEMPLKPNILEDMARDHWLAAPIPRTKFFSAQDSIHLEDESGRVRLIGDAIQRERDREGGGLVTGVIMAALGMETPSGDFEVIDICFAGMPDKLVLNPAPSSAKRKGKEKVENDEDIDMQEDAKIELPENAKTWIAMVSGLSIGTQEASTDLKAEMLVEWLMGEIGGHSDQLGGGRIARLIIAGNSLTLPVKGEDDKKIKRFNSTSKPLFPNHPTKTLATLFADLLSSSLPIHLIPGPSDPAGATLPQQPLPKILFGGKAKTEGLECETNPTWMEVGGRSFLTTGGQAIDDIFKYVPGNSRLGMTQRTLEWRHMAPTAPDTLWIYPFPDTDPFIMNYRPDVYIVGNQPEFETTIIGDEDAPTRLVLLPSFAKTGVIAFVCLETLECRTLEFEAPMWVGETMAGEAEGVDNEEMES

SEQ ID NO: 14083 - protein, 526 aa, Oryza sativa
MASESESNGHHHAGDEARAENSGAGCLHGGDDGGGTPRTTPEIRYTKLFINGRFVDAASGKTFETSDPRTGDVIARVAEGDKEDVDLAVKAAREAFDHGEWPRMSGSERGRVMAKYAEVVERHADELAALESLDAGKPLAAARAVDVGECVGILRYFAGAADKIHGETLKMSRQLQGYTLREPLGVAGLIVPWNFPAIMFFSKVSPALAAGCTVVVKPAEQTPLSALFLAHLSKQAGVPDGVINVVTGFGPTAGAAISSHMDVDVVAFTGSTEVGRLIMEASAKSNLKPVALELGGKSPFIVFDDADLDRAVELAIGGNFFNKGEACVAGSRVFVQEGIYDRFEQKLADTMKSWVVGDPFDPRVNQGPQVDKAQYERVLGYIEQVKAEGATVLTGGKPCGKKGYYIEPTIFTNVKDDMVIAREEIFGPVMCLMKFKTVEEAIERANGTRYGLAAGLVTRDIDVANRMARSIRAGVVWVNCYFAMDRSCPFGGRKMSGFGKDDSMHALDKFLAVKSVVTPVHGSPWF

SEQ ID NO: 14084 - protein, 918 aa, Escherichia coli O157:H7 EDL933
  misc_feature (639)..(639): Xaa can be any naturally occurring amino acid
MTNYSLRARMMILILAPTVLIGLLLSIFFVVHRYNDLQRQLEDAGASIIEPLAVSTEYGMSLQNRESIGQLISVLHRRHSDIVRAISVYDENNRLFVTSNFHLDPSSMQLGSNVPFPRQLTVTRDGDIMILRTPIISESYSPDESPSSDAKNSQNMLGYIALELDLKSVRLQQYKEIFISSVMMLFCIGIALIFGWRLMRDVTGPIRNMVNTVDRIRRGQLDSRVEGFMLGELDMLKNGINSMAMSLAAYHEEMQHNIDQATSDLRETLEQMEIQNVELDLAKKRAQEAARIKSEFLANMSHELRTPLNGVIGFTRLTLKTELTPTQRDHLNTIERSANNLLAIINDVLDFSKLEAGKLILESIPFPLRSTLDEVVTLLAHSSHDKGLELTLNIKSDVPDNVIGDPLRLQQIITNLVGNAIKFTENGNIDILVEKRALSNTKVQIEVQIRDTGIGIPERDQSRLFQAFRQADASISRRHGGTGLGLVITQKLVNEMGGDISFHSQPNRGSTFWFHINLDLNPNIIIEGPSTQCLAGKRLAYVEPNSAAAQCTLDILSETPLEVVYSPTFSALPPAHYDMMLLGIAVTFREPLTMQHERLAKAVSMTDFLMLALPCHAQVNAEKLKQDGIGACLLKPLTXTRLLPALTEFCHHKQNTLLPVTDESKLAMTVMAVDDNPANLKLIGALLEDMVQHVELCDSGHQAVERAKQMPFDLILMDIQMPDMDGIRACELIHQLPHQQQTPVIAVTAHAMAGQKEKLLGAGMSDYLAKPIEEERLHNLLLRYKPGSGISSRVVTPEVNEIVVNPNATLDWQLALRQAAGKTDLARDMLQMLLDFLPEVRNKVEEQLVGENPEGLVDLIHKLHGSCGYSGVPRMKNLCQLIEQQLRSGTKEEDLEPELLELLDEMDNVAREASKILG

SEQ ID NO: 14085 - protein, 320 aa, Vibrio parahaemolyticus RIMD 2210633
MQTKNKQGVLLVNLGTPDEPTAPAVKRFLSQFLHDHRVVDMTRWLWCPILHGVILPIRSPKVAKLYESVWMEEGSPLMVYSKRQAKKLAQHLDMPVELGMTYGNPSLQSGFEALIAQGVEEVIVLPLYPQYSGTTTAAVSDGITKAFKQLPVMPAFSFIRDYHDHPMYIEALAHSVRQYWEEHGKGDYLLCSYHGIPKRYADNGDIYPQHCEATTRLLGEALGLSSDQIGMAYQSRFGREEWLQPYTDKTLETITSKGVKKIDIMTPAFSSDCLETLEEIAGENKEIFMEAGGEQFHYIPCLNDDDMHIDMMAELVRSKL

SEQ ID NO: 14086 - protein, 496 aa, Mycobacterium sp. JLS
MTDITTEQLATFELLIGGEPAAAASGATYDSVDPYTGRPWARVPDGGSADVDRAVAAARAALEGPWGTLTATARGKLLWRLGEIIARDAEQLAELEVRDGGKLIREMVSQMRSLPEYYFYYAGLADKLQGEVVPTDKPNYLVYTRHEPVGVVAAITPWNSPLLLLTWKLAAGLAAGCTFVVKPSDHTPASTLAFAKLFAEAGFPPGVINVVTGWGPETGAALASHPGVDKVAFTGSTATGIQVGKAAIENMTRFSLELGGKSAQVVFDDADLDAAANGVIAGVFAATGQTCLAGSRLLVHESVADALVERIVERAATIKLGDPKDPTTEMGPVSNQPQYEKVLSHFASAREQGATVAYGGEPAAELGGLFVKPTVLTGVDPSMRAVAEEIFGPVLAVMTFTDEDEAVAAANASEFGLAGAVWTKDVHRAHRVAAKLRAGTVWVNAYRVVAPHVPFGGVGYSGIGRENGIDAVKDFTETKAVWVELSGATRDPFTLG

SEQ ID NO: 14087 - protein, 152 aa, Glycine max
MTAIAGTHVFGVVSFQLKHAEMPFACSCLIRKRIGDSPQRNVALRRRVNGTILPQIRAQNLPDYVPKSEFYKVEAILRPWRVPQVSAALLKMGIRGVTVSDVRGFGAQGGSKERQGGSEFSEDNFVAKVKMEVVVRKDQVEADLLSFISYIY

SEQ ID NO: 14088 - protein, 710 aa, Oryza sativa
MEAAALSTVLCVLALVVADADHHVVHVQGRRHRQCQPFSCGHLSNITHPFRRRGDPRRCGVSSYELDCSSDDGKATIRINTGKYYVSSIDYTASIFWVVDANLQDDANSSCPLPRSDQLPYVGLGIPGSHDSWDLGLDDMITWVGFVNCSQELITNSSSKYQPMNCLTTTSSYVYYMLPSFGAPSIQDIEPSCGYLAMTPIGGGSNGNSINLSEYEDVVKSMRGGFAVKFPTYGGPWTTWYGLIKDCLNESVSLADSHDNPLPRVGIKDRIIDILSIDLRFWGCMIGISRRYYLDMRLSISDMIRGVDHSLYHKLFIIYTLCLVKWIAVLCRFVFAPLVVMIFLTRKYWKTRIAIDAVEKFLRMQDMLGPKRYAYTDIIAITSHFRDKLGQGGYGSVYKGVFLPGDVHVAIKMLDGNSNCNGEDFISEVATIGRIHHINVVRLVGFCSEEMRRALVYEYMPRGSLNKYIFSSERSFSWDKLNEIALGIARGINYLHQGCEMQILHFDIKPDNILLDDNFVPKVADFGLAKLYPREKSFVSDRALRGTVGYMAPEMVSRSFGVISDKSDVYSFGMLLLEMAGGRRNADPNANSNASRAYYPAWVYDQLIADQQVDEISNVADMHELERKLCLVGLWCIQMKSHDRLTMSEAIEMLEGGVDALQVPPRPFFCDGDGIGNGMPPPQVMDSYFHSSELTAISEEDDGISELASS

SEQ ID NO: 14089 - protein, 268 aa, Candidatus Phytoplasma australiense
ETSKRHYAHVDCPGHADYVKNMITGAAQMDAAILVVSGADSVMPQTREHILLARQVGVPKIVVFLNKCDLCPDEEILELVEMEVRELLSKYDFPGDDTPIIRGSALKALEGDAHYVAQVNELIQTLDTYIEDPAREVDKPFLMPVEDVFTITGRGTVVTGRVERGQVKAGDEIEIVGLKETKKTIVTAVEMFKKDLDFAQAGDNIGALLRGINREDVQRGQVLAKPGSVKPHSKFVAQVYVLTKEEGGRHTAFFSQYRPQFYFRTTDI

SEQ ID NO: 14090 - protein, 268 aa, Fischerella sp. AEA-2001/1
QPNAMGGREAGGLAHLLPGYRLVKNPQHRAEVEEIWGLKRGQISPNPGLTAWDMITGLEDGNVGLLWIAATNPAVSMPDLERTKAALMRSPFTIYQDAYYPTETATYAHVLLPAAQWSEKTGVMTNSERRVTLCPAFRRPPGQAEPDWEIFAEVGRRLGFVGEFAFANSAEVFAEFVKLTCDRPCEMTGLSHEQLQPQGPTQWPHPDKEIEKRGNGESKRLYTDLRFHTPDGRARFGAYHSRGLAEPPDPDYPFVLTNGRLYGHWHTL

SEQ ID NO: 14091 - protein, 108 aa, Methylobacillus flagellatus KT
MNLHLTGHHLEVTPALREYVQSKLARLSNHFDHVIDLKVTLSVEKLVQKAEATLHVPGNDLHAECGAENMYSAIDLLADKLDRQVLKHKEKISNHNQASGGLKHQPVE

SEQ ID NO: 14092 - protein, 405 aa, Coxiella burnetii RSA 493
MAIEIKVPTLPESVSDATVAKWYKKEGDSISRDENLVDLETDKVMLEVPAPKDGVVEKIVAKEGEVVKADQILALLKEGGAVAKEKEKKDEKETKKEKEKKEEKKDKEKKEKTEEKESDLSPAVRRMVSEKDVDVEEIEGSGKGGRITKKDVEDYLEKQKEKPSEGKEGPADERTEKRVPLSRIRQRVAERLVQVQQEAALLTTFNEINMQLVMELRKKYREEFEKKFKVRLGFMSFFTKAVVEALKRFPMVNASIDGSDIIYHNYYDIGIAIGTERGLIVPILRNAEKMNMADIEKQIREYASRAQEGRLNIEELTGGTFTITNGGTYGSLLSTPIINPPQTAILGMHKIMDRPTVENGEVVVRPIMQVALSYDHRVIDGREAVLFLVTIKELLEDPARMILEC

SEQ ID NO: 14093 - protein, 282 aa, Colwellia psychrerythraea 34H
MSALILDGKSVTKKSEEDLRSRVARLKELSNGAVPILATILVGNDPSSATYVKMKSNACTRVGMDSLKVEMSEETTTEELLAEIAKLNANPNIHGILLQHPVPPQINERQCFDSIDLSKDVDGVTCWGFGRMAMNETSYGSATPKGIIRILEAYDIQLEGKHAVVVGRSPILGKPMAMMLLNKNCTVTICHSKTVGLDKIIKTADIVVGAVGKPEFIKADWIKDDAVVIDAGYHEGGIGDIELQPLMSRVKAYTPVPGGVGPMTINTLIYQTVEACELKLAQ

SEQ ID NO: 14094 - protein, 877 aa, Vibrio vulnificus CMCP6
MNEKYAALKSNVSMLGHLLGNTIQEAHGDEILEKVETIRKLSKSARAGNQADRNNLIEEIKSLPDEQLTPVARAFNQFLNLTNIAEQYHTISRHCDAHVCEPDAINTLFAKLGQNGINKLDTAQAIRELNIELVLTAHPTEITRRTMINKLVKINECLSKLELSDLSYKERHKTEKRLEQLIAQSWHSDVIRKQRPTPLDEAKWGFAVVENSLWEAVPDFLRELDEKLKDYLDQGLPIDARPVHFSSWMGGDRDGNPFVTHTVTREVLLLSRWKAADLYLKDINELISELSMTKCNDTVRQLAGEDEHEPYRAILKQLRTLLSDTKEILDAKINGQKLAVKAPLQSVEQLWDPLFACYQSLRECGMSMIAEGSLLDTLRRVKAFGVHLVRLDIRQESTRHADVLSELTRYLGIGDYNHWSEQDKIAFLTNELASKRPLLPRDWQPSEQVKEVLDTCKIIAAQSREAFGAYVISMAKTASDVLAVHLLLQESGCPYRMDVCPLFETLDDLNNAEAVIKQLMSIDLYRGFIQNHQMVMIGYSDSAKDAGVMAAGWAQYHAMEALVNVAEQEGIELTLFHGRGGTIGRGGAPAHAALLSQPPKSLKGGLRVTEQGEMIRFKLGLPDVAVNSFNMYASAILEANLLPPPEPKQEWRDLMEVLSQVSCEAYRSVVRGEPDFVPYFRQATPELELGKLPLGSRPAKRNPNGGVESLRAIPWIFSWSQNRLLLPAWLGAGEAIQYSIDKGHQALLEEMCREWPFFSTRLGMLEMVYLKCNSEISRYYDERLADKSLLPLGDRLRDQLQSDIKAVLNVENNENLMQSDPWGQESIRLRNIYIEPLNMLQAELLYRTRQAGVVSEALEEALMVTIAGIAAGMRNTG

SEQ ID NO: 14095 - protein, 368 aa, Synechococcus sp. WH 5701
MTSSPSSNGIVPSQSARIEVIGVGGGGSNAVNRMIASDLEGVGYGVLNTDAQALLQSAAQRRVQLGQKLTRGLGAGGNPMIGQKAAEESRNELQEALEGADLVFIAAGMGGGTGTGAAPILAEVAKECGALTVGIVTKPFGFEGRKRMKQAEEGIARLAEHVDTLIVIPNDRLRDAISGAPLQEAFRAADDVLRQGVKGISDIITRPGLVNVDFADVRSVMTLAGTALLGIGVGSGRSRAVEAAQAAISSPLLEAARIDGAKGCVINISGGKDMTLEDMTTASEVIYDVVDPDANIIVGAVVDEKLEGEIHVTVIATGFEAGSTYRTERPRATFAASPELTHTEAEADQRGAKIPPFLLNRQSRSSDS

SEQ ID NO: 14096 - protein, 272 aa, Triticum aestivum
MAQSMLMSGVNGVASGRSLLQAARPSTASTPFSRLALSSSSAAYYKHMPSLSVRTMALFGKSKTKAAPAKKVAAPKPKTEDGIFGTSGGIGFTKENELFVGRVAMIGFAASILGEAITGKGILSQLNLETGIPIYEAEPLLLFFILFTLLGAIGALGDRGRFVDEQPTTGLDKAVIAPGKGFRSALGLSEGGPLFGFTKSNELFVGRLAQLGIAFSIIGEIITGKGALAQLNIETGVPISEIEPLVLFNVVFFFIAAINPGTGKFISGEEDD

SEQ ID NO: 14097 - protein, 98 aa, Arabidopsis thaliana
  misc_feature (18)..(18): Xaa can be any naturally occurring amino acid
  misc_feature (29)..(29): Xaa can be any naturally occurring amino acid
  misc_feature (42)..(42): Xaa can be any naturally occurring amino acid
  misc_feature (82)..(83): Xaa can be any naturally occurring amino acid
  misc_feature (85)..(85): Xaa can be any naturally occurring amino acid
  misc_feature (87)..(88): Xaa can be any naturally occurring amino acid
  misc_feature (92)..(92): Xaa can be any naturally occurring amino acid
PLQSEQLASVSLPATMVXSPAQATMVAPXNGLKSSAAFPATXKANNDITSITSNGGRVNCMQVWPPIGKKKFETLSYLPDLXXSXFXXREVXYLIRNK

SEQ ID NO: 14098 - protein, 638 aa, Arabidopsis thaliana
MINLSLYQTNSLSYTIIWMLFVIPSCVLSVDERQKHCSPTFRCGKQTDLYYPFWSPDREECGHPVFKVNCSGDFAEFTISTVKFHVLEMNYESRIIRLVRTEYLNNLCPWHPENRSINQEVLPFLQDTELGTFYYNCSGPTVDELANGYIRQLGCDEEVGGKSYFVSSPSHPGNRAILDGLSASCERNVDIPVSRSAMETTATNQSLEAIKKVLDVGFELGFNSDCSLCVASKGACGFNQSSKAFVCYCKDEPHEHTCGKMGIGIGLGCGFLGATLITVCLLCFFFQKRRTSHHLRPRDNNLKGLVQLKQYSYAEVRKITKLFSHTLGKGGFGTVYGGNLCDGRKVAVKILKDFKSNGEDFINEVASMSQTSHVNIVSLLGFCYEGSKRAIVYEFLENGSLDQFLSEKKSLNLDVSTLYRIALGVARGLDYLHHGCKTRIVHFDIKPQNILLDDTFCPKVSDFGLAKLCEKRESILSLLDARGTIGYIAPEVFSGMYGRVSHKSDVYSYGMLVLEMIGAKNKEIEETAASNSSSAYFPDWIYKNLENGEDTWKFGDEISREDKEVAKKMTLVGLWCIQPSPLNRPPMNRIVEMMEGSLDVLEVPPKPSIHYSAEPLPQLSSFSEENSIYTEVFIGSTS

SEQ ID NO: 14099 - protein, 490 aa, Escherichia coli O157:H7
MSRMAEQQLYIHGGYTSATSGRTFETINPANGNVLATVQAAGREDVDRAVKSAQQGQKIWAAMTAMERSRILRRAVDILRERNDELAKLETLDTGKAYSETSTVDIVTGADVLEYYAGLIPSLEGSQIPLRETSFVYTRREPLGVVAGIGAWNYPIQIALWKSAPALAAGNAMIFKPSEVTPLTALKLAEIYSEAGLPDGVFNVLPGVGAETGQYLTEHPGIAKVSFTGGVASGKKVMANSAASSLKEVTMELGGKSPLIVFDDADLDLAADIAMMANFFSSGQVCTNGTRVFVPAKCNAAFEQKILARVERIRAGDVFDPQTNFGPLVSFPHRDNVLRYIAKGKEEGARVLCGGDVLKGDGLDNGAWVAPTVFTDCSDEMTIVREEIFGPVMSILTYESEDEVIRRANDTDYGLAAGIVTADLNRAHRVIHQLEAGICWINTWGESPAEMPVGGYKHSGIGRENGVMTLQSYTQVKSIQVEMAKFQSIF

SEQ ID NO: 14100 - protein, 391 aa, Methanothermobacter thermautotrophicus str. Delta H
MRYFVSPFNKEAELKFPDRITIYDTTLRDGEQTPGVCLGTEEKLEIARKLDELGIHQIESGFPVVSEQERVSVKSIANEGLNAEILALCRTKKDDIDAAIDCDVDGVITFMATSDLHLKHKLKLTREEALNVCMNSIEYAKDHGLFLAFSAEDATRTDLDFLKQIYRKAENYGADRVHIADTVGAISPQGMDYLVRELRRDIKVDIALHCHNDFGMALSNSIAGLLAGGTAVSTTVNGIGERAGNTSLEELIMALRIIYEVDLGFNIGVLYELSRLVEKHTRMKVPENKPIVGRNVFRHESGIHVDAVIEEPLTYEPFLPEMIGHQRKIVLGKHSGCRAVKAKLEEYGIDVTRDELCRIVEEVKKNREKGKYINDELFYRIVKSVRGPVDF

SEQ ID NO: 14101 - protein, 361 aa, Prochlorococcus marinus str. MIT 9211
MEMQESPMQELTHYINGEHVKGTSGRFADVFNPATGEVQAKVPLANAEEFNQAVEIAAAAQPAWGATNPQRRARVMMKFVDLLNRDMDKLAEALSREHGKTFPDAKGDIQRGLEVVEYCIGAPQMLKGEFTDSAGPGIDMYSLRQPLGVTGGITPFNFPAMIPMWMFAPAIVCGNAFILKPSERDPSVPLMLAELIEEAGLPKGILQVVNGDKEAVDAMLYNDTVQSIGFVGSTPIAEYIYGTGCSQGKRVQCFGGAKNHMIIMPDADLDQAADALVGAGYGAAGERCMAISVAVPVGEETADRLIEKLVPRIEKLKVGPYTSGDDVDYGPVVTAQAKENILRLVQTGVDQGAELVVDGRD

SEQ ID NO: 14102 - protein, 857 aa, Brassica oleracea var. alboglabra
MKGVRNIYHHSYTSILLVFVVMILFHPAFSIYINTLSSADSLTISSNRTLVSPGNIFELGFFRTTSSSRWYLGMWYKKLSDRTYVWVANRDNPLSNSIGTLKISGNNLVILGDSNKSVWSTNITRGNERSPVVAELLANGNFVMRDSNNNDGSGFLWQSFDYPTDTLLPEMKLGYDLITGLNRFLTSSRSLDDPSSGDYSYKFESRRLPEFYLLKGSGFRVHRSGPWNGVQFSGMPEDQKLSYMVYNFTQNSEEVVYTFRMTNNSIYSRLTISSEGYLERLTWTPSSGMWNVFWSSPVDLQCDVYKICGPYSYCDVNTSPVCNCIQGFNPLNVHQWDLRDGTSGCIRRTRLSCSGDGFTRMKNKKLPETTMAIVDHSIGLKECKKWCLSDCNCTAFANTDIRNGGTGCVIWTERLEDIRTYFTDGQDLYVRLAAADLVKKRNANGKIASLIVGASVLLLLIMFCLWKRKQNRVKASAISIANRQRNKNLPMNGMVLSSKKQLRRGNKTEELELPLIELEAVVKATENFSNCNKLGEGGFGIVYKGRLLDGQEIAVKRLSKTSVQGTDEFMNEVTLIARLQHINLVQIFGCCIQADEKMLIYEYLENSSLDSYLFGKTRSSKLNWKERFEITNGVARGLLYLHQDSRFRIIHRDLKVSNILLDKNMIPKISDFGMARIFAREETEANTMKVVGTYGYMSPEYAMHGIFSEKSDVFSFGVIVLEIVTGKRNRVFYNLNYEDNLLNYAWNNWKEGRALEIVDPAILDSLSSLPSTFQPQDVLKCIQIGLLCVQDLAENRPTMSSVVWMLGSEATEIPQPKPPGYCLVRSPYEPDPSSNRQREDDESWTVNQYTCSVIDAR

SEQ ID NO: 14103 - protein, 402 aa, Vibrio sp. Ex25
MTIEILVPDLPESVADATVATWHKQPGDAVERDEVLVDIETDKVVLEVPAPEAGVLEAIVEEEGATVLSKQIIAKLKPGAVAGEPTADKTEGTEASPDKRHKAALSEESNDALSPAVRRLLAEHSLEASQVKGTGVGGRITREDIEAHLANAKAATKEEAPAVVDVPAAARSQKRVPMTRLRKTVANRLLEAKNNTAMLTTFNEVNMKPIMDLRKQYKDQFEERHGIRLGFMSFYVKAVTEALKRYPEVNASIDGDDIVYHNYFDISMAVSTPRGLVTPVLKDCDKLGFADVEKGIKELAIKGRDGKLTVDELMGGNFTITNGGVFGSLMSTPIINPPQSAILGMHKIQERPMAVDGKVEILPMMYLALSYDHRLIDGRESVGFLVTIKELLEDPARLLLDV

SEQ ID NO: 14104 - protein, 526 aa, Clostridium thermocellum ATCC 27405
MKKILIYDSTLRDGAQAQGISFSVEDKLKIVERLDRLGISYIEAGNPGSNPKDLEFFDRIGRVKLRHAKIIAFGSTRRVNVSVQEDANVKSLLKADTPAVAIFGKSWDFHVTDILKTTLDENLRMIFDTISFFKNKNKEVVFDAEHFFDGYKANPDYAMKTLKTAVEAGADCICLCDTNGGTFPNEIKDITARVVSEFNVNVGIHCHNDTGMAVANSIMAVLAGAVQVQGTMNGFGERSGNANLCTIIPNLQLKAGYDCIPQENMADLTATARSISEIANVIHDERAPYVGKYAFAHKAGMHADAVTKNSIAYEHINPEVVGNERLFLMSEVAGRSAVLHLIKNIDSTITKDSPETKLILDKLKELEFEGYQYEGAESSFEIVIRKILGKYRPSFELGEFKVVVNEPSISGANSSAMIKINVDGQYEITADEGQGPVNALDKALRKALEKFYPQIAEMKLTDYKVRVLDSNSATAAKVRVLIESTDGKEVWTTIGVSTDIIEASWKALVDSIEYKLIKDKEAKQKS

SEQ ID NO: 14105 - protein, 251 aa, Asparagus officinalis
MKFNIANPTTGCQKKLEIDDDQKLRAFYDKRISQEVSGDALGEEFKGYVFKIMGGCDKQGFPMKQGVLTPGRVRLLLHRGTPCFRGYGRRNGERRRKSVRGCIVSPDLSVLNLVIVKKGENDLPGLTDVEKPRMRGPKRASKIRKLFNLSKEDDVRKYVNTYRRTFTNKKGKTCSKAPKIQRLVTPLTLQRKRARIAEKKKRVAKAKSEAAEYQKLLASRLKEQRDRRSESLAKKRSRLSAAAAKTASVSA

SEQ ID NO: 14106 - protein, 217 aa, Triticum aestivum
  misc_feature (186)..(186): Xaa can be any naturally occurring amino acid
MNGLEHPRNGRTAYHFQPAKFWQNDPNGPLYHNGMYHFFYQYNPHGATWGDGTLSWGHSVSGDLVNWADVGNALDPTSPFDANGCWSGSATVLPGGRPAILYTGIDANRVQVQNVAFAKNPADPLLREWEKPDCNPVMPMPADVTGNNFRDPTEAWRGRDGLWRVGVVAEVGGVGSLLVYRSADFXRWERNTLSRQVSGHSLFWSVRTSPHGAARAR

SEQ ID NO: 14107 - protein, 211 aa, Yarrowia lipolytica CLIB122
MVDFIQKEAEEKAKEIELKANEEYEIEKANIVRAESSNIDTQYAVKAKQESLSQQITKSTINNKARLRVLGARQEVLDQYYEAAGKQLKDASKDKSKYTTVLQGLITEGAYTLLEPVIYVRARKADQDIAKGTFDAVSKAYEKETGSKVEVKLDDEVLPAESSGGVIVFNGTKKISVDNTLEERLKLLFIEKLPAIRTDIFGPSPTRKFFD

SEQ ID NO: 14108 - protein, 419 aa, Nicotiana tabacum
MATMLGLSNPAEIAASSPSSTSFAFYHSSFIPKQCCFTKARRKSLCKPQRFSISSSFTPFDSAKIKVIGVGGGGNNAVNRMIGSGLQGVDFYAINTDAQALLQSAAENPLQIGELLTRGLGTGGNPLLGEQAAEESKEAIANSLKGSDMVFITAGMGGGTGSGAAPVVAQIAKEAGYLTVGVVTYPFSFEGRKRSVQALEAIEKLQKNVDTLIVIPNDRLLDIADEQTPLQDAFLLADDVLRQGVQGISDIITIPGLVNVDFADVKAVMKDSGTAMLGVGVSSSKNRAEEAAEQATLAPLIGSSIQSATGVVYNITGGKDITLQEVNRVSQVVTSLADPSANIIFGAVVDERYNGEIHVTIIATGFTQSFQKTLLSDPRGAKLADKGPVIQESMASPVTLRSSTSPSTTSRTPTRRLFF

SEQ ID NO: 14109 - protein, 181 aa, Hordeum vulgare subsp. spontaneum
MEYQGQQQSGQATNRVDEYGNPVAGHGVGTGMGAHGGVGTGAAAGGHFQPMRKEHKAGGILQRSGSSSSSSSEDDGMGGRRKKGIKDKIKEKLPGGHGDQQHAAGTYGQQGIGMAGTGGTYGQQGHTGMTGTGATGTMATGGTYGQPGHTGMTGTGTHGTDGTGEKKGIMDKIKEKLPGQH

SEQ ID NO: 14110 - protein, 591 aa, Schizosaccharomyces pombe
MAEELKAKGNAAFSKKDYKTAIDYFTQTIGLDERNHILYSNRSACYASEKDYADALKDATKCTELKPDWAKGWSRKGAALHGLGDLDAARSAYEEGLKHDANNAQLLNGLKSVEAAQTQAASGAGGFNPFAKLGSQLSDPKFMEKLASNPETASLLADSAFMAKLQKIQQNPGSIMAELNDPRMMKVIGMLMGIDINMNAGEGAAEEQEKKEEFAPSSSTPSADSAKPETTNPPPQPQASEPMEEDKTAEELEEAATKEALKKKADQEKQIGNENYKKRNFPVAIEQYKKAWDTYKDITYLNNLAAAYFEADQLDDCIKTCEDAIEQGRELRADFKLIAKALGRLGTTYQKRGDLVKAIDYYQRSLTEHRTPDILSRLKDAEKSKELQDREAYIDPDKAEESRVKGNELFKSGDFANAIKEYTEMTKRAPSDPRGFGNRAAAYLKVMAPAECIRDCNKAIELDPNFAKAYVRKAQALFMLKDYNKCIDACNEASEVDRREPNTGKNLREIESQLSKCMSAMASQRQNETEEETMARIQKDPEVLGILQDPAMQAILGQARENPAALMEHMKNPTVKSKIEKLIASGVIRLG

SEQ ID NO: 14111 - protein, 554 aa, Vibrio parahaemolyticus RIMD 2210633
MCSVFGILDIKSDAAALRPIALEMSKKLRHRGPDWSGIYSSERAILAHERLAIVGLNSGAQPLYSPDKKLILAVNGEIYNHKEIRARYEGKYEFQTDSDCEVILALYQDMGADLLEELNGIFAFVLYDEEKDEYLVGRDHIGIIPLYQGYDEHGNYYVASEMKALVPVCKTVSEFPPGSHYSSKDAEPQRYYIRDWNEYAAVQGNSTSKEELTEALEAAVKRQLMTDVPYGVLLSGGLDSSITSAVAKRYAAMRIEDDEKSEAWWPQLHSFAVGLEGAPDLKAAREVAEKIGTVHHEMTYTIQEGLDAIRDVIYHIETYDVTTIRASTPMFLMGRKIKAMGIKMVLSGEGADEIFGGYLYFHKAPNAKEFHEETVRKLLALNMFDCARANKSLAAWGVEGRVPFLDKEFIDVAMRLNPADKMCGNGKMEKHILRECFEHYLPDSIAWRQKEQFSDGVGYSWIDTLKAVAEEKVTDQQMETAQYRFPYNTPTTKEGYVYREIFEELFPLPSAAECVPGGPSVACSSAKAIEWDESFKNCVDPSGRAVQTVHNDAY

SEQ ID NO: 14112 - protein, 464 aa, Clostridium perfringens str. 13
MLFGKNELGSQFETPIFGTVESNESIPKYELAKKSIAPQVAYRLIKDDLLDEGNARQNLCTFCQTYMDDEAVKLMAETLEKNAIDKSEYPQTTDLENRCVNILADLWHAPKDESFMGTSTVGSSEACMLGGMAMKFRWRNRAKALGMDVTSRKPNLVISSGYQVCWEKFCVYWDIEMRLVPMDEEHMSINVDKVLDYVDDYTIGVVGILGITYTGKYDDIKALDKKLEEYNKTAKLTVPMHIDAASGGMFAPFIEPELEWDFRLKNVVSISTSGHKYGLVYPGIGWVLWRDKEYLPQELVFDVSYLGGKIPTMAINFSRSASQIIGQYYNFLRYGFEGYRQIHQRTKDVAMFLASELEKTGLFQIYNNGENLPIVCYKLRDDVNVDWTLYDLADRLLMKGWQVPAYPLPADLQDTIIQRIVCRADLSHNLAELYLRDLKAAIEDLNNARVLNQKSKTGVQGFTH

SEQ ID NO: 14113 - protein, 170 aa, Triticum aestivum
GLVPNSARGIEALLSDEIFQPKVFWSLADVQATCGTLGLSTATVKLIGPDGEEKIACAVGTGPVDAAYKAVDDIIQIPTVLREYSMTSVTEGIDAIATTRVVVTGDVSDSKHALTGHSFSRAFSGSGAALDIVVSSVRAYLSALNKMSSFVGAIKASSEVSESQRVQTTE

SEQ ID NO: 14114 - protein, 324 aa, Zea mays
  misc_feature (289)..(291): Xaa can be any naturally occurring amino acid
MAASLLHASAAAASLLSSTQHARAGAAAFHPLACAPSLRLTRSSFSTNRHLEISLRAISASRRFAGRGAPRDRRVVAALAGEQTEGSEVGDDRNGEIKPEEAQEIWKVMLEQFKAEALRMQALSMQAYDVYSERTREVLLEASEKLKIQADKAQKDLSVVATEIGQEGQEYLMMAARNSPDSIKDITTTFRALGKLNWPSEYEDYHVGIPFGTFLTVGGFLNFMLAGSTSALRFGIILGLALLALGISSLRSHREGDRRPRLLVKGQAAIALVIFFREFSVLLQNGWFXXXFIVLLSGVVAAFYFYRIATGNPKDLSSKNDSAN

SEQ ID NO: 14115 - protein, 370 aa, Mesorhizobium sp. BNC1
MATRKLFLLPGDGIGPEAMAEVSKLIAVLNSEFGAGFETEAGLVGGIAYDTHGKAISDEDMARALAADAVLLGAVGGPKWDGVPYDVRPEAGLLRLRKDMELFANLRPAICYPALAESSSLKKEAVEGLDILIVRELTGGVYFGEPKEIIDLGNGQKRGIDTQVYDTFEIERISGVAFELARTRGNKVCSMEKHNVMKSGVLWKEVVTATHRAKYSDVELTHMLADAGGMQLVRWPKQFDVIVTDNLFGDMLSDVAAMLTGSLGMLPSASLGAPDPKNGKRKALYEPVHGSAPDIAGKGIANPIAMISSFAMCLRYSLNMVAEADRLEKAIAAVLDDGLRTRDILSEGMREVSTSAMGDAVARKFRELAP

SEQ ID NO: 14116 - protein, 338 aa, Cordyceps bassiana
MAPVKVGINGFGRIGRIVFRNAVEHNDIDVVAVNDPFIEVKYAAYMLKYDSSHGLFKGEVAIDGNDLVINGKKVRFYGERDPAAIPWKETSAEYVVESTGVFTTTEKAKAHLQGGAKKVIISAPSADAPMYVMGVNEKSYDGSADVISNASCTTNCLAPLAKVIHDKFGIVEGLMTTIHSYTATQKTVDGPSAKDWRGGRGAAQNIIPSSTGAAKAVGKVIPELNGKLTGMSMRVPTANVSVVDLTARLEKGASYDAIKAAIKEAADGPLKGILGYTEDEVVSTDLNGNTNSSIFDAKAGISLNDNFVKLVSWYDNEWGYSRRVLDLISYVAKVDASK

SEQ ID NO: 14117 - protein, 334 aa, Geobacillus stearothermophilus
AVKVGINGFGRIGRNVFRAALKNPDIEVVAVNDLTDANTLAHLLKYDSVHGRLDAEVSVNGNNLVVNGKEIIVKAERDPENLAWGEIGVDIVVESTGRFTKREDAAKHLEAGAKKVIISAPAKNEDITIVMGVNQDKYDPKAHHVISNASSTTNCLAPFAKVLHEQFGIVRGMMTTVHSYTNDQRILDLPHKDLRRARAAAESIIPTTTGAAKAVALVLPELKGKLNGMAMRVPTPNVSVVDLVAELEKEVTVEEVNAALKAAAEGELKGILAYSEEPLVSRDYNGSTVSSTIDALSTMVIDGKMVKVVSWYDNETGYSHRVVDLAAYIASKGL

SEQ ID NO: 14118 - protein, 446 aa, Brassica napus
MKGVIPHYHHSYTFFFVILVLFPHAFSTNTLSSNEALTISSNKTLVSPGDVFELGFFKTATKNSQDGSTDRWYLGIWYKTTSDKRTYVWVANRDNPLHNSIGTLKISHASLVLLDQSDTTVWSTNLTGVAHLPVTAELLANGNFVLRDSKTNDLDRFMWQSFDYPVDTLLPEMKIGRKHKSSEKEKILTSWKSPTDPSSGDYSLILETEGFLHEFYLFKNEFKVYRTGPWNGVRFNGIPKKMQNWSYIDNSFIDNNEEVAYTFKVHNNNNMIHSRFRMSSTGYLQVITWTKTVPQRNMFWSFPEDTCDLYKVCGPYAYCDMHTSPTCNCIKGFVPKNAGRWDLRDMSGGCVRSSKLSCGEGDGFLRMSQMKLPETSEALVEKRIGLKECREKCVRDCNCTGYANMDIMDGGSGCVTWTGELVDMRKYDAGGQDLYVKVAEASLVPS

SEQ ID NO: 14119 - protein, 320 aa, Escherichia coli CFT073
MIMTVTSMLDNVLRIATRQSPLALWQAHYVKDKLMASHPGLVVELVPMVTRGDVILDTPLAKVGGKGLFVKELEVALLENRADIAVHSMKDVPVEFPQGLGLVTICEREDPRDAFVSNTYDSLDALPAGSIVGTSSLRRQCQLAERRPDLIIRSLRGNVGTRLSKLDNGEYDAIILAVAGLKRLGLESRIRAALPPEISLPAVGQGAVGIECRLDDARTRELLAALNHHETALRVTAERAMNTRLEGGCQVPIGSYAELIDGEIWLRALVGAPDGSQIIRGERRGAPQDAEQMGISLAEELLNNGAREILAEVYNGDAPA

SEQ ID NO: 14120 - protein, 268 aa, Leptolyngbya boryana
QPNAMGGREAGGLSHLLPGYRSVTNPGHRAELETFWQLPTGSISSNPGLTAWEMITGLETGNLGMLWVAATNPAVSMPDIERTKAALRQSPFTVYQECYYPTEMADYAHVLLPTTQWSEKTGVMTNSERRVTLCPQFRVAPGEARSDWEIFAEVGRRLGYRKQFAFNYAAEVYAEFVRLTRDRPCDQSGLSHTYLREMGATQWPFSSKAEPTQQKVEKAKRLYTDLKFHTPDGRARFSLVYSRGLAEPPDDNYPFVLTTGRLYGHWHT

SEQ ID NO: 14121 - protein, 506 aa, Bacillus anthracis str. 'Ames Ancestor'
MKQILFMDTTLRDGEQSPGVNLNEQEKLQIARQLERLGIHVMEAGFAAASEGDFQSVKRIANTIQNATVMSLARAKESDIRRAYEAVKGAVSPRLHVFLATSDIHMKYKLCMSKEDVLDSIYRSVTLGKSLFPTVQFSAEDATRTARDFLAEAVEVAIRAGANVINIPDTVGYTNPEEYYALFKYLQESVPSYEKAIFSCHCHDDLGMAVANSLAAVEGGALQVEGTINGIGERAGNAALEEVAVALHIRKDFYKAEPSMTLKEIKATSTLVSRLTGMVVSKNKAIVGANAFAHESGIHQDGVLKEVTTYEIIEPALVGESQNLFVLGKHSGRHAFTEKMKELGYEFTNDERDAVFEAFKKLADRKKEITEEDLRALMLGEAAFAAQQYNITQLQVHFVSNSTQCATVVLKDEEGNVFEDAATGSGSIEAIYNAIQRILGLECELADYRIQSITQGQDALAHVHVELKEGAHQVSGFGVAQDVLEASARAYVHAAGKLKSFIQLVK

SEQ ID NO: 14122 - protein, 867 aa, Ustilago maydis 521
MPPFTPAVRAENTFAAQSTSTKPFSSKFAPASHDGQPRRLAVMTSGGDSAGMNAAVRSVVKMAIFRGCEAFVIREGWEGLVRGNQTPENTPSATPSVSRSASTFFDSPNIQAKPSHLEANPEQSDFVPTYGEGELLREGVGEAQELGLRGRYIIRVGWDDVRGWMDQGGTLIGTARSKTFRTPEGREQAAYNLIINGIDALAVCGGDGSLTGADKLRAEWPDLVASLKAKSKITEEQATKFAHLNIVGLVGSIDNDMATTDITIGASTALQRICEAVDSISSTAASHSRAFVVEVMGRHCGWLALMAGIATGADYVFIPERPPQGEQWHSEMSAVLQKHRDLGKRKSIVIVAEGAIDRELNDISPEMIKQVLSNDLGLDTRVTTLGHTQRGGKPDANDRILATLQGIEAVDAVLEATPETPSYVIGISENKITRIPLMFAVEQTQKVAKLIESKDFDGALALRDPEFAEGLRAFKYISQITEDEMLPQNKRLRMGVINVGAPAGGMNAATRTAVRYCLAKGHEAVVIYNGFPGLLEDNVSVLNWLRVDNWATRGGSELGVNRHLPDIDIGAVAAKLQEHKIEGLLIVGGFEAFSSVKILNDNRDRYPAFRIPIVGLPATISNNVPMNEFSLGSDTSLNALVDACDAVKQSASASRNRVFVVETQGGKCGYIAVMGALAAGAVLVYTPEVGIGLQQLGKDVAFLKKRFLLDVKGKSEGRLVIRNEKSSDVFTTEVITKILKEEGNSLFDARSASLGHTLQGGVPSPLDRVRATRLALKCCEFLESQALKQRSGSSASSKTGSGSSSDKSYSDDTAVMITIQGSTICFTSATEMSRNADMKNRRGKTAWWHELKALVELLGGRTALAEL

SEQ ID NO: 14123 - protein, 382 aa, Oryza sativa
MAFKSTTNRSHLRLVREVEAIGGNVFASASREQMSYTYDALKCYAPEMVEVLIDSVRNPAFLEWEVKEQLQKIKSEISEVSGDPHGLLMEALHSAGYSGALAKPLMASESAVNRLDVATLEEFVSENYTAPRMVLAASGIEHDELVSVAEPLLSDLPSVKRPEEPKSVYVGGDYHCQADSTSTHIALAFEVPGGWRQEKTAMIVTVLQVLMGGGGSFSTGGPGKGMHSWLYLRVLNNYGQIESFSAFSSIYNNSGLFGIHATTNPDFVSSAVDLAARELHEVATPGKVTQEQLDRAKEATKSSVLMDLESRIVASEDIGRQVLTYGERKPIEYFLKTVEEITLNDISSTAKKIISSPLTLASWGDVIHVPSYESVRRKFHSK

SEQ ID NO: 14124 - protein, 260 aa, Vibrio diazotrophicus
QPNAMGGREVGGLANQLAVHRGFDTESVRLVKEYWQSPSIAAKPGLKAVELFEAVEAGKIKVLWIMATNPVVSLPNSDQVRRALKGCDFVVVSDITEQSDVAEYADLVLPAAGWGEKQGMVTNSERRMSRQRAFLPAPGEAKPDWWAVTQVGKKLRTKLNCESGFEFDSEAAVFREFAGLSAINTNSNYLFDLSKFASISDEEYANWQPTQWPLEKEAPYHDGVFSTPSGKAQFVAVTAPSTVMNGWWLNTGRLRDQWHT

SEQ ID NO: 14125 - protein, 555 aa, Bacteroides fragilis YCH46
MGLFIKKPFEALLAEANASGSKSLKRVLGPWSLVALGVGVIIGAGLFSITGTVAAGYTGPAITLSFAIAALGCCFAGLCYAEFASMIPVAGSAYTYSYATMGELIAWIIGWDLVLEYTVAATTVSISWSRYLVVFLEGLDIHLPQALTACPWDGGIVNIPAFLIVVLMSIFLIRGTEGSSIFNGIVVFLKVSVIAIFVVLGWKYINADNYTPYIPANTGTLGEYGLSGVLRGAAIVFFAFLGFDAVSTAAQETKNPKRNMPIGILVSLLVCTVLYMLFAHVMTGVAHYTEFSGQQGIAPVAIAIEHMGHADATGIIHPDYPWLNRAIVLAILFGYCSVIMVTLLGQSRVFLSMSHDGLLPPFFSHINEKFRTPARSNLLFMLIVGLLAAFVPARLAGEMTSIGTLMAFTLVCAAVLVVRKTMPNVPRSFKTPFVPLVPILGILTCLCMMLFLPADTWIRLVLWMLIGLDIYVGYGMKHSKLEHGVKNRRGQSALNMIGIALSLLCVITGLWHQQTVGWNESKVLLIISFVFAFTHCAYYMMRIWKGTTKQTNDNG

SEQ ID NO: 14126 - protein, 468 aa, Methanosarcina barkeri str. fusaro
MISKKVNLETLDESKKYRVGAYSARYIPQVKEKGIPKYEFPEEGMSPRAAYQLVHDEQSLDGNPFLNLASFVNTWMEPEADKLVMENINKNIIDIFEYPQTDKVIQSNIVNMLGRLFNGHHTKFMGTATAGSSEAIMLGLLAHKWSWKNSGRGTGKPNIIFGNDAHVCWDKFAKYFDVEARKIPIDKDERKISAAAVSEQIDENTICVGCVLGTTFTGEIDPVKDINDLLLRYKKEKGWDIPIHIDAASGGFILPFTEPDFEWDFRLESVKSINVSGHKYGLTYPGLGWLIFRDENDLPEDLIFHVNYLGEMEDSYTLNFSGGSAMVVAQYYNILRFGRAGYTRIMKNILEVSQDLAEKVDRLGRFEMLNKGERLPIIAFKQKEETDYSLQQLSYKLRERGWIIPAYCLPENAADIEIMRIVVRENFTSDMAAILVNDIENACQFFENGRKSETKKPCPPDDGMVHIC

SEQ ID NO: 14127 - protein, 394 aa, Staphylococcus epidermidis RP62A
MLEFEQGFNHLATLKVIGVGGGGNNAVNRMIDHGMNNVEFIAINTDGQALNLSKAESKIQIGEKLTRGLGAGANPEIGKKAAEESREQIEDAIQGADMVFVTAGMGGGTGTGAAPVVAKIAKEMGALTVGVVTRPFGFEGRKRQTQAAAGVESMKAAVDTLIVIPNDRLLDIVDKSTPMMEAFKEADNVLRQGVQGISDLIAVSGEVNLDFADVKTIMSNQGSALMGIGVSSGENRAVEAAKKAISSPLLETSIVGAQGVLMNITGGESLSLFEAQEAADIVQDAADEDVNMIFGTVINPELQDEIVVTVIATGFEDKPSSQGRKATSTGFGSSVNSSSNHQSGASAKEDSFSAHTSHSQSSESVSERSHTTKDDDIPSFIRNREERRSRRTRR

SEQ ID NO: 14128 - protein, 340 aa, Coprinopsis cinerea
MSQVNVGINGFGRIGRIVLRNALQHGKINVVAVNDPFIDLEYMVYMFKYDSVHGRFKGHVEAKDGKLWVEGKPISVFQEKDPANIPWGSVGADYIVESTGVFTTTEKASAHLKGGAKKVIISAPSADAPMFVVGVNLESYDPKYTVISNASCTTNCLAPLAKVINDKFGIVEGLMTTVHSTTATQRTVDGPSHKDWRGGRAVGNNIIPSSTGAAKAVGKVIPSLNGKLTGLAFRVPTIDVSVVDLVVRLEKPASYDEIKQAVKEASEGPLKGILEYTDEKVVSTDFTGSTSSSIFDAEAGIALNKNFVKLISWYDNEWGYSRRVCDLITYAAAKDKEAGV

SEQ ID NO: 14129 - protein, 732 aa, Candida albicans SC5314
MSETFPETNTPVQTPSTESFVNKMNAGDKTIGNNIFSQDSDSNQQSSHQEPLSPPNPSPTPEKRQLDDEVDNSIEPESKKQKVEEETEASQTGVIQTEVSETVPEIESSVNKDSEPVNGVSEESENTNNEQEKPQEEAPEENPQEEVPEAKPQEEASGENPQEIPNDKPQDDEPDIQEVDPPKPVVPVFTEPAPKPPQEPDMNNLPENPIPQHQAKFVLNTIKAVKRNREAVPFLHPVDTVKLNVPFYYNYIPRPMDLSTIERKINLKAYEDVSQVVDDFNLMVKNCKKFNGEAAGISKMATNIQAQFEKLMVKVPPKELPAGTNVAEATSVATSPTTNKRKSVAESSSSHQHRDSVAAARPKRTIHPPKSKELPYETKPKNKKVAAELRFCNQTIKELMSKKHYNYNFPFLAPVDTVALNIPNYNEIVKQPMDLGTIQSKLANNEYENADDFEKDVRLVFKNCYLFNPEGTDVNMMGHRLEAVFDKKWANKPVPEPTPQNSDVSDREYSSEEEDNVEISEAMLSEIPAIQVMENQIIRMRKELDELKKEHLKKLREQQAARKKKKQQKGKRRAPKAKHTKDTQHQVQAPPEPPKLTPPQPVVTYEMKKQVSEMVPNLSDKKLNALIKIIQDDVQISNDDEVELDMDQLEDRTVLKLYDFLFGDKALKNSAGKKKKPVANNNLDELAHLRSQLALFDEGVNGQQGSDNGFMKVVNQEESSEDEASSESSEEE

SEQ ID NO: 14130 - protein, 493 aa, Porphyromonas gingivalis W83
MAKELKELTPRSESYSQWYQDLVIKADLAENSAVRGCMVIKPYGYAIWEKMQRQLDDMFKETGHVNAYFPLFIPKSFLSREAEHVEGFAKECAVVTHYRLKANPDGDGVVVDPQAKLEEELIVRPTSETIIWNTYKNWIQSHRDLPILCNQWANVVRWEMRTRLFLRTAEFLWQEGHTAHATKEEAEEEARRMLEVYATFAEEYMAMPVVKGVKSANERFAGAVDTYTIEALMQDGKALQSGTSHFLGQNFAKAFNVTFADKDGNRDFVWATSWGVSTRLMGALIMSHSDDNGLVLPPKLAPYQVVIIPIYRNEEQLAQIDEKATQITQALRAKGISVKYDNSDNKKPGWKFAEYELKGIPVRLAMGARDLENNTIEIARRDTLTKETVGLDGIEETVATLLDDIQKNIFQKALNYRKEHTITVDSYEEFKEKIEDGGFILAHWDGTSETEERIKAETKATIRCIPLNGDMTPGKCMVTGKPSPQRVLFARAY

SEQ ID NO: 14131 - protein, 475 aa, Debaryomyces hansenii CBS767
MTTLQNGLRIVTDSTPGHFSALGAYVDAGSRFENPEKPGLSHIFDRLAWKSTDQYTGIEMMENLSKLGGNYMCSAQRESMIYQASVFNKDVDKMFDCIAQTIRAPRITDQELVETLQTADYEVSEIALKHDMFLPEVLHCAAYSNNTLGLPLFCPPERIPMISKDEVLNYHKTFYQPQNIVVAMVGVRHDHAVRLAQSQFGDWKSSSLQRPDLGTVNYTGGEIALPHQPPLAGNLPELYHMQIGFETTGLLNDDLYALATLQKLLGGGSSFSAGGPGKGMFSRLYTRVLNQYAFVENCMSFNHAYINSGLFGITISCSPNAAHVMSQIICFELSKLLEKDPSEGGLTDREVKRAKNQLISSLLMNVESKLAALEDLGRQIQCQGKLTTIDEMIDKIEKITVEDLRKVAEKILTGNVVTKGVSSGKPSVVMQGDRAAFGDVEFVLRHFGLGKFDGPPLTEPRDFSSGLGNKISKWF

SEQ ID NO: 14132 - protein, 400 aa, Campylobacter upsaliensis RM3195
MLIVQKYGGTSVGDLERIRAVALRVIESVKAGNELVVVVSAMSGVTNSLIEQAEYFSKNPNGADMDMLLSSGERVTSALLSIALNELGYRAVSFSGRKAGIITNSVFTKARIKHIDTSAIKAALKEGKIVIIAGFQGVDEEGNVTTLGRGGSDLSAVAVAGALSADLCEIYTDVDGVYTTDPRIEPKAKKLDKISYEEMLELASLGAKVLQNRSVELAKKLNVNLVTRSSFNNNEGTMITKEDGIEQALVSGIALDKNQARITLRNIEDKPGIAAEIFSSLARANINVDMIIQNVGTNGATNLGFTVPENELDQAKNTMKEVLGDQVSLESDSAVVKVSVVGVGMKSHSGVASMAFKALADEGINIGMISTSEIKISMIVHEKYGELAVRALHEVYGLDK

SEQ ID NO: 14133 - protein, 504 aa, Pericallis cruenta
MSILTLICTFITGLMFYGLVNLLSRRASRLPPGPTPWPIIGNLMHLGKLPHHSLADLAKKYGPLIHVRLGSVDVVVASSASVAGQFLKVHDANFANRPPNSGAKHMAYNYHDMVFAPYGPRWRMLRKMCSMHLFSAKALADFRQVRQEEVMILTRVLAGTEQSAVKLDQQLNVCFANTLSRMMLDRRVFGDGDPKADDYKDMVVELMTLAGQFNIGDYIPWLDLLDLQGIVKRMKKVHSQFDSFLDTIIDEHTIGTGRHVDMLSTMISLKDNADGEGGKLSFIEIKALLLNLFSAGTDTSSSTVEWGIAELIRHPQLMKQAQEEMDIVIGKNRLVTEMDISQLTFLQAIVKETFRLHPATPLSLPRIASESCEVKGYHVPKGSILFVNVWAIARQSELWTDPLEFRPGRFLIPGEKPNVEVKPNDFEIVPFGGGRRICAGMSLGLRMVNLLIATLVQAFDWELANGLELEKLNMEEVFGISLQRVQPLLVHPRPRLARHVYGTG

SEQ ID NO: 14134 - protein, 184 aa, Hordeum vulgare subsp. spontaneum
MEYQGQQQHGQATDRVDEYGNPVAGHGVGTGMGAHGGVGTGAAAGGGGGHFQPTRAEHKAGGILQRPGSSSSSSSEDDGMGGRRKKGIKDKIKEKLPGGHGDQQHAAGTYGQQGIGMAGTGGTYGQQGHTGMTGTGATGTMATGGTYGQPGHTGMTGTGTHGTDGTGEKKGIMDKIKEKLPGQH

SEQ ID NO: 14135 - protein, 549 aa, Brucella melitensis 16M
MARDATKLEATVAKLKKHWAESAPRDMRAAFSADPGRFGRYSLCLDDLLFDWSKCRVNDETMALLKELAVAADVEGRRAAMFAGEHINNTEDRAVLHVALRDTSSKEVLVDGHNVLPDVKHVLDRMAAFADGIRSGALKGATGRKITDIVNIGIGGSDLGPVMATLALAPYHDEPRAHFVSNIDGAHIADTLSPLDPASTLIIVASKTFTTIETMTNAQTARKWVADTLGEAAVGAHFAAVSTALDKVAAFGIPEDRVFGFWDWVGGRYSVWSAIGLPVMIAVGPDNFRKFLAGAHAMDVHFRDAPLEKNLPVMLGLIGYWHRAICGYGSRAIIPYDQRLSRLPAYLQQLDMESNGKSVTLDGKPVSGPTGPVVWGEPGTNGQHAFFQLLHQGTDTIPLEFIVAAKGHEPTLDHQHEMLMANCLAQSEALMKGRTLDEARAQLQAKNLPASQVERIAPHRVFSGNRPSLTLIHDMLDPYTLGRLIALYEHRVFVEAQIFGINAFDQWGVELGKELATELLPVVSGKEGASGRDASTQGLVAHLHARRKA

SEQ ID NO: 14136 - protein, 919 aa, Corynebacterium glutamicum
MTDFLRDDIRFLGQILGEVIAEQEGQEVYELVEQARLTSFDIAKGNAEMDSLVQVFDGITPAKATPIARAFSHFALLANLAEDLYDEELREQALDAGDTPPDSTLDATWLKLNEGNVGAEAVADVLRNAEVAPVLTAHPTETRRRTVFDAQKWITTHMRERHALQSAEPTARTQSKLDEIEKNIRRRITILWQTALIRVARPRIEDEIEVGLRYYKLSLLEEIPRINRDVAVELRERFGEGVPLKPVVKPGSWIGGDHDGNPYVTAETVEYSTHRAAETVLKYYARQLHSLEHELSLSDRMNKVTPQLLALADAGHNDVPSRVDEPYRRAVHGVRGRILATTAELIGEDAVEGVWFKVFTPYASPEEFLNDALTIDHSLRESKDVLIADDRLSVLISAIESFGFNLYALDLRQNSESYEDVLTELFERAQVTANYRELSEAEKLEVLLKELRSPRPLIPHGSDEYSEVTDRELGIFRTASEAVKKFGPRMVPHCIISMASSVTDVLEPMVLLKEFGLIAANGDNPRGTVDVIPLFETIEDLQAGAGILDELWKIDLYRNYLLQRDNVQEVMLGYSDSNKDGGYFSANWALYDAELQLVELCRSAGVNVRLFHGRGGTVGRGGGPSYDAILAQPRGAVQGSVRITEQGEIISAKYGNPETARRNLEALVSATLEASLLDVSELTDHQRAYDIMSEISELSLKKYASLVHEDQGFIDYFTQSTPLQEIGSLNIGSRPSSRKQTSSVEDLRAIPWVLSWSQSRVMLPGWFGVGTALEQWIGEGEQATQRIAELQTLNESWPFLPSVLDNMAQVMSKAELRLAKLYADLIPDTEVAERVYSVIREEYFLTKKMFCVITGSDDLLDDNPLLARSVQRRYPYLLPLNVIQVEMMRRYRKGDQSEQVSRNIQLTMNGLSTAVRNSG

SEQ ID NO: 14137 - protein, 184 aa, Hordeum vulgare subsp. spontaneum
MEYQGQQQHGQATDRVDEYGNPVAGHGVGTGMGAHGGVGTGAAAGGGGGHFQPTRAEHKAGGILQRSGSSSSSSSEDDGMGGRRKKGIKDKIKEKLPGGHGDQQHAAGTYGKQGIGMAGTGSTYGQQGHTGMTGTGATGTMATGGTYGQPGHTHMTGTGTHGTDGTGEKKGIMDKIKEKLPGQH

SEQ ID NO: 14138 - protein, 630 aa, Oryza sativa
MASSISSSSITYTLQTALVISSSLLVAADVGGGQSNNHYCPPSSCGDLHNISYPFRLQGDSRDCVAAPRPWYDLSCSNTGKATIQINTRTYYVSSINYTDLSFLVTDATMQDDDSSCPLPPSDHPPYSTDDLLDRTTTDSYGFLDLATSSDSAWACFVNCSRPIQDTTSPWYRPVSCLPTNNSFVYLNEFYGCTIGELQPSCRYLSMIPFDTQHISVSQLQNASYTDIIGFIGKGFRVRFPMDHSSLRPFLFRLMLAPLVVFIFLAHKYWKTRITIDAVEKFLQMQQMIGPMRYAYTDIIAITSHFRDKLGQGGYGSVYKGVLLPGNVHVAIKMLSGNSNCNGDEFISEVSTIGRIHHINVVRLVGFCSEEMRRALVYEYMPRGSLDKYIFSLEKCFSWDKLNEIALGIARGINYLHQGCEMQILHFDIKPHNILLDDNFVPKVADFGLAKLYPRDKSFVPVSAARGTVGYIAPEMISRSFGTISSKSDVYSFGMLLLEMAGGRRNADPNAANSSQAYYPSRVYKQLTRRETCEISDIVDMHELEKELCVVGLRCIQMRSSDRPTMSEVIEMLEGGSDDLQVPPKPFFCDDEQPLGVEPYHLSSDLTAISEAEEDDDDESISLFQSFSYQ

SEQ ID NO: 14139 - protein, 352 aa, Thermus thermophilus HB27
MEGAVIKVIGLGGAGNNAVNRMIEAGLSGVEFIAANTDAQVLAKSLADHRIQLGEKLTRGLGAGANPEIGEKAALEAEDLIAEALEGADLVFITAGMGGGTGTGSAPVVADIAKRLGALTVAVVTRPFSFEGPKRMRAAEEGIKKLKERVDAMVVVQNDRLLSAVDKKMTLKDAFLIADRVLYHGVKGITDVINLPGLINVDFADVKALLEGAGQVLMGIGAGRGENRVEEAAKSAIHSPLLERSIEGAKRLLLNVVGSEELSLMEAAEVVERIREATGHEDVDILYGVTYDERAQDELRVILIAAGFAESTVVPRPARPVDFPTGHVDLTNYDIPAFIRYGDGDYPPRRGN

SEQ ID NO: 14140 - protein, 371 aa, Triticum aestivum
MARRSAPLLRRLVSSAPPLPGHGGGARRTVTYMPRPGDGTPRPVTLIPGDGIGPLVTGAVEQVMEAMHAPVYFESYDVHGDMPAVPPAVIESIRRNKVCLKGGLATPVGGGVSSLNMQLRKELDLFASLVNCANVPGLPTRHQNVDIVVIRENTEGEYSGLEHEVVPGVVESLKVITKFCSERIAKYAFEYAYLNYRKKVTAVHKANIMKLADGLFLESCREIAAKYPSIEYNEIIVDNCCMQLVSRPEQFDVMVTPNLYGNLVANTAAGLVGGTGVMPGGNVGQDHAIFEQGASAGNVGNDNLVEQQKANPVALLLSSAMMLRHLQFPSFADRLETAVKRVIADGKYRTKDLGGTSTTQEVTDAVIANLD

SEQ ID NO: 14141 - protein, 157 aa, Zea mays
MDREHESDEPNLPSVRPSAKCHYAIYRVTQRTFSPLVLQHSPYHTEPTRGARGSYSSLAHTTTHHRHRATELPRVCCALLIDRPIDLGMADWGPVLIGLVLFILLSPGLLFQIPGKGRIIEFGNFQTSGLSILVHAVIYFALLAIFLLAVGVHIYLG

SEQ ID NO: 14142 - protein, 153 aa, Brassica napus
MAPTVMASSATSVAPFQGLKSTAGLPVSRRSNGASLGSVSNGGRIRCMQVWPIEGIKKFETLSYLPPLSTEALLKQVDYLIRSKWVPCLEFSKVGFIFREHNASPGYYDGRYWTMWKLPMFGCTDATQVINEVEEVKKEYPDAYVRIIGFDNM

SEQ ID NO: 14143 - protein, 492 aa, Oryza sativa
MDPTAPNSGDANGGAAADATAPSNTTVTLPPLTLRDVPLLPSAAAATDTIPNPISRHPYFHPPATFYISPGDVSLRHAFFDLASASPSPLVAYRRAGPRAGVAVDPARARAAVVTCGGLCPGLNTVLRELVVGLRELYGVRDVFGVAAGYRGFYGPDADHARLDLAAVDDWHKKGGTVLKTTRGGFDLNKIVDGIVARGYTQCLTSNTFYHDYILLKVYAIGGDGTMRGAVAIFNEFKRRGLNISITGIPKTVDNDIGIIDRSFGFQTAVEIAQQAIDAAHVEAVSAVNGIGLVKLMGRSTGHIALHATLSSRDVDCCLIPEVDFYLEGKGGLFEFLYERIKQKGHAVVVVAEGAGQELIPRTDDQKREQDESGNIVFLDVGPWLKSELGKWWKREHPSELFTVKYIDPTYMIRAVPANATDNLYCTLLAHSAIHGIMAGYTGFVPGPINGNYSYIPLEDVAVAKNPVDVNDHKWAWVRSVTNQPDFMKPKY

SEQ ID NO: 14144 - protein, 613 aa, Agrobacterium tumefaciens str. C58
MFQTFDNKSAPQFGKARVEALRAGFDALGIDGFLVPRADEYQGEYVPECAERLSWLTGFTGSAGIALVTRAQAVVFVDGRYTTQLKSQVDQSVFTGGDLVGAPPSVWLSEHAAQGFRLGIDPWLHTGAELKRLEKALAGKGGSVVLLEKNPLDALWQDRPAEPLEPVVIQPEAFTGILAKEKIASLAETVSAKGADALLVTDPSSIAWIFNIRGNDVPHTPHPLARGIIYADGKADIFLDKRKTGIEAEAYLAQLATQLPPSKIADRLHAIASAKGRVMVDADLTPVALTGAITAAGGSLIEEADPVRLPRARKNKAELAGSAAAHVQDGAAMVEYLCWLDRQQPGSVTEIAAVKALEAARAKVGQAMQNPLKDVSFDTISGAGDHAAIIHYRVTTDTDRILADGEMFLVDSGAQYVNGTTDITRTVAIGTVPEEQRRFFTLVLKGVIAISAARFPKGTRGCDLDPLARIALWKAGADYAHGTGHGVGSYLSVHEGPQRIARLSTQELLPGMILSNEPGYYRPGAFGIRIENLIYVREAEEVAGGDQPMFSFETLTWCPIDRRLVVVSLLTDEELDWLNAYHADVLEKLSPLITDEEVKAWLVAATKPLERAA

SEQ ID NO: 14145 - protein, 169 aa, Zea mays
  misc_feature (134)..(134): Xaa can be any naturally occurring amino acid
MAALPLATAEVCDANPHLIMNGELRALQPIFQIYGRRQVFAGPIVTLKVYEDNVLVREFLEEKGHGRVLVVDGGGSMRCAILGGNPVQQAQNNGWAGILVNGCIRDVDEINGCDIGVRALSSHPMKANKKGMGXEKHVPVNIAGTRICDGEWLYADPDGIRVSRTELTV

SEQ ID NO: 14146 - protein, 268 aa, uncultured marine bacterium
QPNAMGGQEVGGLANQIAAHMDIANDKHRDLVTRFWNAPNIATEDGLKAVDMFAAIERGDIRAVWIMGTNPVVSMPEANGVRQALEKCDLVVVSDLFANTDTAAVADVCLPALGWGEKEGMVTNSERRISRQRKFLTAPGEARADWRIICDVATRMGYSEAFQFSSVDEIFREHAALSAFENNGSRDFNLELAQNLSSQAYEDWQPIQWPFTATSPTGQKRMFSDGQFFTAHKKAKMLPVAAPVTPSQPDQDYPFVLNTGRIRDQWHT

SEQ ID NO: 14147 - protein, 417 aa, Symbiobacterium thermophilum IAM 14863
MTGQEFFRDTQETIRAAVAKLGHSEGVYKILRNPRRTLEVHIAVTMPDGSVETFLGYRSQHAAVFGPYKGGVRFHPNVTKEEVEALAMLMTLKNAVLGLPYGGAKGGVICDPNALPPTAVEQIARGYVRGLRDMIGPDTDIPAPDVNTNSRVMGWMLDEYLKCTNAIDFSVFTGKSLNLGGIEGRTGATGLGIAYVTREACKVRGVDLKGARVAVQGFGNVGRGAAQALTALGARIVGVTDITGGVYKEDGLDVAALTEYARDRGGVAGFPGAEPLTNEQLFALPVDVLIPAALEGQITGKVAETIQAPIVVEGANGPTTPEGAQVLADRGIMQVPDILANGGGVTVSYFEWVQGQQGGLRWSERTVHRRLDRYMTSAFAAVLAYSERYNVSMREAAYLFAVDRLATGMIERGWVPR

SEQ ID NO: 14148 - protein, 106 aa, Rhodopseudomonas palustris CGA009
MAVGKVSDADFENEVLNAQGPVVVDFWAEWCGPCRMIAPALDEIAGAMGDKVKIVKLNVDESPVTASKYGVMSIPTLMIFKGGEMASRQVGAAPKAKLQQWISAAV

SEQ ID NO: 14149 - protein, 651 aa, Pseudomonas aeruginosa UCBPP-PA14
MSQRHGWDIRTRMLAISLGPALLLTLLLTAYFTYSRLQDLRQELTHTGQLIADQLAPAAEYGVIAGNTPVLQKLLQATLDTPHVRFIEVRDRNDNILVYVEQLSGALQNAAPIDIFHSTIQRQRIALASDPLLDGASEGDGQSGEDYLGRVVVGMSNDAFSQRQQEILLKAALLAAFALILTFLVARRLAQRLSAPISTMGQAVEAIQSGDYKTSLPILDDGEIGDLARHINNLASGLDRASREQEQAIGQLISAREEAEQANRAKSDFLAMMSHELRTPMNGVLGMLQLLETTEQTREQAEYTALATESTEHLLKVINDILDFSRIERGALELECIPFNLLELVQGSALVFQHSAQQRGLALELQIQAGLENIEVCGDPTRIRQILVNLLGNALKFTEEGAIHLSLEWQALDHDVLWLTCAVHDSGIGISPERLEHMFDAFQQADSSISRRYGGTGLGLAIARTLAERMGGTLQAESKEGSGSTFTLEIPLPFQQSPAHRQQAAGDAAPIAAGQEILLVEDNPVNQTVIEAMLRSLGYRVTLVADGIQAVRSAERQRYDAILMDCRLPVLDGYSATREIRAQENGRRVPIIALTANALQGDRENCLQAGMNDYLAKPFKRAELQRILQRWIGSQPERPVTSNETGRGEPE

SEQ ID NO: 14150 - protein, 226 aa, Candidatus Blochmannia floridanus
MKRDMKEYLIEPSILAADFSKLGEDVSNVISAGADVLHFDVMDNHYVPNLSIGPMVLKSLRNYGIDIPINVHLMIKPINDRLILDFLEAGATGISFHPESTDHVDRFLQLIKEHGCKTGLVLNPSTDLSCLEYVMHKIDVIILMSVNPGFGGQIFLPEILRKITQTRKLIDNNPYDINLAVDGGINMSNFCKICESGANVFIIGSAIFNASNYHDVIYNFRSMLLY

SEQ ID NO: 14151 - protein, 244 aa, Zea mays
  misc_feature (8)..(8): Xaa can be any naturally occurring amino acid
  misc_feature (213)..(213): Xaa can be any naturally occurring amino acid
  misc_feature (230)..(231): Xaa can be any naturally occurring amino acid
GYFSGSSXKASLEDNKFGTRAIQALRTLRGRTASEKVLADDVEDTIVSIKAAYAGQEAEGNVWEVFEGASLKAFTIGGGLVLFQQITGQPSVLYYAASILQTAGFSAASDAAKVAILIGLFKLLMTGVAVFKVDDVGRRPLLIGGVGGIALSLFLLAAYYKILNDFPFVAVGALLLYVGAYQVSFGPISWLMVSEIFPLRTRGRGISLAVLTXIRSNALVTFAFSPLKEXXRPANIFFLFSVIA

SEQ ID NO: 14152 - protein, 341 aa, Gibberella zeae PH-1
MASIIDTVKNTIAENFGGPAEQLATHQFSLSETPNLSGKVAVVTGGSEGIGYGVTHTLLTHDISKIFILSLSKEVVEGAKKSVAEELGQEKADRTEWVQCDLSNWAEVKKAADQIKDSTDRLDILVNNAGRGIQTYQLSSYGVDQHMATNHFGHVLLTSYLLELLKKTSEKHGIVRIVNQASNAHQGAPSDVKFESLEELNTDLGPNPQYGRSKLANILYTRYFDRNVTKAGSPKILMNATHPGFVSTRQSLEHIHEAYPLAGYAMSVGMEPFKKDQFQGATSAMYAATMTDKSGQYICPPAVPELGNEKSQDEKLGDQLMELTRKIISEKFESFDDRKFY

SEQ ID NO: 14153 - protein, 601 aa, Burkholderia thailandensis E264
MDAGRRHAHAVARPDRQDLTPHGGTAAVCAARRRVVRGPLPAPLAPRPPRPHTAGQYLLRYGIRIVMLDANLKTQLKSYLERITRPVELVASLDDGDKSRELRALLDEIASLSPQVFVVERRDEAERAPSFSVGEPGEAARIRFAGIPMGHEFTSLVLALLQTGGHPVKLDDATIEQIRALDGDYTFETYISLTCQNCPEVVQALNVMALVNPRIRHVMIDGALFQDEVDARRIMAVPTIFLNGETFGQGRSSVREILAKLDSGASRRAAQALAAKPVFDMLIVGGGPAGAAAAIYAARKGISTGVVAERFGGQVLDTMAIENFVSVTETEGPKFATALEQHVKQYEVDVIDVQRADRLVPGSLHEIRLASGAVLKAKAVVLATGARWREIGVPGEREYRNRGVAYCPHCDGPLFKGKRVAVVGGGNSGVEAAIDLAGIVSEVTLIEYGAQLRADEVLQRKLRSLPNVTVLTHARTTELAGDGARLNALVYEDMRTGETKRIALEGVFVQIGLVPNTEWLKGTVELSKHGEIVVDARGATSVPGVFAAGDVTTVPYKQIVIAVGEGAKASLGAFDYLIRSDADAVQPADADAPASAEVVAA

SEQ ID NO: 14154 - protein, 362 aa, Colwellia psychrerythraea 34H
MSNIAILAGDGIGPEVMVEAKKVLNTVASKFDFEITTQDYDIGGAAIDNHGNALPDSTMAGCIESDAILFGSVGGPKWANLPPTEQPERCALLGLRSHFDLFCNMRPATLQPALSSLSTLRSDISEQGFDVLVIRELTGDIYFGEPKGRRGEGEEETGFDSMFYSRREVKRISHLAFQAAQKRNNKVTSVDKANVLATSQLWRQVVEEVAVEYPDVELEHLYVDNAAMQLVRDPNQFDVMLCPNLFGDILSDICAMITGSMGLLPSASLNSDGFGMYEPAGGSAPDIAGLGVANPIAQILSAALMLRYSLNQGAAAKAIEDAVSNALDNGVLTADLLPANERKNAKSTSEVGDYICKQIESA

SEQ ID NO: 14155 - protein, 125 aa, Trichodesmium erythraeum IMS101
MEKSTEKETKQDVPQVTDSSFDKDVLHSDIPVLVDFWAPWCGPCKMVAPVVSEIAQQFKDKVKVVKLNTDENPNTASKYGIRSIPTLMIFKGGQRVDMVVGAVPKTTLASTLEKHLSNEEKQTSK

SEQ ID NO: 14156 - protein, 109 aa, Trichodesmium erythraeum IMS101
MSNTNPVTDASFKEEVLESNIPVLVDFWAPWCGPCRMVAPVVEDISKQYEGQVKVVKLNTDENPNVASQYGIRSIPTLMIFKGGERVDMVVGAVPKTTLANTLDKYIEK

SEQ ID NO: 14157 - protein, 491 aa, Bacillus clausii KSM-K16
MGETTVEVRKVKNYINGKWIESSTSLYEDVVNPATKEVICQVPLSTKADVEYAVEAAKTAFAKWSKVAVPRRARILFNYQQLLQRDKEELARLITIENGKNLTEARGEVQRGIENVEFAAGAPSLMMGDSLPMIATDVEASNYRYPIGVVGGIAPFNFPMMVPCWMFPMAIALGNAFLLKPSERTPLLTEKLADLLTEAGVPDGVFNVVYGAHDVVNGMLEHPDIKAISFVGSKPVGEYVYKKASENLKRVQALTGAKNHTIVLNDADLDDAVTNIAGAAFGSAGERCMACAVVTVEEGIADAFVAKLKAKAESLVMGNGLDDGVFLGPVIREENKNRTIAYIEKGVEEGATLVCDGRSRVSADGYFIGPTIFENVTTDMTIWKDEIFAPVLSIIRVKNLDEGIQIANRSEFANGACLFTTNAAAVRYFRENIDAGMLGINLGVPAPMAFFPFSGWKSSFYGTLHANGKDSVDFYTRKKVVTARYPKPSFD

SEQ ID NO: 14158 - protein, 334 aa, Coccidioides immitis RS
MFSLRHALCRAVCAPYSQLAKSRTITTIPHRSTKLDRIITAATFQQRWLSGKVQSEQLNTPLPYTQEQQKKENGTPSEESSFAISSGSLSGDSSRVNATQTTSDELDSAKATETPVDSRSVGQPRFSIRRPKPDGYIAPKSTIYVGNLFFDVTAGDLKNEFSKCGPVEGVRLLYDYRGVSKGFGYVKFHDVETAEKAVALMHGQLFEGRHLAVNFARVELDKPMNHDPTKPPTRTLYIGNIPFEMTDRDLNELFKDVDNIIDVRVAVDRRTGRARGFVHADFTDIESARKAFTLLSTKTPYGRPLRIDYSHSNIKIQPAGPPKRDDPGATFGSD

SEQ ID NO: 14159 - protein, 136 aa, Chrysanthemum x morifolium
MWHMHESHHKPREGPFELNDVFAIINAVPAIALLNYGFFHKGIIPGLCFGAGLGITVFGMAYMFVHDGLVHKRSQVGPIANVPYLRKVAAAHQLHHTEKFNGVPYGLFLGPKELEEVGGMDELEKEIQRRIKLSKK

SEQ ID NO: 14160 - protein, 123 aa, Zea mays
MVSALRFFTCLVLAVCIVASVDAAISCNTVVGSLGTCYVYLRQGGIVPPSCCRGVRNLNGMAQTTPDRQQACKCVQSFTKSVPGLNQNLASGLPGKCGVSLPYPISISMNCDNVKLSGTHISS

SEQ ID NO: 14161 - protein, 236 aa, Arabidopsis thaliana
  misc_feature (160)..(160): Xaa can be any naturally occurring amino acid
  misc_feature (192)..(192): Xaa can be any naturally occurring amino acid
  misc_feature (199)..(199): Xaa can be any naturally occurring amino acid
  misc_feature (206)..(206): Xaa can be any naturally occurring amino acid
  misc_feature (213)..(213): Xaa can be any naturally occurring amino acid
  misc_feature (219)..(219): Xaa can be any naturally occurring amino acid
MSSYSIASAISRISPLIRFVKPYSTGFSFITCACNSTRRPKRFDQLCVFSMASEARESPANNPGLSTNRDEATKGYIMQQTMFRIKDPKASLDFYSRVLGMSLLKRLDFSEMKFSLYFLGYEDTTTAPTDPTERTVWTFGQPATIELTHNWGTESDPEFXKGYHNGNSEPRGFGHIGVTVDDVHKACERFEXLRVEFAXEPNDGKXEDIAFIXDPDGYXNQDFDLKTIGTTTVNAA

SEQ ID NO: 14162 - protein, 184 aa, Hordeum vulgare subsp. spontaneum
MEYQGQQQHGQATDRVDEYGNPVAGHGVGTGMGAHGGVGTGAAAGGGGGHFQPTRAEHKAGGILQRSGSSSSSSSEDDGMGGRRKKGIKDKIKEKLPGGHGDQQHAAGTYGQQGIGMAGTGGTYGQQGHTGMTGTGATGTMATGGTYGQPGHTGMTGTGTHGTDGTGEKKGIMDKIKEKLPGQH

SEQ ID NO: 14163 - protein, 590 aa, Pseudomonas syringae pv. phaseolicola 1448A
MCGLAGELRFDHQPADLAAVERITHQLAPRGPDAWGFHSQGPVALGHRRLKIMDLSDGSAQPMIDSHLGLSMAFNGAIYNFPELRAELESLGYQFHSGGDTEVLLKGYHAWGADMLPKLNGMFAFAIWERDSKQLFIARDRLGVKPLYLSKTDKRLRFASSLPALLKGGDISGMLDPVALNHYLNFHAVVPAPRTLLAGVEKLPPASWMRIDASGKVEQKVWWTLPYGPHEDEKNLTLEDWRDRVLDSTREAVAIRQRAAVDVGVLLSGGVDSSMLVGLLREVGVEDLSTFSIGFQDAGGERGDEFQYSDLIAKHYGTRHHQLRIQESEIIEQLPAAFRAMSEPMVSHDCIAFYLLSREVSKHCKVVQSGQGADELFAGYHWYPQVDGASDPVAAYRDAFVDRSYAEYAETVQPKWRTANDAAGDFVRDHFAQPGASAAVDKALRLDSTVMLVDDPVKRVDNMTMAWGLEARTPFLDYRLVELSARIPGKFKLPDDGKQVLKEAARLVIPSEVIDRKKGYFPVPGLKHLQGDTLNWVRELLTDSSQDRGLFNPAMVDKLLTNPEGQLTPLRGSKLWQLAALNLWLSEQGL

SEQ ID NO: 14164 - protein, 544 aa, Legionella pneumophila str. Paris
MTKESEIKIPDIGGANQVDVIEILVKEGDQIEVDTPLITLESEKASMDIPSPISGTVTQILVKVGDKVSEGDLIVKAKSDTTTNISSSQEQKTELEKQNSQTRPEEQSVDTKATASTPDSKDIEISIPDIGGANDVDVIDILVKPGMEVEKDQALITLEGDKATMDIPSPYAGKVIEMKIKLGDKVSQGTPILSLKTSGKTETPEIEKSQIKNISEQSIKEIEKPYEELKSEPISINNLEIAESKSILISAGPAVRRLAREFGVDLSLVQGSGRKSRITKEDLQNYIKVRLNEKTTSGGFSLPSNPAIDFSKFGSIETKPLNKIKKLTGANVHRSWITIPHVTQFDEADITDLEAFRKSESESTKNQDYKLTLLAFVCSVVCKALHAYPQFNASLDASGENLIYKKYYNIGIAVDTPNGLVVPVIKNVDKLSVIDIAKEMSRLSTKAREKGLTPIDMSGGCFTISSLGGIGGTAFTPIVNSPEVAILGLSRSTIKPIYDNKEFKPRLMLPISLSYDHRVIDGAEAARFTRFLCDCLGDIRRVLL

SEQ ID NO: 14165 - protein, 303 aa, uncultured bacterium 314
MSDKKQIISASPKVRKFARELGANLYQIHGSQREGRVSENDVRSFIKESLSGEIAKKRTVTPQEYEHSEFGEIDVQPIPRIKKIARSHLEKSWNEIPHVTHHDEADITEMDKFRKTLRDLYTGEKISITPLAFIIRAVVKALKDYPNFNASLDLENGKVIYKKYFHVGIAVDTPHGLMVPKIRDADKKDITALGKELKKVSKLCKELKIDKKEFFGGSITISSLGNIGGSFFTPIINQPEVAILGVGRAETKQVFMDGKYQSRIMLPLSLSYDHRIINGAEGARFCVHLRESLGKDFAYKLAV

SEQ ID NO: 14166 - protein, 303 aa, Anaplasma marginale str. St. Maries
MYAPVVRLGTRGSTLALIQAEEVKAAIAAHFPEVRVDVTKIKTSGDIKVDRPLCDIGGKGLFIKEIEEALLANKIDIAVHSAKDVPGFYSENLDMPCVLKRRSPMDVFISVKYKSLNSLPAGAKIGTSSIRRKVQLLAFRPDLEITPMRGNVDTRIAKVQSGECDGIVLAEAGVDRISARAKITEVLHPDVMLGAVGQGAICVQCRKSDEGIVRMLAKLNDHESFTAVLAERSFMKAVNGSCHTPLAAMARYVDSGLMSMKCMLAHDSRTMVSAERTFPERDAESVGFEMGVMLKDELRLRGV

SEQ ID NO: 14167 - protein, 526 aa, Chlamydophila pneumoniae J138
MERKRFIDCDSTKILQELALNPLDLTAPGVLSAERIKKFSLLGGGFTFSFATERLDDAILAALISLAEERGLHESMLAMQQGQVVNYIEGFPSEMRPALHTATRAWVTDSSFTGEAEDIAVRSRVEAQRLKDFLTKVRSQFTTIVQIGIGGSELGPKALYRALRAYCPTDKHVHFISNIDPDNGAEVLDTIDCAKALVVVVSKSGTTIETAVNEAFFADYFAKKGLSFKDHFIAVTCEGSPMDDTGKYLEVFHLWESIGGRFSSTSMVGGVVLGFAYGFEVFLQLLQGASAMDQIALQPNARENLPMLSALISIWNRNFLGYPTEAVIPYSSGLEFFPAHLQQCCMESNGKSIVQDGRRVGFSTSPVIWGEPGTNGQHSFFQCLHQGTDIIPVEFIGFEKSQKGEDISFQGTTSSQKLFANMIAQAIALACGSENTNPNKNFDGNRPSSVLVSSQLNPYSLGELLSYYENKIVFQGFCWGINSFDQEGVSLGKALANRVLELLEGADASNFPEAASLLTLFNIKFR

SEQ ID NO: 14168 - protein, 464 aa, Agrobacterium tumefaciens str. C58
MTEIGFRTPSTDTTGAQPVSKLATARLALSLIRNPLKALPPEIFSEPAVFTRLGGVMRVHLADPVLIHEALVKNAALLGKGEDVRRALGPALGQGLLTADGDHWKWQRQSVAAAFRHEKLLELLPVMIETARRTQKRWRSSSTADIDIGHEMMRTTFDIIVETMMSGGYGIDIARVEQSITDYLKPTGWTFALAMLGAPEWLPHPGRRKSRAAVDYLRASLATVITGRRKNPTDRPDLVSMLLEAKDPETGRMMSDEEIIDNLLTFITAGHETTALGLAWTFHLLSQNPETERKAVEEIEAVTGGEPVAAEHIANLAYVRQVFSEAMRLYPPAPVITRTALQDFRLGEHDIPAGTVLYVPIYAVHRHTALWDEPERFDPSRFEPEKVKARHRYAYMPFGAGPRVCIGNAFAMMEAVAILAVILQKNHLENRTMASAEPLMRVTLRPQERLMMKITQRQNKSPAV

SEQ ID NO: 14169 - protein, 390 aa, Mycoplasma pulmonis
MSDLENFIPTANIKVIGVGGGGNNSVETMIQAGIQGVEFIVANTDIQALQRSSAPNFIHLGENKRGLGAGANPEVGKKAAEESIVEIKEKLKGADMVIITSGMGGGTGTGASPIIAKIARELGALTISIVTTPFEFEGNLRNKNAQEGIKNLRAVSDSIITISNNKLLEQYGDAPMKDSFLFADTILKHTVKTITDIIAIPAHINLDFADVKTVMKDKGDALIGIGRASGKDRAVKAAIHAISSPIIETSIQGASHTIINITGSANLTLTEVHSAVNVIKNAVGPEMNTIFGATINESIGDEIYVSVIATGLSSSKKFNSEQEIKDEVSSMLKTMEIDLQASETKTILINDPLPKDEKMVLTSLLDRDSKILEKDDSQDDTLPFFLKRNV

SEQ ID NO: 14170 - protein, 191 aa, Hordeum vulgare subsp. spontaneum
MEYQGQQQHGQATNRVDEYGNPVAGHGVGTGMGEHGGVGTGMGAHGGVGTGAAAGGHFQPTRKEHKAGGILQRSGSSSSSSSEDDGMGGRRKKGIKDKIKEKLPGGHGDQQHAAGTYGQQGTGMAGTGSTYGQQGHTGMTGTGATGTVATGGTYGQPGHTGMTGTGTHGTDGTGEKKGIMDKIKEKLPGQH

SEQ ID NO: 14171 - protein, 401 aa, Vibrio parahaemolyticus RIMD 2210633
MTIEILVPDLPESVADATVATWHKQPGDTVERDEVLVDIETDKVVLEVPAPEAGVLEAILEVEGATVLSKQLLAKLKAGAVAGEPTADKTEATEASPDKRHKATLTEESNDALSPAVRRLLAEHGLEAHQVKGTGVGGRITREDIEAHLANAKAAPKADAPAVEAPATARSEKRVPMTRLRKTVANRLLEAKNSTAMLTTFNEVNMKPIMDLRKQYKDQFEERHGIRLGFMSFYVKAVTEALKRYPEVNASIDGDDIVYHNYFDISMAVSTPRGLVTPVLKDCDKLGFADVEKGIKELAIKGRDGKLTVDELMGGNFTITNGGVFGSLMSTPIINPPQSAILGMHKIQERPMAVNGKVEILPMMYLALSYDHRLIDGRESVGFLVTIKELLEDPARLLLDV

SEQ ID NO: 14172 - protein, 221 aa, Galdieria sulphuraria
NSEVKYSTVQNWYSGDENGKGGIYNFVTKRGLCAESNSKISWTQVETGSAITWKYPSCILAGNNSKGEFYSVALTNHYQQADTGSKMIHIGKNSRSKIISKGISTGNSINSYRGKVKVSLNASRARNYSQCDSLLIGNSSEANTFPYIEVYNRSSIIEHEASISKINEEKLFYFMQRGISIEEAISLIVSGFCKEVFTELPLEFALEADKLLGLKLEGSVG

SEQ ID NO: 14173 - protein, 194 aa, Hordeum vulgare subsp. spontaneum
MEYQGQQQHGQATNRVDEYGNPVAGHGVGTGMGEHGGVGTGMGAHGGVGTGAAAGGGGGHFQPTRAEHKAGGILQRSGSSSSSSSEDDGMGGRRKKGIKDKIKEKLPGGHGDQQHATGTYGQQGIGMAGTGGTYGQQGHTGMTGMGATGTMATGGTYGQPGHTGMTGTGTHGTDGTGEKKGIMDKIKEKLPGQH

SEQ ID NO: 14174 - protein, 302 aa, Gibberella zeae PH-1
MEDIELLKLPLAFQNGSARLLTGDLVVRDIERWCDRKADKGGVKPVMAVVYFNTGADAIDYVKIKAHVAARAGVSYWVYEMPVDASTTQVMTQVKKLNKNPRIHGILIQRPLPRQLNEPEVMRSINPIKNIEEYAKGRANNIAADALVRLLTKYGLRESAQQARIQIVGFGNIITKEFIKQMKSQFPYMEVEAPRDSIIISELHRGPGFIKSSMVKSEVSVLVDLGFYVTEKGVLGDVSHVLFDRSSLAIAPTPGGVLPILLWIMMERTIKAKNLTMKEEMQGCYCMAIIERRSMYPGTTSA

SEQ ID NO: 14175 - protein, 290 aa, Vibrio parahaemolyticus RIMD 2210633
MSVLINKDTKVICQGFTGGQGTFHSEQAIAYGTQMVGGVSPGKGGQIHLGLPVFNTVREAVEATGATATVIYVPAPFCKDAILEAIDAGIELIVTITEGIPTTDMIDVKVKLEETGVRMIGPNCPGVITPDECKIGIMPGHIHKKGKVGIVSRSGTLTYEAVKQTTDEGFGQSTCVGIGGDPIPGSNFIDILKLFQEDPETEAIVMIGEIGGTAEEEAAAFIKENVTKPVVSYIAGVTAPPGKRMGHAGAIISGGKGTAEDKFAALEAAGVKTVKSLADIGQGLREVTGW

SEQ ID NO: 14176 - protein, 248 aa, Corynebacterium glutamicum ATCC 13032
MTNGKLILLRHGQSEWNASNQFTGWVDVNLTEQGEAEAKRGGELLVEAGVLPGVVYTSLLRRAIRTANIALNAADRHWIPVIRDWRLNERHYGALQGLDKAATKEKYGDDQFMEWRRSYDTPPPELADDAEYSQANDPRYADLDVVPRTECLKDVVVRFVPYFEEEILPRAKKGETVLIAAHGNSLRALVKHLDGISDADIAELNIPTGIPLVYEIAEDGSVVNPGGTYLDPEAAAAGAAAVANQGNK

SEQ ID NO: 14177 - protein, 558 aa, Arabidopsis thaliana
MAFAVSVQSHFAIRALKRDHFKNPSPRTFCSCFKSRPDSSYLSLKERTCFVSKPGLVTTRYRHIFQVGAETGGEFADSGEVADSLASDAPESFSWSSVILPFIFPALGGLLFGYDIGATSGATLSLQSPALSGTTWFNFSPVQLGLVVSGSLYGALLGSISVYGVADFLGRRRELIIAAVLYLLGSLITGCAPDLNILLVGRLLYGFGIGLAMHGAPLYIAETCPSQIRGTLISLKEQFIVLGILLGFSVGSFQIDVVGGWRYMYGFGTPVALLMGLGMWSLPASPRWLLLRAVQGKGQLQEYKEKAMLALSKLRGRPPGDKISEKLVDDAYLSVKTAYEDEKSGGNFLEVFQGPNLKALTIGGGLVLFQQITGQPSVLYYAGSILQTAGFSAAADATRVSVIIGVFKLLMTWVAVAKVDDLGRRPLLIGGVSGIALSLFLLSAYYKFLGGFPLVAVGALLLYVGCYQISFGPISWLMVSEIFPLRTRGRGISLAVLTNFGSNAIVTFAFSPLKEFLGAENLFLLFGGIALVSLLFVILVVPETKGLSLEEIESKILK

SEQ ID NO: 14178 - protein, 643 aa, Vibrio vulnificus YJ016
MVCISHTNSFTRLRSWIPSMDHNPQSQLKLLVIRGKEQGYLTYAEVNDHLPAEIVDSEQVEDIIQMINDMGIKVVETAPDADDLALSDETNITDEDAAEAAAAALSSVESEIGRTTDPVRMYMREMGTVELLTREGEIDIAKRIEDGINQVQSSVAEYPGTIPYILEQFDKVQAEELRLTDLISGFVDPNADETAAPTATHIGSELAESDLEDEDNTDIDDEDEDEDEDGDSSSDSEEDVGIDPEMALEKFTQLRNSYQNLQLAVNEHGRESAQTAQAHELMLDVFKEFRLTPKQFDHLVNELRTAMDRVRTQERLIMKSAVEIAKMPKKSFIALFTGNESNEEWLDQILASDKPYVEKIKLHEEDIRRSIAKLRAIEEETSLSVNNIKDISRRMSIGEAKARRAKKEMVEANLRLVISIAKKYTNRGLQFLDLIQEGNIGLMKAVDKFEYRRGYKFSTYATWWIRQAITRSIADQARTIRIPVHMIETINKLNRISRQMLQEMGREPLPEELAERMQMPEDKIRKVLKIAKEPISMETPIGDDEDSHLGDFIEDTTLELPLDSATATSLKAATKDVLAGLTPREAKVLRMRFGIDMNTDHTLEEVGKQFDVTRERIRQIEAKALRKLRHPSRSETLRSFLDE

SEQ ID NO: 14179 - protein, 496 aa, Burkholderia thailandensis E264
MDKTTLAYWQDKAASLAIEGRAFIDGAYRDAHGGNTFDCVSPIDGRVLAKVADCGAADVDAAVAAARRAFDEQVWAGLNPRKRKAILLRWAALMRAHLDELSLLETLDAGKPIGDTTTVDVQGAAYCVEWFAEAIDKVGGEVVPADHHLVGLVTREPLGVVAAVVPWNFPILMASWKFGPALAAGNSVVLKPSEKSPLTAIKVAQLAHEAGIPAGVFNVVPGGGEPGKLLALHRDVDCLAFTGSTGVGKLIMQYAGQSNLKRVWLELGGKSPNIVLPDCPDLDRAAKAAAGAIFYNMGEMCTAGSRLLVHRDIKDAFLEKLVAAARAYKPGNPLDPNVSMGAIVDALQLERVLGYIEAGRAEAKLLLGGARVNAASGGFYIEPTVFDTAPDTKIAREEIFGPVLSVITFDSVDEAVRIANDSEYGLGAAVWTANLTTAHEVARRLRAGTVWVNCYDEGGDMNFPFGGYKQSGNGRDKSLHALEKYTELKSTLVRLR

SEQ ID NO: 14180 - protein, 550 aa, Vibrio vulnificus CMCP6
MLKTINPTQTQAWNALTAHFESAQDMDLKDLFAQDAARFDKFSARFGSDILVDYSKNLINEETLKHLFALAKETELSAAIKAMFSGEAINQTEGRAVLHTALRNRSNQPVLVDGEDVMPAVNAVLEKMKSFTDRVIGGEWKGYTGKAITDIVNIGIGGSDLGPYMVTEALAPYKNHLNLHFVSNVDGTHIVETLKKVDPETTLFLIASKTFTTQETMTNAHTARDWFLATAGDQAHVAKHFAALSTNAPAVSEFGIDTDNMFEFWDWVGGRYSLWSAIGLSIALAVGYDNFIELLEGAHEMDNHFVSTELESNIPVILALIGIWYNNFHGAESEAILPYDQYMHRFAAYFQQGNMESNGKYVDRNGNPVTYQTGPIIWGEPGTNGQHAFYQLIHQGTKLIPCDFIAPAVSHNPAGDHHQKLMSNFFAQTEALAFGKNEETVKAELVKAGKNAEEVAAIAPFKVFEGNRPTNSILVKQITPRTLGNLIAMYEHKIFVQGVIWNIFSFDQWGVELGKQLANQILPELADGSEISSHDSSTNGLINAFKAFKA

SEQ ID NO: 14181 - protein, 376 aa, Phytophthora infestans
MADDDVQALVVDNGSGMCKAGFAGDDAPRAVFPSIVGRPKHLGIMVGMDQKDAYVGDEAQSKRGVLTLKYPIEHGIVTNWDDMEKIWHHTFYNELRVAPEEHPVLLTEAPLNPKANRERMTQIMFETFNVPAMYVNIQAVLSLYASGRTTGCVLDSGDGVSHTVPIYEGYALPHAIVRLDLAGRDLTDYMMKILTERGYSFTTTAEREIVRDIKEKLTYIALDFDQEMKTAAESSGLEKSYELPDGNVIVIGNERFRTPEVLFQPSLIGKEASGIHECTFQTIMKCDVDIRKDLYCNIVLSGGTTMYPGIGERMTKELTALAPSTMKIKVVAPPERKYSVWIGGSIQSSLSTFQQMWISKAEYDESGPSIVHRKCF

SEQ ID NO: 14182 - protein, 445 aa, Ustilago maydis 521
MSFARSAAPVRSVLRSAVNQQSRTFTTTNASGITTAAADDGALTSTVTVAIKAGSRYESAPGVAHVLKNYLFKSNQKRSALRLVREAEFYGGVLSTALTKEHLLLTAEFLRGDEDFFVEVLGDVLSKSKFAAHEFNEEALPQVQAEHAQAQSNPAVLGYDSLLQTAYRQRSLGHSLFASPASPVSHRQTVDFAHAAFAKNNIAVLGSGIESNKLSQLVSAHFGDLAATASVSTTAAKYFGGEQRVAFSAPHGAENTRAAHGHFFIGFEGAGHKDASEAANLAVLRSLLGGDSSVKWSNGVSPLSQIAESVSGAQAHAFNLTFSDSGVFGAHVSAPSASVQDAASKVVQALKNVAGGLKDETIQAAIAKAKFERASVLENRTASHELVSAQLLDSANVVTLDDTFAALEAVKANSLSTAAEKLLKSKPTTVAVGDVHLLPYADEVL

SEQ ID NO: 14183 - protein, 487 aa, Brassica oleracea
MVVRSFLPFGSVRLTRPYNKSSLLISCCSSVSKKAETSGTDLKTVVERWPEYIPNKLPDKNYVRVFDTTLRDGEQSPGAALTPPQKIEIARQLAKLRVDIMEVGFPVSSEEEFETIKTIAKTVGNEVDEETGYIPVICVIARSKERDIKAAWESVKYAKRPRIVIFTSTSDIHLKYKLKMTREEVVEMVASSIRFAKSLGFEDIEFGCEDGGRSDKDYICKVFEEAIKAGATTLACPDTVGINMPHEYGKLVRYIKANTPGIDDVIFSAHCHNDLGVATANTIAGICAGARQVEVTINGIGERSGNAPLEEVVMALKCRGAFVMGGVYTRIDTRQIMATSKMVQEYTGLYVQPHKPIVGANCFVHESGIHQDGILKNRSTYEILSPEDVGVVKSQNSGIVLGKLSGRHAVKGRLKELGYEISDEKLNEVFSRFRDLTKQKKRVTDDDLRALVTCGDEIFSSEKLNGTNDNEINRNGYVPSPQISSVV

SEQ ID NO: 14184 - protein, 334 aa, Polaromonas sp. JS666
MSAASQPGNPIAPRKIIIATRESRLALWQAEHVKALLESRLGWQVELLGMTTQGDQILDRSLSKVGGKGLFVKELEVALSEGRADLAVHSLKDVPMDLPDGFALACVLEREDPHDAFVSNQFASLADLPQGAVVGTSSLRRLVLLKALRPDLNIEPLRGNLDTRLRKLDEGHYHAIVLAAAGLKRLGLQARIRGIFAPDDMLPAAGQGALGIEVRADRHDLMQALGTLAHQPTWLAVTAERTVSRAMGGSCSMPLAAYTEGPAAEGSEGMQLHATWGDPATADAPAGQPLAPLVRVQKTAVVRSFAEAEALGEAVAAQLRAGGAVWASNTPSDT

SEQ ID NO: 14185 - protein, 970 aa, Polaromonas sp. JS666
MLACEVQEQVQNQRVEMVISARARKVSENAKDGTPGKTGTRARDNERPLVEDIRLLGRILGDVIREQEGVTAYELIEQVRKLSVAFRRDADQEADKALKKLLKGLSGEQTVSVIRAFTYFSHLANLAEDRHHIRRRAVHERAGDTQEGSIEVALARLRWAGISPKTIATTLAHSFVSPVLTAHPTEVQRKSILDAERDIAQLLTARDDIKALALATNAAKDALTPRELAANEAQLRARVMQLWQTRLLRFSKLTVADEIENALSYYEATFLREIPKLYANLERELGNQPVHSFLRMGQWIGGDRDGNPNVSADTLNYALARQAEVALRHYLTEVHYLGGELSLSAMLVAVSPGMQALAESSPDTNEHRKDEPYRRALTGVYARLAATLKELTGGEAARHAVAPQNAYARAEDFLADLRTIETSLRSNHGEALIAQRLHPLIRAVEVFGFHLATVDLRQSSDKHEEVVAELLAVARIEPRYPSLDEAAKRALLIRLLNDARPLRVISTIYSAHAQSELAIFEAARTARARFGKEAIRHYIISHTETVSDLLEVLLLQKEVGLMHRTLDDKATNDLIVVPLFETIEDLRNAAPIMREYYALPGIAQLVQRSGAEQDIMLGYSDSNKDGGIFTSNWELYRAEIALVELFDQLANSHNIQLRMFHGRGGTVGRGGGPSYQAILAQPPGTVRGQIRLTEQGEVIGSKYANPEIGRRNLETLVAATLEATLLQPTKPATKAFLQAAAELSQASMAAYRALVYDTPGFNEYFFGATPIREIAELNIGSRPASRKASQKIEDLRAIPWGFSWGQCRLTLPGWYGFGAAIEKMLDAGGTPATRKEALALLQKMYKQWPFFRTLLSNMDMVLAKSDLALASRYAELVADARLRKKVFTAIEAEWHRTAEALTLITGEKQRLAGNAALQRSIRHRFPYIDPLHHLQVELVRRYREGKADQKVQTGIHISINGIAAGLRNTG

SEQ ID NO: 14186 - protein, 311 aa, Candidatus Blochmannia floridanus
MQAKILRIATRKSPLAICQACYVCNKLKHYHPHIQTELIPIITTGDTSLHTVSKTNKIKKGAFIKELEYALIEHRADIAVHSMKDVTVLLPKELIIPVLCKRHDPRDAFVSIQYPNIHSLPTGSIIGTSSLRRQCQIRAQRSDLILHDLRGNINTRIKKLHQGQYNAIILAVAGLTRLKLTKYIQTYIDPSELLPAMGQGVIAIECRINDINTISLLSPLYHKETSLCIKSERAVTTYLESYCRLPIASYAEIQNNQIWLRALIGLPDGSIIIRTEGIASLDKAEELGLNLAKDLLIQFKKNTHFDINSIK

SEQ ID NO: 14187 - protein, 345 aa, Mycobacterium sp. JLS
MPIPNWPLTVADVVAETADAVTIVFDPPNGCDVGYRPGQFLTLRVPSERTGFVARCYSLCSSPDTDKRLAVTVKRTAEGYASNWLCDNVRSGDEFECLPPAGVFSPDHLDRDLLLIAGGSGITPMMSITKSVLAQSHGRVVLIYANRDPDAIIFAAALRELVAEHPDRLTVIHWLESVQGLPNDATLTPLLAPFADHDVFICGPAPFMKSARSAIEGLGTPRTQIHIENFVSLSGDPFVDRPVSVDQIGDSADDPLTAEVVVELNGSTHTLTWTPKDTLIDLLVDQGIEAPYSCREGDCGTCQCVLIDGKVEMDTHGALDDDDIADGIVLGCQARPASERIRIEF

SEQ ID NO: 14188 - protein, 184 aa, Zea mays
MAAGAGAGASAPVAWLLAAAVAAAALAASASAQSGCTTTLISLYPCLNYISGNVSTPPPSCCSQLASVVQTSPQCLCAALSSDSSSLGGVTIDRTRALQLPQACSVKTPPASKCNSVGGGSAPGAATPAAPSSGVPATAAAGTGSGSKATPTAPFLTSGGASVRGAVSLALAFAAVAVYAISAA

SEQ ID NO: 14189 - protein, 393 aa, Deinococcus radiodurans R1
MAGIFMTDAPPPLIPARSWAIIDSTLREGEQFARGNFGTDDKVEIARALDAFGAEYIEVTTPMVSEQTRQDIRKLTGLGLRAKFLTHVRCHMEDVQRAVDTGVDGLDLLFGTSSFLREFSHGKSIAQIIDTAGEVIGWIKTHHPELEIRFSAEDTFRSEEADLMAVYSAVSELGVHRVGLADTVGVATPRQVYTLVREVRKVIHEGCGIEFHGHNDTGCAVSNAYEAIEAGATHIDTTILGIGERNGITPLGGLLARMFTFDPQGLIDKYNLELLPELDRMIARMVDLPVPWNNYLTGEFAYNHKAGMHLKAIYLNPGAYEAIPPGVFGVGRRIQAASKVTGKHAIAYKARELGLHYGEDALRRVTDHIKSLAEQDELDDAHLEQVLREWVSA

SEQ ID NO: 14190 - protein, 284 aa, Streptococcus thermophilus
MAIIMDGKALAVNMQEQLQEKVARLKEKEWIVPGLVVIMVGENPASQVYVRNKERAAKKAGFHSKTVNLSESISEEELIEVIEKYNQNPLFHGILVQLPLPNHINEMRILLAIDPKKDVDGFHPMNTGNLWNGRPQMVPCTPAGIMEILREYNVELEGKTAVIIGRSNIVGKPMAQLLLEKNATVTLTHSRTPHLAKVCNKADVLIVAIGRAKFVTEEFVKEGAVVIDVGINRDEEGKLCGDVDFDQVKEKVSMITPVPGGVGPMTITMLMEQTYQAALRSLKG

SEQ ID NO: 14191 - protein, 154 aa, Synechocystis sp. PCC 6803
MEVQFREVNPFDFWIWLEFETNPAPAEQQYVEELFASWFYLGKLGGFNAENLQVQDTGIDLSYLDYDSANLSSSMMSPMHNMADFQYQDHWGRCWFDLGTSDLIALDVLINALYQLSLDYVPIRRLIVGGINEDWPVGDRQDDRFDQFEDFDHN

SEQ ID NO: 14192 - protein, 113 aa, Candidatus Blochmannia floridanus
MDQPILCLTDSNFSDHVSDPINIENNVLFLVDFWADWCNPCKIIAPIIEEIANEFNDKIKVIKLNIDNNPITTKHYGIKSIPTLLLIKKGVVLSTQVGLISKNQLRDFINTYL

SEQ ID NO: 14193 - protein, 379 aa, Arabidopsis thaliana
MTTICDLPRDLVARILSRVPLTSMRRVRFTCKRWNTISKDPSFAKTHFGKAARQFIMMSQSRVSLMSVKLHGDGKLTSLNNLDQVEISKVFHCNGLLLCLTKDKTRLTSLVVWNPYLGQTRWIKPRHAFHRLDVYALGYDKNLKNHKILRFVDSYEPAVKHSIIEHEIFDLKSNAWRVLDATPDWEIDSYQRGVSLKGNTYFFAKEKIVVEGDDVVVIEDFKDFLICFDFTKTVTLSSVREEQLAVLYQQDTCLMEIWVTNKIEPDVVSWSKVFLAVDMEPLTGSFIPFAFFAGSFFIDEEKKIAVVFDKDQEEINDRAYLIGENGYYKEVDLGYMNGYYQQQVDPRGPDPVFPLVCSYSPSLVTIPQGTRGKRKERDY

SEQ ID NO: 14194 - protein, 302 aa, Staphylococcus epidermidis RP62A
MSVFIDKNTKVMVQGITGSTALFHTKQMLDYGTQIVAGVTPGKGGQVVEGVPVYNTVEEAKNETGANVSVVYVPAPFAADSIIEAADADLDMVICITEHIPVVDMVKVKRYLQGRKTRLVGPNCPGVITADECKIGIMPGYIHKKGHVGVVSRSGTLTYEAVHQLTEEGIGQTTAVGIGGDPVNGTNFIDVLKAFNEDSETKAVVMIGEIGGTAEEEAAQWIKENMNKPVVGFIGGQTAPPGKRMGHAGAIISGGKGTASEKIKTLNDCGVETADTPSEIGTTLIDAAKKAGIYEELLTIKK

SEQ ID NO: 14195 - protein, 319 aa, Geobacillus stearothermophilus
MKRIGVLTSGGDSPGMNAAIRSVVRKAIYHGVEVYGVYHGYAGLIAGNIKKLEVGDVGDIIHRGGTILYTARCPEFKTEEGQKKGIEQLKKHGIEGLVVIGGDGSYQGAKKLTEHGFPCVGVPGTIDNDIPGTDFTIGFDTALNTVIDAIDKIRDTATSHERTWVIEVMGRHAGDIALYSGLAGGAETILIPEADYDMNDVIARLKRGHERGKKHSIIIVAEGVGSGVDFGRQIQEATGFETRVTVLGHVQRGGSPTAFDRVLASRLGARAVELLLEGKGGRCVGIQNNQLVDHDIAEALANKHTIDQRMYALSKELSI

SEQ ID NO: 14196 - protein, 374 aa, Methanosarcina mazei Go1
MFRFADELGPFKIIHIYEPSIDLKAVLVVDNIARGPALGGVRIAPDVSAEECFRLARAMTLKNAAADLPYGGGKIVVYGDPKMPFEKKSQLLRALAGALRYTEEYIFAPDMGTDEICMACIKDEIGRVVGLPCEMGGIPLDEVGATGWGLFNATEVALKYCDFELKGARVVIQGFGAVGKHAARFLVRKGAVLVGVADSRGAVHNPEGLDVDSLIALKNEGKNVFEYPEGKKLASDEIVSVPCDIWIPAARPDVINGNNVHLLDTKLVVEGANIPLTGEAEKILYDKGILYVPDFIANAGGVICAASEHQKTTRSIVFGLIEEKVRSNTEQVLEASKTRGILPREAAFELAIKRVNRAMKYRRWSIFSSAPGFV

SEQ ID NO: 14197 - protein, 335 aa, Mycobacterium tuberculosis CDC1551
MTAPPVHDRAHHPVRDVIVIGSGPAGYTAALYAARAQLAPLVFEGTSFGGALMTTTDVENYPGFRNGITGPELMDEMREQALRFGADLRMEDVESVSLHGPLKSVVTADGQTHRARAVILAMGAAARYLQVPGEQELLGRGVSSCATCDGFFFRDQDIAVIGGGDSAMEEATFLTRFARSVTLVHRRDEFRASKIMLDRARNNDKIRFLTNHTVVAVDGDTTVTGLRVRDTNTGAETTLPVTGVFVAIGHEPRSGLVREAIDVDPDGYVLVQGRTTSTSLPGVFAAGDLVDRTYRQAVTAAGSGCAAAIDAERWLAEHAATGEADSTDALIGAQR

SEQ ID NO: 14198 - protein, 738 aa, Saccharomyces cerevisiae
MHKERPLNKASMIRSPVDEIYMEQTQTAEGTDLLIGDEKTNDLPFVQLFLEEIGCTQYLDSFIQCNLVTEEEIKYLDKDILIALGVNKIGDRLKILRKSKSFQRDKRIEQVNRLKNLMEKVSSLSTATLSMNSELIPEKHCVIFILNDGSAKKVNVNGCFNADSIKKRLIRRLPHELLATNSNGEVTKMVQDYDVFVLDYTKNVLHLLYDVELVTICHANDRVEKNRLIFVSKDQTPSDKAISTSKKLYLRTLSALSQVGPSSSNLLAQNKGISHNNAEGKLRIDNTEKDRIRQIFNQRPPSEFISTNLAGYFPHTDMKRLQKTMRESFRHSARLSIAQRRPLSAESNNIGDILLKHSNAVDMALLQGLDQTRLSSKLDTTKIPKLAHKRPEDNDAISNQLELLSVESGEEEDHDFFGEDSDIVSLPTKIATPKNWLKGACIGSGSFGSVYLGMNAHTGELMAVKQVEIKNNNIGVPTDNNKQANSDENNEQEEQQEKIEDVGAVSHPKTNQNIHRKMVDALQHEMNLLKELHHENIVTYYGASQEGGNLNIFLEYVPGGSVSSMLNNYGPFEESLITNFTRQILIGVAYLHKKNIIHRDIKGANILIDIKGCVKITDFGISKKLSPLNKKQNKRASLQGSVFWMSPEVVKQTATTAKADIWSTGCVVIEMFTGKHPFPDFSQMQAIFKIGTNTTPEIPSWATSEGKNFLRKAFELDYQYRPSALELLQHPWLDAHII

SEQ ID NO: 14199 - protein, 491 aa, Sinorhizobium meliloti 1021
MALTPALTRHIRRPKIFASLDEVTRSSGQPAGPVFDVSNPSTGELLATLPDMGIDDARTAIDAAALAQPLWAGKPAKDRSIILRRWHDLIVEHADDLAAILTAEMGKPVGEAKGEVLHAASYVEWYAEEAKRVYGETFPAPANDRRMLVIKQPVGVVGTITPWNFPASMVARKISPALAAGCTIVLKPAEQTPLVAGAMFVLAEKAGFPEGVLNLLYASEGAPIGRELCGNPKVRKISFTGSTEVGRLLMRQCSDQIKKVSLELGGNAPFIVFDDADIDEAVDGAVQAKFRNAGQTCVSANRIYVQSAVHDAFAEKFVTRVRELTVGDGFAPDVAIGPMIDAHAIDKIEAHVADAVAKGAQVRSGGSRIGTTGTFFEPTVLTGISHDMRIAQEETFGPIAPIIRFETAEQVVAEANDTIYGLAAYFYAENLKRVWHVAEALEYGMVGINTGRMSSEAAPFGGIKQSGIGREGSRHGLEDYLEMKYLCMGNI

SEQ ID NO: 14200 - protein, 617 aa, Zea mays
MSSSVRHGSSRGQAWIPLLSPRVSVVLTMRSVSRARFCTTGLPSDVVFEVHDMTFHLHKFPLMSKSLKIHRMLSEQEDQRPTRGRRQRRRQPYCIAFPDFPGGPGTFEAAAKFCYGVRVDLTPWNVAPLRCAAEYLEMTEDHAEDNLAARAEAYLDQAVLRHPGDATKALKSCEELLPLAEDLGIVSRCVEAIAARSSSASRSWFDDLAVLGLRMYKRVMAAMAARGDVRAEARESCLVSYARGTIPGLSRSMRRRLASAPVSSEVEQKELLEAVVASLPADKCSGRVVTAKFLFALLRTAHILRASDAARAALERKAATQLQQAALEDVLIPSYSGTAETLYDVDCVQRIVRYFLAEEELGGEASSSAAIEEEEAVAVAAARPSAVVMVQVGKLVDNYLAEVASDANLKPAKFCDLALSLPDHARIYDDGVYRAVDIYLKAHPRLTAEERDRVVGVVDCRKLTVEACTHAAQNERLPLRAVLQVLFFEQLQLRRAIAGTLLAPSAGAAPREAAAWRGATALAQDSQVLRLDMDSMASRVQDLERECSSMRRAIKKIDGRGGSGSGSRSPGGRSADGSRPAAGGWRARHGCKFSTQVCDSHARNVVASRASRMGMSP

SEQ ID NO: 14201 - protein, 191 aa, Hordeum vulgare subsp. spontaneum
MEYQGQQQHGQATNRVDEYGNPVAGHGVGTGMGEHGGVDTGMGAHGGVGTGAAAGGHFQSTRKEHKAGGILQRSGSSSSSSSEDDGMGGRRKKGIKDKIKEKLPGGHGDQQHAAGTYGEQGTGMAGTGSTYGQQGHTGMTGTGATGTVATGGTYGQPGHTGMTGTGTHGTDGTGEKKGIMDKIKEKLPGQH

SEQ ID NO: 14202 - protein, 320 aa, Xylella fastidiosa Ann-1
MNHTSDTALLIVNLGTPEAPTAAAVRRYLGEFLSDRRVVSIPPLFWKPLLHTVILPIRGPRSARKYAKVWLQEGSPLSVYTRRIAEGLTQHLPDWRVAWAMRYGAPALTKALDALQAQQVRRIVILPLYPQYSTTTTASVQDVVEAWCKRTPQVQVECIQDYAEDPAWVAAVAASIRRHWQAHGRSEKLMFSFHGLPQRVANNGDPYPQRCQVSASLIAAALNLNESEWVLGYQSRFGAERWLQPYAEPTLWALAESGIRRFDLVCPGFSVDCLETLEEVALGFSETLAARGATMRYIPCLNDDPAHVQALAGLAQRALL

SEQ ID NO: 14203 - protein, 394 aa, Thermobifida fusca YX
MLSTQSADIVRATLPVVGAHLDEITSRFYSTMFSERPELLDGLFNRGNQANGEQRRALAGSIAGFASALLANPDERPDALLARIAHKHAAVAVTDDQYVIVHKYLFGAIADVLGDAATPEVIAAWDEVYWLMGGALIALEARLYAEKNADNGRTWREWTIVDRREETPDVFSLVLRPSDGGPLPEARPGQYVSVLHRMPDGIRQIRQYSISGGDEHTRRITIKRVRGTEHTPEGEMSALLYATAKAGDTLTVSAPFGDVVLTDSDRPLVFATAGIGCTPIVGMLNYLAATGATRRILALHADRSRAEHALWQETSTLIARLPHAQYVVWYEEGDGGLPGQMDLTGLEIPADAEVYLCGPLPFMREIRTQFLAAGVPAKDIHYEVFGPDLWLPAD

SEQ ID NO: 14204 - protein, 410 aa, Thermobifida fusca YX
MNRTASPIPLDDIDEALKAIAAGRPVVVVDDADRENEGDLVFAADAATPELLAFMIRHTSGVVCVPMLGEDLDRLNLPLMTPRNEDRLHTAYTVTVDARTGVHTGISAADRARTIRLLADEASEPGDFVRPGHIFPLRYRPGGVLVRRGHTEAAVDLARLAGRRPAGVIAEIVNDDGTMARLPELRAFADEHGLALVSIEQLVAYRRRTETLIERVVETRIPNRYGEWRAVGYRSVVDDSEHVALVYGDLGTGERALVRLHSECLTGDAFGSYRCDCGDQLDAAMARIAQTGAGVIVYQRGHEGRGIGLLHKLRAYRLQDQGADTVDANLQLGLPADAREFGTGAQILLDLGVRSVRLLSNNPDKAAGLAAHGVVVDERIPLPAAITPDNLRYLRTKRDRMGHDLPGLAS

SEQ ID NO: 14205 - protein, 194 aa, Hordeum vulgare subsp. spontaneum
MEYQGQQQHGQATNRVDEYGNPVAGHGVGTGMGEHGGVGTGMGAHGGVGTGAAAGGGGGHFQPTRAEHKAGGILQRSGSSSSSSSEDDGMGGRRKKGIKDKIKEKLPGGHGDQQHAAGTYGQQGIGMAGTGGTYGQQGHTGMTGMGATGTMATGGTYGQPGHTGMTGTGTHGTDGTGEKKGIMDKIKEKLPGQH

SEQ ID NO: 14206 - protein, 119 aa, Triticum aestivum
MAFASKIITCLLILTIYIAAPTESHITCGTVTSTMTQCISYLTNGGPLPSSCCVAVKSLNQMAQTTPDRRQVCECLKSVGKEIKGLNIDLVAALPTTCGVSLSYPIGFNTNCDSISIAV

SEQ ID NO: 14207 - protein, 307 aa, Bifidobacterium adolescentis
MTLFIEDGAPVIVQGMTGHQGMTHTARMLKAGTNIVGGVNARKAGLDVTFPEAKNGEDATIHVFANCSEAIEATGAKASVVFVPPRFAKDAVVEAIEAGIELIVVITEGIPVADSAYFVELALRKGVRIVGPNCPGLLTLPSSKDAKGCNLGIIPDGIVSRGPLGLVSKSGTLTYQLMGELSDIGFTACLGAGGDPIVGTTLQEALEAFENDEATKAVVMIGEIGGSAEQDAAKWASEHMTKPVVAYIAGFTAPEGKQMGHAGAIVSGGKGTAQDKKEALEAVGIRVGRTPGQTAEIMREVLASQSL

SEQ ID NO: 14208 - protein, 317 aa, Methanosarcina acetivorans C2A
MIIGTRGSQLALAQTENVARLLKERGVETSIKIIKTSGDRFTDRPLHAVSGGVGAFVRELDDVMLAGEIDIAVHSMKDMPTIRPEGLPTVAVLKRDTPFDILLTYDGTTLDELPEQAIIGTSSLRRTAQIRRYRPDLITQELRGNIDTRLRKLKEGQYDGILLAKAGLERMGWEIDGEILSPDFFCPSPNQGTVAVVTRADPEIEAAVSGLDHTESRIVTEIERILISELGGGCTTPIGSYAELTSDKQEIHIRAEVLSLDGKEDVRIDEFIPMLGGLEKARELGHRLVEMGGKRLAEEALLQISRNACGTENSFDY

SEQ ID NO: 14209 - protein, 106 aa, uncultured proteobacterium
MATVAATDATFDSIVKDSDLPVVVDFWAEWCGPCKQIGPSLEELSVEMEGKIKVVKVDVDSNPSAAAALGVRGIPALFLFKDGQVISNKTGAAPKAALKSWIDDAI

SEQ ID NO: 14210 - protein, 238 aa, Chlorella sorokiniana
MTQIMFETFNVPAMYVAIQAVLSLYASGRTTGIVLDSGDGVSHTVPIYEGYALPHAIQRLDLAGRDLTDFMMKILTERGYSFTTTAEREIVRDIKEKLGYVALDYEQELQTSLNSSTLEKTFELPDGQVITIGSERFRCPEVLFQPSMMGLESAGIHETTFNSIMKCDVDIRKDLYSNIVLSGGTTMFPGIADRMGNEITKLAPSSMKIKVVAPPERKYSVWIGGSILSSLSTFQQMW

SEQ ID NO: 14211 - protein, 583 aa, Agrobacterium tumefaciens str. C58
MTIQLQKPDITELKPRITVFGVGGGGGNAVNNMITAGLQGVDFVVANTDAQALTMTKADRVIQLGVNVTEGLGAGSQPEVGRAAAEECIDEIIDHLNGTHMCFVTAGMGGGTGTGAAPVVAQAARNKGILTVGVVTKPFHFEGGRRMRLAEQGIEELQKSVDTLIVIPNQNLFRIANDKTTFADAFAMADQVLYSGVACITDLMVKEGLINLDFADVRSVMREMGRAMMGTGEASGPGRAMQAAEAAIANPLLDETSMKGAQGLLISITGGRDLTLFEVDEAATRIREEVDPDANIILGATFDEALEGLIRVSVVATGIDRVAGIGEQNIAEMRAAAAKPLIRPSAAVAPAPAAVQPAHAVSQAPKTVDQIAQTIRSAEAEMERELGFAAHQQPSQDFRPQSKLFASSPAEAPAALRPAQPVQQAAPAPVAQAPVYHAPEQVAVPAPRMQQPQAPVYQEPAPVARQPEPVRMPKVEDFPPVVKAEMDHRDRATPVAQEERGPMGLLKRITNSLGRREEEEVPSDMMDAPSMAPQRRAPLSPEASLYAPRRGQLDDHGRATPSSSSHHDDDQLEIPAFLRRQSN

SEQ ID NO: 14212 - protein, 491 aa, Cytophaga hutchinsonii
MSKVLPKRSDDYSLWYNELVKRADLAENAPVRGCMIIKPYGYSIWEKMQAVLDKMFKETGHSNAYFPLFIPKSYLSKEASHIDGFAKECAVVTHYRLKNDENGKGIIVDPEAKLDEELIVRPTSETVIWNTYKTWIQSHRDLPLLINQWANVVRWEMRTRLFLRTTEFLWQEGHTAHATKQEAIVETEQMMNVYATFAQNFMALPVHRGIKSANERFAGAEETYCIEALMQDGKALQAGTSHFLGQNFAKAFDVKFASKEGSLEYVWGTSWGVSTRLMGALIMAHSDDEGLVLPPLLAPIQVVIVPIFKTAEQLDLIEATLKPILAALKAKDISVKFDHSDKYSPGFKFAEYELKGVPLRVAIGARDIENGTVELARRDTKEKTTVPQEGLADTIEKLLQEIQENIYKKAFAYREANTFVADDYTTFKTMLDETPGFILAHWDGTPETEEKIKEETKATIRCIPLDVTSEPGICMVTGKPSAQRVLFARAY

SEQ ID NO: 14213 - protein, 420 aa, Zea mays
  misc_feature (288)..(288): Xaa can be any naturally occurring amino acid
AFHEEPRNSTGIREQILDILTFETLWFCVIDQLGSSNNVVKSVLINIIVRIIPFVLWGLKSAHVICRFVLMPLAVFVFLAYKYWKTRITIDAVEKFLRMQHMLVPMRYAYTNIIAITSHFRDKLGQGGYGTVYKGVLQPGEVHVAIKMLGNSNCNGDEFISEVATIGKIHHVNVVRLIGFCSEENIRALIYEFMPRGSLDKYIFSSEKTFSWDKLNEIALGIARGLNYLHHGCDMQIVHFDIKPHNILLDSNFVPKVADFGLAKLFPRGDTFVPLSAMRGTIGYIAPXVSRSFGVISSKSDVYSFGMLLLEMTGGRRNADPHAGSSSQAYYPSLVYSQLSQGDVGGISKGVDMHELEKKLCIIGLWCIQMKTQDRQTMSEVIEMLEASVDGIQMPPRPFFCDDEGDSSYSAISELDTIEE

SEQ ID NO: 14214 - protein, 132 aa, Schizosaccharomyces pombe
MSGGKSGGKAAVAKSAQSRSAKAGLAFPVGRVHRLLRKGNYAQRVGAGAPVYLAAVLEYLAAEILELAGNAARDNKKTRIIPRHLQLAIRNDEELNKLLGHVTIAQGGVVPNINAHLLPKTSGGTGKPSQEL

SEQ ID NO: 14215 - protein, 338 aa, Sordaria macrospora
MVVKVGINGFGRIGRIVFRNAIEHDDIQIVAVNDPFIEPKYAEYMLRYDSTHGNFKGTIAVEGSDLVVNGKKVKFYTERDPSAIPWSETGADYIVESTGVFTTTEKASAHLKGGAKKVIISAPSADAPMYVMGVNNESYDGSANVISNASCTTNCLAPLAKVIHDNFTIVEGLMTTVHSYTATQKTVDGPSSKDWRGGRTAAQNIIPSSTGAAKAVGKVIPDLNGKLTGMSMRVPTANVSVVDLTVRIEKGASYDEIKEVVKKASEGPLAGILAYTEDEVVSSDMNGNPASSIFDAKAGISLNKNFVKLVSWYDNEWGYSRRVLDLISYVAKVDASKA

SEQ ID NO: 14216 - protein, 127 aa, Azoarcus sp. EbN1
MRILHTMLRVGDLDRSIAFYTEVLGMRLLRRQDYPEGKFTLAFVGYGDEADNAVIELTYNWEVSSYDLGNGFGHIALAVPDARRACDDIRARGGKVVREAGPMKHGNTVIAFVEDPDGYKIELIERS

SEQ ID NO: 14217 - protein, 349 aa, Deinococcus radiodurans R1
MSKMDQLRPVLGRAGVDALWVSAPANVRWLSGFTSAEDGKVLVSPDGATLYTDARYTVQAQEESSLPQYIARPPATYEHAADTVRGLRVGFEAESLTVAELEDLRQAWPNSTLVALRGTLGGLRAVKTPEEIGAIRAAQDLADRVYTEVRPMIRAGVRELDVAVEIETRLRRAGGESAFELIVASGPNGAKPHGHASKRVIEDGDLVTIDMGARLGGYNSDMTRTVAVGTPSAEMKRVYDAVLEAEEAAIAAIRPGVRAADLDKLARDLLTRHGLGEAFAHSLGHGVGLEVHEGPGLRGTSQDVLEAGMVITIEPGAYLPGVGGVRIEDLILVTEDGYEVLSHSAKESV

SEQ ID NO: 14218 - protein, 451 aa, Solibacter usitatus Ellin6076
MRPRTHMNRYLLKSTIVAALGGLLFGFDTVVISGATSTLSDVYHLTPMLLGFTVASALLGTVLGSMVAAAPSDRYGRRQCLQALAVLYVVTAIGCAAAWNWPAFVVFRFIGGLAIGGSSVIGPMYIAEIAPAAKRGRLVGLFQFNIVAGILIAYLSNYFVGTLALGPEEWRWKLGLAALPAVLFFVTLFGIPQSPRWLIRRGFIAEAREIFRRIGEPDPDREVADVVRSVESEDRTKVEPLFQHKYRRPIFLAIAIGFFNQLSGINAILYYLNDIFKSAGFDKVSSDLQAVAIGGTNLLFTMIAMSLIDRLGRKKLLLTGAAGTAVCLAGVAVIFSTGQGEHLLVWLLIGFIGFFAFSQGAVIWVYLSEVFPNLVRAKGQSLGSFTHWIMNAIIAFTFPLVAALSRPAPFVFFAAMTVVQFVVVLFLFPETAGITLEDMEKQLERKASSGV

SEQ ID NO: 14219 - protein, 301 aa, Deinococcus radiodurans R1
MGILVDKNSKVIVQGMTGSEGAKHSRAMKEFGTQVVAGVTPGKGGQDFEGWPIYNSVAEAKEKHGANVSIIFVPPAGAADAVLEAAHAGIPLIVLITEGVPTVDMMRAVQEVKELDAHSKANGGQGVRLIGGNCPGLVTNGEAKVGIMPNRIYTNPGRIGLISRSGTLTYEAAKLLNDAGMGTSTTVGIGGDPVIGTTFADVLPMFEADEGTDAVVVIGEIGGADEEAAAEYIKNNMKKPVVAFISGRSAPAGKRMGHAGAIIMGDVGTPESKLAAFKAANVPVADTMPEIIDLVKQALNK

SEQ ID NO: 14220 - protein, 573 aa, Burkholderia thailandensis E264
MKRTRRARRRTSARSARSDAPYSPAQPGRVPAAPPNLPICANPPRSRVVTLVRPIRAAMSGAGRPIEPQHETHMTQTDLVAVADTVRAFTKREFGIFIDGAMRAAHSPRRLDVYDPATGERLSRVPDADAHDVDAAVASAKRAFDARVWSGLRPADRERVLLKLADVLEAHAEELAQLETLNQGKSILVSRGVEVGATIEYVRYMAGWATKITGQTLDVSIPFPPGARYTAYTRKEPVGVVAAIVPWNFPLMIAVWKLVPALAAGCTVVLKPSPETPLTALRLAELALEAGVPAGVFNVVTGGRECGAALAGHPSVRKISFTGSTATGKLVGAAAVQNMTRFSLELGGKNPIVMLDDVDVDAALGGVAAGAFFNQGQVCAAASRIYVHRSKFRRLAQGLADVAAAMRLGPGLDPAAQINPLVSAHHRDKVVQHIEVARREGLTFLTGGTRADDLPGYFVRPAVIADAAHDSAIVRDEVFGPVVVVLPFDDPAEAVRLANASPYGLAASLWSNDLKAVMDLVPQIEAGTVWVNCHIPLDPSMPFGGYKQSGIGREFGQYAIEGFTETKSVCIAH

SEQ ID NO: 14221 - protein, 354 aa, Symbiobacterium thermophilum IAM 14863
MNDYEPGFEQLACIKVIGVGGGGNNAVNRMISAGLQGVEFIAVNTDAQALKSAQAPTRLQIGAKLTKGLGAGADPEIGNRAAEESREEIAAALRGADMVFVTAGMGGGTGTGAAPVVAEIAKELGALTVGVVTRPFTFEGKKRAMQADKGIQNLRQKVDTLITIPNDRLLQVVDKKTSLMEAFRVADDVLRQGVQGISDLIAVPGLINLDFADVRTIMSNTGSALMGIGVGRGESRAADAARAAISSPLLETTIDGAKGVLLNITGGPDLGLMEVNEAAEIIAQAADPEATIIFGAVIDESIQDEIRVTVIATGFGDGDFPAWGRRRAGQNAVGEVKPMVDELDIPAFLRRKPQ

SEQ ID NO: 14222 - protein, 231 aa, Methanosarcina mazei Go1
MFGREAILLKSTIPEKNAIIQRDGETYVIAPRTPGGIVDPATLRKIADVAEKYGAATLKMTSEQKMAIVGLKEEDIDAAWADLGMDAGIVAGPFVKAVKFCPGTTFCRKGQQDAVSLGMKLEARYRGVKLPYMMKMAVSGCPSSCSEPVIKDVGVMGTATGYTLMVGGSAGLKPRLADVVAKGLSEDEVLAAVDRIVEFFKNYGENRKRLGTIIDKIGLEEFKKEVGLWEK

SEQ ID NO: 14223 - protein, 295 aa, Parvularcula bermudensis HTCC2503
MGARLIDGKAQAAIVRAKVKVAAGELAARLGRPPCLAVVLVGADPASEVYVRNKVKLTKAVGMTSIERRLPETIDQATLDATLTDLNENEEVDGILLQMPIPAHLDTDRALSLIDPAKDVDGLTPISAGALVLGRAGLVPCTPQGAMILIQSVLGPDLSGRTAIVLGRSILVGKPLSLLLQSANATVTMAHSRSPDLPALCRSADILCAAVGRPELVRGDWIKPGAVVIDVGINRVIEEGRPRLIGDVAFGEAESVADAVTPVPGGVGPMTIACLLRNTVLAAARQAGEAIPHDL

SEQ ID NO: 14224 - protein, 219 aa, Methanosarcina mazei Go1
MKDNLPEKGAIVQRDRETYTIAPHLPGGIVDPDTLIKIGEVAKKYGAAALKATSAQRIAIVGLKEEDLDNAWADLGIKPGAAIGLCVRSIKFCPGTTFCKQAKQDAVGLGLKLDEKYHGMSMPSKLKIGVSGCPNSCAEPAIKDIGLMGTAKGYNLMVGGSAAAVPRLAQVVAKDLSEDDALEIVDRILNFYKNSGTKKRLGRFIEDMGLDEFKKQVGL

SEQ ID NO: 14225 - protein, 478 aa, Sulfolobus solfataricus P2
MKSYQGLADKWIKGSGEEYLDINPADKDHVLAKIRLYTKDDVKEAINKAVAKFDEWSRTPAPKRGSILLKAGELMEQEAQEFALLMTLEEGKTLKDSMFEVTRSYNLLKFYGALAFKISGKTLPSADPNTRIFTVKEPLGVVALITPWNFPLSIPVWKLAPALAAGNTAVIKPATKTPLMVAKLVEVLSKAGLPEGVVNLVVGKGSEVGDTIVSDDNIAAVSFTGSTEVGKRIYKLVGNKNRMTRIQLELGGKNALYVDKSADLTLAAELAVRGGFGLTGQSCTATSRLIINKDVYTQFKQRLLERVKKWRVGPGTEDVDMGPVVDEGQFKKDLEYIEYGKNVGAKLIYGGNIIPGKGYFLEPTIFEGVTSDMRLFKEEIFGPVLSVTEAKDLDEAIRLVNAVDYGHTAGIVASDIKAINEFVSRVEAGVIKVNKPTVGLELQAPFGGFKNSGATTWKEMGEDALEFYLKEKTVYEGW

SEQ ID NO: 14226 - protein, 320 aa, Candidatus Blochmannia floridanus
MIKKIGVLTSGGDSPGMNAAIRGVVRAGLSEGIEVYGIYDGYLGLFQNRMMLLSYCSVSDIINKGGTVLGSSRFPELKKDMIRSVVMNNISKSHLDALVIIGGDGSYIGARRLSDLGCPCIGIPGTIDNDVAGTDYTIGYFTALETIIEAIDRLRDTSSSHQRISIVEVMGRYCGDLTISAAIAGGCEFVIIPELKFQMQDLVDKIKLNISKGKKHAIVAITERICNVFDLAQYIENETGKETRATVLGHIQRGGKPVAYDRILASRMGAYSIELLLKGYGRHCIGIENEKLVHHDINDATKYMRRSFRQDLLTTAKKLC

SEQ ID NO: 14227 - protein, 294 aa, Magnetospirillum magnetotacticum MS-1
MIGCGLTGVEFISANTDAMSLDESCAKSRIFLGPAIPVLCGGRVTPYRGRVAAEKSFDEIVGQIQGANIVFIAAGMGGSTGSGAAPVIAKAAREQGILTVGVVTKPFHFEGAHRMRTAEQGIEELHQCIDTLIIIPNQRLFHVATERTTFADAFKMSDDALYSCVRSVTDLMIMPGLINRDFADIRTVMSAMGKAMMGTGEAEGVKRAVEATEAAICSPLLHFNSINWAKGGLINITGGMDMTLLEVDEVANRIRDEVDPEANIIFGSAFDEKLNGKIRVSVIVSDTERVVIQI

SEQ ID NO: 14228 - protein, 183 aa, Hordeum vulgare subsp. spontaneum
MEYQGQQQHGQATDRVDEYGNPVAGHGVGTGMGTHGGVGTGAAAGGGGHFQPTREEHKAGGILQRSGSSSSSSSEDDGMGGRRKKGIKDKIKEKLPGGHGDQQHAAGAYGQQGIGMAGTGGTYGQQGHTGMTGTGATGTMATGGTYGQPGHTGMTGTGTHGTDGTGEKKGIMDKIKEKLPGQH

SEQ ID NO: 14229 - protein, 462 aa, Moorella thermoacetica ATCC 39073
MSIAAARTRSQAGQKVGLRRDLGIWESYATLIGVLIGSGIFVVTGQAGAVAGPSVPLAYLVMYPIVICTAVAYMVFLSTPLGERPGGAYIHISRTFGTYYPGYIAMWLKWVAFMGALGVLSLGFGQYVTFFIPGANPVLVGSLVLLFFYFINLFGVRIYGWAQVAMFLVLMIAVLVLVIPGLPAVNLSYYRPLFPFGLKGFLAAIPPLFLSYAGFESLAQTAGETREARRSLPRVFLVGLSITVVIYFAMSFVAFGNLPYQQLAHSRSAMADVAARYLPFGAAAIVAVGAMMAFTTSINGTLMVPPRVLMVLAEDRMIPGFLAHINPRFRTPDVALTISTGVALALLWTKTLDYILAVTLQAMFILYIVHGIALICLPFVNPRLYKTALVRLHPALLVISGLISIAAMLLFSYAMIIAAWRLLLLWVAVGTGIYLYSRYQGRREGFDYQRRLVEEWCDEAEA

SEQ ID NO: 14230 - protein, 1338 aa, Kluyveromyces lactis
MSFLKKKSSTAGHSRSGSASSILNKHVDPANISEFYPSSLDHKVTSGLKNDYSFDSSSKGSRKSSGGSTNSLTSERLLFNWDVTDPSQWTMPRIIQWFRANDFNDQWITFFKRNSISGNKFLKLLAYDNFAPYEKSLQQSKSSSYERFQYLLKKTLEENVVKGNNRNGNRIINNSRSSSESAKVSQRLSTSFSTHIRSTSESALLNIENITKDSSSSEPTTSKKQEASNYSLPLRQAKTNSASALYRRSLISLRNASSTKDNASKNDIKITIPPRPLSTTENTNKSPTTPSSVSPSHTAYTGIFRRQHKTSSSESSLFTSIFGHGVVEEPEETPKPRPVENRRIPAASTVNASTSKQSINVDDKARLWDKIKRKGQLPAEPSSQPAARIIIEEVKESPKAEPPEIVIPEEIYPKRPSDSRELFIMLTKDNSTFSPFNVQPHLGTDVSELKKAVALALGLTHSNFSIHLTDFGAEFGSQIPDGLLADFQKTSFQNIPNKLYIQDLEKKANLNPRPRTETLASQHSTAASTKSKTSVKSNASAASNGEGSSSDLTSIDDQGSSHRRAYPQTPSHYYDNSTSAETDYWSFKDSVPETISDAPHITLPKSRPSLKLNSSVLNTHASEKSTFRIIRQTSDTDIDFNKRRESPYVRVAELAPKRKAPKPPVNGNPVTSGSLPSAAAKNVSESPLESPPKLDRNGKTIYQKNKPRPPPPLTTERSSRRSVSSLSGQDLNEVKESPVQSFTPASTQVMVPQPYKGALETLKPRKSSADLSIRPRMSLRQFSRSNSSLNRKVLSTSRQTLNRTNSKPLVTSSTAADIFDENDISFADAPELSDSDDYSASSDEIIWSRDRKSISNDVPEFSFNTEDTIDLVGTDTTQVSVGATEGSDTPKKMALRPSPDVVYQNLEKFFPDADLDNPILEGLTPPPSPNADSSPPSPRGFEKSLKTKSEQQPAFLSSRGESSQFLTPVKSLKPPKRTKTIRIIAQEASEARKNEVSQKLQRKNTKMWGTKVVEITDKRTISINKSRNSRGEYKEFAWIKGEIIGKGSFGAVYLALNVTTGEMLAVKQVTVPEFSSQDESAISMVEALKSEVSTLKDLNHVNIVQYLGFEEKNGIYSLFLEYVAGGSVGSLIRMYGRFDDQLIRHLTKQVLEGLAYLHSKGILHRDMKADNLLLDNDGVCKISDFGISRKSNNIYSNSDMTMRGTVFWMAPEMVDTAHGYSAKVDIWSLGCVVLEMFAGKRPWSNFEVVAAMFQIGKSKTAPPIPDDTKDLVSPAGQSFLDQCFEIDPEMRPTADSLVGHPFCKTSSSFDFPKTKLAQFIKSNDKLNSSRLRISSQEL

SEQ ID NO: 14231 - protein, 119 aa, Triticum aestivum
MVDLQAAALVISVVAAEVFMLTGSTSAIRFGFVLGFALLALGISSLRSQRAGGRQPRLLLKGQAAIASVIFFKDLSVFFRHGWFPNVFAVLLSGMVVTFYIHRIVTGGHKGSTESSSDN

SEQ ID NO: 14232 - protein, 181 aa, Hordeum vulgare subsp. spontaneum
MEYQGQQQHGQATNRVDEYGNPVAGHGGGTGMGAHGGVGTGAAAGGHFQPTRKEHKAGGILQRSGSSSSSSSEDDGMGGRRKKGIKDKIKEKLPGGHGDQQHAAGTYGQQGIGMAGTGGTYGQQGHTGMTGTGATGTMATGGTYGQPGHTGMTGTGTHGTDGTGEKKGIMDKIKEKLPGQH

SEQ ID NO: 14233 - protein, 296 aa, Coccidioides immitis RS
MFSNRCARLVASRTSVPLTSYLARARFSSTASPASAAYEYILTSTPKPGVGLITLNRPKALNALCSPLFHELNEALTKYDEDKDIGAIIITGSEKAFAAGADIKEMAPLTFAAAYSNNFIAPWSHLANSIRTPVIAAVSGYALGGGCELALMCDMIYCTSKATFGQPEIKLGTIPGAGGSQRLTKIVGKSKAMELILTGNTFSGKEAGEWGVAAKVVDGGKDELLAAALETASTIAGYSRVAVVAAKEVVNKSQELSLGEGVDYERRLFHGLFGSKDQKIGMTAFAEKKKPEWSNE

SEQ ID NO: 14234 - protein, 81 aa, Gaertnera rosea
  misc_feature (14)..(14): Xaa can be any naturally occurring amino acid
  misc_feature (48)..(48): Xaa can be any naturally occurring amino acid
  misc_feature (54)..(54): Xaa can be any naturally occurring amino acid
TPQDEMRAGMSYFXETIWKGVPKFLRRVDTALKNIGINERLPYNAPLXQFSSWXGGDRDGNPRVTPEVTRDVCLLARMMAA

SEQ ID NO: 14235 - protein, 282 aa, Thermus thermophilus HB27
MAAQVLSGHEAAEAVYEEIRARLRSLSFTPSLRVIRLGEDPASVAYVRLKDKRARALGYRSQVEVYPEDLPEEALLERIAALNADEEVDGILVQLPLPPHIRTQRVLEAIHPLKDVDGFHPLNVGRLWSGGKGLFPCTPLGVVRLLKHYGVDLRGKEVVVVGRSNIVGKPLAGLLLREDATVTLAHSKTQDLPQVTRRAQVLVVAVGRPHLVRKEWVREGAIVVDVGVNRVEGRLLGDVHPEVAEVASALTPVPGGVGPMTVAMLMGNTLEAALLRRHGASG

SEQ ID NO: 14236 - protein, 191 aa, Hordeum vulgare subsp. spontaneum
MEYQGQQQHGQATNRVDEYGNPVAGHGVGTGMGEHGGVGTGMGAHGGVGTGAAAGGHFQPTRKEHKAGGILQRSGSSSSSSSEDDGMGGRRKKGIKDKIKEKLPGGHGNQQHAAGTYGQQGIGMAGTGGTYGQQGHTGMTGTGATGTMATGGTYGQPGHTGMTGTGTHGTDGTGEKKGIMDKIKEKLPGQH

SEQ ID NO: 14237 - protein, 81 aa, Gaertnera schatzii
  misc_feature (37)..(37): Xaa can be any naturally occurring amino acid
TPQDEMRAGMSYFHETIWKGVPKFLRRVDTALKNIGXDERLPYNAPLIQFSSWMGGDRDGNPRVTPEVTRDVCLLARMMAA

SEQ ID NO: 14238 - protein, 479 aa, Methanococcoides burtonii DSM 6242
MTEDNEVQIAGMSIVIVCSVVDPASQNIKEHLLKLRDWVEMSVPGGIFDDLSAVYQSGNFYIIEVTEHHIYQDGIDRKIEEAGLDCDLLIFASKHKSADGRRLLTAHFTGNPGSADFGGYPGELSMAAPFALRCLLRNMAELSESIGFDVSMESTHHGPSDLDVPSVYAEIGSSEVEWVDQDAGDIVARSILSVRSGFCPVGIGFGGGHYAARQSELVLGSDISFGHNFPNYQLQFVDVDMFRKAVERSGADLVYCDRKAMSSDEKKRINELADEFGLDVLRESDIKGMEGVCWDIFRIFWHKVRDEGLSGRVKVPVGLKDKLSENVCDIFDFDVSNVVTVVIDNELLKLVRSVDAGGVKRLLDMSNVVYSERDDATISNHFYTFWNRDAEDFLTFIVDECIKILKGRYDTEYVFEENVLYISDERFSPELARKWGVPSGPMFGELAKGQSVMIEGNTVLPEMVHERTQKSLVLRNVIF

SEQ ID NO: 14239 - protein, 191 aa, Hordeum vulgare subsp. spontaneum
MEYQGQQQHGQATNRVDEYGNPVAGHGVGTAMGEHGGVGTGMGAHGGGGTGAAAGGHFQPTRKEHKAGGILQRSGSSSSSSSEDDGMGGRRKKGIKDKIKEKLPGGHGDQQHAAGTYGQQGIGMAGTGGTYGQQGHTGMTGTGATGTMATGGTYGQPGHTGMTGTGTHGTDGTGEKKGIMDKIKEKLPGQH

SEQ ID NO: 14240 - protein, 302 aa, Corynebacterium glutamicum ATCC 13032
MTLKIGTRGSKLATTQAGTIRDQLKHYGRDAELHIVTTPGDVNMSPVERIGVGVFTQALRDVLHSGECDVAVHSMKDLPTATDPRFHLVVPTRADSREALIARDGLTLAELPEGAKVGTSAPRRISQLKAIRPDLEILPLRGNIDTRMGKVTSGELDAVMLAYAGLTRVGMQDRATEVFDADIIMPAPAQGALAIECRADDTETVRALNMLMHADTFVSAVAERTVLNRLEAGCTAPVAAHATLDGYSGDTMTLTAGVYALDGSDQLVFSAEGDGARPEELGELVAQQLIDAGAANLLGDRS

SEQ ID NO: 14241 - protein, 368 aa, Methanococcoides burtonii DSM 6242
MKSIVEEALARSVEETQIRSGGVSQSEDINAELEAMLKDLQTNIKVVGCGGGGSNSAQRMQQEGIKGAEVVAVNTDAQHLLNVTTERKILIGRKKTRGLGAGSLPQIGEDAALESIDEVRSIVEGSDMVFITAGLGGGTGTGSAPVVAEAARDAGALTIAVVTLPFSVEGHVRRENAEAGLERLRDVADTVIVVPNDKLLEVVPRLPLQAAFKVSDEVLMRAVKGITELITKPGLVNLDFADVRTVMQNGGVAMIGLGEADGENKAVESVQKALRSPLLDVDISGATSALVNVVGGPDMTIAEAESVVQEVYSRIDPNARLIWGAQVDPDLEHSVRTMLVVTGVRSPQIYGSGNSKNVTRKYGIDFVK

SEQ ID NO: 14242 - protein, 194 aa, Hordeum vulgare subsp. spontaneum
MEYQGQQQHGQATDRVDEYGNPVAGHGVGTGMGEHGGVGTGMGAHGGVGTGAAAGGGGGHFQPTRAEHKAGGILQRSGSSSSSSSEDDGMGGRRKKGIKDKIKEKLPGGHGDQQHAAGTYGQQGIGMAGTGGTYGQQGHTGMTGTGATGTMATGGTYGQPGHTGMTGTGTHGTDGTGEKKGIMDKIKEKLPGQH

SEQ ID NO: 14243 - protein, 469 aa, Oryza sativa
  misc_feature (205)..(205): Xaa can be any naturally occurring amino acid
MGRRSGGRKLPFFASNASTSSSTKRTRSARRLPSLTRPRASSSPSPASPSPPPPSASHPAPPSPPLAVSPAGAGKVGKKKAGARLWMRLDRWGVSETLHLDKGSIIRRAGLPPRDLRILGPVFSDSSSILAREKAMVINLEFIRAIVTADEILLLDPLTIDVIPFVEQLTHHLPLKNLVCGNGQPGGDDHGEKHDDSHGDQVPRXLNEATGAEHELPFEFQVLELALETVCSSFDVNVSGLERRATPVLEELTKNVSTRNLDRVRTLKSDLTRLLAHVQKVRDEIEHLLDDNEDMAHLYLTRKQLQNQQVEALISSAASNSIVPGGTSLSRLNNSFRRSVSIATSMHLDNDVEDLEMLLEAYFMQLDGIRNRILSVREYIDDTEDYVNIQLDNQRNELIQLQLTLTIASFGIAVNTFIAGAFAMNIQSKLYSIDDGSFFWPFVGGTSSGCFMICIVLLWYARWKKLLGP

SEQ ID NO: 14244 - protein, 891 aa, Schizosaccharomyces pombe
MEYRTNNVPVGNETKSAALNALPKIKISDSPNRHHNLVDAFMQSPSYSTQPKSAVEPLGLSFSPGYISPSSQSPHHGPVRSPSSRKPLPASPSRTRDHSLRVPVSGHSYSADEKPRERRKVIGNYVLGKTIGAGSMGKVKDAHHLKTGEQFAIKIVTRLHPDITKAKAAASAEATKAAQSEKNKEIRTVREAALSTLLRHPYICEARDVYITNSHYYMVFEFVDGGQMLDYIISHGKLKEKQARKFERQIGSALSYLHQNSVVHRDLKIENILISKTGDIKIIDFGLSNLYRRQSRLRTFCGSLYFAAPELLNAQPYIGPEVDVWSFGIVLYVLVCGKVPFDDQNMSALHAKIKKGTVEYPSYLSSDCKGLLSRMLVTDPLKRATLEEVLNHPWMIRNYEGPPASFAPERSPITLPLDPEIIREMNGFDFGPPEKIVRELTKVISSEAYQSLAKTGFYSGPNSADKKKSFFEFRIRHAAHDIENPILPSLSMNTDIYDAFHPLISIYYLVSERRVYEKGGNWNRIAKTPVSSVPSSPVQPTSYNRTLPPMPEVVAYKGDEESPRVSRNTSLARRKPLPDTESHSPSPSATSSIKKNPSSIFRRFSSRRKQNKSSTSTLQNSAPLETSQSPPTPRTKPSHKPPVSYKNKLVTQSAIGRSTSVREGRYAGISSQMDSLNMDSTGPSASNMANAPPSVRNNRVLNPRGASLGHGRMSTSTTNRQKQILNETMGNPVDKNSTSPSKSTDKLDPIKPVFLKGLFSVSTTSTKSTESIQRDLMLVMGMLDIEYKEIKGGYACLYKPQGIRTPTKSTSVHTRRKPSYGSNSTTDSYGSVPDTVPLDDNGESPASNLAFEIYIVKVPILSLRGVSFHRISGNSWQYKTLASRILNELKL

SEQ ID NO: 14245 - protein, 140 aa, Brassica napus
MAEEAKSKGNAAFSSGDYAAAITHFTEAINLSPTNHVLYSNRSAAYASLHRYAEALSDAQKTVELKPDWAKGYSRLGAAYMGLSQYKEAADAYRKGLEVDPSNETLKSGLADASRPRGPSSNPFVEAFQGEEMWAKLTAD

SEQ ID NO: 14246 - protein, 375 aa, Phytophthora infestans
MDDDIQAVVIDNGSGMCKAGFAGDDAPRAVFPSIVGMPKHLGIMVGMNQKDAYIGDEAQAKRGVLTLRYPIEHGIVTNWDDMEKIWSHTFYNELRVAPEEHPVLLTEAPLNPKANRERMTQIMFETFNVPAMYVNIQAVLSLYASGRTTGCVLDSGDGVSHTVPIYEGYALPHAIVRLDLAGRDLTDYMMKILTERGYSFTTTAEREIVRDIKEKLTYVAMDFDEEMEKSTRSSALDKTYELPDGNVIVIGNERFRTPEVLFNPSMIGRECSGVHECAFQTIMKCDVDIRRDLYSNVVLSGGSTMFPGIGERMTKEVIKLAPTAMKVKIITPPERKYSVWIGGSILASLATFQHMWISKTEYDESGPSIVHRKCF

SEQ ID NO: 14247 - protein, 261 aa, Rhodococcus sp. T104
MSETATPAVVWSDVEAGVMTITLQRRPANALGLPIIDGLNAALDAADADGSVKVVVVRSDIPGFFAAGADIKHMSAVDAESFTAYGDRLRSALDRLASADRISIAAVDGLALGGGLELAMACTLRVGGADAKFGLPEVKLGLIPGAGGTQRLPRLVGRGHALDIMLSARQVLAPEAHAIGLIDRLVEAGAATEAALALATELCTMSLPAQRAVIRTVDASFDTPLEEGFRFEVAQEQDLFENGEAKEGITAFLEKRAPRFS

SEQ ID NO: 14248 - protein, 337 aa, Volvariella volvacea
MVVNVGINGFGRIGRIVYRNAVENDQINVVAINDPFIDLAYMVYMFKYDSVHGRFKGTVESKDGKLVINGKSITVFSEKDPAAIPWGTAGADYIVESTGVFTTTEKASAHLKGGAKKVIISAPSADAPMFVVGVNLDAYDPKYTVISNASCTTNCLAPLAKVIHDEFGIVEGLMTTVHATTATQKTVDGPSHKDWRGGRSVANNIIPSSTGAAKAVGKVIPSLNGKLTGMSFRVPTLDVSVVDLVVRLEKPTEYSAIKAALKKAAEGEYKGIIDYTEDPVVSTDFIGNPASSIFDASAGIQLNPNFVKLISWYDNEWGYSKRVCDLVVYVAGKDGNL

SEQ ID NO: 14249 - protein, 430 aa, Vibrio vulnificus CMCP6
MSRCSAIIENNPETRLVVSSACSGVTNLLVELANGVQSQERRAELLAQLAEIHDAILNQLEDATEAAAEVYAILDTITSLAEAASIQASNKLTDHLVACGELMSTHILAQLMRERGVNAVRFDIREVLRTDDNFGRAEPDVAKIAELAQEKLLPLCRDYVVVTQGFIGSDEEGNTTTLGRGGSDYSAALIAEGVKASGLEIWTDVPGIYTTDPRIAAKAAPIPEISFAEASEMANFGAKILHPSTLVPALRHDIPVFVGSSKEPEKGGTWIRHEAQSSPLFRALALRCNQTMVTLRSAKMFHAYGFLAKVFEILAKHKISVDLITTSEISVSLTLDKTDTSGGAPELPQAAREELEELCTVEVEHNLCLVALIGNHMETKGYAKEVFSTLGDFNLRMICYGASDHNLCFLVDAHDSKSVIQKLHQDLFER

SEQ ID NO: 14250 - protein, 269 aa, Rhodococcus sp. T104
MTEPTTWETFTLERPEPGIAVVTLNRPERMNSMTNTMFVELEKVALQLDQEDDLRVVILTGAGKAFCGGFDLDDADGLSSLTPMGMLDQQELAARALSAIRSIRVPVIAAVNGAAAGGGLSLSLAADIRIGSPAARFNAAFVRIGLSAGDLGASWHLPRLIGPARAAEFAYTGRFIEAVEAESLGLLNAVVPAESLLDEALAMARLIRANSPAGVQLSKRALHANMEVSSYAAALELENRGQALLTRGEDMPEALAAFKEKRNPKFTGR

SEQ ID NO: 14251 - protein, 499 aa, Clarkia lingulata
  misc_feature (291)..(296): Xaa can be any naturally occurring amino acid
MASPALISETEAWKDLKAHLEGIKMTHLRELMGDTERCQSMMVEFDNIFLDYSRQQASPDTISKLYKLADAAHLKQKIDRMYNGDHINTTENRSVLHVALRAPRNSAICSDGKNVVPDVWNVLDKIKDFSDRVRNGSWIGATGKELKDVIAVGIGGSFLGPLFVHTALQTDPEASKNARGRELRFLANVDPIDVARNISGLNPETTLVVVVSKTFTTAETMLNARTLREWISSALGPSAVAKHMVAVSTNLPLVEKFGIDPNNAFAFWDWVGGRYSVCSAVGVLPLSLQYXXXXXXKFLQGAHSIDQHFSSAPFEKNIPVLLGLLSVWNVSFLGYPARAILPYSQALEKLAPHIQQVSMESNGKGVSIDGLPLPFESGEIDFGEPGTNGQHSFYQLIHQGRVIPCDFIGVVKSQQPVYLKGEVVNNHDELMSNFFAQPDALAYGKTPEQLKKENVSEHLIPHKTFTGNRPSVSILLPTLDAYRIGQLLAIYEHRVAVQG

SEQ ID NO: 14252 - protein, 272 aa, Rhodococcus sp. T104
MLRNYEPPQLETLTLEVLEGKIVVLTINRPDRMNSMTVKMFTEFNTAAYALRDTDARALIIRGAGEQSFCAGFDLDEIHVITEMGVRDFLKFQETATGGLAALYHLPFPVIAAIHGAAAGGGLALALAADIRLVAPTAKFNTAFVKVGLSVGELGTSWKLTRLVGPGRAAEIAYTARFVGAEEATRIGLANRVVPSEDLFGKAIAMAEAIASNSPGGIRMSKRALQRNQEVTSYAAALELENRGQALLTRCADMPEALAAFKEKRAPRFTGQ

SEQ ID NO: 14253 - protein, 370 aa, Schizosaccharomyces pombe
MVKRHKNTIGVWRLGKTLGTGSTSCVRLAKHAKTGDLAAIKIIPIRYASIGMEILMMRLLRHPNILRLYDVWTDHQHMYLALEYVPDGELFHYIRKHGPLSEREAAHYLSQILDAVAHCHRFRFRHRDLKLENILIKVNEQQIKIADFGMATVEPNDSCLENYCGSLHYLAPEIVSHKPYRGAPADVWSCGVILYSLLSNKLPFGGQNTDVIYNKIRHGAYDLPSSISSAAQDLLHRMLDVNPSTRITIPEFFSHPFLMGCTSLSSMDSTTPPTPSLSIDEIDPLVVDCMCVLWKKSSSKKVVRRLQQRDDNDEKYVYKVLSEILRDDMLKKQRFDENKYLSLYDLIHDNNLFTKALNKFRTKASENAAY

SEQ ID NO: 14254 - protein, 499 aa, Clarkia lingulata
  misc_feature (291)..(296): Xaa can be any naturally occurring amino acid
MATPALISDTEAWKDLKAHLEGIKHTHLRELMGDTERCQSMMVEFDNIFLDYSRQQASPDTINKLYKLAEAAHLKQKIDSMYNGDHINSTEHRSVLHVTLRAPRNSAICSDGKNVVPDVWNVLDKIKDFSERVRNGSWVGATGKELKNVIAVGIGGSFLGPLFVHTALQTDPEASKNARGRELRFLANVDPIDAARNISGLNPETTLVVVVSKTFTTAETMLNARTLREWISSALGVSAVAKHMVAVSTNLPLVEKFGIDPNNAFAFWDWVGGRYSVCSAVGVLPLSLQYXXXXXXKFLQGAHSIDQHFSSAPFEKNIPVLLGLLSVWNVSFLGYPARAILPYSQALEKLAPHIQQVSMESNGKGVSIDGLPLPFESGEIDFGEPGTNGQHSFYQLIHQGRVIPCDFIGVVKSQQPVYLKGEVVNNHDELMSNFFAQPDALAYGKTPEQLKKENVSEHLIPHKTFTGNRPSLSILLPTLDAYRIGQLLAIYEHRVAVQG

SEQ ID NO: 14255 - protein, 82 aa, Clarkia biloba subsp. biloba
TNLPLVEKFGIDPNNAFAFWDWVGGRYSVCSAVGVLPLSLQYGFAVVEKFLQGAHSIDQHFSSAPFEKNIPVLLGLLSVWNV

SEQ ID NO: 14256 - protein, 189 aa, Triticum aestivum
MAPTVMASSVTSVVPFQGLKSTAGLPVSRRSNGASLGSVSNGGRIRCMQVWPIEGIKKFETLSYLPPLSTEALLKQVDYRIRSKWVPCLEFSKVGFIFREHNASPGYYDGRYWTMWKLPMSGCTDATQVINEVEEVKKEYPDAYVRIIGFDNMRQVQCVSFIDFKPPGCEESGKAYTDHSAWATYKVLL

SEQ ID NO: 14257 - protein, 96 aa, Brassica napus
  misc_feature (91)..(92): Xaa can be any naturally occurring amino acid
MASSMLSSAAVVTSPAQAAMVAPFTGLKSSAAFPVTRKSNTDITSIASNGGRVSCMKVWPPVGKKKFETLSYLPDLTDVELAKEVDYLLRXXWIPC

SEQ ID NO: 14258 - protein, 402 aa, Bacillus anthracis str. 'Ames Ancestor'
MLSEKTIEIVKSTVPLLQEKGVEITTRFYEILFSEHPELLNIFNHTNQKKGRQQQALANAVYAAATYIDNLEAIIPVVKQIGHKHRSLGIKAEHYPIVGTCLLRAIKEVAGAPDEVLNAWGEAYGVIADAFISIEAEMYEEAAHKEGGWKDFRNFVVVKKVKESDVITSLYLKPEDGGKVSSFIPGQYVTVQINIEGETYTHNRQYSLSDAPGKEYYRISVKKEKGVDTPDGKVSNYLHDHVKEGDMLPVSAPAGDFVLNMDSTLPVVLISGGVGITPMMSMLNTLIEQDSKRNVCFVHAAINSNTHAMKEHVEAVDNEYEQVKAYTCYSAPTEKDLEMKNFDKEGFVEREWLQTIIPTTEAEFYFCGPVPFMKHINAVLTDLGVKQEHIHYEFFGPAASLQ

SEQ ID NO: 14259 - protein, 229 aa, Glycine max
  misc_feature (40)..(40): Xaa can be any naturally occurring amino acid
GTSSTIKNQMEAKDGTGYKHVREICADVRLVFKNAMKYNXDERSDVHVMAKTLLSKFEEKWLQLLPKVTEEGPRREEEEAEAQLALQVAQEAAQAKMARDLSNELYEVDVILEELREMVVKRFRKMSTEEKRKLGDALTRLSPEDLSKALEIVAQNNPSFQATAEEVDLDMDAQSESTLWRLKVFGKEALEVQGKNSGSMGGNENQNNIRKRELCDAIAKTKRKTKRLT

SEQ ID NO: 14260 - protein, 232 aa, Debaryomyces hansenii CBS767
MPRSKRSKLVTLAQTDKKGKENKTRIFDEVRSALDEFRFVWILQLDDVRTPVLQDIRTDWAGSKLILGKRRVLEKALGDTPEEEYKDNLHKLSKLCTGVSGLLFTNETPDTVQAYFTAYSKQDYSRAKSKAPIDFTIPEGIVYSRGGQIAIEEDVPMSHSLEETLRNKLKVPTKIKAGKIILNEPYVVCTEGETLDVRKALLLKQFGIAASEFKVNTIAYFDNESSEITKFD

SEQ ID NO: 14261 - protein, 949 aa, Deinococcus radiodurans
MTKSLSDLLQTNDFTRRHIGPSEAEQAEMLGVLGVSSLDELTQTTLPAAIQFDGELHTGPGMTEAQALAELKAVAQKNKVFRSYIGMGYAGTDVPPVILRNMLENPGWYTAYTPYQAEISQGRLEMLLNFQQTVQDMTGMPVSNASLLDEATAAAEAMTLAKRQSKNKGSNVFFVADNVHPQTMDVVKTRAEYFGFEVQTGSADAIPEGAFGALVQYPGTHGEVLNLAPIAEKAHTQGAALIVATDLLACALLTPPGEQGADIVVGSAQRFGVPMGFGGPHAAFLACQKGFERSMPGRVIGVSKDVRGNTALRMAMQTREQHIRREKATSNICTAQALLANMAAAYAVWHGPEGIKTIAERVHRLTGILAKALQDAGIKANETFFDTLTFEGQDDLGARAEAKGINFRLDGGKVGISLDETVTPQDLADIIEVVTGKGVDVQKLDAEAVDGIPAPLKRQSDFLTHPVFNTHHSEHGMLRYLKQLENKDYSLTHGMIPLGSCTMKLNATTEMIPVTWPEFGGLHPFAPESQTQGYAEMLAELERWLADITGYDAVSMQPNSGAQGEYAGLLVIRKYHEARGEAHRNICLIPASAHGTNPASAAMMGMQVVVVKTDEQGNIDFDDLKAQAEAHSDHLAALMITYPSTHGVYEENVRDVCDLIHQHGGQVYLDGANMNAMVGVAKPGLIGGDVSHLNLHKTFAIPHGGGGPGMGPIGVKAHLAPFLPNHAVAPTSDSHTGAVSAAPYGSASILPISYLYIKLLGAAGLRQSTQVALLNANYIAKRLSGAFPVLYSGKGGRVAHECILDIRPLKQESGVSEEDIAKRLMDYGFHAPTMSFPVPGTLMIEPTESEPKAELDRFVDAMLNIRREIQDVQDGTISAADSPLKHAPHTLKDLMDSEWTRAYSRETGAFPSAAQKAWKYWPAVNRVDNVYGDRNFVCSCPPIEDYIGA

SEQ ID NO: 14262 - protein, 359 aa, Cicer arietinum
MSNFKSKYHDELIANAAYIGTPGKGILAADESTGTIGKRLASINVENVETNRRALRELLFTAPNVLQYLSGVILFEETLYQSTAAGKPFVDVLNEAGVLPGIKVDKGTVELAGTDGETTTQGLDGLGARCAKYYEAGARFAKWRAVLKIGPNEPSLSILSIENAYGLARYAVICQENGLVPIVELEILVDGSHDIHKCAAITERVLAATYKALSDHHVLLEGTLLKPNMVTPGSDSPKVAPEVVAEHTVRALQRTVPAAVPAVVFLSGGQSEEEATVNLNAINQVKGKKPWTLSFSFGRALQQSTLKAWSGKEENVKNAQDALLTRAKANSEATLGTYKGNSQLGEGASESLHVKDYKY

SEQ ID NO: 14263 - protein, 497 aa, Oceanospirillum sp. MED92
MTQQVPLLINGELVQSKSENWIPVTNPATQEVIAQVPCATADEVEQAIDAAKAAFEDWKDTPVGERARLMLRYQAILKERQDDIARLISQEVGKTFEDAKGDVWRGIEVVEHACNIASLSMGETVENVARKIDCYSITQPLGVCVGITPFNFPAMIPLWMFPMAIACGNTFVLKPSEQDPLTPMLLAELFKEAGAPDGLLQVVHGAKDVVDQLLVHKDTPAISFVGSVNVGEHIYRTGTDKMKRVQAFAGAKNHMVVMPDASKNQVVNSIAGASVGAAGQRCMAISVAVFVGEARQWIPEVRDALAKVRPGAWDDPEAGYGPLINPQARERVLNFIQEGKDAGAECILDGSECVVDGFPDGNWVGPTMFRGVTRDMSIYQEEIFGPVLIALEVDTLEEAIELINENPYGNGTSMFTSSGAAARKYQHEIKVGQVGINVPVPVPLPMFSFTGWRKSFYGDQHAYGKQAVKFYTETKTVTARWFEDDIDTGVNTTIQLK

SEQ ID NO: 14264 - protein, 601 aa, Lactobacillus acidophilus NCFM
MTKINGSDAMLKVIYDWGIDHIYGFPGGSFDSSMNAIYDFRDKMKFIEVRHEEAGALAASSEYKVTGKLGVCFGSAGPGAAHLFNGLYDAKYDKTPMLAIVANVPTSKQDIDFFQAFDEDKWFLDASVWCASAKTPELIPVLTDEAIRQAYARKGPAVLIIPKDYGWQKIEDNFRVSKKAQPKPNYPAPTETSVEEAVKLLKEAKNPTMYIGAGAKDAGEEVKEFAEKFKTPIMSSYLGKGVVEDKFPAYIGTIGRIGPKAAQEVQTATDLVVWVGNNSPFSGLWFPKDAKVIQIDVDPGKFGKRHSTDVSMLADSKKALRALIEEGEERSESPLYKAAIADRENWDAWEDSFKNSDEMPVRPEPIWDVINKKADDNAIFAIDVGNVNVDSCRLLNLHDDQKWTTSGLHATMGYGAPAALMAATVYPDREVWNLAGDGGFAMMNQELLTMSRYNMHVLNVVFTNETLGYIEAEQVDESHQPLSGVIIPDNNWAKVAEGMNVKGVVVRTKEEFEKAVDEFKQMDGPMLIDIKYTHKMPYSTELNSLDDPAFVKKYEAEDLKPFSYFAEKYGLEADAATGASQHEGEPVEDTTPDTVSGASQH

SEQ ID NO: 14265 - protein, 258 aa, Oceanospirillum sp. MED92
MTDKLIVEKQGHTAVITMNNPPANTWTEESLKGLAVVVEELNQDKEIYALVIRSNSEKFFSAGADLNLFADGDRSVARDMARYFGEAFETLARFRGVSIAAINGFAMGGGLEVALACDIRVAEEQAQMALPEAKVGLLPCAGGTQNLTMLVGEGWTKRLILCGERIKAPLAKEIGLVEELVPQGQSFEKAMELAKAVEQQSPTAVAACKQLIQNNRTNHWDAGYILERELFVDLFHTEDQKEGVNAFLEKRAPEWKNQ

SEQ ID NO: 14266 - protein, 772 aa, Oryza sativa
  misc_feature (33)..(33): Xaa can be any naturally occurring amino acid
  misc_feature (44)..(44): Xaa can be any naturally occurring amino acid
PGLQALSPPLPWRWPPRALRLLPRLLPPRRRRXPTPSSSSPSAXSTSTSRVVRLRAAAASAPSEVLDSTNGAIPSGKGGGGQQYGREYFPLAAVVGQDAIKTALLLGAIDREIGGIAISGKRGTAKTVMARGLHAMLPPIEVVVGSIANADPNYPEEWEEGLANQVQYDADGNLKTEIIKTPFVQIPLGITEDRLIGSVDVEASVKSGTTVFQPGLLAEAHRGVLYVDEINLLDEGVSNLLLNVLTEGVNIVEREGISFRHPCKPLLIATYNPEEGSVREHLLDRIAINLSADLPMSFDDRVAAVDIATQFQESSKEVFKMVEEETEVAKTQIILAREYLKDVAISTEQLKYLVMEAIRGGCQGHRAELYAARVAKCLAAMEGREKVYVDDLKKAVELVILPRSILSDNPQEQQDQQPPPPPPPPPPQDQDSQEDQDEDEEEDQELISCTLGQDDDEENEQQDQQIPEEFIFDAEGGIVDEKLLFFAQQAQRRRGKAGRAKNLIFSSDRGRYIGSMLPKGPIRRLAVDATLRAAAPYQKLRREKDRDKTRKVFVEKTDMRAKRMARKAGALVIFVVDASGSMALNRMQNAKGAALKLLAESYTSRDQVSIIPFRGDFAEVLLPPSRSIAMARNRLEKLPCGGGSPLAHGLSTAVRVGLNAEKSGDVGRIMIVAITDGRANVSLKKSTDPEATSDAPRPSSQELKDEILEVAGKIYKAGISLLVIDTENKFVSTGFAKEIARVAQGKYYYLPNASDAVISAATKTALSDLKSS

SEQ ID NO: 14267 - protein, 480 aa, Mycobacterium leprae
MGCNKRGVTRQEDDFSAWYNEVVAKAGLIDRGPAKGTMVIRPYGYRIWELLQDELDSKIKELGHENAYFPMLIPENYFNREAEHVEGFHPELAVVTHAGGKELSEPLVIRPTSETVIGDMMAKWITSHRDLPLRLNQWSNVVRWELRPRMLLRTIEFLWQEGHSAHIEKSDALRETLFALDIYTTLARDMAAIPIVSGEKTAGERFAGALNTYTIEAMMRDGKALQSATTHYLGDNFARAFNIRYTTAEEQQAFVHTTSFGLSTRMIGAIVMVHGDDKGLVLPPQVAPYQVVIVPITTGNKASEVGHAAADLARRLQAAGVRTHVDARPQLTPGWKYNEWELRGVPIRLELGPRDLEAGTTVMVRRIGEKAKQPIAIAAAPTELPGILEEFQRTLLERATQFRDDHTTLVDNWDAFATTVATGWALAIHCGNPECEEDIKAETAATPRCVPRQGAPATGRCIRCDAPSAYDKRVIFARAY

SEQ ID NO: 14268 - protein, 113 aa, Brassica napus
  misc_feature (80)..(80): Xaa can be any naturally occurring amino acid
ACLVLPSKIVAGPISVNAALTCGTVNSNVAPCIGYITQGAPLPTACCAGVSKITSMARTTPDCQQTSRGLILAASAYRPXNSFAGRAVGIPKACAVSVPFPIVPSHHMRSSWT

SEQ ID NO: 14269 - protein, 81 aa, Morinda citrifolia
TPQDEMRAGMSYFHETIWKGVPKFLRRVDTALKNMGINERVPYNVPLIQFSSWMGGDRDGNPRVTPEVARDVCLLARMMAA

SEQ ID NO: 14270 - protein, 81 aa, Morinda royoc
  misc_feature (35)..(35): Xaa can be any naturally occurring amino acid
TPQDEMRAGMSYFHETIWKGVPKFLRRVDTALKNXGINERVPYNAPLIQFSSWMGGDRDGNPRVTPEVTRDVCLLARMMAA

SEQ ID NO: 14271 - protein, 286 aa, Vibrio parahaemolyticus RIMD 2210633
MTAQNIDGTLISQTVRSEVAARVKARVAAGLRAPGLAVVLVGEDPASQVYVGSKRRACEEVGFVSKSFDLPASTSEEELLALIDELNNDNEIDGILVQLPLPAGIDTTHVLERIHPEKDVDGFHPYNVGRLAQRIPKLRSCTPKGIITLLDRYNIELRGKHAVVVGASNIVGRPMTLELLLAGCTTTTCHRFTKDLESHVRQADVVVVAVGKPNFIPGEWIKKGAVVVDVGINRLDSGKLVGDVEYDKARESASFITPVPGGVGPMTVASLIENTMLACEQFHTEQ

SEQ ID NO: 14272 - protein, 81 aa, Pagamea guianensis
TPQDEMRAGMSYFHETIWKGVPKFLRRVDTALKNIGINERLPYNAPLIQFSSWMGGDRDGNPRVTPEVTRDVCLLARMMAA

SEQ ID NO: 14273 - protein, 726 aa, Medicago truncatula
MAVSTIALYASPPSSVCSTPHQINYDFELGSRSSSPASTAASTSGKSVMGGLSCLFSSPTVVKHVPFTSSFSGGGGGDEDELKELSSSFSYSFSPTKFGGSWKRDHSPVSVFQCPVSCSSSIGAGTGTVRSGRGSTGGGFLDGFVRSALGSSCLDYDSTGVRLRGGGGEFDGVGGDSGIVDELTFNLDDTFVEGCVGIEIEPYAKKLLMNAQLRHKIFCEEFVIKAFCEAEKAHRGQMRASGDPYLQHCLETAVLLALIGANSTVVAAGLLHDTVDDAFLTYDYIYGMFGAGVADLVEGVSKLSHLSKLARDNNTASKSVEADRLHTMFLAMADARAVLIKLADRLHNMMTLDALPVAKQQRFAKETLEIFAPLANRLGIANWKDQLENLCFKHLNPVQHKELSSKLVESYDDAMIASAIERLEQALKDEGISYHVISGRHKSLYSVYCKILKKKLTIDDIHDIYGLRLIVDKEEDCYKALKVVHRLWSEVHGKLKDYIRFPKFNGYQSLHTVVMGEGKVPLEVQVRTKDMHLQAEFGFAAHWRYKEDHCQLSSYVLQMVEWARWVVTWQCEAMSKDSTSVGYVDSIKPPCKFPSHADNCPYSYKPDCAQDGPVFVIMIENDKMSVQEFCANSTVLDLLERVGRASCRLTTYRFPLKEELRPRLNHKPVSDPNCKLKMGDVIELTPAIPDKYLTEYREEIQRMYDRGLTVSSMGSTATASSMVGTS

SEQ ID NO: 14274 - protein, 499 aa, Clarkia heterandra
  misc_feature (221)..(231): Xaa can be any naturally occurring amino acid
MASPALISETEAWKDLKAHLEGIKMTHLRELMGDTERCQSMMVEFDNIFLDYSRQQASPDTISKLYKLADAAHLKQKIDRMYNGDHINSTENRSVLHVALRAPRNSAICSDGKNVVPDVWNVLDKIKNFSDRVRNGSWIGATGKELKDVIAVGIGGSFLGPLFVHTALQTDPEASKNARGRELRFLANVDPIDVARNISGLNPETTLVVVVSKTFTTAETXXXXXXXXXXXSSALGPSAVAKHMVAVSTNLPLVEKFGIDPNNAFAFWDWVGGRYSVCSAVGVLPLSLQYGFAVVEKFLQGAHSIDQHFSSAPFEKNIPVLLGLLSVWNVSFLGYPARAILPYSQALEKLAPHIQQVSMESNGKGVSIDGLPLPFESGEIDFGEPGTNGQHSFYQLIHQGRVIPCDFIGVMKSQQPVYLKGEVVNNHDELMSNFFAQPDALAYGKTPEQLKKENVSEHLIPHKTFTGNRPSISILLPTLDAYRIGQLLAIYEHRVAVQG

SEQ ID NO: 14275 - protein, 252 aa, Brassica napus
  misc_feature (80)..(80): Xaa can be any naturally occurring amino acid
  misc_feature (105)..(105): Xaa can be any naturally occurring amino acid
  misc_feature (134)..(134): Xaa can be any naturally occurring amino acid
  misc_feature (209)..(209): Xaa can be any naturally occurring amino acid
MAGSAPEGTQFDTRQFDQRLNEVLEGQDEFFTSYDEVHESFDAMGLQENLLRGIYAYGFEKPSAIQQRGIVPFCKGLAFXISQAQSGTGKTATFCSGVLQQLDFXSLVQCQALVLAPTRELAQQIEKVMRALGXDYLGVKVHACVGGTSVREDQRILQAGVHVVVGTPGRVFDMLRRQSLRSDSIKMFVLDEADEMLSRGFKDQIYDIXFQLLPPKIQVGVFSATMPPEALEITRKFMSKPVRIPVKRDELT

SEQ ID NO: 14276 - protein, 184 aa, Arabidopsis thaliana
  misc_feature (134)..(134): Xaa can be any naturally occurring amino acid
  misc_feature (149)..(149): Xaa can be any naturally occurring amino acid
  misc_feature (174)..(174): Xaa can be any naturally occurring amino acid
MASSMLSSAAVVTSPAQATMVAPFTGLKSSAAFPVTRKTNKDITSIASNGGRVSCMKVWPPIGKKKFETLSYLPDLSDVELAKEVDYLLRNKWIPCVEFELEHGFVYREHGNTPGYYDGRYWTMWKLPLFGCTXDSAQVLKEVEECKKXEYPGAFIRIIGFDNTRQVQCISFIXAYKPPSFTEA

SEQ ID NO: 14277 - protein, 398 aa, Bacillus amyloliquefaciens
MFHPIEEALEALKKGEVIIVVDDEDRENEGDFVALAEHATPEVVNFMATHGRGLICTPLSEDIAGRLDLHPMVDHNTDSHETAFTVSIDHKLTKTGISAQERSFTIQALLDEESVPGDFQRPGHIFPLIAKKGGVLKRAGHTEAAVDLAKACGSQGADVICEIMNEDGTMARVPEISEIAKSHQLKMITIKDLIEYRYNITTLVNREVDITLPTDFGTFRVYGYTNEVDGKEHLAFVMGDVPFNSGPVLVRVHSECLTGDVFASHRCDCGPQLHAALRQIAEEGRGVLLYLRQEGRGIGLINKLKAYRLQEQGYDTVEANEALGFLPDLRNYGIGAQILRDLGVQHMKLLTNNPRKIAGLEGYGLSISDRVPLQMEASEHNKQYLQTKMKKLGHLLHF

SEQ ID NO: 14278 - protein, 559 aa, Clarkia heterandra
MATPTLISETEAWKDLKAHLDGIKRTHLRELMGDTERCQSMMVEFDNIFLDYSRQQASPDTINKLYKLAEAAHLKQKIDRVYNGDHINSTENRSVLHVALRAPRNSAICSDGKNVVPDVWNVLDKIKDFSERVRNGSWVGATGKELKDVIAVGIGGSFLGPLFVHTALQTDPEASKNARGRELRFLANVDPIDAARNISGLNPETTLVVVVSKTFTTAETMLNARTLREWISSALGISAVAKHMVAVSTNLPLVEKFGIDPNNAFAFWDWVGGRYSVCSAVGVLPLSLQYGFAVVEKFLQGAHSIDQHFSSAPFEKNIPVLLGLLSVWNVSFLGYPARAILPYSQALEKLAPHIQQVSMESNGKGVSIDGLPLPFESGEIDFGEPGTNGQHSFYQLIHQGRVIPCDFIGVVKSQQPVYLKGEVVNNHDELMSNFFAQPDALAYGKTPEQLKKENVSEHLIPHKTFTGNRPSLSILLPTLDAYRIGQLLAIYEHRVAVQGFVWGINSFDQWGVELGKSLATQVRKQLHASRVKGEPVEEEGFNFSTKTLLTRYLQATSDV

SEQ ID NO: 14279 - protein, 380 aa, Clarkia dudleyana
MASPALISETEAWKDLKAHLEGIKTTHLRELMGDTERCQSMMVEFDNIFLDYSRQQASPDTISKLYKLADAAHLKQKIDRMYNGDHINSTENRSVLHVALRAPRNSAICSDGKNVVPDVWNVLDKIKDFSDRVRNGSWIGATGKELKDVIAVGIGGSFLGPLFVHTALQTDPEASKNARGRELRFLANVDPIDVARNISGLNPETTLVVVVSKTFTTAETMLNARTLREWISSALGPSSVAKHMVAVSTNIPLVEKFGIDPNNAFAFWDWVGGRYSVCSAVGVLPLSLQYGFAVVEKFLQGAHSIDQHFSSAPFEKNIPVLLGLLSVWNVSFLGYPARAILPYSQALEKLAPHIQQVSMESNGKGVSIDGLPLPFESGEI

SEQ ID NO: 14280 - protein, 118 aa, Oryza sativa
RRPGKGLPSISRRGYSFAIVCSGGKKIKNDKPYGIGGGMSVDIDACGRKSTGKGVYQFVDKYGANVDGYRPIYSPEEWSPTGDTYVGGTTGLLIWAVTLAGVLGGGALFVYNTRALAG

SEQ ID NO: 14281 - protein, 380 aa, Clarkia dudleyana
MATPSLISETEAWKDLKAHLEGIKRTHLRELMGDTERCQSMMVEFDNIFLDYSRQQAAPDTINKLYKLADAAHLKQKIDRMYNGDHINSTENRSVLHVALRAPRSSAICSDGKNVVPDVWNVLDKIKDFSERVRSGSWVGATGKELKDVIAVGIGGSFLGPLFAHTALQTDPEASKNARGRELRFLANVDPIDAARNISGLNPETTLVVVVSKTFTTAETMLNARTLREWISSALGVSAVAKHMVAVSTNLPLVEKFGIDPNNAFAFWDWVGGRYSVCSAVGVLPLSLQYGFAVVEKFLQGAHSIDQHFSSAPFEKNIPVLLGLLSVWNVSFLGYPARAILPYSQALEKLAPHIQQVSMESNGKGVSIDGLPLPFESGEI

SEQ ID NO: 14282 - protein, 475 aa, Wigglesworthia glossinidia endosymbiont of Glossina brevipalpis
MIDNLIWFRKDLRLNDNPALYYACVDEYKSASGILILNKKKWNEKIVSKNRIRFMYKNIFSLKRNLKKIGIELIFYTCRDFFEYTCLLYNFCYTNKVKELYFNKGIEKEDLEEDKIIIKKLKKITKCICFNGNLLIDPEKIKNKNKKTYKVYSYFLKSCISFISNNNINIIPFPKIRKNKLNLIKSYNDSIKIKKKLSPCYEEHALNKLNNFIKLKINKYHITRDFCINSTSFLSPYINIGVLSLRECINNIKNNNFDFIEKKNSGHFKWFSEIIWREFCHHLIIEYSDFFDSKKLIKWTKYIKWENKIKKIQAWKNGTTGFPIIDAAMRQLKKTGWMHNRLRMITSSFLVKDLLVDWKIGEKYFYYHLIDGNSAINNFNWQWISSSGICSSPYFRMINPITQSKKFKSIYKYIKFWIPELKNIPFNEIHEPYNWIIKNKINYPNQIIEHKTAKINFFKACKKAIYIFKSKNINK

SEQ ID NO: 14283 - protein, 380 aa, Clarkia dudleyana
MATPALISETEAWKDLKAHLEGIKRTHLRESMGDTERCQSMMVEFDNIFLDYSRQQASPDTINKLYKLADAAHLKQKIDRMYNGDHINSTENRSVLHVALRAPRNSAICSDGKNVVPDVWNVLDKIKDFSERVRNGSWVGATGKELKDVIAVGIGGSFLGPLFVHTALQTDPEASKNARGRELRFLANVDPIDAARNISGLNPETTLVVVVSKTFTTAETMLNARTLREWISSALGVSAVAKHMVAVSTNLPLVEKFGIDPNNAFAFWDWVGGRYSVCSAVGVLPLSLQYGFAVVEKFLQGAHSIDQHFSSAPFEKNIPVLLGLLSVWNVSFLGYPARAILPYSQALEKLAPHIQQVSMESNGKGVSIDGLPLPFESGEI

SEQ ID NO: 14284 - protein, 377 aa, Bacillus licheniformis ATCC 14580
MAVEVVMPKLGMSMKEGTVSVWNKKVGEAVEKGESIASINSEKIEMEIESPANGTVLDIQVSEGEGVPPGTVICRIGNENEQTQESQTKQPDPTKERIKISPAARKIAQSANIDIKTLKGTGPGGRITKADVLQALPGRPNKQAAKAEAEERPPASPMRKTIAARMTESLQNSAQLTITMKADITKLTVLQKQLNETAQSRYDTKLTITDFAARAAVFSLLDHPAMNSVYQDGRLATFEHVHLGVAAALDEGLAVPVIRHAERLPLIELAKKIKWYAKKAREGRLLHDEIEGSTFTITNLGAYGVEHFTPILNPPETGILGVGQMYSAPVYQDGELTKGAILPLSLTFDHRALDGAPAAAFLSDVKNYLEDPASILL

SEQ ID NO: 14285 - protein, 312 aa, Campylobacter coli RM2228
MLDVAIIGGGPAGLSAGLYTTRGGLKNVVMFEKGMPGGQIISSSEIENYPGVAQVMDGISFMAPWSEQCMRFGLKHEMVGVEQISKNEDGSFTIRLEGGKTELAKAVIVCTGSAPKRAGFKGEDEFFGKGVSTCATCDGFFYKNKEVAVLGGGDTALEEALYLANICSKVYLIHRRDEFRAAPSTVEKVKKNEKIELITSASIDEVYGDKMGVTGVKVKLKDGSIRDLNVPGIFTFVGLNVRNEILKQDDGKFLCNMEEGGQVSVNLKMQTNVPGLFAAGDLRKDAPKQVICAAGDGAVAALSAMAYIESLH

SEQ ID NO: 14286 - protein, 122 aa, Zea mays
MSLARVASLVAPWAVLVADEKNWDGMVMACETPVLVEFWAPWCGPCRMIAPVIDELAKDYAGKIMCCKVNTDDSPNVASTYGIRSIPTVLIFKGGEKKESVIGAVPKSTLTTLIDKYIGSSS

SEQ ID NO: 14287 - protein, 303 aa, Triticum aestivum
  misc_feature (217)..(217): Xaa can be any naturally occurring amino acid
  misc_feature (237)..(237): Xaa can be any naturally occurring amino acid
  misc_feature (272)..(272): Xaa can be any naturally occurring amino acid
MASFGSMAVALVVCAMLLQTCAATRRLQALVQEQPITMKYHKGALLSGRIAVNLVWYGNFSAPQRAIVTDFVSSLASASPAPQPEPSVATWFKTAQKYYASSKARFPALALGSHVFDQSYSLGRRLRERDLVRLAARGGPSRAINVVLTADDVAAQRVLHGPLPAPMGGLPIGPLTRGGVTHPPGQCAWPFHQPQYGPQMAPLAPPNGEFGVDGMVXSLASMVVGTVTNPFGNGFFXGPPEAPLEAPPACPGVFGKGGFPGFAGSLFVDPAXGASFNGNGAPGRKYLVPALVDPDTSACSPLG

SEQ ID NO: 14288 - protein, 794 aa, Gibberella zeae PH-1
MTDRYVAVHEAANGPGDARPTADQIIKDENLEGKLKDHVIFLTGCSAGIGVDTAKALYLTGATLYLTARNLDKAKTALGDLVQDDRVHLLELDLESLDSVRSCAAKFLSESLKLNILICNAGVMCTPEGRTKEGFETQFATNHLAHFLLFNLLRPSLQKGVKPDRAARVVMLSSLGHRFGEPDFNNINMEGCYDPHKAYVKSKTANLWTANEIERRYGSEGIHAWSVHPGAVLTDLGRHLSEEQKNSLGGDPYLNSVWKFSSQGAATTVWAATAEALEGQGGRYLEDCQIIGKWDPSTSRYAPGYGDHAYDEGKAKAFHIFNSCISNATSPFIDFVFPSLAVTLVVYRVAKGVPIKNSKPCKLQASILVGVQKDTLLAKDIDCFTCPFLATSKRLPGVNPLDSIELFLRRRIGLADSPKAMRIVSCNHSYLCHFLEGCRQPWIGFLSPNFKNTAHFRQKVEAVASAQLTSVTFNYPIHIFHRFRLIFTKTLHKPTSTALPLNMESITTEPPQYDVLFKDQDFPGSLPTPNDTESGEPLPIDRTFCDKLVRIRNDFIMKYGPEVKPIEAHNMLYVAKNTSLVVPKVYAIYQGKETPQNFTYILMQHIQGKTLKELWPELDGTRKTSIAKTLRDSLQQLRRLQHPGYFGNIDGGPPLDDVFTGTQGGLKNVTSPFATEEELINSVIRIFSLETRSWSVNLVKYYQYVLPTVLHSNKAPVFTHNDLQRKNIMVQDDGTIVIIDWEYSSWYPVYWEYSTAMFANGGWRDDWGEYLRIILDEYLNEAVWICQMKTQMWS

SEQ ID NO: 14289 - protein, 544 aa, Yarrowia lipolytica CLIB122
MVLSEHVNADKLLSNLTGKGDEHAIRALIASHTLRDPYSSKYNSQEPIPKFRIPEEGCEEKQAYQLIKDDLDLDGKPNLNLASFVNTYISDRAEKLAVENLTKNLADADEYPALMTVHARCVSILGHLWNNTDHEKAIGTATTGSSEAIHLGGLAMKKRWQEKRRAAGKSTEKPNILMAANAQVALEKFARYFDVEDRIIPVREASKHCLDLSKIKENLDENTIGIFVIMGSTYTGHYEDVQGVAKILDEYEKETGHSIDIHVDGASGAMVAPFLYPDLEWDFRVPRVKSINTSGHKFGLTTAGLGWILWRDAKYLPKELIFELHYLGGKEESYTLNFSRPGFPVLHQYYNFLHLGFDGYKQLHASSMANARLLSVFLEATGHYTCVSEIHLPANGSKPKDVKHVATADPLQYMAGLPVVAFRFSDSFRKAHPEVPQAAVSTLLRVKGYIIPNYELPPSEQKTEILRVVVRQSMSIDLLDRLMEDISAITNVLLEAVEDVKKLRAEGDHDPQLIHKYVLTLVTGKPVEEREEDWEGHSTFRAAC

SEQ ID NO: 14290 - protein, 801 aa, Staphylococcus epidermidis ATCC 12228
MAKQKLVMIGNGMAGLRTIEEILERSQSQFDITIIGKEPYPNYNRIMLSNILQKKMTVEDTIMNPYDWYQENNIELINNDPVEKVDKENKIVTTSKGIEVEYDICIFATGSKAFVLPIPGSNLPSVIGWRTIDDTNKMIEIAQTKKRAVVIGGGLLGLECARGLLDQGMEVTVLHLADWLMEMQLDRKAGEMLKADLEKQGMKIELQANSKEIIGDKDVEAIKLADGRVIETDLVVMAVGIRPYTEVAKDSGLDVNRGIVVNDYMQTSDSHIYAVGECAEHDGKVYGLVAPLYEQGKVLADYLTGKETKGYKGSTAFTSLKVSGCDLYSAGQIVEDEDVHGVEIFNSVDNIYKKVYLSQGQVVGAVLYGDTDDGSRFYNMMKKHETLEDYTLVSLLHKGDEDAGTSIADMSDDETICGCNGVDKGTIVNAITTKGLTSVDEVTKATKAGNSCGKCKGQIGELLQYTLGDDFIAAKPTGICPCTDLTRDQIVTQIRAKNLKSSKEVRHVLDFKDKDGCPKCRPAINYYLNMVYPFEHRDEKDSRFANERYHANIQNDGTFSVIPQMRGGVTDADQLIRLGEVAKKYNVPLVKVTGSQRVGLYGLKKEELPQVWKDLGMRSASAYGKKTRSVKSCVGKEFCRFGTQYTTRLGIRLEKTFEYIDTPHKFKMGVSGCPRSCVESGVKDFGVISVENGYQIFIGGNGGTDVTVGKLLTTVETEDEVIQLCGALMQYYRETGVYAERTAPWLERMGFENVKNVLLNQEKQKELYLRIMEAKKAVENEPWETIVENKEAQKIFEVEKV

SEQ ID NO: 14291 - protein, 154 aa, Cicer arietinum
VKGLTMCYAVILVTFYSAAVSGYWVFGNKSNSNILKSLLPDSGPTLAPTWVLGLAVIFVLLQLFAIGLVYSQVAYEVMEKKSADVKQGMFSKRNLIPRLILRTIYMIFCGFLAAMLPFFGDINGVVGAVGFIPLDFVLPNDSYTTKHTSLQNHP

SEQ ID NO: 14292 - protein, 175 aa, Magnetospirillum magnetotacticum MS-1
MPPASAALERLAEAKGPVELLLAESYVRRDRIALVAFRGTGAEVVLPPTRSLVRAKRVLAGLPGGGGTPLAAGLDAAATLALGVRRSGGSPVIVLLTDGRANVARSGLGGRALAGEEALAAGRLLRAQGLPTLVIDTGARPDGARRLAEAAQARYCPLPHADAGSVSAAIRAVTL

SEQ ID NO: 14293 - protein, 397 aa, Leifsonia xyli subsp. xyli str. CTCB07
MAKAKFQRTKPHVNIGTLGHVDHGKTTLTAAISKVLADKYPSATNVQRDFASIDSAPEERQRGITINISHVEYETPKRHYAHVDAPGHADYIKNMITGAAQMDGAILVVAATDGPMAQTREHVLLAKQVGVPYLLVALNKSDMVDDEEILELVELEVRELLSSQDYLGDDAPVVRVSGLKALEGDEKWVQSVLDLMEAVDNNIPDPVRDKDKPFLMPVEDVFTITGRGTVVTGRAERGTLAVNSEVEIVGIRPTQKTTVTGIEMFHKQLDEAWAGENCGLLLRGTKREDVERGQVVVKPGSVTPHTSFEGTAYILSKDEGGRNNPIYTNYRPQFYFRTTDVTGVISLTEGTEMVMPGDTTDMTVELIQPIAMEEGLGFAIREGGRTVGAGKVTKIIN

SEQ ID NO: 14294 - protein, 240 aa, Sinorhizobium meliloti 1021
MCRPAKHVNSKSKGPGLDTSSSAIFTKNFAALLFDMDGTLLNSMAVVERVWGSWALRNGIDPVALMKIVHGVRAVDTIRALGLPVDPEQEARILAEAEIADVEGIVEIPGAVSFLKTLPPERWAIVTSAPLELAARRLEAAGIPVPRHMVTGEDVSVGKPDPQGYLLAAQRLGVRAEDCLVFEDAPAGVLAGKSAGAEVAVITGAHAAAAEMPHIMLSHYSDVEARLVEDGWLSLHRRRG

SEQ ID NO: 14295 - protein, 519 aa, Debaryomyces hansenii
MFDVDTVHNFFTSWYGILLAVLIGYHVFDYIRIQIVMKKLGCVSPPVELDGFFGFKLLYTSLKHKKEGTLVNFIKERFETVGKDTFSFRIAGTPVISTKNPENIKALLATQFSDFALGTRHAQFKPLLGDGIFTLDGSGWKHSRAMLRPQFAREQVAHVKSLEPHIQMLAKHVRRAKGGAFDVQSLFFRLTVDSATEFLFGESVESLQDESIGMAKDAVDFDGKAGFAEAFNTAQVYLSIRSLAQKAYFLVNNKEFRSSNEKVHKFADYYVQKALNSSPEELEKHSQDGYIFLYELVKQTRDPHVLRDQLLNILLAGRDTTAGLLSFTFYELARNPQVWLKLKEEIYEKFGKGDDARLEDITFESLKKCEYLKALLNEVLRLYPSVPQNFRVAQKDTSLPRGGGPNRDQPIFIAKGQTVTYTVYAMHRDEQFYGKDSEVFRPERWFEPETRKLGWAFLPFNGGPRICLGQQFALTEASYVIARLAQLFPNLASHDDEYPPRKASHLTMCHQSEVKISLA

SEQ ID NO: 14296 - protein, 519 aa, Debaryomyces hansenii
MSELLDSIQPYLTKWYVVISALLVSFFIAHKISVARFKATHNCAASPEYYKVNWFSLPLLYRLIQVKREGRLLDFAQKIYDDVKALTFVIKIVGVPVIITRDPENMKAVLATQFNDFALGTRHAHFKPLLGDGIFTLDGNGWKQSRSMLRPQFSREQVAHVQALEPHLQRLAKHIRLADGETINIQDLFFKLTVDTATEFLFGQSVYSLKDAAINDPPTEDFDGRSSFANSFNTAQTYLGTRAYLQMFYFIVNNSDFRKCCKQVHDFTRFYVQKGLDMTPEELEKKSENGYVFLYELVKQTRDPKVLQDQLLNILLAGRDTTAGLLSFTFFELARHPRVFNKLKEEIYEAFGKGDDARVSEITFESLKKCEYLKWVMNEMLRLYPSVPVNFRVATKRTTLPRGGGPDGNSPIYVGKGTTVAYSVYSTHRMEEYYGKDADEFKPERWAESRKLGWAYVPFNGGPRICLGQQFALTEASYIVTRLLQMFDKLELHDDRPYPPAKSVHLTMCHQDGVYVSLS

SEQ ID NO: 14297 - protein, 228 aa, Nostoc sp. PCC 7120
MNAADDKTIVREYFNSTGFDRWKRIYGDGEVNKVQLDIRNGHQQTVDSVIGWLKNDGNLAELSICDAGCGVGSLSIPLATEGAKVYASDISEKMVEEGKQRALETLGNAENPTFAVQDLESLSGSYHTVICLDVLIHYPQEKADEMISHLCSLAQSRIILSFAPKTCALTLLKKIGSFFPGPSKTTRAYLHREADVIKILESNGFAIQRKEFTKTRFYFSRILEATRS

SEQ ID NO: 14298 - protein, 408 aa, Pseudomonas sp. B4
MIDTIAIIGAGLAGSTAARALRAQGYEGRIHLLGDESHQAYDRTTLSKTVLAGEQPEPPAILDSAWYASAHVDVQLGRRVSCLDLANRQIQFESGAPLAYDRLLLATGARARRMAIRGGDLAGIHTLRDLADSQALRQALQPGQSLVIVGGGLIGCEVATTARKLSVHVTILEAGDELLVRVLGHRTGAWCRAELERMGVRVERNAQAARFEGQGQVRAVICADGRRGPADVVLVSIGAEPADELARAAGIACARGVLVDATGATSCPEVFAAGDVAAWPLRQGGQRSLETYLNSQMEAEIAASAMLSQPVPAPQVPTSWTEIAGHRIQMIGDAEGPGEIVVRGDAQSGQPIVLLRLLDGCVEAATAINATREFSVATRLVGTRVSVSAEQLQDVGSNLRDLLKAKPN

SEQ ID NO: 14299 - protein, 521 aa, Oceanospirillum sp. MED92
MLDANVKKQLDAYLQNIVTPVEVTVSLNDSEKSTQLEQLAKEIAELSDKVSLIHGPVASGRVPAMAVAPASEAPRVEFAGIPMGHEFTSLVLALLQAGGHPAKEEAALLEQIKRLDNPLKVETYISLSCQNCPEVVQAFNLMAVLNPNIQHSMIDGALFQDEIESRKVMAVPAVYVNGELFGQGRMSLTEIVDKLDSGSAEDKVAELNDKELYDVLVVGGGPAGASAAIYAARKGIRTGIVAERFGGQVLDTMAIENFISVQATEGPKLVANLEQHVLNYDVELVQNQRAAQIKRNELIEIELESGAVLKSRSVILSTGARWREMNVPGEQAYKGRGVAYCPHCDGPLFKGKSVAVIGGGNSGIEAAIDLAGIVEHVTVLEFADSLRADEVLQRKARSLPNVKIIMNAMTTEVIGDGERVTGLEYQDRSSGDQHTLALAGVFVQIGLIPNTEWLEGSMELSQQGEVVINERGETSLPGVFAAGDMTTVPYKQIIIAMGAGSTAALSAFDYLIRESVEEEAA

SEQ ID NO: 14300 - protein, 361 aa, Triticum aestivum
  misc_feature (123)..(123): Xaa can be any naturally occurring amino acid
  misc_feature (180)..(180): Xaa can be any naturally occurring amino acid
  misc_feature (204)..(204): Xaa can be any naturally occurring amino acid
  misc_feature (237)..(237): Xaa can be any naturally occurring amino acid
  misc_feature (265)..(265): Xaa can be any naturally occurring amino acid
AYLGDLSNKFVQKSRLAPVRNSRDIVDPRVRGERGEDAVVEVLSWKFSRKGATGFSWASTADEVTAGVTASGLTAIVTGASSGIGAETARVLAARGAHVVMAVRNLAAGDTVRQAVLAETPAXSVDLMELDVSSLASVRNFAADFAARGLPLNILVNNAGIMATPFTLSKDGIQMQFATXNHVGHFLLTHLVLDTMKKTSRESXVGGRIVIVASGGHRVTYKEGIRFAKINDEQGYXTLAAYGQSKLANILHAGELARRFKMTNXEEGVNITANSLHPGAIITNLPCHHSIIDVLHRTLGRLVLKNAKQGAATQCYVALHPDAKGVSGKYWSDSNLYEPSEKAKDAELGKKLWDYTLDLVA

SEQ ID NO: 14301 - protein, 468 aa, Hordeum vulgare subsp. vulgare
MGAFILLLCLLVPLVLVCAVRARKGAGGRSSSGGGKKGRLPPGSMGWPYVGETTQLYSSKNPNVFFARKRNKYGPIFKTHILGCPCVMVSSPEAAKFVLVTQAHLFKPTFPASKERMLGRQAIFFQQGDYHTHLRRLVSRAFSPEAIRGSVSSIEAIALRSLGSWEGHEVNTFQEMKTYALNVALLSIFGEEEMQYIEELKQCYLTLEKGYNSMPVNLPGTLFHKAMKARKRLGAIVAHIISARRERERGSDLLGSFMDGREALTDDQIADNAIGVIFAARDTTASVLTWMVKFLGDNPAVLKAVTEEHAEIAREKALSGEPLSWADTRRMRVTGRVIQETMRVASILSFTFREAVEDVEYQGYLIPKGWKVLPLFRNIHHNPDHFPSPEKFDPSRFEVAPKPNTFMPFGNGTHSCPGNELAKLEMLVLCHHLATKYRWSTSKSESGVQFGPFALPINGLPMTFTRKA

SEQ ID NO: 14302 - protein, 516 aa, Shewanella oneidensis MR-1
MTTPVDAPKWPRQIPYIIASEACERFSFYGMRNILTPFLMTALLLSIPEELRGAVAKDVFHSFVIGVYFFPLLGGWIADRFFGKYNTILWLSLIYCVGHAFLAIFEHSVQGFYTGLFLIALGSGGIKPLVSSFMGDQFDQSNKSLAQKAFDMFYFTINFGSFFASLSMPLLLKNFGAAVAFGIPGVLMFVATVFFWLGRKRYIHMPPEPKDPHGFLPVIRSALLTKVEGKGNIGLVLALIGGVSAAYALVNIPTLGIVAGLCCAMVLVMGFVGAGASLQLERARKSHPDAAVDGVRSVLRILVLFALVTPFWSLFDQKASTWILQANDMVKPQWFEPAMMQALNPLLVMLLIPFNNFVLYPAIERMGVKLTALRKMGAGIAITGLSWIVVGTIQLMMDGGSALSIFWQILPYALLTFGEVLVSATGLEFAYSQAPKAMKGTIMSFWTLSVTVGNLWVLLANVSVKSPTVTEQIVQTGMSVTAFQMFFFAGFAILAAIVFALYARSYQMQDHYRQAT

SEQ ID NO: 14303 - protein, 479 aa, Agrobacterium tumefaciens str. C58
MRRKEQPWFSTGAAGGGINTATPMRIETIIFDCFRQAAEKPQEISIFRHKFTLHLHAAVASICQTCLWVYAKRRAMMAKQKVAMLTAGGLAPCLSSAVGGLIERYSDIAPEIDIIAYRSGYQGVLLGERIEITKDMREKAHLLHRYGGSPIGNSRVKLTNAADCAKRGLVKEGDNPLRVAAERLAADGITILHTIGGDDTNTTAADLAAYLGANGYDLTVVGLPKTVDNDVVPIKQSLGAWTAAEVGAAFFDNVSNEQSAAPKTFVIHEVMGRHCGWLTAATARAYIQKTRGNDYVEGLMMNTQMKNIDGIYLPEMAFDIEAEAERLKEVMDKHGYVTLFVSEGAGLDAIVAEREAAGEAVKRDAFGHVKIDTINVGGWFQKQFAGLIGAERSMVQKSGYFARSAPANGDDLRLIQGMVDLAVESALNKVSGVTGHDEDQNGKLRTIEFPRIKGGKHFDLSAKWFTEVMEHVGQPFTAA

SEQ ID NO: 14304 - protein, 413 aa, Crocosphaera watsonii WH 8501
MEIRRIALVLRVAVVGSGPAGSSAAETLAKAGIETYLFERKLDNAKPCGGAIPLCMVSEFDLPPEIIDRRVRKMKMISPSNVEVDINLDRQDEYIGMCRREVLDGFLRDRAAGLGANLINGTVYQLEIPKTSEGAYTLHYADHSNGNSVGERKSLEVDLVIGADGANSRVAKAIDAGDYNYAIAFQERIRLPQDKMTYYEDLAEMYVGKDVSPDFYAWVFPKYDHVAVGTGTMKVNKNMIKGLQAGIRARAARRLEGGEIIKVEAHPIPEHPRPRRVVGRVALVGDAAGTVTKSSGEGIYFAAKSARMCAETIVEMSNAGQRIPTEDDLKVYLKRWDKQYGMTYLVLDILQRVFYRTDATREAFVEMCADKDVQRMTFDSYLYKTVVPANPLVQMKITAKTIGSLLRGHALAP

SEQ ID NO: 14305 - protein, 521 aa, Juglans regia
MPAVSGVPAGGVPGKAYPGNLTPYVTVTCIVAAMGGLIFGYDIGISGGVTSMDPFLKKFFPSVYRKKNEDKSTNQYCQYDSETLTMFTSSLYLAALLSSIVASTVTRKFGRKLSMLFGGVLFCAGAILNGFAKAVWMLIVGRILLGFGIGFANQSVPLYLSEMAPYKYRGALNIGFQLSITIGILVANVLNYFFAKIEGGWGWRLSLGGAMVPALIITVGSLVLPDTPNSMIERGQHDEAKEKLKRIRGVDDVEEEFCDLVAASEASQLVENPWRNLLQRKYRPHLSMAILIPFFQQLTGINVIMFYAPVLFNTIGFGSDASLMSAVITGIVNVGATMVSIYGVDKWGRRFLFLEGGTQMLICQAIVTAAIGAKFGVDGNPGDLPKWYAIVVVLFICIYVAGFAWSWGPLGWLVPSEIFPLEIRSAAQSVNVCVNMIFTFVVAQAFLAMLCHMKFGLFLFFAFFVMVMTVFVYFFLPETKGIPIEEMNRVWKTHWYWSRFVSDDDNPKVEMGKGGRAIKNV

SEQ ID NO: 14306 - protein, 105 aa, Rickettsia typhi str. Wilmington
MVNNVTDISFKNEVLESDLPVIVDFWAEWCGPCKMLIPIIDEISKELQDKVKVLKMNIDENPKTPSEYGVRSIPTIMLFKNGEQKDTKIGLQQKKSLLDWINKSI

SEQ ID NO: 14307 - protein, 509 aa, Burkholderia thailandensis E264
MNATPSSQKGHHVPTVKLLIAGEFVESHATEWRDIVNPATQELLARVPFATAAEVDAAVEAAQAAFAKWKSTPLSARMRIMLKFQDLVRANLPQIAKTLTAEQGKTLPDAEGDVFRGLEVVEHACSIGTLQLGEFAENVAGGVDTYTLRQPLGVCVGITPFNFPAMIPLWMFPMAIVCGNTFVLKPSEQDPLSTMLLVELAIEAGVPKGVLNVVHGGKEVVDALCSHPLVKAISFVGSTAVGTHVYRLGSEHGKRVQSMMGAKNHAVILPDANREQTVNALVGAAFGAAGQRCMATSVAVLVGAARDWLPDIVAKAKTLKVNAGAEAGTDVGPVVSRAAKQRILGLIETGAKEGAKLVLDGRDVSVPGYEHGNFIGPTIFADVKPEMSVYTHEIFGPVLCVMSVDTLDEAIALVNANPFGNGVGLFTQSGAAARKFQSEIDIGQVGINIPIPVPVPFFSFTGSRGSKLGDLGPYGKQVVQFYTQTKTVTARWFDDDATAGAVNTTIRLH

SEQ ID NO: 14308 - protein, 508 aa, Juglans regia
MPAVSGVPAGGVPGKAYPGNLTPYVTVTCIVAAMGGLIFGYDIGISGGVTSMDPFLKKFFPSVYRKKNEDKSTNQYCQYDSETLTMFTSSLYLAALLSSIVASTVTRKFGRKLSMLFGGVLFCAGAILNGFAKAVWMLIVGRILLGFGIGFANQSVPLYLSEMAPYKYRGALNIGFQLSITIGILVANVLNYFFAKIEGGWGWRLSLGGAMVPALIITVGSLVLPDTPNSMIERGQHDEAKEKLKRIRGVDDVEEEFCDLVAASEASQLVENPWRNLLQRKYRPHLSMAILIPFFQQLTGINVIMFYAPVLFNTIGFGSDASLMSAVITGIVNVGATMVSIYGVDRWGRRFLFLEGGAQMLICQAVVTAAIGAKFGVDGNPGDLPKWYAIVVVLFICIYVAGFAWSWGPLGWLVPSVNVCVNMIFTFVVAQAFLAMLCHMKFGLFLFFAFFVMVMTVFVYFFLPETKGIPIEEMNRVWKTHWYWSRFVSDDNNPKVEMGKGGRAIKNV

SEQ ID NO: 14309 - protein, 338 aa, Xanthophyllomyces dendrorhous
MAVKVGINGFGRIGRIVLRNAIIHGDIDVVAINDPFIDLEYMVYMFKYDSTHGVFKGSVEIKDGKLVIEGKPIVVYGERDPANIQWGAAGADYVVESTGVFTTQEKAELHLKGGAKKVVISAPSADAPMFVCGVNLDKYDPKYTVVSNASCTTNCLAPLGKVIHDNYTIVEGLMTTVHATTATQKTVDGPSNKDWRGGRGAGANIIPSSTGAAKAVGKVIPSLNGKLTGMAFRVPTPDVSVVDLVVRIEKGASYEEIKETIKKASQTPELKGILNYTDDQVVSTDFTGDSASSTFDAQGGISLNGNFVKLVSWYDNEWGYSARVCDLVSYIAAQDAKA

SEQ ID NO: 14310 - protein, 359 aa, Pyrococcus horikoshii OT3
MVEKPVVIKFGGTSVRYAFEEALELVAKLHENMKIIVVVSALAGVTDCLLRLAKGDKSALLEIDEIHEELSQELNVQLEHLIHQLKKTINSKSSFPSEKAFIDEIASFGERFSAKLFSEGLKILGITARPVDSKDVLFVKGEFGNAEVEFKKSAQGVDVLYRMLRRGIVPVVTGYYGNLNGFRATFGRGGSDYSATSIASLVNAKAVLIMSDVEGIYTADPKLVPPARLIHYISYKEAKTAAKLGMKVLHPRAIDPVEGKIPVILGKTRDLKFGTLISHESQGIPIVTHKLLENHAEISVVSVKTNIPLPYEVYEEGDLYFKIKTSKDQFLEVLRDVHRRVVENENLHSSHDGELWTWV

SEQ ID NO: 14311 - protein, 428 aa, Collimonas fungivorans
MTIKHEVPSYLTQHGIGPWGDYLEQIDRVTPYLGNLARWVETMKRPKRMLIVDVPIERDDGTIAHFEGYRVQHNTSRGPGKGGVRFHQDVTLSEVMALSAWMTVKNAAVNVPYGGAKGGIRVDPKTLSQGELQRMTRRYTSEIGIIIGPNKDIPAPDVNTNEQIMAWMMDTYSMNQGSTASGVVTGKPISLGGSLGRREATGRGVFVVGCEAAVKRGLDIHGAKIAVQGFGNVGGIAARLFSEAGAKVVAVQDHISTVVRSSGLDVAALQAHVNETGSVAGFKGGEEISDRAQFWAVDCDILVPAALEQQITVENAPTIRAKIILEGANGPTSPAADDILHEKGVLVVPDVIANAGGVTVSYFEWVQDFSSFFWTEDEINLRLTRIMREAFTAVWQLAEEKKVSLRTAAFIVACTRVLQAREMRGLYP

SEQ ID NO: 14312 - protein, 558 aa, Candidatus Blochmannia floridanus
MKNINPTKTKSWKSLKKHFLNINTTHILDLFKQNKYRFLSFSTIFNNEILLDYSKNLITEETINKLIDLAKECDLPGAIKSMFQGAKINRSENRAVLHTALRNRKNIPILVDGHDIMPNINTVLEKMKIFCQNIIQGYWKGYTNKNITDIVNIGIGGSNLGPHMVTEALTPYKNHLNIHFVSNIDGTHLFEVLKKINPETTLFLITSKTFTTQETMTNAFSARNWFVQKITKSSSFNHYEQHISKHFIALSANPVEVKKFGINPSTNMFEFWEWVGGRYSLWSSVGLSIMLSLGSNHFESLLDGAYAMDMHFKNTPLNKNIPVILALIGIWYNNFFLSETEAIFPYDQYMHRFAAYIQQSNMESNGKCVDRNGYPINYQTGPIVWGESGTNGQHSFFQLIHQGTKMIPCDFIAPVLSHHPIFDHHDKLIANFLAQTKALAFGKKLEEITQEYITKKQSYIYDLNILPFKVFKGNNPSNSILIKKITPYTLGALIALYEHKIFTQGVIFNIYTFDQWGVELGKQLADDIYSILKQTNINPQYDSSTNGLINYYKYWSQA

SEQ ID NO: 14313 - protein, 161 aa, Brassica napus
MKGLFKSEPRTPPDIVRQTRDLLLYADRSVSIPDLRESKRQEKLSELSKNLRELKLILYGNSDAEPVAEACAQLTQEFFKGDTLRRLITMLQYLNLEARKDATQVVANLQRQQVNSRLIASDYLESNIDLMDFLADGFENTDMALHYGTMFRECIRHQMRS

SEQ ID NO: 14314 - protein, 1478 aa, Saccharomyces cerevisiae
MPFLRKIAGTAHTHSRSDSNSSVKFGHQPTSSVASTKSSSKSPRATSRKSIYDDIRSQIPNLTPNSTSSQFYESTPVIEQSFNWTTDDHISAGTLENPTSFTNSSYKNDNGPSSLSDSRKSSGGNSVNSLSFDKLILSWDPTDPDEWTMHRVTSWFKFHDFPESWILFFKKHQLFGHRFIKLLAYDNFAVYEKYLPQTKTASYTRFQQLLKKTMTKNVTNSHIRQKSASKLKSSRSSSESIKSKLKNSKSQEDISNSRSTSESPLSPTKSGPSKTDEKIFLHSTSTHQKTKSASSLYRRSFISLRGSSSSNASSAKSPSNIKLSIPARPHSIIESNSTLTKSASPPASPSYPSIFRRHHKSSSSESSLLNSLFGSGIGEEAPTKPNPQGHSLSSENLAKGKSKHYETNVSSPLKQSSLPTSDDKGNLWNKFKRKSQIGVPSPNTVAYVTSQETPSLKSNSSTATLTVQTADVNIPSPSSSPPPIPKTANRSLEVISTEDTPKISSTTASFKETYPDCINPDKTVPVPVNNQKYSVKNFLLDQKFYPLKKTGLNDSENKYILVTKDNVSFVPLNLKSVAKLSSFKESALTKLGINHKNVTFHMTDFDCDIGAAIPDDTLEFLKKSLFLNTSGKIYIKDQMKLQQKPKPAPLTSENNVPLKSVKSKSSMRSGTSSLIASTDDVSIVTSSSDITSFDEHASGSGRSTPKPRVITMTEVSNTNPTEELNYWNIKEVLSHEENAPKMVFKTSPKLELNLPDKGSKLNIPTPITENESKSSFQVLRKDEGTEIDFNHRREAPYTKPEVAPKRESPKPPANTSPQRTLSTSKQNKPIRLVRASTKISRSKRSKPLPPQLLSSPIEASSSSPDSLTSSYTPASTHVLIPQPYKGANDVMRRLKTDQDSTSNSPSLKMKQKVNRSNSNVSTSNSIFYSPSPLLKRGNSKRVVSSTSAADIFEENDITFADAPPMFDSDDSDDDSSSSDDIIWSKKKTAPETNNENKKDEKSDNSSTHSDEIFYDSQTQDKMERKMTFRPSPEVVYQNLEKFFPRANLDKPITEGIASPTSPKSLDSLLSPKNVASSRTEPSTPSRPVPPDSSYEFIQDGLNGKNKPLNQAKTPKRTKTIRTIAHEASLARKNSVKLKRQNTKMWGTRMVEVTENHMVSINKAKNSKGEYKEFAWMKGEMIGKGSFGAVYLCLNVTTGEMMAVKQVEVPKYSSQNEAILSTVEALRSEVSTLKDLDHLNIVQYLGFENKNNIYSLFLEYVAGGSVGSLIRMYGRFDEPLIKHLTTQVLKGLAYLHSKGILHRDMKADNLLLDQDGICKISDFGISRKSKDIYSNSDMTMRGTVFWMAPEMVDTKQGYSAKVDIWSLGCIVLEMFAGKRPWSNLEVVAAMFKIGKSKSAPPIPEDTLPLISQIGRNFLDACFEINPEKRPTANELLSHPFSEVNETFNFKSTRLAKFIKSNDKLNSSKLRITSQENKTE

SEQ ID NO: 14315 - protein, 316 aa, Alkaliphilus metalliredigenes QYMF
MRTIKIGSRASQLALVQAEIIINMLKEKFPQYTYEIIKITTLGDRILDKTLDKIGGKGLFVKEIQKALAEEKIDLAIHSMKDMPGETPEELVLGAITKREDPRDVLITRENKSLEELPKGAVIGSSSLRRQAQVMALRGDIKVVPIRGNVGTRLGKIETESLDGVILAAAGLNRLGLKEKISSYLEIEDFTPAVGQGALGCEARRKDIEMLEMLLAINHEETYRCVMAERAFLKLLEGGCHVPIGAYGQQQGQELHMTGMVASSDGRRVIKEQVMGDIADFQALGIQLGETLIEKGAKEILETVNTDNRIVNTEGS

SEQ ID NO: 14316 - protein, 325 aa, Neurospora crassa
MTKVLLTGGSGFIAAHILEQLLAKGHTVVTTVRSEDKAQNIREAYPDKASSGELKVVIVPDIAKLDAFDEVVKEPGLEVVLHTASPFHFKFTPKEDPKTELIDPAVNGTTGILKAIARSAPTVRRVVITSSFAAILDENKITDPNHTFSEASWNPVTIDDIHRNPATAYRASKTLAEKAAWDFVRDPANNVKFDLATINPPMVFGPVVHHLASLSSINTSNERIVDLLQGKWKEGVPSTGAATIWIDVRDVARAHIRAGLEVPEAGGKRLFTTAGTFSNSEIAEKVRKNFPEYGDKLPEERRSRAASCRRMISGSRSITRRRMSC

SEQ ID NO: 14317 - protein, 497 aa, Erythrobacter sp. NAP1
MRQVDHFIVGERPAPTRKANVWNPSTGEVQAEVALGDRDLLERVVATAKEVQPAWAATNPQKRARVMFRFKELIEANMQELAELLSSEHGKVVDDAKGDVQRGLEVIEFACGIPQVLKGEYTQGAGPGIDVYSMRQPLGIGAGITPFNFPAMIPMWMFGMAIAAGNAFILKPSERDPSVPVRLAELFVEAGAPEGLLQVVHGDKEMVDAMIEHPDIPAISFVGSSDIAHYIYRRGAEFHKRVQAFGGAKNHGIVMPDADLDQVVNDLSGAAFGSAGERCMALPVVVPVGDETADKLREKLIPAINALRVGVSTDPDAHYGPVVTPQHKERIEQWITTAEREGGEIVVDGRGFSLQGHENGFFVGPTLIDHVTPNMSSYKEEIFGPVLQIVRAKDFEEAVRLPSEHQYGNGVAIFTRNGHAAREFASRVNVGMVGVNVPIPVPVSYHTFGGWKRSGFGDIDQYGTEGLQFWTKKKKITQRWPDGGGDGSNAFIIPTMG

SEQ ID NO: 14318 - protein, 480 aa, Neisseria meningitidis Z2491
MKQLAMYINGRFENDFNGEWRNVLNPSTEEAIAREPKGGKADVDRAVAAARAAQPAWERLPAVERGAYLRKIAQGIRERADELTDTIVAEGGKTKDLARVEVMFTADYLDYQAEWARRYEGEIIQSDRPRENILLFKRPLGVIAGILPWNFPFFLIARKMGPALVTGNTIVVKPSSVTPINCHIFAEIVDAVGLPAGVFNVVNGPGAEIGNALSAHPQVDMVSLTGSVEAGRQVMEAASANITKVSLELGGKAPAIVLKDADLDLAVKSILASRVGNTGQICNCAERVYVHSSLKDAFIEKMTAAMKGVRYGNPAEAEAGALEMGPLIEERAVKAVAEKVERAVKQGAKLVCGGKRAEGRGYFFEPTLLTDTDNSMDIMKEETFGPVLPVSAFDTLDQVIALANDCEFGLTSSVYTTNLNEAFYVTRRLQFGETYINRENFEAMQGFHAGWKKSGIGGADGKHGLEEYLQTQVVYLETDI

SEQ ID NO: 14319 - protein, 122 aa, Zea mays
  misc_feature (49)..(49): Xaa can be any naturally occurring amino acid
  misc_feature (83)..(83): Xaa can be any naturally occurring amino acid
MGCTQSALTGAPVAPGLFFLAARTTSEAAITFGQVRFVIAPFLFYARGXQGFGPSSSCCKGGRNLKSAASTPADRRAACNCLXNTTRGVRGLNTGNSDSIPSNCGVSMPYTISTFTHCSWVS

SEQ ID NO: 14320 - protein, 637 aa, Glycine max
MLLPTSGVGMNSAMDDMNLIQQTQRHHLVVREIGEEIDLEIGAGEDDPSFGSATLIGAPMRESSVEEHGESKQMGMISQLPNDAQDMSKTQQGKRKKKVVKRWREEWADTYKWAYVDVKDGTPRIFCSVCREYGRKHRRNPYGNEGSRNMQMSALEEHNNSLLHKEALRLQMASKDKIVVDKPVYVKVAMSKTAGSILEATLKRDPHEVEFIQAVQEAVQALERVIAKNSRYINIMERLLEPERMIVFRVSWVDDRGGTCVNRGFRVQFNQSMGPCRGGIRFHPSMNLSVAKFLGFEQTLKNALSPYKLGGAAGGSDFDPKGKSDNEIMRFCQSFMSEMYRYLGPDKDLPSEEMGVGTREMGYLFGQYRRLAGHFQGSFTGPRIFWSGSSLRPEATGYGLVFFAQLMLADMNKELKGLRCAVSGSGKIAMHVLEKLIAYGALPISVSDSRGYLVDEDGFDYMKISFLRDIKAQQRSLRDYSKTYARSKYYDEAKPWSERCDVAFACTSQNEIDQSDAINLVNSGCRILVEGSNMPCTPEAVQILRKASVLIAPAMAAGAGGVVAGELELNHECSLMHWSPEDFESKLQEAMKQTYQRAMKAATDFGYQKESPEALVHGAVISAFLTIAQAMTDQGSI

SEQ ID NO: 14321 - protein, 155 aa, Brassica napus
RDPDPVIFLENELLYGESFPVSAEVLDSSFCLPIGKAKIERGGKDVTITAFSKMVGYALQAAEILSKEGISAEVINLRSIRPLDRAAINASVRKTNRLVTVEEGFPQHGIGAEICMSVVEESFEYLDAPVERIAGADVPMPYAANLERMAVPQVD

SEQ ID NO: 14322 - protein, 159 aa, Methanopyrus kandleri AV19
MPKTKHWHYSIPPEELDDERTAKAFIRELRISPKHAREICRAIRGMPLDRAKEFLRRVIRKEEAVPFRKHKKKVPHRRQIRPGWDAGRFPEKAAREILRVLEHAEANAEYKGLDTDRLYIKHIAAHKGRVIRGWIPRAFGRATPFNTPTTHIEVILEER

SEQ ID NO: 14323 - protein, 314 aa, Bradyrhizobium japonicum USDA 110
MAEWLKEAGLPDGVFNVVQGDKEAVDALLHHPNVSAVSFVGFTPIAQYIYSTAANTGKRCQALGGAKNHMIVMPDADMDQAVDALMGAAYGSAGERCMAISVAVPVGEGTADKLISALEPKVRGLKVGPGTDPEAEMGPIVTKQHLDKVRSYIDAGVADGAKLLVDGRKFKMQGYEDGFFLGGTLFDHVKPSMKIYKEEIFGPVLSVVRAPDYATAARLINEHEFGNGTSIFTRDGDAAREFAHQIKVGMVGINVPIPVPMAFHSFGGWKASIFGDHHMHGPEGVRFNTRMKTVTSRWPTGIRAGAEFVMPTMS

SEQ ID NO: 14324 - protein, 61 aa, Cucumis melo
DTLLDADLESDALGWQYISGTLPDSREFDRIDNPQLEGYKFDPNGEYVRRWLPELSRLPTE

SEQ ID NO: 14325 - protein, 332 aa, Candidatus Protochlamydia amoebophila UWE25
MPCDVLLIEHPTHILYLTGLELSAGKILVSENQTCLIVDGRYFEICNQQTLYPVILLHESSLTNWLKEYQLKNLGIDPETTTFGRYSFLSSSLSSCTIIPIPSPLQEMRLIKDEQEIIYLKESAKLALEGYHYLKTLLQVGVTEAELAFELEFFWKKKGAKQLAFDPIIAFGFNSSKPHYRADKEILQANMPVLIDIGVVVHHYHSDMTRVDFFGNVSEQIQSIYSIVEEAKHQAMHLCKPGTLIGELDNTARSFIESKGYGDYFTHSLGHGIGLDIHESPTIRRSGPFSDYPLQAGMVITIEPGIYLKGVGGVRLEDTLLITETGYEILTQ

SEQ ID NO: 14326 - protein, 370 aa, Legionella pneumophila str. Paris
MNIFNLPDLGEGLPDAEIHEWFVKEGDTVKADQPLVSMETAKAVVDVPCPQSGTIAKLYGKPGDVIKTGEPLVAFVSTTEKPADKGTVVGNLEESTDVSEDNFIIGSQRSSHRVKTTPAVRMLAKKLGVDLSSLKGSGDNGVITREDVQNQANINSQPPAGFEPLRGVRRAMLNSMVQSHAEIVPVSIFDEADIHIWKPNTDITVRLIRAIIHASKKEPALNAWFDTKHAARRCFKEVHLGIAMDNEEGLFVPVIHDAEKYSDSELRKIIDEFKESVRNRAVSADKLKGATITLSNFGKFSGRFASPIIVPPMVAILAVGRLYKAPVINDEDKIEAHKMLPLSLSFDHRAITGGEATRFLGAVIESLQQA

SEQ ID NO: 14327 - protein, 257 aa, Mesorhizobium sp. BNC1
MTLTLVRKEEFALLTLNRPEALNALSFALLKDIADALDEVAGWRDVRALFITGAGQKAFCAGADIKELRHRSLSEQKRGAEAGQATFARLDRLPIASVALINGYAFGGGLELALAATFRIASSNALFGLPEVKLGLIPGYGGTQRLPRIVGEARALEMIMTGRSVAAEEAERIGLIHQVVNDGDLWEAGVAFARRFTRFSLPSLELARRAVQRAAEMPLADGLQMEAELSTLAYRTADAEEGMAAFEEKRQAEFKDE

SEQ ID NO: 14328 - protein, 590 aa, Pyrococcus horikoshii OT3
MRIAVIDYDKCNPDKCGHFLCERVCPVNRMGGEAIIIDEENNRPIIQEASCTGCGICVHKCPFKAISIVNLPEQLEEDCVHRYGVNAFVLYRLPVVKDGMVVGIVGPNGTGKTTAVKILAGQLIPNLCCDNDSWDDVIKAFRGSELQNYFEKLKNGEIKPVVKPQYVDLLPKAVKGKVGELLKKVDETGKFEEIVKVLELEKVLEREIDQLSGGELQRVAIAAAILRKAHFYFFDEPSSYLDIRQRLNVARVIRRLADEGKAVLVVEHDLAVLDYLSDIVHIVYGEPGVYGIFSQPKGTRNGINEFLQGYLKDENVRFRPYEIKFTKLSERVEVERETLVEYPRLVKDYGSFKLEVEPGEIRKGEVIGIVGPNGIGKTTFVKMLAGVEEPTEGKVEWDLTVAYKPQYIKAEYEGTVYDLLSKIDASKLNSNFYKTELLKPLGIIDLYDKNVNELSGGELQRVAIAATLLRDADIYLLDEPSAYLDVEQRLATSRAIRHLMEKNEKTALVVEHDVLMIDYVSDRLIVFEGEPSKYGKALPPMGMREGMNRFLASVGITFRRDPDTGRPRANKEGSVKDREQKEKGEYYYTD

SEQ ID NO: 14329 - protein, 651 aa, Triticum aestivum
MSKLLVIALLLLPLINHGIYLATAWDDQDFFKYCPPSNCSQHGPEVRFPFCLESSNTSAVAAAAAASCGCSSTDGLIWKLACFGQDTILVHPVLGSYSVSAIDYRRSSVKLIPLVDPCLMLQQKLAISRRWSSRQVDVIDGMQLPDRQFSILSYKYATLVCCSSEFTPAAVDADSIAGPVSCLSNTTLFLYLVAAYKDMSILPLDCKVFPVSDGVSGRLIPMYMLEDPMSGTPFSLSFKERAERMLSFAETTVYWFGGNCRQCELSGQRCAFSSQRDETFCIPDPHGSRIKVIAATSSVAAFVVLLVTVATVLYPSLKTRYNAEIHLKVEMFLKTYGTSKPTRYTFSEVKKMARRFKEKVGQGGFGSVYKGELQNGVPVAVKMLENSTGEGEAFINEVATIGLIYHANIVQLLGFCSEGMRRALIYEFMPNESLEKYIFSRDSANFQHLLVPDKLLDIALGIARGMEYLHQGCNQRILHFDIKPHNILLDYNFNPKISDFGLAKLCARDQSIVTLTAARGKMGYIAPELYSRNFGGVSYKSDVYSFGMLVLEMVSGRRNSDPRIGSQDDVYLPEWIYEKVINGEELALTLETTQEEKDKVSQLAMVALWCIQWNPRNRPSMTKVVNMLTGRLQSLQMPPKPFVSYENEPMP

SEQ ID NO: 14330 - protein, 337 aa, Crocosphaera watsonii WH 8501
MIRVAINGFGRIGRNFLRCWLGRENTGLEVVGINDTSDPRTNAHLLRYDSMLGILDADIEADENSITVNGKTIKCVSDRNPLNLPWTEWNVDLVIESTGVFVTEEGASKHIVAGAKKVLITAPGKGGNVGTYVVGVNAQDYEHDKHNVISNASCTTNCLAPVVKVLNDNFGIIKGTMTTTHSYTGDQRILDASHRDLRRARAAAVNIVPTSTGAAKAVALVIPEMKGKLNGIAMRVPTPNVSVVDLVAQVEKSTIAEQVNDIFKTASEGSMKGVLGYNDLPLVSCDYRGTDVSSIVDASLTMVMGGDMVKIVAWYDNEWGYSQRVVDLAEVVANKWK

SEQ ID NO: 14331 - protein, 583 aa, Arabidopsis thaliana
  misc_feature (565)..(565): Xaa can be any naturally occurring amino acid
MGGGGNLVDGVRRWLFFQRRPSSSSSSNNHDQIQNPPTVSNPNDDEDLKKLTDPSKLRQIKVQQRNHLPMEKKGIPNAEFFTEYGEANRYQIQEVVGKGSYGVVGSAIDTHTGERVAIKKINDVFDHISDATRILREIKLLRLLLHPDVVEIKHIMLPPSRREFRDVYVVFELMESDLHQVIKANDDLTPEHHQFFLYQLLRGLKYVHAANVFHRDLKPKNILANADCKLKICDFGLARVSFNDAPTAIFWTDYVATRWYRAPELCGSFFSKYTPAIDIWSVGCIFAEMLLGKPLFPGKNVVHQLDIMTDFLGTPPPEAISKIRNDKARRYLGNMRKKQPVPFSKKFPKADPSALRLLERLIAFDPKDRPSAEEALADPYFNGLSSKVREPSTQPISKLEFEFERKKLTKDDIRELIYREILEYHPQMLEEYLRGGNQLSFMYPSGVDRFRRQFAHLEENQGPGGRSNALQRQHASLPRERVPASKNETVEERSNDIERRTTAAVASTLDSPKASQQAEGTENGGGGGYSARNLMKSSSISGSKCIGVQSKTNIEVNKGKLHISXIEEQDETAAVKVASLHNS

SEQ ID NO: 14332 - protein, 130 aa, Brassica napus
MSSTVNPNNPWATYDSYRDCSQGICSVYCPQWCYVIFPPPPPSFFLDDEDDSSSSDFSPLLIALIGILASAFILLGYYTLISKYCHRRRQASSSTAASISISSFVTEAPEGNNGAPDPTRDGLDETLIKS

SEQ ID NO: 14333 - protein, 162 aa, Triticum aestivum
MARLNSKAVAAAVVLAAVVLMMAGREASAALSCGQVDSKLAPCVAYVTGRASSISKECCSGVQGLNGLARSSPDRKIACRCLKSLATSIKSINMGKECCSGVQGLNGLARSSPDRKIACRCLKSLATSIKSINMDKVSGVPGKCGVSVPFPISMSTNCNNVN

SEQ ID NO: 14334 - protein, 523 aa, Polaromonas sp. JS666
MLDASTKAQLKSYLERATQPIEIIASLDDGKASGELLSLLKDVAESSPLVTLTESRDDPHRKPSFSVNRPGENHGPRFAGLPMGHEFTSLILALLQVGGYPPRVEQAVLEQIRALDGDFEFEIYVSLTCHNCPDVVQALNLMAVQNPRIRTTMIEGGTFQDEVKERQVMAVPTVFLNGTEFGQGRMSLEEILAKIDTSGVEHEAAKIAAKDPFDVLIVGGGPAGAAAAVYAARKGIRTGVASERFGGQVLDTMGIENFISIKETEGPKFAHALEEHVRNYDVDIMNLQRAKALVPNTGPGKDLIEIQLESGASLKSRSIVISTGARWRNINVPGEREYKNKGVAYCPHCDGPLFKGKRVAVIGGGNSGVEAAIDLAGIVGHVTLIEFDTALRADAVLQRKLTSLKNVTVFTHAQTTEITGDQKVNGLIYKERASGELKKVELEGVFIQIGLVPNTDWLKGVVELSRHGEIVVDAKGQTSVPGVFAAGDVTTVPFKQIIIAAGEGAKAALSAFDHLIRTSAPAA

SEQ ID NO: 14335 - protein, 163 aa, Ipomoea nil
GSAYYVAPEVLRRNYGPEADIWSAGVILYILLSGVPPFWGENEQSIFDAVLRGHLDFSSDPWPSISSSAKDLVKKMLRSDPKERLSATDVLNHPWMREDGDASDKPIDIAVLSRMKQFRAMNKLKKVALKVIAENLSEEEIIGLKEMFKSIDTDDSGTITYEE

SEQ ID NO: 14336 - protein, 296 aa, Hydrogenimonas thermophila
VELLSGQKGMLTHFIVEPFTPHTQDQEYYISATVVDNDDVLYMSAEGGMEVEEGWDEKVNEVRIPINMTDEEMEKAVRANVPEGIPAENKERFAKFAIQFFKFYRDLNFAYLEINPIVMIENNAHILDLVARLDDTAGFLMRDKWGDIEFPTPFGMEDQSPEEKAIAEADAKSGASLKLTILNPKGRIWTMVAGGGASVVYADTIADLAGVEDLANYGEYSGGPTESETQFYAETILTLMTRYEDERGKILIIGGAIANFTDVAKTFTGIIKALDKYADKLKAHNTKIYVRRGGPN

SEQ ID NO: 14337 - protein, 164 aa, Cicer arietinum
LVAGEAGTGIAELIALEMSKQTKTPIEETRKKIWLVDSKGLIVSSRANSLQHFKKPWAHEHEPVGTLIDAVKVIKPTVLIGSSGVGKTFTKEVIEAMTSNNEKPLILALSNPTSQSECTAEEAYTWSEGRAIFASGSPFDPVEYNGKVYYSGQSNNAYIFPGFG

SEQ ID NO: 14338 - protein, 207 aa, Triticum aestivum
MTSVWKTKVLPGLNKIFDKDGKKAAAAEFLKSFNKEEIDKEIGDKKTELEPKLVETIEASPPEIKGLIKDKKTSKIKKNSVAVTKFLDDLAKIDFPGAKLVSDAVAKSGTTPLSPAIVFILDKVAPFVPAPKEEPKAEPEAAAPAEETTTREVAVEEKEEEAEPSAAPAEAAPVEAAAPAAEVVEEKKEEEKPAEAAAPAAEEPEKK

SEQ ID NO: 14339 - protein, 488 aa, Zea mays
  misc_feature (206)..(206): Xaa can be any naturally occurring amino acid
  misc_feature (226)..(226): Xaa can be any naturally occurring amino acid
MATCATTLAPLLGPAANATEYLCNQFADTTSAVDSTYLLFSAYLVFAMQLGFAMLCAGSVRAKNTMNIMLTNVLDAAAGALFYYLFGFAFAYGTPSNGFIGKHFFGLKRLPQVGFDYDFFLFQWAFAIAAAGITSGSIAERTQFVAYLIYSAFLTGFVYPVVSHWVWSADGWASPTRTSGKLLFGSGIIDFAGSSVVHMVGRHRRXLGRPHRGPPHWPVRHAGPLXALRGHSASLVVLGTFLLWFGWFGFNPGSFLTILKSYGPAGSIHGQWSAVGRTAVTTTLAGSTAALTTLFGKRLQTGHWNVVDVCNGLLGGFAAITAGCSVVDPWAAVICGFVSAWVLIGLNALAARLRFDDPLEAAQLHGGCGAWGVLFTGLFARREYVEQIYGTPGRPYGLFMGGGGRLLAANVVMILVIATWVSVTMAPLFLALNKMGLLRVSAEDEMAGMDQTRHGGFAYAYHDDDLSLSSRPKGMQSTQIADAASGEF

SEQ ID NO: 14340 - protein, 375 aa, Emericella nidulans
MEEEVAALVIDNGSGMCKAGFAGDDAPRAVFPSIVGRPRHHGIMIGMGQKDSYVGDEAQSKRGILTLRYPIEHGVVTNWDDMEKIWHHTFYNELRVAPEEHPVLLTEAPINPKSNREKMTQIVFETFNVPAFYVSIQAVLSLYASGRTTGIVLDSGDGVTHVVPIYEGFALPHAISRVDMAGRDLTDYLMKILAERGYTFSTTAEREIVRDIKEKLCYVALDFEQEIQTASQSSSLEKSYELPDGQVITIGNERFRAPKALFQPSVLGLESGGIHVTTFNSIIKCDVDVRKDLYGNIVMSGGTTMYPGISDRMQKEITALAPSSMKVKIIAPPERKYSVWIGGSILASLSTFQQMWISKQEYDESGPSIVHRKCF

SEQ ID NO: 14341 - protein, 341 aa, Bradyrhizobium japonicum USDA 110
MDLTELNRIATAMVAPGKGILAADESSGTIKKRFDAIGVESTESNRRDYREMLFRSREAMSQYISGVILYDETIWQDAKDGTPLVKLIESSGAIPGIKVDEGTQGLPMCPGELVTVGLDKLAERLKKYYERGARFAKWRAVIDIGSGIPSMTAISVNAHALARYAALCQAAQIVPIVEPEVLMDGDHDIDRCYEVTQRVLNKTFQELRVQRVALEGMVLKPNMAISGKKCAKQAPVEEVAEKTIRLLKACVPAAVPGIAFLSGGQSDEEATAHLNAMHKLGPLPWGLTFSYGRALQAAPQKAWSGKAENVAAGQRAFSHRARMNGLASKGEWQSSLEKKAA

SEQ ID NO: 14342 - protein, 268 aa, Erythrobacter sp. NAP1
MTETQGYETIQIETNAHGTKGVTLITLDRPKALNALNSKVLDELMCAFAGYQADDSQLCAVITGSGDKAFAAGADIKEMSEKPASDFYLDDFFSPWTSEIVKKTRKPWIAAVNGFALGGGCELAMMADFIIASDNAKFGQPEIKLGVAPGMGGSQRLTRAIGKSKSMEMCLTGRMMSAEEAERANLVVRVVSQADLLAETLKTAATIASMPPMAAIANKEMVNAAFETTLDQGLIMERRIFQILTASEDKAEGMAAFIEKREGNWKGR

SEQ ID NO: 14343 - protein, 335 aa, Bradyrhizobium japonicum USDA 110
MAVRVGINGFGRIGRNVLRAIAESGRKDIEVVGINDLGPVETNAHLLRFDSVHGRFPGTVTVDGDSISLGGGKIKVTAERDPSKLPWKDLGVDIALECTGIFTSKDKASAHLTAGAKRVLVSAPADGADATIVYGVNHDTLTKDHLVVSNGSCTTNCLAPVAKVLNDLVGIETGFMTTIHAYTGDQPTLDTMHKDLYRGRAAAMSMIPTSTGAAKAIGLVLPELKGKLDGVAIRVPTPNVSVVDLKIIAKRATDVKEINAAMKRASEQQLKGILGYTNAPNVSIDFNHDPHSSTFHEDQTKVQNGTLVRVMSWYDNEWGFSNRMADTAVAIAKVI

SEQ ID NO: 14344 - protein, 575 aa, Yarrowia lipolytica CLIB122
MSADELKAQGNAAFAAKDFPTAIDHFTKAIEASPTPNHVLYSNRSACHSSLKNFDDALKDAQSCIDINPQWTKGYGRKGAALHGKGDLIGAKDAYEEGLKLDPSNAQNKAGLESVERAIMAEAQGDGTTPDMGLGDMFSNPANLAKLASDPEVKEYMKDPEFVKKLGELQKNPMAALSGMQQDPRLMKAMALMLGIPTDMQGKASEDKAAHDAQQDVEMKDSEPAKPAEAPKAAPKTESKPAAEPVSDEKKQADEEKALGNTAYKAHKFDEAIAHYNKAYSIHEDITYLNNRAAAEFEKGDYETCIKTCEEAITKGREVFADYKVLAKSFSRCATAYVKLDNLPKAIELYNRALTEHRTPDTLSKLRAAEKDLKNKETQAYIDPAKAEEAREEGKEKFAAGDWPGAVKAYTEMIKRAPENPIGYSNRAAALAKLMSFPEAVVDCDAAISKDPSFIRAYIRKANAYFAMREYSKCVDTCTAALEHDKEGKSKAEIEALQYKAMSARFQAQEGETPEETMERASKDPEIVQILQDPIMSSILNQARENPAALQDHMKNPEVARKVQLLVAAGIIRTR

SEQ ID NO: 14345 - protein, 420 aa, Leifsonia xyli subsp. xyli str. CTCB07
MFLLHGVAVMTKKIVITGLGASSPLGGTAPESWAALLAGESGARSLTHDWVTELELPITFAAEAKVRPSAVLERPVAKRLDPSSQFALVSAMEAWADAGSPRVAPERLGVDYATGIGGVWTLLDAWDTLRERGPRRVLPMTVPMLMPNAAAAAVSMHFEARAFARTVASACASSTESLVNAYEHLQAGLADIVITGGSESAIHPITLASFASMQALSRRNDDPATASRPYSIDRDGFVMGEGAASLVLETEKHAFARGARIYAEVVGGGVTADSYHITANDPEGRGASRAVRMALEQAGASPDEVTHINAHATSTPVGDPSEYVALREVFGDRVHSVPVSATKASTGHLLGGTGALEAVFTVLALRDRIAPPTINITEMDPAIPLQVSGESQPLGNGPQLAISNSFGFGGHNAVVAIRSV

SEQ ID NO: 14346 - protein, 112 aa, Moorella thermoacetica ATCC 39073
MYKIEAIIRPEKFEAVKEALGRYGVHGMTVTHTLGCGQQKGKTEVYRGTAYTIALLPKVKVEIVLEDRYVDDVVAIIAREARTGNIGDGKIFICPVQDAIRIRTGERGAEAI

SEQ ID NO: 14347 - protein, 522 aa, Erythrobacter sp. NAP1
MNAPNKSGWKPEMTVAEDGLHNGPETTTGNRALMLEEPLIFEIGHTETTGVDLPEIDPEAPSRLGSLTRSEPIGLVGLTEPETVRHYTRLSRQNYGIDLGFFPLGSCTMKHNPRLNEKMARLPGYADIHPLAPQNSVQGALEVIYELGDWLKTLTGMPAVAMSPKAGAHGELCGILAIRAAHEARGDAREVVLVPESAHGTNPATAAFAGYRVEDIPATEEGRVDVAKLKERLGPDVAAVMITNPNTCGLFEKDFREIADAVHEAGGYVYCDGANFNAIVGRVRPGDLGVDAMHINLHKTFSTPHGGGGPGSGPVVFSEALEPFAPLPFVRKHEDGTYELVEEEAREESRGQTFGRMTAFHGQMGMFTRALTYMLSHGADGLKQVAEDAVLNANYILRNLEGSLYAPFADSGPCMHEALFGDKGFENGLTTLDLAKGLIDEGYHPMTVYFPLVVHGAMLIEPTETESKAAIDQFITAIRSVAERAKAGDETLKQAPYYAPRRRLDETAAARKPKLSWQEPEG

SEQ ID NO: 14348 - protein, 376 aa, Mycobacterium leprae
MTHSQRRDNLKSQIATTGLDAMLVTCLINVRYLSGFTGSNGALLVFADERGAVLATDGRYRTQAAQQVPELEVAIEQSCGRYLAGRAADDGVCILGFESHVVTVDGLDALTGELEGRHTELVRAPGTVEVLREVKDAGELALLRLAAEAADAALTELVARGGVRPGLTEREVGRELEGLMLDHGADALSFETIVAAGPNSAIPHHRPTDTVLAAGDFVKIDFGALVAGYHSDMTRTFVLGPAADWQLEIYQLVADAQRAGRKALRPGANLRDVDAAARQLIVDAGYGQQFSHGLGHGVGLEIHEAPGIGTTSAGTLLAGSVVTVEPGVYLSGRGGVRIEDTLVVAAKGTSETPITSRPTGFIPELLTRFPKELAIL

SEQ ID NO: 14349 - protein, 458 aa, Erythrobacter sp. NAP1
MRYLPLTDTDRTEMLAKIGADSIDDLFVDVPEVARLDGPIRDLPMHASEMAVERHMKARAAKNLAAGDAPFFLGAGAYRHHIPASVDHIIQRGEFLTAYTPYQPEIAQGTLQMLFEFQSQVARLYGCAVANASLYDGSTACWEAVAMATRVTRKKRAVLSGALHPHYSEVVRTMAHFTGDVIADSAPAIQPEPDLDGLTARIDEDTACVVVQYPDILGRISDLTPVAEAAHAVGALLVVVNTEPVALGAIKAPGEMGADIVVGEGQSIGVGLQFGGPYLGLFAVRDPNHVRQMPGRLCGETTDAEGKRGFVLTLSTREQHIRREKATSNICTNSGLCALAFSVHMTLLGEKGLRELAAENHRLACLAADRLEKVPGVKLLNNAFFNEFTLMLDGKPAREIVRDLADRGVLGGVSLGRLYPGVEALEHALLVAVTETTTEEDIETLARELEASVKEVAQ

SEQ ID NO: 14350 - protein, 557 aa, Acinetobacter calcoaceticus
MNKNIEQFPRKTTLTPQQKLEQLMEQHKTVHLTELFDKEQDRFAKYCVGCEDLVFDFSKQRINQPILDALVQLAESKQLNKWIDTLFSQNKINYTEQREAMHWALRLPADNQVYPELAKQVSDQLERMYQLVNKIHEGQYRGATGEVIQDVVNIGVGGSDLGPLMVSHALSDFKVKTAKPLNIRFVSTMDGSQLSDILHQLRPETTLFIVSSKSFSTIDTLSNAHTARKWLEKALGRESSILKSHFIGVSTKPDKMTEWGIHPDNQFLLWDWVGGRYSLWSCIGLPIALTIGVEGFKAFLAGAHGIDEHFRTTEFHQNIPVLMGLMGIWNTNYLNLKTHAVLPYDGRLKYFTSYLQQLEMESNGKSTQRNGQKVENTTCPIVWGEVGPNAQHAFYQLLHQGTQKVSCDFIAPMHRYNANHFTYVENADALIDQHLLALSNCLAQSRLLAFGNDALKVDQREQLPAYKQYEGNQPSTTMLLKELSPRTMGKLIALYEHKVFVQSVIWDINPFDQWGVEKGKEIANDLLPILNGESSDLSHLDDSTQGLIQFLLGKSNG

SEQ ID NO: 14351 - protein, 482 aa, Polaromonas sp. JS666
MANSTVQLDKLISQGYQHGFYTTVETDTVPRGLSEDVVRLISAKKGEPDFMLDWRLQAYRHWLTMTEPRWATVRHPPITYQDIAYYSAPKSRKDGPQSLDDVDPELLRTYEKLGVPLEERALLAGVAVDAVFDSVSVATTFKEKLGELGIVFCSFSEAVQQHPDLVRKYLGSVVPYTDNFFATLNSAVFSDGSFCYIPPGVRCPMELSTYFRINAQNTGQFERTLIIADKGAYVSYLEGCTAPMRDENQLHAAVVELIALEGAQIKYATVQNWYPGDKEGKGGIYNFVTKRGDCRGANSKISWTQVETGSAITWKYPSVILQGDNAVGEFYSVALTNHYQQADTGTKMIHLGKNTRSTILSKGISAGHGQNAYRGLVKVAKGAAGARNYTQCDSLLLGDRCAAHTFPYIEVKNPTARVEHEASTSRIGEDQLFYCQSRGLAPEDAVSMIVNGFCKEVFKELPMEFAVEAQKLLGVSLEGSIG

SEQ ID NO: 14352 - protein, 487 aa, Nocardia farcinica IFM 10152
MTDREGALLATAPHQLFIGGEWVDATGGATFAVHDPATGEIVREVADATAEDAVRALDAAVAAQESWAATAPRTRGEILRRAWELVQERAEDLALLMTLEMGKPLAEARGEVTYGGEFLRWFSEEAVRIHGRYGLNPEGTGQMIVSQRPVGPCYFITPWNFPFAMATRKIAPALAAGCTVVVKPPQLTPLTTLFFTGLLAEAGLPAGVVNVVTSTSSRRVSAPIIADSRLRKLSFTGSTEVGRQLIAQAADNVLRVSMELGGNAPFVVFEDADLDKAVEGALAAKFRNIGQACTAANRFIVHEQVAEEFAARVTERVAAMKIGRGTEDGVTIGPLIDDDAVAKAHELVTDATARGAVVRTGGERIDGPGSFYRPTVLTGVTEGSAILREEIFGPVLAIATFTTEDEAVRLANNTEYGLVSYVYTRDLARGHRMIDKLETGMMGLNAGVVSNAAAPFGGVKQSGVGREGGFEGIHEFLSTKYTLIPTS

SEQ ID NO: 14353 - protein, 423 aa, Glycine max
MDRLNGSANLMIVSDLDFTMVDHDDPENLALLRFNALWEAYYRHNSLLVFSTGRSPTIYGELRKQKPLLTPDITIMSVGTEITYGESMVPDDGWKQYLDHKWNRDIVMEETAKFPELTLQSETEQRPHKVSFYLEKGKAPNVTQTLSKRLENRGLDVKIIYSNGIALDVLPQAAGKGQALAFLLEKLKADEQGPINTLVCGDSGNDAELFTVPEVNGVLVSNAQEELLQWYAENARGNPRIIHATERCAAAIVQAIGNFSLGPNVSPRDIGDLMSNRKVHSPSHEVVMFYIFYERWRRGEVENPEQYIQKLKSVFHSTGNFVHPSGIDQPMHQTIDTLAKAFGDKTGKDFRVWVDCISLAEVSLGSWLVKFDKWELSGNESRGCSTKALMNAKVDVPDEYTWMHLHHTWLDDVGGQDDVSWLL

SEQ ID NO: 14354 - protein, 966 aa, Cytophaga hutchinsonii
MKIDLTQRGSFQERHIGTSLSEKETMLKAIGVGSLDQLIDETVPANIRLANPLQLPKALSEEEFLVEFKKVVSQNEIFKTYIGLGYYNTLTPTVILRNILENPGWYTAYTPYQAEIAQGRLEALINYQTMVCELTGMEIANASLLDEATAAAEAMTLIYSLRKGTKKNATVFVVSKYTFPQTIDVLLTRSEPLGIKLEMVDPATADFTRTDIFGALVQSPDCNGNVADYTALISAAHANDTLVAFGSDLLSLTLIKSPGEMGADVVFGSSQRFGVPMGFGGPHAGFFATKEEYKRQLPGRIIGVSIDAEGKKAYRMSLQTREQHIRREKATSNICTAQVLLSVIAASYAVYHGPEGLKQIANRVHGFAAALSAIVTEFGFEQTNAAFFDTISIKAPGKGLAIKSAAEKRKINLRYEGDSVFVALDESVTVADLDQLIEVFAEAADKKVVAIDISNKYLRVEGALSGALLRTSAYMTHPVFNTYHTEHEMLRYLKHLENKDLSLTHSMISLGSCTMKLNATTEMIPVTWPEVGQIHPFVPASQVKGYHQLFNNIELWLSEITGFAGVSVQPNSGAQGEYAGLLVIRAYHESRGDTHRNIALIPTSAHGTNPASAVMAAMQVVLVKCDDAGNIDVADLKLKAEQHSKNLSCLMVTYPSTHGVFEESIIEICEVIHRHGGQVYMDGANMNAQVGLTSPGSIGADVCHLNLHKTFCIPHGGGGPGVGPIGVAAHLTPFLPGHAVVKAGGEKAISAVSAAPWGSASILPISYAYIAMMGSEGLTNATKNAILNANYIKSRLEKFYPILYTGTHGHCAHEFILDCRAFKTTIGIEVEDIAKRLMDYGFHAPTVSFPVAGTLMIEPTESESKHELDRFCDAMIAIRAEIAEIENGTADKLDNVLKHAPHTASVITADAWTRSYSRQKAAYPLPYLKTTKFWPSVSRIDSAYGDRNLFCSCIPTEEFAEAELAN

SEQ ID NO: 14355 - protein, 500 aa, Nocardia farcinica IFM 10152
MADSAGHHVPAELPDRIRHYIDGAFVDSVDGDTFDVLDPVTNETYVQAAAGKKADIDRAVAAARKAFTEGPWPKLLPRERSRVLHRIADLVESRDARLAELESFDSGLPITQALGQARRAAENFRFFADLIVAQSDDTYKVPGRQINYVNRKPIGVAGLITPWNTPFMLESWKLAPALATGNTVVLKPAEFTPLSASLWAGIFEEAGLPQGVFNLVNGLGEEAGDALVKHPEVPLISFTGESRTGQIIFANAAPHLKGLSMELGGKSPAVVFADADLDAAIDATIFGVFSLNGERCTAGSRILVQREIYDEFVERYAAQAERVKVGYPHDPATEVGALVHPEHYAKVTEYIEIGKSEARLVAGGDRPAEFPTGNFVRPTVFADVKPDARIFQEEIFGPVVAITPFDTEEEALELANGVKYGLAAYIWTNDLKRAHNFSQAVEAGMVWLNSNNVRDLRTPFGGVKASGLGHEGGYRSIDFYTDQQAVHITLGKVHNPTFGK

SEQ ID NO: 14356 - protein, 216 aa, Lactobacillus acidophilus NCFM
MIIAPSILNADNLNLETDIKEAIAAGINRFHIDIMDGHFVPNLSFGPQLVEDFKREFPMTDAEIHLMSDSPDDLVPAFVNAGADLIELHYEAMDEDKLDYWLDYLISNGVNTGLALNPDTPSDVVTKYVSKLNQVLVMTVYPGFGGQEFIANSAQKIKEVRELVGPDIDIEVDGGINNQTIKIAKDAGANVFVVGSYLYKAGNIANQVHKLEDILK

SEQ ID NO: 14357 - protein, 369 aa, Arabidopsis thaliana
MEMMKIDPLFDRASELKAFDETKTGVKGLVDSGVSQVPRIFHHPTVKLSTPKPLPSDLLHLKTIPTIDLGGRDFQDAIKRNNAIEEIKEAAAKWGFFQVINHGVSLELLEKMKKGVRDFHEQSQEVRKEFYSRDFSRRFLYLSNFDLFSSPAANWRDTFSCTMAPDTPKPQDLPEICRDIMMEYSKQVMNLGKFLFELLSEALGLEPNHLNDMDCSKGLLMLSHYYPPCPEPDLTLGTSQHSDNSFLTVLLPDQIEGLQVRREGHWFDVPHVSGALIINIGDLLQLITNDKFISLEHRVLANRATRARVSVACFFTTGVRPNPRMYGPIRELVSEENPPKYRETTIKDYATYFNAKGLDGTSALLHFKI

SEQ ID NO: 14358 - protein, 241 aa, Legionella pneumophila str. Paris
MENLEHGHSQKEIKERLAQIPSQNYLRDWIYGGIDGVVTTFAIVSGVVGGQLSSLVILILGFANLLADGFSMAASNYLGTKSEVDQFQRYKTIEEKHIDFIPEGEKSEIKQIFQNKGLHGQALDQVVEEITANRALWIKTMLQEEYGLPATLRFPLKSALYTFSAFLLFGIIPLIPYVLVMNNSFIWSCFFTAITFFVIGSIKSHWSTKSWLYSGFETLIIGTVTASLSYGIGLFLHYLLT

SEQ ID NO: 14359 - protein, 257 aa, Pseudomonas syringae pv. phaseolicola 1448A
MSYETILSEIIGKVGVITLNRPKALNALNAQLIDELNHALDQFEADSAIGCIVLTGSEKAFAAGADIKEMVDLSYPQIYLDDLFRESDRVAARRKPIVAAVAGFALGGGCELALMCDFILAAENARFGQPEINLGVLPGMGGTQRLTRAVGKAKAMEMCLTGRLIDAHEAERAGLVARVLPLEQLLPEALAVAAVIAGKSLPVAMMVKESVNRAFEVSLAEGIRFERRVFHAAFASHDQKEGMNAFIDKRQPDFKDC

SEQ ID NO: 14360 - protein, 90 aa, Prunus persica
ITCGQVSSNLAPCIPYVRVGGAVPPACCNGIRNVNNLARTTPDRQAACNCLKQLSASVPGVNPNNAAALPGKCGVHIPYKISASTNCATV

SEQ ID NO: 14361 - protein, 406 aa, Escherichia coli O157:H7 EDL933
  misc_feature (128)..(128): Xaa can be any naturally occurring amino acid
  misc_feature (131)..(131): Xaa can be any naturally occurring amino acid
  misc_feature (318)..(318): Xaa can be any naturally occurring amino acid
MKRAVITGLGIVSSIGNNQQEVLASLREGRSGITFSQELKDSGMRSHVWGNVKLDTTGLIDRKVVRFMSDASIYAFLSMEQAIADAGLSPEAYQNNPRVGLIAGSGGGSPRFQVFGADAMRGPRGLKXVGXYVVTKAMASGVSACLATPFKIHGVNYSISSACATSAHCIGNAVEQIQLGKQDIVFAGGGEELCWEMACEFDAMGALSTKYNDTPEKASRTYDAHRDGFVIAGGGGMVVVEELEHALARGAHIYAEIVGYGATSDGADMVAPSGEGAVRCMQMAMHGVDTPIDYLNSHGTSTPVGDVKELAAIREVFXDKSPAISATKAMTGHSLGAAGVQEAIYSLLMLEHGFIAPSINIEELDEQAAGLNIVTETTDRELTTVMSNSFGFGGTNATLVMRKLKD

SEQ ID NO: 14362 - protein, 480 aa, Thermosynechococcus elongatus BP-1
MSLRLFWHRRDLRLNDNLGLAAAYTRTPKVVGLFCFDPAILSASDIAAVRVAYLVGCLQALQEAYRRLGGSFLIFRGDPRQILPQVAKGLGAVAVHWHEDVEPYGRERDRAVAAALKEKGIAVETAWDQLLHPPEAIQTKQGQPYTVYSPFWRNWSSLAKPEPVSAPRHLEPLTEIEQATAGTLGAICLPTAKDLGFHWSGDLILAPGEAAAQAQLETFIDQHIQDYGEQRNYPAQPGTSLLSPALKFGVIGIRRVWTATQAAMAAARSEEAQRSIRTWQQELAWREFYQHALYWFPHLAERPHREGFATFPWLNNEAHFAAWCEGRTGYPIVDAAMRQLNETGWMHNRCRMIVASFLTKDLIINPQWGERYFMQKLIDGDLAANNGGWQWSASSGMDPKPLRIFNPASQAQKFDPEAEYIRRWLPEVRSLDTIDLVTGNISPLERHRCGYPLPIVDHRQQQQRFKQLYQEHFRSPIPQE

SEQ ID NO: 14363 - protein, 373 aa, Medicago truncatula
MVVKNTNQLEEATDSTYDRKAEVKAFDDSRAGVNGLVESGVSKIPRFFHAGKLDIGENSTCDSKLSVPIVDLKDIHNNPAQRVDVIHQIRSACHEWGFFQVINHEIPITVLDEMIDGIRSFHEQDADVRKEFYTRDLKKKVMYYSNVHLFSGQAANWRDTFGFAVAPHPFKPEEVPPICRDIVIEYSQKIKELGFTIFELLSEALGLNSSYLKELNCAEGLFILGHCYPPCPEPELTMGTTKHTDSNFMTLLLQDQLGGLQVLHKDKWVNVPPVHGALVVNVGDLLQLITNDNFVSVYHRVLSHNIGPRISVASFFVNSPDPIEGKSKVYGPIKELLSEENPPIYKDITIEDFLAHYYAKGLDGNSSLQPFKL

SEQ ID NO: 14364 - protein, 238 aa, Xylella fastidiosa Ann-1
FIEVRLASGASLSSRTVILSTGARWRQMNVPGEDEYRNKGVAYCPHCDGPLFKGKRVAVIGGGNSGVEAAIDLAGIASYVTLLEFDTKLRADEVLQRKLRSISNVEVIMGAQTTEVRGDGKKVTGLVYVDRSTGGSFILALEGVFVQIGLLPNTEWLKGRVELSPRGEIVVDERGHTSLPGVFAAGDATTVPYKQIVIAMGEGSKAALSAFDYLIRNVVEITRVAQAQAGVSQCSTAV

SEQ ID NO: 14365 - protein, 85 aa, Triticum aestivum
MSSRRGRITDEEINELISKLQALVPESSRRRSASRSSASKLLKETCGYIKSLHQEVEDLSDRLSELMSTLDETSPQAEIIRGLLR

SEQ ID NO: 14366 - protein, 131 aa, Zymomonas mobilis subsp. mobilis ZM4
MIRVSDPDETIRFFSFLGLEEVGRVNNNEGRFTLIYLAVPNDNVQVELTWNWDEKGYEGGRNFGHLAFEVDNIYDSCQKLIDGGYVINRPPRDGWMAFVRTPDQISIELLQAGDKLEPIEPWKSMPNTGSW

SEQ ID NO: 14367 - protein, 136 aa, Ustilago maydis 521
MSSGGKSGGKAGDASSKAQSRSAKAGLQFPVGRIHRLLRKGNYAQRVGAGAPVYLAAVLEYLAAEILELAGNAARDNKKSRIIPRHLQLAIRNDEELNKLLGGVTISQGGVLPFIQSELLPAKSGKPKKAGGSQDI

SEQ ID NO: 14368 - protein, 489 aa, Arabidopsis thaliana
  misc_feature (419)..(419): Xaa can be any naturally occurring amino acid
MEEEILSFVSIQSHVSSAGEKPIHVLDENPKFSRLHPSPSNIDSGEDSTSINKSNMESYGFSPVKIIEALIRETTAQENCNSRHFSWLMKSCLPNPSDAKSLVQIHQPSSTAANSSATIASLPDDLLLECISRVPSSSIPSLAVVCRRWSRLLHSPYFLHLRRRLGLLRHSLFAISTVDSGLFAADLQFQSEIASWKVSLAVSSRSVGVDGSYGSLSHARAAAIGPRVYVVSRNAVLRYDSWMGTLNLRSPMIFPRKKFAIAVVSGKIYVAGGGGGSEVAAAVEEYDPELNRWEVVTQSARKRYGCIGAAVDGVFYVIGGLKIGNETSRAVAARAYASSMDLFDVESRQWLRSRSVPGGGCVVAACAAVGYVYVLTSHAVELSFWRFDARRRGGNSGFGEWQRLKSPPLPAQVRLDGTXVRFSCVGVEDKVAVVQVVGCIDDLLRRSGRGERGIRESLVLLYDTTEGEWRRAADLPEMITRAACACVEW

SEQ ID NO: 14369 - protein, 378 aa, Burkholderia vietnamiensis G4
MSIPIINDTTLRDGEQTAGVAFTVEEKCAIATALSNAGVPELEIGIPSMGADEIADIRSIVDLNLDASVMVWGRLTPGDLAAALRCRPDIIHLSVPVSDIHLQYKLRQPRAWVFAQIRRVIGEAVRSDLKISLGAEDASRADPAFLADVARLAQQCGAQRIRFADTLGVLDPFSTYEAVARLRDAIDIEIEMHAHNDLGLATANTLAALRAGATHANTTVNGLGERAGNAALEEVVMCSRHLLGRDTGVDTTALVGISRLVEHASGRQVALNKSIVGGGVFTHESGIHTDGLAKNPTTYESFDPAELGRARSLVLGKHSGSHGVRHAYEALGLPVADQLVPLLLARIRQHATQTKQAPNAADLYRFLVETRELIEEWS

SEQ ID NO: 14370 - protein, 1142 aa, Ralstonia eutropha JMP134
MSEVEKKGFCTLCRSRCGTVNVVDGETLVAVRPDGDHPTGKAMCLKGKAAPELVHSADRILYPMRRTHPKGADDPGWVRISWDEALDEIAARLLHARATRGAESVAFAVTTPSGTALSDSIDWIERFVRLYGSPNICYATEICNWHKDFAHAFTFGCGMPTADYRNAGLILLWGHNPTNTWLSQAEAIGAGRAGGARLIVVDPRQTALAEDADQWLRVKPGSDAALAMALANLMIEANAFDIDFVRRWTNGPLLVRQDNGAFLRGGDIGLADTDALLVWDARQRMAVPAGKGVDDAQHIALRGTFAIPRIGGGERKSLLCQPAFDLYAAECARYTVERAAALTWIPEGDIRHAASLIGAAGRIAYHAWSGVGQHENATQTERAIACLYALTGSFDRRGGNRVYSKPPFNAVSRFDLLSPDQAHKALGLDARPLGPPAQGWVTAPDLYRAITHHAPYAVTSLIAFGTNTLLSQPDVANAEQALRELELYVHCDLFENPSARHADILLPVNTPWEREGLRIGFEVSADAEQFVQLRQRMVAPLGESRSDNDIVFALAARIGLDEAFFGGSLEAGWNHMLAPTGLTVAALRDAPEGIRVLVEDVEMKYAAGTDGQPFNTPTGLVELYSERLLRHGYPPLPGLPESAWNDAGQTSASFPYLMTSAKNGYYCHSQQRGVASLRRKALLPQLDISSDIAAARNIRTGDPVRVSTPAGSARFTARVQPGLHPAVVVGEYGWWQGCDPMGQQPTAVLGTDSANFNALIDATRQDPVSGSSPLRCCHCNVERDATLDIRRRRWEGYRPFRIVGLRKEATDVTAVDLEPADGGRLPDYLPGQHVTIRLCVDTGQQEVVRSYSLTGPAVVADRRRYAIAVRHARARLASGEVVSGVASSFINTRLAIGDTIELRAPAGTFVMPTRTARPLVLLAGGIGITPFINLLESLVGQQDPPRMLLLYANQNGTTHAFRDPLRELEALIPALKVINFYDAPADGDILGSDFQVHGRVTAAAVPDALLASRPLVYMCGPDAMMTAFAAGLAARGVPRFDIQKEVFRSPTVRRIEASQAFQVQFRRSDITLSWRSEHGPLLGFAEALGIRLPSGCRVGQCESCAVRIVSGTVHHLHGEAPDDPGVCLACQAVPASDLVIDA

SEQ ID NO: 14371 - protein, 142 aa, Campylobacter coli
MTQEQIQIIKDCVPILQKNGEDLTKEFYKIMFNDYPEVKPMFNMEKQASGEQPKALAMAILMAAKNIENLENMRSFVDKVAITHTKLNVKEEHYPIVGACLLKAIKVVLYADETTLKAWEEANKAIAQFYIDIEKEIYAKAK

SEQ ID NO: 14372 - protein, 461 aa, Tropheryma whipplei TW08/27
MSEDFILPALGESVSECVITRWLKEAGDRVEVDEPLVEVSTDKVDTELPSTLTGILEEILVQRDETAKPGQILARIAVDKDETKSNFDHGVKQSDVITGDSAGNLLGNTRPIEDNEWPVTLHTAESKPDLSAKADHIGDEGDKQGNLYAAHNAEIPYATPIVRQLARKLNIDLTNIVGSGVGNRILREDVLLASNRTTNTSTECAQNIPSSPEHDKSAASFDSEVSELRGTRIKMSRLRNIIAERAVHSMQNTAQLSTVIEVDLTRIVDYRNSIKEKFKEAEGVNLTVLPFIINATVQALRKYPVINSHIVDDQIVFPDYENISLAVDTERGLLTPVIKNAGDMTVAQFAKSVFDLARRARNNKLSPDELTGGTFTVTNTGSRGALFDTPVVFLPQLAILGIGAIARRPVIVLDAQGNECISIRSVAFFALSYDHRVIDGADAARFLGYIKSLLETGNCTV

SEQ ID NO: 14373 - protein, 1095 aa, Arabidopsis thaliana
MTMMSDLSLDLVEEILCRVPITSLKAVRSSCKLWNVLSKNRILCKTEARNQFLGFTIMNHRLYSMRFNLHGIGLNENSEEFIDPSIKPIGNLLNQVEISKVFYCEGLLLCVTRNHSSKLVVWNPYLGEIRWIKTRNDYHIGVTYALGYDNNKNHMILRFFSEQGYYEIYDMNSSDSWDCFYGIPNKGLKCYQPGASLNGNAYFLTEGREVMEGYDCLLGFDFTTKKFGPLLSLSFSHDFIETGRLSCVKGEKLAVLYQRCYTYEMEVWVTTKIEPNAVSWSKFLAVEMEPLTSLKFNDDSGSFFIDEEKKIVVVFDIDESERNNTAYIIGDYGCLKEVDLDEVVNPQESVEVGDRIYSFSPFVCSCSYVPSLVKFKEDAEHERKDKKRKSKRKRTNKDGYDFILCFDFTTERFGQILPLPFKHSFRDTWTLSSVKEEKLAVAVLYWKNTCVMIEIWMTIKIDPNVESWSKFLRVDRKPCIDLRFDDRNDSFFIDEEKKVVVFFSSDKVKTSTAYVIGDNRYLRTVDLEKAANSQESVEVGERVYCFSPLVCSCSYYVPSLVKINHNAGRKRKEKKTKRKSKDKQMKLSNKVYRDVDGEPIVDFDDFGNDREPSTEPLQDFDEDLADDIGDWDGEGSQTPVYDNDKVAKPRKRLVKKSSSERVTIDVPELIDEDVDDAEFDEFMGGRGGGSTDYDDKVGRKRKKEKERSSSGSGKEKRHKFPNRGERKSEEIDEMWKSIAHNPENDEEGVRTMDDDNFIDDTGLDPSERYGGDAGDRSPTHYPQAEEGEDEDEVNNLFKMGKKKKKTERNPAEIALLVENVMAELEVTAEEDAELNRQGKPAINKLKKLSLLTDVLGKKQLQTEFLDHGVLTLLKNWLEPLPDGSLPNINIRAAILRVLTDFPIDLDQYDRREQLKKSGLGKVIMFLSKSDEETNSNRRLAKDLVDKWSRPIFNKSTRFEDMRNLDEDRVPYRRPPVKNFSSCSTGDRPSNKATMESRDGDFDLEIRERKTGLTSGQSSRGDRQMTMRPEATPLDFLIRPQSKIDPDEIIARAKQVSQDQRRVKMNKKLQQLKGTKKKRLQATKVSVEGRGMIKYL

SEQ ID NO: 14374 - protein, 184 aa, Synechococcus sp. WH 8102
MTGSSPQPLLGPVQRIVLVVAAIVLAVGLTMMRGGLQSGSPLEQLARRSMTPDVALSNGRPTMIEFYADWCQVCREMAPAMLKLEQSMQQQLDVVMVNVDNPRWQDLVDRYDVNGIPQLNLFNAEGDAVGRSIGLRREQELSLLADALIQGSPLPSLQGLGRVSERTDVAPQQASLTAGPRSHG

SEQ ID NO: 14375 - protein, 320 aa, Brassica rapa subsp. rapa
MEENIKPPVIDLSKLNDEERDQTMALIDDACQNWGFFELLNHGIPYDLMDNIERMTKEHYKKFMEQKFKEMLRSKGLDTLETEVEDIDWESTFFLHHLPQTNLYDIPNMSDEYRTAMKDFGKRLENLTEELLDLLCENLRLEKGYLKKVFRGTKGPTFGTKVSNYPPCPNPEMIKGLRAHTDAGGLILLFQDDKVSGLQLLKDGDWVDVPPLKHSIVINLGDQLEVITNGKYKSVMHRVMTQKEGNRMSIASFYNPGSDAEISPAQSLVDKESEYPSFVFDDYMKLYSGVKFQPKEPRFEAMKNAAVTTDVNPVATEETF

SEQ ID NO: 14376 - protein, 553 aa, Prochlorococcus marinus str. MIT 9211
MSSQSNLNEVIPLRVKLGHSFTDQKPGTSGLRKSTKQFQENHYLESFIESIFRTLPGVKGGILILGGDGRFGNRKAIDVIIRMAAAHGVRKVITTVDGILSTPAASHLIRINNSIGGIILSASHNSGGKDGDFGVKINGSNGGPASESLTNSIYACSQNLKEYQIIQNQEISLSVPGEYEIFSMKVEVIDGLKDYIDLMQTIFDFDRIGAFLTKDFPIAFDALNAVTGPYAKKILEDILGACKGTVKNGVPLEDFGGCHPDPNLTYAKELADALLLGNKYFFGAACDGDGDRNMILGKGCFVNPSDSLAVLAANADCVPAYSSGLLGIARSMPTSSAVDIVAKDLGVKCYETPTGWKFFGNLLDSGQITLCGEESFGTGSNHVREKDGLWAVLFWLQILADKKCSVHELMHRHWSKYGRHYYSRHDYEEISSEIAKDLYQRVELMLPSLSGKQFGRRVVKLADNFSYKDPIDSSITTNQGLRILLDDGSRVILRLSGTGTRGATLRVYLESYVASDGNLNQDPQSALCELIRDIDYLAEITKRTGMTSPTVIT

SEQ ID NO: 14377 - protein, 434 aa, Debaryomyces hansenii CBS767
MVAPAYVEDTYVDHELSANLDSTFAFEGPEKLLEIWFFKSENDIPKKSEGLRSIPLEKWVRVLDLVSCKILSMKSSKFMDAYLLSESSLFVFPHKLILKTCGTTTTLACLESLFETVNQYVEGIDFNDFNVYKIFYSRRSFMFPDKQKHVHRNWKQEVTLLNKYFQNGKSYIVGDFTGDDHWYLYMGGRDSVPSDENANDNVRDQTFEILMTELNPEKAENFIADRKPGAESLIKESSEEEEHDLGHDMGMQTMCKSKLDSIFDGSNKKLKSHHLPSPSLSDSMELDSDECLKETPTINSDKFKFIHDAFAFSPCGYSSNSISSNNGGYYYTLHITPESGWSYASFETNYPFTKDSNESIVDVLNKVLDIFQPGKFSVTFITESEDTHDKFNFHDLSNCAEDLSEQGYQKQERVLYDLKFGYKLLYLNFTKDKT

SEQ ID NO: 14378 - protein, 478 aa, Nicotiana tabacum
MSSFLVSSNNLPEREIPGDYGFPIISAIKDRYDYFYKQGEDVWFHSKAEKYNSTVVKINMAPGPFTSNDYKLVAFLDANSFVYMFDNSLIDKTDTLGGTFKPGKEYYGGYRPVAFVDTSDPNHAALKNYILTSFAKRHNLFIPLFRNSVSDHLFQNLEKQVSDQGKSDFNALLPNMTFGFIFRLLCDQTNPSDTVLGAQGPEHLRKWLFPQLIPSLSARKLPSFIEDLLFHNFLIPFGLVKSDYNKLVDAFSKNAGSMLDEAEKLGIKREEAVHNILFLVGINMFAGLNAFFPHLIRFVGEAGPTLHARLAKEIRTAIKEEGGAVTLSAINKMSLVESIVYETLRLRPPVPLQYGKAKKDFMVQSHDASYMIKKGQFLVGYQPMASRDPKIFDKPDDFIPDRFMGEGVKMLKHVLWSNGRETENPAPDNKQCAGKDLVHLLGRLMLVEFFLRYDTFTVEITPLFRAPNVAIKTLTKAT

SEQ ID NO: 14379 - protein, 738 aa, Petunia x hybrida
MDCNCFDPQWPADELLMKYQYLSDFFIALAYFSIPVELVYFVQKSAVFPYRWVLVQFGAFIVLCGATHLINLWTSTAHTRTLAIVMTTAKVLTAVVSCATALMLVHIIPDLLSVKTRELFLKNKAAELDREMGLIRTQEETGRYVRMLTHEIRSTLDRHTILKTTLVELGRALGLEECALWMPTRTGLELQLSYTLRHQNPVGFTVPIQLPVINQVFSTNRAVKISPNSPVARLRPAGKYMPGEVVAVRVPLLHLSNFQINDWPELSTKRYALMVLMLPSDSARQWHAHVLELVEVVADQVAVALSHAAILEESMRARDLLMEQNVALDLARREAETAVRARNDFLAVMNHEMRTPMHALIALSSLLQETELTPEQRLMVETILKSSNLLATLINDVLDLSRLEDGSLQLDIGTFNLHALFREVLNLIKPIASVKKLFVTLSLSSDLPEFAIGDEKRIMQVLLNVIGNAVKFSKEGSVSVSAVAAKSESLRDPRAPEFFPVQSENHFYLRVQVKDTGSGISPQDIPKLFNKFAQNQALATKNSGGSGLGLAICKRFVNLMEGHIWIESEGLGKGCTAVFVVKLGIPGRSNESKLPFMPRLPPNHMQMIFQGLKVLVMDDNGFSRMVTKGLLVHLGCDVTTVASGDECLRVLAQEHRVVFMDVSIPGIDCYEVAVRIHEKFNKRHDRPHIVALTANTDRVIKENCMRAGMDGVILKPVSVDKMRSVLSELLEHGVVLQS

SEQ ID NO: 14380 - protein, 374 aa, Debaryomyces hansenii CBS767
MLQLKPRRIIFNISQNFQVIQVVGEGAYGVVCLAIHKPTGIKVAIKKLEPFEKPLFCLRALREIKLLTYFKKHENIISIFDVQKPLNFENFNEIYLIQEYMPSDLHKTIATQNLTDDHIQYFIYQILRGLKLIHSANVIHRDLKPSNILVNENCDLKICDFGLARLDILKEGYDKRLAINSGISMLTEYVATRWYRAPEIMLTSSQYSTAIDMWSVGCILAELFTCTPLFPGNDYRHQLILIFQLLGTPTDADLTCIKSQRAKNYIKTLPYCSPLSLDQVFNRHPNRAKRFGGQPINPLGLDLLKKLLVFDPKERLTVEEALEHPYVSTYHDPEDEPTIMPIPHEDFEFDKSKDKLSILELKRQLYNDIIKCNR

SEQ ID NO: 14381 - protein, 333 aa, Bdellovibrio bacteriovorus HD100
MMKLTVIPGDGIGPEIMAQVVRVLKHVHAPFEYEEHQAGEVALNSLGELLPQTTIDSINKTKLAIKGPTTTPVGGGHKSINVTMRQKFDLYANVRPVRSLPGVQCVCSDVDLTIVRENTEDLYAGIERMVDEDTAESIKRITRKGSERIARYAYDLAQKTGKPRMAIVHKANIMKLSDGLFLKVAQEVGWQYPEITTKDVIVDNACMQLVTKPQQFDVIVTENLYGDILSDLCAGLVGGLGVVPGANIGANHAIFEAVHGSAPDIAGQNKANPTALLQSAVMMLQHVGENAKADAIMKALIAALSDVNARTGDLGGKGTTVSFTDAIIQRLGH

SEQ ID NO: 14382 - protein, 137 aa, Oryza sativa
MAASVMASLALKPSASPLLERSKLRGKGTMARPSLIIVAKKAKKIQTSQPYGPAGGVVFKEGVDASGRVAKGKGLYQFSNKYGANVDGYSPIYTPEEWSSTGDVYVGGKAGLLLWAITLAGILVGGAILVYNTSALA

SEQ ID NO: 14383 - protein, 738 aa, Petunia x hybrida
MDCNCFDPQWPADELLMKYQYLSDFFIALAYFSIPVELVYFVQKSAVFPYRWVLVQFGAFIVLCGATHLINLWTSTAHTRTLAIVMTTAKVLTAVVSCATALMLVHIIPDLLSVKTRELFLKNKAAELDREMGLIRTQEETGRYVRMLTHEIRSTLDRHTILKTTLVELGRALGLEECALWMPTRTGLELQLSYTLRHQNPVGFTVPIQLPVINQVFSTNRAVKISPNSPVARLRPAGKYMPGEVVAVRVPLLHLSNFQINDWPELSTKRYALMVLMLPSDSARQWHAHELELVEVVADQVAVALSHAAILEESMRARDLLMEQNVALDLARREAEMAVRARNDFLAVMNHEMRTPMHAIIALSSLLQETELTPEQRLMVETILKSSNLLATLINDVLDLSRLEDGSLQLDIGTFNLHALFREVLNLIKPIASVKKLFVTLSLSSDLPEFAIGDEKRIMQVLLNVIGNAVKFSKEGSVSVSAVAAKSESLRDPRAPEFFPVQSENHFYLRVQVKDTGSGISPQDIPKLFNKFAQNQALATNNSGGSGLGLAICKRFANLMEGHIWIESEGLGKGSTAVFVVKLGIPGRSNESKLPFMPRLPPNHMQMTFQGLKVLVMDDNGFSRMVTKGLLVHLGCDVTTVASGDECLRVLAQEQSVVFMDVSIPGIDCYEVAVRIHEKFNKRHDRPLIVALTASTDRVIKENCMRAGMDGVILKPVSVDKMRSVLSELLEHGVVLQS

SEQ ID NO: 14384 - protein, 227 aa, Arabidopsis thaliana
  misc_feature (201)..(201): Xaa can be any naturally occurring amino acid
MTTSSSSYGTFSTVVNSSRPNSSATFLVPSLKFSTGISNFANLSNGFSLKSPINPGFLFKSRPFTVQARAAAEKTVHDFTVKDIDGKDVALNKFKGKVMLIVNVASRCGLTSSNYSELSHLYEKYKTQGFEILAFPCNQFGFQEPGSNSEIKQFACTRFKAEFPIFDKVDVNGPSTAPIYEFLKSNAGGFLGGLIKWNFEXGKVVERYPPTTSPFQIEKDIQKLLAA

SEQ ID NO: 14385 - protein, 753 aa, Petunia x hybrida
MGSLLRMNRLLTSIVDSCNCIDPQLPADDLLMKYQYISDFFIALAYFPIPVELIYFVKKSAVFPYRWVLVQFGAFIVLCGATHLINLWTFSMHTRTVAVVMTTAKVLTALVSCITALMLVHIIPDLLSVKTRELFLKKKAAQLDREMGIIRTQEETGRHVRMLTHEIRSTLDRHTILKTTLVELGRTLALEECALWMPTRTGLELQLSYTLRHQNPVGLTVPIQLPVINQVFGTNRAVKISPNAPVARLRPTGKYMPGEVVAVRAPLLHLSNFQINDWPELSTKRYALMVLMLPSDSARQWHVHELELVEVVADQVAVALSHAAILEESMRARDLLMEQNVALDLARREAEMAVRARNDFLAVMNHEMRTPMHAIIALSSLLQETDLTPEQRLMVETILKSSNLLATLINDVLDLSRLEDGSLLLDIGTFNLHALFREVLSLIKPITSVKKLFATLSLSSDLPEYVIGDEKRLMQILLNVVGNAVKFSKEGSVSISAFVAKSESLRDPRAPEFFAVPSENHFYLRVQVKDTGVGINQQDIPNLFSKFAQSEALTTKNSDGSGLGLAICKRFVNLMEGHIWIESDGLGKGCTAIFIIKLGIPGRPNESKLPLMSKLTANELQMTFHGLKVLVMDDNGVSRMVTKGLLAHLGCDVTTVGSRDECLRVVSQEHKVVFMDVSMQGIDCYEVAVLIHERFGKHHGRPLVVELTGNTDSVTKENCMRVGMDGVILKPVSVDKMRSVLSELLEHGVVLQS

SEQ ID NO: 14386 - protein, 394 aa, Chlamydia muridarum
  misc_feature (317)..(317): Xaa can be any naturally occurring amino acid
MSKETFQRNKPHINIGTIGHVDHGKTTLTAAITRALSGDGLADFRDYSSIDNTPEEKARGITINASHVEYETPNRHYAHVDCPGHADYVKNMITGAAQMDGAILVVSATDGAMPQTKEHILLARQVGVPYIVVFLNKIDMISEEDAELVDLVEMELSELLEEKGYKGCPIIRGSALKALEGDAAYIEKVRELMQAVDDNIPTPEREIDKPFLMPIEDVFSISGRGTVVTGRIERGIVKVSDKVQLVGLRDTKETIVTGVEMFRKELPEGRAGENVGLLLRGIGKNDVERGMVVCLPNSVKPHTQFKCAVYVLQKEEXGRHKPFFTGYRPQFFFRTTDVTGVVTLPEGVEMVMPGDNVEFEVQLISPVALEEGMRFAIREGGRTIGAGTISKIIA

SEQ ID NO: 14387 - protein, 576 aa, Thermus thermophilus HB27
MPISRYYDVKRDEKGERYLEPYVTGFLLLRLPLLNKGTAFTEEERRLLGLEGLLPPHVHTLEEQKERVYRRYRLIQSPLEKHIYLRHLQDRNEVLFYALVVDHLEEMLPILYTPTVGEAVREFSHIYRYPRGFTASTKNIDRIDEALQNVPLEDVRLIVATDSSAILGIGDQGYGGMAISIGKLTLYTAAGGVGPDKTLPVELDVGTDREDLLKDPLYLGVRHRRLRGEEYFRFLDRFVEAVRRRYPKALIQWEDFAKETAFQVLERYRKVIPSFNDDIQGTGAVALAGVLSACRLKGERLSDQVVVVYGAGAGGIGVAWALVEGMKREGLSEEEAKARVLVLDSKGLLVEGRSMEDYKRPYAQRPERLWGWRFAGEYPNLLETITNARATVLLGLSGQAGSFTEPVVRAMLANTPRPVIFPLSNPTSATEALPDDLVYWTEGRALVAAGSPFPPVGFKGRTVPIGQGNNAFVFPGLGLGAVLSRAREVTDGMVLEAAYALYDYTREHFPERIYPPVGRLREVSPYVAARVMQRALEEGVAEEARVQGLTLEALLDFVKSRFWEPRYLPYRPAPVI

SEQ ID NO: 14388 - protein, 395 aa, Aspergillus nidulans FGSC A4
MSGQQDNAPPSSATNAVLVASEPVPEGTHKVSGVDFEKYQGRDITVAEMVDNMKHMGFQSSAVADAARIINEMCSFPQRAYRHPETGDKTTIFLGYTSNLISSGLRDTIRYLVRHRHVSAIVTTAGGVEEDLIKCLAPTYMGSFTAPGAGLRAKGLNRIGNLIVPNSNYCSFEDWLVPILDKMLEEQEAANKKARETGNEEDELHWTPSRIIERLGREINHEDSVLYWAAKNNIPIFCPALTDGSLGDMLYFHTFRASPLRLRVDIVDDLRRINTMAVRAARAGMIILGGGIVKHHIANACLMRNGAEHAVYINTAQEFDGSDAGARPDEAPPLHEQDNKVPLKRNPTIDNDNAQQIDSTQSAEHPRHTFGIRSPGSERTSRKAGVGTAREQNQR

SEQ ID NO: 14389 - protein, 605 aa, Bifidobacterium adolescentis
MSTMFLRTLREDPADADVVSDKLLQRACYLRKAAPGIWTWLPLGLNVLNKIENIIREEMASIDAQEVHFSGLLPREPYEATHRWEEYGDNIFRLKDRHEADYLLAPTHEEMFTLLVKDLYSSYKDLPVTLYQIQTKYRDEFRPRAGLIRGREFIMKDAYSFTLDKEGLVKAYMDERGAYERIFNRLDLKYVPVHAMAGPMGGFESEEFLAPMEIGEDTFAQSPSGKAWNVEALTTPEPEAIDFTATPAAEKRPTPDAATIDKMVEFANANHPRSDGRDWQASDILKNVVIAVMHPQDEDHDEPWRELVVVGVPGDRTVDMKRLEAQFTPAEIEEATDEDLKKHPELVKGYIGPMALGPQARDGKKAENASETGDALRYLIDAHVARGSAWFTGADEQDVDYYDLVYGRDFEADGTVEAVQVRHGDMSPDGSGPLSFERGVEIGQVFQLGLKYSNALGLKVLDQNGKTVPVWMGSYGIGVSRVMACIAETHHDEKGLAWPAVIAPAQVHVVATGKDAAAFEAAEQLIGELEAKGIEVIFDDRKKVSPGVKFKDAELIGVPIIAVAGRDTVNNGTIEVRDRNGENAEAVPVADAAQAIADRVAALLK

SEQ ID NO: 14390 - protein, 221 aa, Pseudomonas aeruginosa
MKKIKLVMVGNGMAGVRTLEELLKLNSDFYDITVFGAEPHPNYNRILLSPVLAGEQTFEEIVLNDLNWYAENGIKLLLDRKVVQIDRLRRRVVAADGSEAEYDRLLLATGSLPFILPIPGNRLQGVIGYRDIADTQAMIDCARTHSHAVVIGGGLLGLEAANGLKQRGMDVTVVHLSDWLLERQLDRTAGKLLQGALEARGIRFRLNTQTQELMDNGSGRV

SEQ ID NO: 14391 - protein, 438 aa, Thermus thermophilus HB27
MDYTPHTEEEIREMLRRVGAASLEDLFAHLPKEILSPPIDLPEPLPEWKVLEELRRLAAQNLPAHKAFLGGGVRSHHVPPVVQALAARGEFLTAYTPYQPEVSQGVLQATFEYQTMIAELAGLEIANASMYDGATALAEGVLLALRETGRMGVLVSQGVHPEYRAVLRAYLEAVGAKLLTLPLEGGRTPLPEVGEEVGAVVVQNPNFLGALEDLGPFAEAAHGAGALFVAVADPLSLGVLKPPGAYGADIAVGDGQSLGLPMGFGGPHFGFLATKKAFVRQLPGRLVSETVDVEGRRGFILTLQAREQYIRRAKAKSNITTNAQLTALMGAMYLAALGPEGLREVALKSVEMAHKLHALLLEVPGVRPFTPKPFFNEFALALPKDPEAVRRALAERGFHGATPVPREYGENLALFAATELHEEEDLLALREALKEVLA

SEQ ID NO: 14392 - protein, 473 aa, Thermus thermophilus HB27
MSFPLIFERSRKGRRGLKLVKAVPKAEDLIPKEHLREVPPRLPEVDELTLVRHYTGLSRRQVGVDTTFYPLGSCTMKYNPKLHEEAARLFADLHPYQDPRTAQGALRLMWELGEYLKALTGMDAITLEPAAGAHGELTGILIIRAYHEDRGEGRTRRVVLVPDSAHGSNPATASMAGYQVREIPSGPEGEVDLEALKRELGPHVAALMLTNPNTLGLFERRILEISRLCKEAGVQLYYDGANLNAIMGWARPGDMGFDVVHLNLHKTFTVPHGGGGPGSGPVGVKAHLAPYLPVPLVERGEEGFYLDFDRPKSIGRVRSFYGNFLALVRAWAYIRTLGLEGLKKAAALAVLNARYLKELLKEKGYRVPYDGPSMHEFVAQPPQGFRALDLAKGLLELGFHPPTVYFPLIVKEALMVEPTETEAKETLEAFAEAMGALLKKPKEWLENAPYSTPVRRLDELRANRSPKLTYFDE

SEQ ID NO: 14393 - protein, 375 aa, Gaeumannomyces graminis
MEEEVAALVIDNGSGMCKAGFAGDDAPRAVFPSIVGRPRHHGIMIGMGQKDSYVGDEAQSKRGILTLRYPIEHGVVTNWDDMEKIWHHTFYNELRVAPEEHPVLLTEAPINPKSNREKMTQIVFETFNAPAFYVSIQAVLSLYASGRTTGIVLDSGDGVTHVVPIYEGFALPHAIARVDMAGRDLTDYLMKILAERGYTFSTTAEREIVRDIKEKLCYVALDFEQEIQTAAQSSSLEKSYELPDGQVITIGNERFRAPEALFQPSVLGLESGGIHVTTFNSIMKCDVDVRKDLYGNIVMSGGTTMYPGLSDRMQKEITALAPSSMKVKIIAPPERKYSVWIGGSILASLSTFQQMWISKQEYDESGPSIVHRKCF

SEQ ID NO: 14394 - protein, 163 aa, Glycine max
  misc_feature (4)..(5): Xaa can be any naturally occurring amino acid
  misc_feature (7)..(8): Xaa can be any naturally occurring amino acid
  misc_feature (21)..(21): Xaa can be any naturally occurring amino acid
  misc_feature (29)..(30): Xaa can be any naturally occurring amino acid
  misc_feature (34)..(35): Xaa can be any naturally occurring amino acid
KNIXXNXXHEGPDSNPGRYCXRLHKNKIXXASEXXVKRATNVARPNLVSLGTCIGKYTHGGSFHLTVQALNLLAANAKHKVWLKPQSEMSFLYGNHVLKGALGKLSENIAAGDGVVVFSMADVPLGFGVAAKSTLDCRKLDPNGIVVLHQADVGEYLRMEDEL

SEQ ID NO: 14395 - protein, 139 aa, Brassica napus
  misc_feature (12)..(12): Xaa can be any naturally occurring amino acid
  misc_feature (56)..(56): Xaa can be any naturally occurring amino acid
  misc_feature (71)..(71): Xaa can be any naturally occurring amino acid
  misc_feature (127)..(127): Xaa can be any naturally occurring amino acid
ITCGTLRLSTAXVNLADADAKEHCACSMRTGLVDSAYKAVDLIVKEPATLLEYSMXNAVTEGIDAIATTRXVLVRGNNTYTSTNAITGEEVLRTFSGTGAGMDIVVSSVKAYVGALNKMLDFKEKSXEKVPSRNIKVTA

SEQ ID NO: 14396 - protein, 518 aa, Pasteurella multocida subsp. multocida str. Pm70
MADNIIIFDTTLRDGEQALKASLTVKEKLQIAFALERLGVDVMEVGFPISSAGDFESVQTIARHIKHSRVCALSRAVDKDIDAAAEALKVAEAFRIHTFIATSALHVEAKLRRTFEDVVDMAINAVKRARNYTDDVEFSCEDAGRTGVDNICRIVEAAIKAGATTVNIPDTVGYCLPYQYGDIIANVMNRVPNIDKAIISVHCHNDLGMATANSLTAVQNGARQIECTINGIGERAGNTALEEVVMAIKTRQDMFNGLDTRINTQEIHRVSQMVSQLCNMPIQPNKAIVGSNAFAHSSGIHQDGMVKHKNTYEIMSPESIGLKKEKLNLTARSGRAAVKNHMSEMGYQESDYDLDKLYEAFLKLADKKGQVFDYDLEALAFIDMQQGDEDRLTLDVITSQCISHLPASAFVQVELDGKKMSQVSNGGNGPVDAVYNAILAITGLEMKMLNYNLTAKGEGAEALGQVDIVVEHEGRRFHGVGLATDIVESSARALIHAINAIYRSQKVADLKLHKIAGV

SEQ ID NO: 14397 - protein, 436 aa, Burkholderia vietnamiensis G4
MKKPSQFDAIVVGAGPSGNAAAYTMAKAGLKVLQIERGEYPGSKNVQGAILYAKALEEIIPDFRDDAPLERHIIEQRLWMLDETSFVGTHVRSDDYNKPPYNRYTIIRAQFDKWFSSKVREAGALVICETTVNHLILDGDQVVGVQCDREQGDVYADVVILADGVNSTLARKAGFHDEIDAGNVALAVKEILFMPEETIRQRFNIGEDEGVVIEMVGRITDGMMGTGFLYTNRESLTIGVGCMLSDFKQNANRTSPYVLIEQMKRHPAIAPLIEGGEMKEYCAHLIPEGGFHAVPRVYGNGWMIVGDSGGFVNAAHREGSNLAMTTGRLAAETVIAAKAAGRGYRAGELKAYKAKLDDSFVMKDLYKYRDMPDTLHRNPQFFTTYPDLVANAARTMITVDGVDKKTKERAIVSSFRKSRSFAGLVGDAFKIWRAFR

SEQ ID NO: 14398 - protein, 525 aa, Chlamydia trachomatis D/UW-3/CX
MMGKGFLDCESLVALQEMALHPIDLTASGCLSEERIQKNSLSAEGFTYSYATERVDDRCLEALQGLTEERELIKQMECMQQGAIMNRIEGFQSESRPVLHTATRAWVRDQDLHEEAAAIARHSKEEALRLAEFLYIARAKFSTLVQMGIGGSELGPKAMYFAMQGSCPSDKRIFFVSNIDPDNAAEVLREIDLEQTLVVVVSKSGTTLEPAANEELFRQAYQNKGLSIAEHFVAVTSQGSPMDDKSRYLEVFHLWDSIGGRFSATSMVGGVVLGFAFGYEAFIEFLQGAAAIDAHALTPKMRENLPLLSAMLGVWNRNLLGYPTTAVIPYSTGLKYFTAHLQQCGMESNGKSISREGKEISFRTSPIIWGDVGTNCQHSFFQSLHQGTDIVPVEFIGFLHNQRGLDCVLSGSSSSQKLFANLVAQSLALAQGRDNANSNKRFKGNRPSSILVAQQLSPRIAGSLLAFYEHKFAFQGFCWGINSFDQEGVSLGKELATQIIGIMSGNAPVEFSEARGMLRLFNVLT

SEQ ID NO: 14399 - protein, 387 aa, Xylella fastidiosa Ann-1
MSTEVKVPVLPESVSDATIASWHKKAGEIVKRDENIVDLETDKVVLEVPSPVDGVLKEIKFDTGSTVTSNQVLAIIEEGSIVAAPSQVIDQKPVAVSAPAAKSNVDSLPPGARFTATTEGIDPAHIEGSGRRGAVTKEDIINFAKQNGAARSSGTRLEERVPMTRIRQRIAERLMQSKNSTAMLTTFNEINLAKVSNIRKELQEEFQKAHGIKLGFMSFFVKAVANALQRFPLVNASIDGTDIIYHGYSDISIAVSTDKGLVTPVLRNVERMSFADIEHRIADYAKKARDGKLSLEELQGGTFTVTNGGTFGSLLSTPIVNPPQSAILGMHTIKERPIAENGHIVIAPMMYVALSYDHRIIDGKDSVQFLVDIKNQLEAPGRMLFGL

SEQ ID NO: 14400 - protein, 306 aa, Solibacter usitatus Ellin6076
MPRILDGNRVRDEIKGELKPRIAALAAHGRPPGLAVVLVGNNPASEIYVRNKIKTCHDLGIYSESITPPDTISTEELLAIVQGLNARAEIDGILVQLPLPPQVDTKRILMAVSPAKDVDGFHPCNVGALVANLPAPRACTPAGIMELLKRGGIPIAGQRAVVVGRSDIVGKPVAMLLLHEHATVTICHSKTPDLKSLCREADILVAAIGRAAMITGEFIKPGATVIDVGTNHVADREKAARIYRNSPEKMANFDKRGNLLIGDVDPVGVVEKAGAYTPVPGGVGPLTIAMLMVNTVASAERRAGVC

SEQ ID NO: 14401 - protein, 220 aa, Larix x marschlinsii
MATCCRAFVGILLVSLVVMNSVHADPEALQDFCVADTKSTIFMNGGPCLNPMEASPEHFITSALRKPGNLSANPLGFSVIVTTPANMPGLNTLGLSMGRIDMAPGSAIPPHIHPRGSETIFVVRGALNVGFVDASSRLFSHKLVAGDVFVLPKGTVHYLQNTGKITAFIVSAFNSQNPGTVIVSMATFASTPAIPYEVLSKAFAISVQELSQIRKSLGGN

SEQ ID NO: 14402 - protein, 333 aa, Ascophyllum nodosum
MVNVAINGFGRIGRLVLRAAKHNKHINVVAVNDPFVPPDYMNYMFKYDTVHGVYDGTVENDDSSIIVDGKKIKVFGEMDAANVKFGDVGADYVVESTGLFTTTESAAVHLKGGAKKVVISAPSQDAPMFVMGVNQDKYTPDMDVVSNASCTTNCLAPIAKVINDSFGLKEGLMTTVHAVTATQKTVDGPSKKDWRGGRAAGFNIIPSSTGAAKAVGKVIPELNGKLTGMSFRIPTANVSVVDLTCRLEKPASYEEIKAAMKAASEGPMHGILGYTEDSVVSSDFIGDSRSSILDANAGIALSDTFVKLVSWYDNEWGYSCRVLDLITHMDKSS

SEQ ID NO: 14403 - protein, 398 aa, Dechloromonas aromatica RCB
MFEIIEKDEESGTIIKVFGVGGAGGNAIEHMIREGVSGVEFIAANTDAQALGRNAAASKLSLGKTGLGAGAKPEAGQAAADAHRDEIRATLEGAHMAFITAGMGGGTGTGAAPVVAEIAREMGILTVGVVTKPFSFEGGKRMKSAEAGIAEFAKHVDSLIVILNDKLMEVMGDDADVDDCFKAADDVLKNAVGGIAEIITYPGLVNVDFEDVRTVMGEMGRAMMGSAAAAGVDRARIAAEQAVASPLLEGINLSGAKGVLVNITAAKGNLKMKEVNEVMNTVKAFAAEDAHIIFGAVYDELMGDALRVTVVATGLGQAAAAVRSKPEVFTQPVLVQAQATGTHDAVAFGSAPDYSHLDVPAVLRGRGQRGGSNVTVEALANSGVDRYDIPAFLRKQAD

SEQ ID NO: 14404 - protein, 246 aa, Streptococcus pyogenes
QIAGPEGLFYSDKEELESLGAKVYMESPVQSIDYDAKTVTALVDGKNHVETYDKLIFATGSQPILPPIKGAEIKEGSLEFEATLENLQFVKLYQNSADVIAKLENKDIKRVAVVGAGYIGVELAEAFQRKGKEVVLIDVVDTCLAGYYDRDLTDLMAKNMEEHGIQLAFGETVKEVAGNGKVEKIITDKNEYDVDMVILAVGFRPNTTLGNGKIDLFRNGAFLVNKRQETSIPGVYAIGDCATIYD

SEQ ID NO: 14405 - protein, 461 aa, Solibacter usitatus Ellin6076
MQKSPRTELKRDLGPWAAASIVVGTVIGSGIFLVPKTMIQKVGTVEAVFAVWVVGGLLSLAGALSYAELAAALPEAGGEYAFLREAYGPMWGFLYSWTQMWVAKSGSIATLATGFFLYLTTFFEPLKGVFYTIPLPIGPNGGPLEIQYGQIFAIFLILALGWLNYFGVRIGGNVQVAVTVIKVGLIAAIIFAGLVFGHAHETAAGPVAPITFSGFIAALVAALWAYDGWNNVSMVSSEIKDPQKNLPRALIGGTLCVIAIYMAANAAYFHVMSPAEVAGSTRVAAEMMRKIFSAPGAAAVSIAAMISIFAALNGSILSGARVPYAAARDGYFFHAIGRVHPKYHTPGVSIIVLNLWACLLVLSGKYDDLFNLVIFASWILYGMTAAAVVVLRIKQPELQRPYRTMGYPVVPVLFIIGAVILLVSTAWERPRESMMGIALILLGLPFYYYWKKRIPATIREV

SEQ ID NO: 14406 - protein, 234 aa, Wigglesworthia glossinidia endosymbiont of Glossina brevipalpis
MSIIKLVLMRHGSSIWNDQDRFTGWTDIDLSEKGKNEVKYAGKMLKSFGYSFNFAYTSLLKRAIHSLWVILKEINQSWIPVEKSWRLNERHYGALQGFSKYEIEKKYGKNQLNEWRRGFSISPPKINEKDNYFILNDKRYLNLKTKKLLPFSESLKSTIDRIMPYWDGNIFPRLQNKEKIIIVAHGNSIRAIIKILCNLNEKEIIKINIPTGIPLIYEFDYNMVFKKKYFLFDR

SEQ ID NO: 14407 - protein, 530 aa, Triticum aestivum
  misc_feature (127)..(127): Xaa can be any naturally occurring amino acid
  misc_feature (139)..(139): Xaa can be any naturally occurring amino acid
MAAAVKTSGGFCNTQQQWLHSTRDLFLHGSTHSNAKECKSKKAKKPTSLRVKATSTKVELDFNDPSWKQNFQEDWDNRFNLPRITDIYDLKPRPTTFSLQKQRTPTGDEDSTPMDMGNGNVNNDDRXALMKVIKDSSPXSAGAECIDPDCSWVEQWVHRAGPRKDIYYEPNEVKAAIVTCGGLCPGLNDVIRQVVFTLETYGVKNIVGIPFGFRGFFEKGLKEMPLSRNLVENINLAGGSFLGVSRGGAKTSEIVDSIQARRIDMLFVLGGNGTHAGANAIHDECRKRKLKVSVVAVPKTIDNDIPLMDKTFGFDTAVEEAQRAINSAYIEARSAYHGIGLVKLMGRSSGFIAMHASLSSGQVDVCLIPEVSFALDGEYGVLQHLEQLIKNKGFCVVCVAEAAGQELLQNSGATDASGNAILSDIGVHMQQKIKTHFKGIGVHADIKYIDPTYMVRACRANASDAILCTVLGQNAVHGAFAGFSGITSCICNTHYVYLPVTQVITAPKRVNNKGRMWHRCLTSTGQPDFR

SEQ ID NO: 14408 - protein, 191 aa, Zea mays
GRCKGRGSKISWTQVETGSAITWKYPSVELVGDDSVGEFYSVALTKDCQQADTGTKMIHKGKNSRSRIISKGISAGKSRNCYRGLVLMNSSAENAYNSSQCDSLLIGDNAAANTYPTIQVGCTSGRVEHEASTSKIGEDQLFYFQQRGVDHEKAVAAMIGGFCRSVFEHLPYEFAQEVDALMNLKLEGSVG

SEQ ID NO: 14409 - protein, 643 aa, Polaromonas sp. JS666
MFDFIRKHTKVTMALLFLLIVPSFILFGLDGYNRSREQGVAVARVDGKDIIQSEWDRAHQLEVDRLRASMPSLDAKLLDSPQARYATLERLVRDRVIAAAADKFKLVISDQRLARELQQSSEIASLRRSDGNLDMERYRQVLGSQGMSPEMFEANVRADLSNRQVLTGIGASGFSSSSAADLALNAYFEKREIQLARFNAADFAAKLSPTDADLDQFYKANEKLFQAPEQASIEYVMLDVETVRKSITINEADLKTYYEQNLQRLSGAEERRASHILITSPKTASAEERQKAKAKAEELLAAVKKSPDTFADVARKNSQDPGSAPSGGDLDFFARGAMVKPFEDAVFSMKKGDISAVVESEFGYHIIRLTDIKAPKQRSFEEMKPELEADLKKQQAQKKFSEAAEAFTNGVYEQAGSLKPVAERLKLDIKTASNVTRQPSAGTTGVLANPKFLNALFGPDAVEKKRNTEAIEVAPSQLVSGRILQYTPARTQPFAEVKDIVRQRWLAQRSAEEARKEGLAKLVAWKAAPASAVLAAPVLVSREQTQNLPVQVIDAALRVDASALPVFAGVDLGAQGYAIVKVAKVMPRDARPDAAAKQERNQYAQWWTSAENLAYYNGLKERFKAEILVAKPASVNADEVVTQ

SEQ ID NO: 14410 - protein, 372 aa, Polaromonas sp. JS666
MSITTTNQASKKRIAVIAGDGIGKETMPEGVRVLDAAARKFGIDLHFDHFDFSSWDYYEKHGQMMPDNWKDQIGGHDAIYFGAVGWPEKIADHVSLWGSLLLFRREFDQYINLRPARLMPGIIAPVVRRDGSPRQPGEIDFYIVRENTEGEYSSIGGRAFPGTDREFVLQESVFTRVGVDRVLKFAFELAQSRPKKHLTSATKSNGISISMPYWDERVAEMAKSYPAIRLDKFHIDILTAHFVQRPDFFDVVVASNLFGDILSDLGPACTGTIGIAPSANLNPERKFPSLFEPVHGSAPDIAGRNLANPIGQIWCGAMMMEFLGHKEAHDAILAAIEKVLRPDSGAPRTPDLGGKAGTADVGKAVAAALAEV

SEQ ID NO: 14411 - protein, 529 aa, Alkaliphilus metalliredigenes QYMF
MKSMHFEDLDIKKDILKALKELGFEVPTPIQVQAIPHLKMGKDIIGQAQTGTGKTAAFGIPMIERVNPKNKAVQILIMAPTRELSVQVADEIQKFSNHVIGVKTLAIYGGQPISTQIKALKRGVQIIVGTPGRILDHINRKTLKLGEVIGVVLDEADQMLDMGFQEDMEAILKETPTERQTAMFSATISREIERIAQKYMKQPEKIMVAQKALTVPQISQYYFEVKPHEKVEALCRILDMDKTDLGIIFCRTKRSVDELTEKLQNRGYSAAAIHGDLKQTQRDRVMKKFRNRTIDLLVATDVAARGIDVNDVEMVMNYDIPEDFEYYVHRIGRTGRAGKEGVAYTLATGKQMRTLKALESYIKGKIVRRKIPTVNDVVEKQKDSIADQIHAVIEKGGLTEYTNFVEKLSDDHNSMDIAAALFKMLTEKSDTELFKVAENISDTEKEYKADMVRLFINIGKSHGVKPKDILGAVAGEAGISGDVVGIIDMYDKFTFVEVPGQFEEQVLDAMDKNRIKGKKINMERANDKR

SEQ ID NO: 14412 - protein, 396 aa, Thermoplasma volcanium GSS1
METYDVLVIGGGPGGSTAARYAAKYGLRTLMIEKRPEIGSPVRCGEGLSKGILNEADIKPDKSFIANEVKGARIYGPSEKRPIILQSEKAGNEVGFVLERDKFDKHLAALAAKAGADVWVKSPALGVIKEDGKVAGAKIRHENNVVEVRAKMVIAADGFESEFGRWAGLKSVILARNDIISALQYRMINIDVDPDYTDFYLGSIAPGGYIWVFPKGEGMANVGIGSSINFIHNRLELKNYLDRFIENHPGLKKGQDIQLVTGGVSVSKVKMPITMPGLMLVGDAARLIDPITGGGIANAIVSGMYAAQVSKEAIESNDYSPQMMGKYEKLVKDRFERKHLRNWVAKEKLAQLSDETLDKLVDIVSEQVLTTISVEAILKAIAEKYPEVVKELEDLI

SEQ ID NO: 14413 - protein, 674 aa, Arabidopsis thaliana
MNLTHLESALRKGFEVKLVIDEIPCQECSSSRGICGFNSTTQICCNVTSLSGGVTCVPQHQPSADELRRRCSERFSCGNQRNLYYPFWIPGREYCGHPDFKLDCSGGFAELNIASVNFRILNMSYDSSNKRLARSDYLNDLCPPNPLNDEPLIETVLQFSADTELLTLYYDCQLNSSATSPFPSSYFGELGCDEGRSYYVTRNLSSPLLDRFRGVLNNLREMCKRKVSVPASGPALNTLQTNPNSNNLKMALEHGFELQDNSNCSMCVLSGGSCGYNQNSMAIIIGIFVALCTIGGFIAFLVLLCPCCKVRIFRNRKTSDDRRQEKLKALIPLKHYTYAQVKRMTKSFAEVVGRGGFGIVYRGTLCDGRMVAVKVLKESKGNNSEDFINEVSSMSQTSHVNIVSLLGFCSEGSRRAIIYEFLENGSLDKFISEKTSVILDLTALYGIALGVARGLEYLHYGCKTRIVHFDIKPQNVLLDDNLSPKVSDFGLAKLCEKKESVMSLMDTRGTIGYIAPEMISRVYGSVSHKSDVYSYGMLVFEMIGARKKERFGQNSANGSSMYFPEWIYKDLEKADNGDLEHIEIGISSEEEEIAKKMTLVGLWCIQSSPSDRPPMNKVVEMMEGSLDALEVPPRPVLQQIHVGPLLESSWITEESSSISEIENRNLQVCEKILS

SEQ ID NO: 14414 - protein, 629 aa, Desulfovibrio desulfuricans G20
MCGIAGYCGACGVADTTEKECAGRLEALLAGIVHRGPDDAGITCAHNVAIGMRRLSIIDLAGGHQPMLSGDGRYALVFNGEIYNFRELRSELAEAGYSFATNSDSEVLLKGYMAWGRGVLDRLDGMFAFAVHDRHAGTVFLARDHLGIKPLYYIHLGGVFAFCSEPAPLLELPQVRRRLDHDALAAFLSFKYVPAPDTFIKDIKKLAAGHTLEYSPRGDMLRTERYWQLQGREGSSDAGELAERLTRAVDSQMVSDVPLGVFLSGGIDSGLLTWAAAGQGGEHFTGGYTVAFDETGRKKGLRAGGSFDESRLAALSAAHLGVPLSSTTLASPAQATLDDWIRRFQEPFANTSIPANFLLCQWVARHVKVALNGSGADELFGGYDRYYAVHPPAALRALHCAAPLLRRVADMLPVGGGKNSLVHRARRYLAGCALAPAQKHAGSIRLFTDTQLAAIAPGVVPATFVQDAFAGAPQGSLLYKATWTDMQTMLPDDYLTLVDRTSMAASLEVRVPFLARDFVQYAFSLPPAAKIAGWKKKTALRALAAKHLPEDIARQPKMGFESPVGRWFRDGLGEALCRQLAQSPLQNIISVRGVQALAQSHSAGQVDAAKPLLALYTLVRWMDMYRVEL

SEQ ID NO: 14415 - protein, 482 aa, Prochlorococcus marinus str. MIT 9211
MSNTNSIAEVIATSNSYKYGFLTNIETEKIAKGLNEDVIRLISMKKNEPDFLLKFRLDAYRKWLTMKEPEWANLGYPKIDYQNIRYYAAPKDIEKKKSLDEVDPEILETFEKLGIPLSEQKRLSNVAVDAVFDSVSIATTFKEKLAEDGVIFCSISEAVQEYPELIERYLGTVVPKNDNFFAALNSAVFSDGSFVFIPKGITCPMELSSYFRINSGDSGQFERTLIVAESGSSVSYLEGCTAPMFDTNTLHAAVVELIALDDASIKYSTVQNWYSGDKNGVGGIYNFVTKRGQCRGKNSKISWSQVETGSAITWKYPSCVLLGANSTGEFYSVALTNNKQIADTGTKMIHIGPKTRSKIISKGISVGKSKNSYRGLVEIGTRAAGAKNFSQCDSLLIGDEAEANTYPYIQSKQSKSNIEHEASTSKISEDQLFYLQSRGISNEEAVSMMVNGFCRDVFNKLPMEFASEANNLLALKLEGSVG

SEQ ID NO: 14416 - protein, 111 aa, Anabaena variabilis ATCC 29413
MSKGVITITDAEFESEVLKAEQPVLVYFWASWCGPCQLMSPLINLAANTYSDRLKVVKLEIDPNPTTVKKYKVEGVPALRLVKGEQLLDSTEGVISKDKLLSFLDTHLNNN

SEQ ID NO: 14417 - protein, 224 aa, Mycobacterium leprae
MGPLIAPSILAADFARLTDEAAVVASADWLHVDVMDGHFVPNLTIGLPVVQSLLAASDIPMDCHLMIDNPDRWAPPYAEAGAYNVTFHAEATDNPVGVAHDIRTAGAKAGIGVKPGTPLNPYLDILPHFDTLLIMSVEPGFGGQAFIPEVLSKVRTVRKMVDAGELTILVEIDGGINADTIEQAAEAGVDCFVAGSAVYGAADPSAAVAALRRRAGAVSPHLRR

SEQ ID NO: 14418 - protein, 249 aa, Xanthomonas axonopodis pv. citri str. 306
MTRKLVLLRHGQSQWNLDNRFTGWVDVELTDQGRQEAVAAGRLMKDEGLQFDVAHTSVLKRAIHTLQGALKELDQDWLPVSKSWRLNERHYGGLQGLDKAETAAKHGEEQVKIWRRSYDIPPPAMDVNDPGHPCHDRRYATLDRNALPGTESLATTLVRVLPYWHDAIAPQLKAGQTVLVTAHGNSLRALYKYLNDVSNEQILELNIPTGIPLLFELDDSLQVRSFRYLGDPEAAKRAAEAVANQGKAK

SEQ ID NO: 14419 - protein, 283 aa, Lactobacillus acidophilus NCFM
MGKILDGKFVANLLGEKLKEKVKDLKEEGITPHFCVINIGDDPASKIYVRTKKRRAEKMGIIQDIYQLPADTKQEVALNLIDKLNEDPDINGVMVQLPAPEQIDADELLERIDPNKDVDGLTPSNIGRIWMENHFIEPATAEGIIALLKYYKILLKGKNVVVIGRSNIVGKPVAALMLEQNATVTIAHSETENLAELTRNADIIVSATGQAFLVTEDMVKDGVVVVDVGMNHVNGKLVGDVDFENVKKKASYITPVPGGVGPLTVQFLMEAVVKLTRRQNGRE

SEQ ID NO: 14420 - protein, 311 aa, Wolinella succinogenes
MNKIIIGTRGSVLALWQAEYVKAELERAHEGLSVELKIVKTKGDKILDVPLAKVGGKGLFTKELEEMMLQGEIDLAVHSLKDVPVELIEGLTLSAITEREDVRDCFLSDKYASLETLPLGAKVGTTSLRRSMQIKSMRSDLDTESLRGNVQTRIKRLKEGDFDAIILATAGVNRLDLWKEVNYVIPIDTEMMIPAMGQAALGIECKEGSEAFRLTQILEDKKARIETTAEREFVRVLEGGCQVPIGANAYLEGETLHLKVAVGLPDGSEILMDRLSAPKGEAVRLGRELAARLIAKGARELLRRAEEMAFQ

SEQ ID NO: 14421 - protein, 180 aa, Synechocystis sp. PCC 6803
MTPAKIRNALLAVVAIALSAAVYLGFQTQTQGISLEAQAQRAIPLATALDNGRPTLVEFYADWCTSCQAMAPDLAELKKNYGGSVNFAMLNVDNNKWLPEVLRYRVDGIPHFVYLDDTGTAIAESIGEQPLRVLEQNITALVAHEPIPYANVTGQTSVVENRTIEADPTSPRSHGNPRPS

SEQ ID NO: 14422 - protein, 435 aa, Mycobacterium leprae
MGPFDSKVAKMTRLDSVERAVADIAAGKAVVVIDDEDRENEGDLIFAAEKATLEMVAFMVRYTSGYLCAPLDGAICDRLGLLPMFAVNQDKHGTAYTVTVDARNGVGTGISASDRATTMRLLADPASVADDFTRPGHVVPLRAKDGGVLRRPGHTEAAVDLARLAGLQPAGAICEIVSQKDEGSMAQTDELRVFADEHDLALITIADLIAWRRKHEKHIERVAEARIPTRHGEFRAIGYTSIYDDVKHVALVRGEIAGSSGDGDDILVRVHSECLTGDVFGSRRCDCGTQLDAAMAMVAREGRGVVLYMRGHEGRGIGLMHKLQAYQLQDAGADTVDANIKLGFPSDARDYGIGAQILVDLGVRSMRLLTNNPAKRVGLDGYGLQIIERVPLPVRANADNIRYLMTKRDKMGHDLGGLDDFHESNYFPGEFGGAL

SEQ ID NO: 14423 - protein, 748 aa, Propionibacterium acnes KPA171202
MRLTPTLPDGHGLRIGILTSGGDAQGMNAAVRAVVRSALSVGAEVYAIYEGYQGMIDGGDGIRRFGWDDVGSILNRGGTVIGTFRCKGMRERPGRLKAVRNLLEHGIDRLVVIGGDGSLTGLDVLRTEWTDLVAELVDTGQVSAEVAREHPALMIAGLVGSIDNDLVGSDMTIGADTALHRIVDAIDDLASTAASHQRSFVVEVMGRHCGYLALMAAVAGGADYVLIPERPPEDGWEDRMCAELKRGRQAGRRDSIVVVAEGATDRSGNRISSEYVRQVLEDKLGEDARVTILGHVQRGGRPSAYDRWASTWLGYHAVHEVLSTTPEAEGRVIGTGSNRIHRLPLVKAVADTKSVPGLITEGRYNEAMRMRGRSFVEMDAIFTELSEPARTTSDTAGDADRKRVAIMHAGGPAPGMNTAARAAVRLAISRGHTVVGIHNGFIGLATGDMSELAWSDVEGWAGEGGAELGTRREIPSTRDLYAVSRALEDHHIDALLVIGGYSAYEGIYTMMTERDRYPAFRIPTVCIPASIDNNLPGSELSIGTDTALNVIVEAMDKIKESGIASRRCFVVETMGRDCGYLALMSGIAAGAERIYTNEDGISLDDLANDVHWLRESFAHGRRLFLAVRNENASHNYTTDFIARLLEEESHGMYDVRQVVLGHMQQGGSPSPFDRLLANRLGYRALNLIDDELAAHQDGSWFIGVNESGMRPCSMDTMPSLIDAAHRRPREQWWLQLRTIARMVSDEVR

SEQ ID NO: 14424 - protein, 360 aa, Glycine max
MLGVIRHKSIRPAFSAIRHFSSAAKEITVRDALNSALDEEMSADPKVFLMGEEVGEYQGAYKISKGLLDKYGPERVLDTPITEAGFAGIGVGAAYYGLRPVVEFMTFNFSMQAIDHIINSAAKSNYMSAGQISVPIVFRGPNGAAAGVGAQHSQCYASLYGSCPGLKVLSPYSSEDARGLLKAAIRDPDPVVFLENELLYGESFPVSAEVLDSSFCLPIGKAKIEREGKDVTITAYSKMVGYALKAAETLAKEGISAEVINLRSIRPLDRSTINASVRKTNRLVTVEEGFPQHGVGAEICTSVIEESFGYLDAPVERIAGADVPMPYAANLERMAVPQVEDIVRAAKRACYRSVPLAASA

SEQ ID NO: 14425 - protein, 110 aa, Arabidopsis thaliana
MEIESVRCECCGLMEDCTQDYISEVKSNFDNKWLCGLCSEAVRDEVSRRKMTTVDEAVKAHVSFCGKFKKDNPAVHVADGMRQMLRRRSGELTNSSTSKKFGRSNTTKLY

SEQ ID NO: 14426 - protein, 229 aa, Medicago truncatula
MDFFMSSFSDYSDTSSSETASSNRTSSSEVILAPARPKKRAGRRVFKETRHPVYRGVRRRKNNKWVCEMRVPNNIVNKNNKSRIWLGTYPTPEMAARAHDVAALTLKGKSACLNFADSAWRLRLPESNDATEIRRAAMEAAQLFAVEDKQCCVTVEDGVFMDMEDSKNMLEAQVPVVSSEFEDMHHLLLSIANEPLRSAPPSPTNYGSYNWGDMEIFDTQLVSLWNFSI

SEQ ID NO: 14427 - protein, 226 aa, Medicago truncatula
MNIFLSSFGDYSDSSSSSETSSSEVILASARPKKRAGRRVFKETRHPVYRGVRRRNNNKWVCEMRVPNINVNKNNKSRIWLGTYPTPEMAARAHDVAALTLKGKSACLNFADSAWRLTLPESNDAVEIRRAAMEAAKMFAIEENHNQRSDRDAVDMNMENSKKNVLEVQVPVLSSEFEDMHHNLLLSIANEPLRSNPPSPTNYYGSNYDDMEIFDTQIVSLWNFSI

SEQ ID NO: 14428 - protein, 363 aa, Shigella flexneri
MSKNYHIAVLPGDGIGPEVMTQALKVLNAVRNRFAMRITTSHYDVGGAAIDNHGQPLPPATVEGCEQADAVLFGSVGGPKWEHLPPDQQPERGALLPLRKHFKLFSNLRPAKLYQGLEAFCPLRADIAANGFDIQCVRELTGGIYFGQPKGREGSGQYEKAFDTEVYHRFEIERIARIAFESARKRRHKVTSIDKANVLQSSILWREIVNEIATEYPDVELAHMYIDNATMQLIKDPSQFDVLLCSNLFGDILSDECAMITGSMGMLPSASLNEQGFGLYEPAGGSAPDIAGKNIANPIAQILSLALLLRYSLDADDAASAIERAINRALEEGIRTGDLARGAAAVSTDEMGDIIARYVAEGV

SEQ ID NO: 14429 - protein, 628 aa, Rumex palustris
MNTCDCVDTQWFADDLLIKSQYISDLFIVLAYFSIPLELIYFVQKSALFPYRWVLIQFGAFIVLCGTTHLINLFTFSMHSKTLAVVMAIAKMSTAAVSCITALMLVHIIPDLLSVKMRESILRRRADELDREMGLILSQEETGRHVRMLTHEIRSTLDRHTILKTTLVELGRTLGLEECSLWMPSQTGMTLKLSHALQNLTPVGSCVSLNLPVITEIFNNPGVVRISHTCPLVSTRPISGRYLAPEVAAIRVPLLNLSNFQINDWPDVSGRTYAVMVLVLPCDGLRKFRKHELELIEVVADQVAVALSHAAILEESMRAHDQLLEKNVALDLARQEAELAIRARNDFLAVMNHEMRSAMHAIITLSSFLLETELTPEQRVMIEIILRSSNILATLINDVLDLSRLEDGSLELDSLTFNLHAVFKKVINLLKPITCVKKLSLTLAVAPEAICVVGDEKRLVQTILNVVGNAVKFTKVGKISIIVSVAKPDSLSSWQPADVIYAAVSKGQFYLRVQVKDTGCGINPQEIPHIFDKFYQSQNCRRNSTDSGLGLAICKRFVNLMGGQIWVESEGLDKGSLVTFVVKMGICRNPDERSINQAASTGHMNQSSTDLLGDSSMSFSLKRFEKSC

SEQ ID NO: 14430 - protein, 224 aa, Medicago truncatula
MDFFMSSFGEYSDTSSSETSSSEVILASVNKPKKRAGRRVFKETRHPVYRGVRRRKNNKWVCEMRVPNNIVNKNNKSRIWLGTYPTPEMAARAHDVAALTLKGKSACLNFADSAWRLRLPESNDATEIRRAAMEAAQLFAVEDKQCCVTVEDGVFMDMEDSKNMLEAQVPVVSSEFEDMHHLLLSIANEPLRSAPPSPTNYGSYNWGDMEIFDTQLVSLWNFSI

SEQ ID NO: 14431 - protein, 402 aa, Solibacter usitatus Ellin6076
MRRVAITGMGAISALGPTSREFSEALLAGRCGIAPIQSADMSQVRFQNGAEVKQYSHTPYFDDRRADFMDRFAQFAVIAAREAVESAHIQWTPELQEIAAIITGSCVGGQATEDLGFVEIYKNAHNRVHPLTIPKTMANAGASHISIEFGIKGPAYTISTACSSAGHAIGQAYQMVRNGDTDLALTGGSEAPFSVGILKAWEAMRVVSPETCRPFSKDRRGMILGEGSAMFVLEPLEAAQARGAHIFGELVGFGMSADACHITQPSKEGAARAMRAALRSAGLAPEQIGYINAHGTATPANDPTETAAIRDVFGAHAGKLAISSTKSMHGHALGAAAALECLATAIALSSGVLPPTVNYSQPDPECDLDVIPNVARKQQVEYALSNSFAFGGLNAVLVLRAV

SEQ ID NO: 14432 - protein, 238 aa, Zea mays
  misc_feature (40)..(40): Xaa can be any naturally occurring amino acid
  misc_feature (148)..(148): Xaa can be any naturally occurring amino acid
  misc_feature (164)..(164): Xaa can be any naturally occurring amino acid
  misc_feature (166)..(166): Xaa can be any naturally occurring amino acid
SQRYPVWLSLVSEPIIAFPRHGACRKPVVWVLVTEYAKGXGSVRQFLAKRQNRSVPLKLAVKQALDVARGMAYVHGLGFIHRDLKSDNLLISGDKSIKIADFGVARIEVKTEGMTPETGTYRWMAPEMIQHKPYNQKINLYNFSIVLXELITSMLPFTNITTVXAXFAIVNKRVRPTIPQNYLLTLPKIITKCCNPNPNIPPPFIKILKILNHPKIKILNTIHKTQFRCYISQPITTN

SEQ ID NO: 14433 - protein, 528 aa, Streptococcus thermophilus LMG 18311
MKFTDLNLSEDIQSAVVAAGFEQPSPIQELTIPLALEGKDVIGQAQTGTGKTAAFGLPTLDKIHTEENTIQALVIAPTRELAVQSQEELFRFGRDKGVKVRSVYGGSSIEKQIKALRSGAHIVVGTPGRLLDLIKRKALKLNNIETLILDEADEMLNMGFLEDIEAIISRVPEERQTLLFSATMPDAIKRIGVQFMKDPEHVKIKAKELTNVNVDQYFIRVKEQEKFDTMTRLMDVDQPELSIVFGRTKRRVDELTRGLKLRGFRAEGIHGDLDQNKRLRIIRDFKNGQIDILVATDVAARGLDISGVTHVYNYDIPQDPESYVHRIGRTGRAGQSGQSITFVSPNEMGYLGIIENLTKKRMKGLKPPTAQEAFQSKKKVALKKIERDFADEAIHANFDKFKDDAVKLAQEFTPEELALYILSLTVQDPETMPEVEIAREKPLPFKPSGGGFGGKGGKGGRGNRGRDNNRRGGYRGDRNRDDRDGGRRDFKRKSKNNSRDFENRGNKRPHRASSEKKNGFVIRNKGDK

SEQ ID NO: 14434 - protein, 527 aa, Zea mays
MAMAMMAMRRAVALGARHIPAAAASSFRVVSLRHMSADAGAAMEKIRAAGLLRTQGLIAGQWVDAYDGKTIEVQNPATGEVLANVSCMGSRETSDAIASAHSTFYSWSKFTASERSKALRKWYDLIISHKEELALLMTLEQGKPMKEALGEVNYGASFIEYFAEEAKRIYGDIIPPTLSDRRLLVLKQPVGVVGAITPWNFPLAMITRKVGPALACGCTVVVKPSEFTPLTALAAADLALQAGIPAGALNVVMGNAAEIGDALLQSTQVRKITFTGSTAVGKKLMAGSANTVKKVSLELGGNAPCIVFDDADIDVAVKGSLAAKFRNSGQTCVCANRILVQEGIYEKFAKAFIQAVQSLKVGNGLEESTSQGPLINEAAVQKVEKFINDATSKGANVMLGGKRHSLGMSFYEPTVVGNVSNDMLLFREEVFGPVAPLIPFKTEEEAVHMANDTNTGLAAYIFTKSIPRSWRVSESLEYGLVGVNEGIISTEVAPFGGVKQSGLGREGSKYGIDEYLELKYICMGNLG

SEQ ID NO: 14435 - protein, 507 aa, Oryza sativa
MALKAAQKQTVATGKAQGARVVAPRVIKGSRMARVVVQARASSTMQAPLVARRGATHVSRSRSNLVVYAVKDGASLGDRKLRVAVIGGGPSGACAAETLAKGGVEAYLIERKLDNCKPCGGAIPLCMVQEFDLPQEIIDRKVTKMKMISPSNREVDVGRTLSETEYIGMCRREVMDAYLRDRAEKLGANVVNGLMMRMEQPEADGPITIHYNGYTDGSKIGTPQTLEVDMVIGANGANSRVAKEIDAGEYDYAIAFQERIRIPDDKMKHYENLAEMYVGDDVSPDFYGWVFPKYDHVAVGTGTVVNKTAIKQYQQATRDRSKVKTEGGKIIRVEAHPIPEHPRPRRCKGRIALVGDAAGYVTKCSGEGIYFAAKSGRMCAEAIVEASENGKKMCGESAIRNYLDKWDRKYWATYKVLDILQKVFYRSNPAREAFVEMCEDSYVQKMTFDSYLYKTVVPGNPLDDVKLLVNTVASIVRANALRAADSKSVDVNFGSKATEEFQARATA

SEQ ID NO: 14436 - protein, 137 aa, Gossypium barbadense
MAEEHRCQAPQLCANNCGFFGSPTTQNLCSECYRGLQLKEQQSSSAKQAFNHTLVPSSSSLPSSSSARSSFSASLPAKEEPSAGTKETKVVEEEEVQVTPNRCLSCKKRVGLTGFKCRCGMVFCGIHRYPGTTCLCF

SEQ ID NO: 14437 - protein, 153 aa, Arabidopsis thaliana
GSGFPGRTTRVQEEVRASFMFSFAVGVTSPVKATMVVQLTGWKQSVFFRVTRKANNTFTSITGIGGGVSCLKVGPPIGRKKLGTLFYLPDLTDVEWAKEVDYLLRTKGIPGVEFEWEHGFGSREPGTTPGSYIGRSWPMGKLPLFGCTDSVQG

SEQ ID NO: 14438 - protein, 90 aa, Medicago sativa
YYEAGARFAKWRAVLKIGPNEPSPLSIHENAYGLARYAVICQENGLVPIVEPEILVDGSHDIAKCADVTERVLAACYKALSDHHVLLEGT

SEQ ID NO: 14439 - protein, 618 aa, Gossypium hirsutum
MEQHIMWVFWFFLHWFCSVHSASDGDSLLSPKGVNYEVAALMSVKRELRDDKQVMDGWDINSVDPCTWNMVACSAEGFVISLEMASTGLSGMLSPSIGNLSHLRTMLLQNNQLSGPIPDEIGKLSELQTLDLSGNHFVGAIPSTLGSLTHLSYLRLSKNNLSGPIPRHVANLTGLSFLDLSYNNLSGPTPKILAKGYSITGNNFLCASSEHICTDVSYPLNGSVSSSRVSGNHHWLLSVAIGIGFAFVVSVMLLACWVHWYRSRIMLPSYVQQDYDFEIGHLKRFSYRELQIATGNFNPKNILGQGGYGVVYKGCLPNRSVVAVKRLKDPNFTGEVQFQTEVEMIGLALHRNLLRLYGFCMTPDERLLVYPYMPNGSVADRLRDACHGKPALNWSRRMHIALGAARGLLYLHEQCNPKIIHRDVKAANILLDESFEAVVGDFGLAKLLDKRDSHVTTAVRGTVGHIAPEYLSTGQSSEKTDVFGFGILLLELITGQKTLDAGNGQVQKGMILDWVRTLHEERRLEVLVDRDLQGCFDTIELETVTELALQCTRPQPHLRPKMSEVLKVLEGLVQSGTDEPQGGTNHCETSAYSFSRNYSDVHEESSFIIEAMELSGPR

SEQ ID NO: 14440 - protein, 514 aa, Erythrobacter sp. NAP1
MANIRHALNVKREDDFAKWYQEVISAADLAEESGVRGCMVIKPWGYGIWERVQRLMDDRIKAAGIANAYFPLFIPLANFEREADHVDGFAKEMAVVTHHRLIADGKGGLIPDPEAKLEEPLVVRPTSETIIGDAMARWIQSWRDLPLMLNQWANVVRWEMRTRMFLRTSEFLWQEGHTAHATREEAVEETHRALEMYRACVEEDLAMPVIAGEKPENERFPGADETWSIEAMMQDGKALQAGTSHYLGTSFASAAGIQYQDKEGTQQLCHTTSWGTSTRMIGGVVMTHGDDDGLRVPPRIAPHQIIILPMLREKPEDEVVLAYCEEVRAALASQWSMGEPVRVLLDKTPGKAAAKRWSWVRKGAPVIVEVGPRDMDEGKVAVLRRDALWNMDNGKPAMAFTPKGEFIDGAAALLEDIQNSLFTKARERRDANITRGLTQWGEVQDFFKSNGKYPGWVEVEWAKPTGAALEKVVEQLKAEKLTLRNVPRDADAGDGICIFTGEPAVERVLVARAY

SEQ ID NO: 14441 - protein, 295 aa, Tropheryma whipplei str. Twist
MVAKVLDGLAVSAGIFERLHRACCELENNGVCPKLATVLVGNNPASRSYVLSKHRDCKNIGIQSTLIELPANTSEKELISKVEILNASSDVSGIIVQLPLPESIDQNKVIEAINPDKDADGLHPLNLGYLVTGKQGIVPCTPAGIVKLLEAHRITLEGKTIAVIGRGTTVGRPLGILLSGKGVNATVINIHSRSRNISGLSRIADVVVACAGVKHIVEPSWIKPGAVVVDVGINQSGVSSSGKMILTGDVHPLTKNIASYISPVVGGVGPMTRAMLMSNVINLSERDFRKRLYAS

SEQ ID NO: 14442 - protein, 501 aa, Arabidopsis thaliana
  misc_feature (154)..(154): Xaa can be any naturally occurring amino acid
MGGDLKSQLSRESHVFGLKVWEVIGIAVALLIIAILSVLSCCLTSKKKSRRSKTGLPVIQTPPVVSKEIREVRVEHVSASNFAPGEGILLTIQDKNNKDSEKVMVHLDMRKKRSSSGRSGSFHHLEIIDKHSDSAEEVSASSSLYNIATPSPRXIQANQTMEMELPESHLGWGHWFTLRDLETATNRFSKENVIGEGGYGVVYRGELMNGTPVAVKKILNQLGQAEKEFRVEVDAIGHVRHKNLVRLLGYCIEGTHRILVYEYVNNGNLEQWLHGAMRQHGYLTWEARMKVLIGTSKALAYLHEAIEPKVVHRDIKSSNILINDEFNAKVSDFGLAKLLGAGKSHVTTRVMGTFGYVAPEYANSGLLNEKSDVYSFGVVLLEAITGRDPVDYGRPAHEVNLVDWLKMMVGTRRSEEVVDPNIEVKPPTRSLKRALLTALRCVDPDSDKRPKMSQVVRMLESEEYPIPREDRRRSRTREGSMEINSDTDMSTPVSRSQSKRQ

SEQ ID NO: 14443 - protein, 240 aa, Cryptococcus neoformans var. neoformans JEC21
MSRPSQVSNPPTAPPTPFQFDPVPDAIEAIRRGEFVVVMDDESRENEGDVVCAASAVTTEGMAWMIKWTSGYICLSLPPSRLKALQLPPSLPPSGVSQDPKGTAYHLTVDSAPGRHPVSTGISAHDRAYTARLLADPKSDESDFTRPGHMVTLRYAVGGVRKRRGHTECATDLCYLAGLPPAGLLCELVNPYDPAGSMARRDDCWRFAKEWGLKIISVEGLAEYVLKEGKQLVPEEEAKA

SEQ ID NO: 14444 - protein, 587 aa, Triticum aestivum
  misc_feature (303)..(303): Xaa can be any naturally occurring amino acid
  misc_feature (339)..(339): Xaa can be any naturally occurring amino acid
  misc_feature (362)..(362): Xaa can be any naturally occurring amino acid
  misc_feature (404)..(404): Xaa can be any naturally occurring amino acid
  misc_feature (409)..(409): Xaa can be any naturally occurring amino acid
  misc_feature (417)..(417): Xaa can be any naturally occurring amino acid
  misc_feature (436)..(436): Xaa can be any naturally occurring amino acid
  misc_feature (463)..(463): Xaa can be any naturally occurring amino acid
  misc_feature (473)..(473): Xaa can be any naturally occurring amino acid
MCGILAVLGVGDVSLAKRSRIIELSRRLRHRGPDWSGIHSFEDCYLAHQRLAIVDPTSGDQPLYNEDKTVVVTVNGEIYNHEELKAKLKSHQFQTGSDCEVIAHLYEEYGEEFVDMLDGMFSFVLLDTRDKSFIAARDAIGICPLYMGWGLDGSVWFSSEMKALSDDCERFISFPPGHLYSSKTGGLRRWYNPPWFSESIPSAPYDPLLIRESFEKAVIKRLMTDVPFGVLLSGGLDSSLVASVVSRYLAETKVARQWGNKLHTFCIGLKGSPDLKAAKEVADYLGTVHHEIHFTVQEGIDAXEEVLYHIQTYDVTTIRASPPIVSNVSGKINSWGVKXMVFSGEGSDEIFGGYLYFHKAPXQKELHEETCRKDKALPLYDCLRANKSTSAWGLEACVPFLDKXFIHVXMGLDPECXMIGVILVDRKWVRVCIYNXKSPFFQAIFKAKRNSSPNGVGYSWIMXGHANALVSNXMTNASFVYPENTPTTKEAYYYRTVFEKFYPKNAARLTVPGGPSVACSTAKAVEWDAAWSKLLDPSGRAALGVHDAAYEEEKAPASVDPVLENAFHPPAHGESTLVKSAVPAAAV

SEQ ID NO: 14445 - protein, 220 aa, Triticum aestivum
MTGYSDSGKDAGRLSAAWYLYKAQEEIVDVAEQHGVKLTIFHGRGGTVGRGGGPSHLAILSQPRNTDDGVACVTRTVDLLEMVFAKGDPGIAALYDKLLVPQDLWPFGEQLRANYAETQSLLLKVAGHEDLLESDPYLRQRLLLRDSYITALNVCQAYTLKRIRDGEFRPATRPPLSKEFIDETAESLMELNPSSEYDPGLEDTLILTMKGIAAGMQNTG

SEQ ID NO: 14446 - protein, 525 aa, Pisum sativum
MEYGTRKLSDVYEVSEILGRGGFSVVRKGTRKSNNDDEKSQSQSKSQSQSQVAIKTLRRLGTSNNLPRKKDGGENSTETMMKFPTMRQVSVSDALLTNEILVMRRIVENVSPHPNVIDLYDVYEDTNGVHLVLELCSGGELFDRIVAQDKYSETEASTVVHQIVAGLEAIHRANIIHRDLKPENCLFLDVGKDSSLKIMDFGLSSVEEFTDPVVGLFGSIDYVSPEALSQGKITTKSDMWSLGVILYILLSGYPPFIAQNNRQKQQMILNGNFSFYEKTWKGISQSAKNLISSLLTVDPAKRPSAQELLSDPWVKGEKAKDDQMDPEIVSRLQRFNARRKLRAAAIASVWSSTIFLRTKKLKSLVGSYDLKEDEIENLRMHFKKICADRDNATLCEFEEVLKAMKMPSLIPFAARIFDLFDNNRDGTVDMREILCGFSSLKNSKGEDALRLCFQARDRSGCITKEEVASMLRALPYDCLPTDITEPGKLDEIFDLMDANSDGKVTFDEFKAAMQRDSSLQDVVLS

SEQ ID NO: 14447 - protein, 463 aa, Erythrobacter sp. NAP1
MAIELKMPALSPTMEEGTLARWLVKVGDEIASGDIMAEIETDKATMEFEAVDEGTLAAILVEEGTENVAVGTVIAMLAEEGEDVSDVSAPSGDAAPAPTPAPAPAPKSAPASSEGVKASPLAKRIAANEGVDLASVEGSGPKGRIVKADVEAAAGGSSSQPRSGDRVIASPLAKKMAGEQGIDLGDVSGTGPGGRIIKADIDNYEPTPAASPAPAPAASEEKTAKPAPQAPEHGAPFEEEKLSNVRKVIARRLTESKQTVPHYYLTMDIVLDPLLKLRKELNASLEPDGVKLSVNDLLIKALARALIRVPQCNVSYHGDTMRKYSRADISVAVAAPSGLITPVITEADTKGLAQISKEMKELAGKARDGKLQPHEYQGGTASLSNLGMFGIKQFDAVINPPQGMILAVGAGQQVPYVIDGEIKPATVLHASGSFDHRAIDGAEGAQLMEAIKQLVENPMGLLV

SEQ ID NO: 14448 - protein, 419 aa, Aspergillus nidulans FGSC A4
MALRRTIALPRMLRSAARIPMGISGEHRRGLATAVPPVTQDATGSKGPTAMVFLNMGGPSTTAEVEDFLSRLFADGDLIPLGRLQNYLGPLIAKRRTPKIQRQYADIGGGSPIRKWSEYQCAEMCKLLDQLSPESAPHKPYVAFRYAAPLTEEMYAQLLADGFGNGKGGRAVAFTQYPQYSCSTTGSSLNELWKWRTRLEGKRANCDVDATGTIQWSVIDRWPTHPGLIEAFARNIEDQLKTYPEEKRNSVVLLFSAHSLPMSVVNRGDPYPAEVAATVHAVMQRLNFSNPYRLCWQSQVGPSAWLGAQTSDTVQEYVKRGQTDLVLVPIAFTSDHIETLYELDLEVMEEANHPGVKRAESLNGNPIFIQALADLAHDHLRKGELCSLQMTLRCQGCKSERCLEQKKFFAGQKYASLVQ

SEQ ID NO: 14449 - protein, 185 aa, Cryptococcus neoformans var. neoformans JEC21
MTFFDSIASKFGYESLPGDVANKSFYDLKAKLPGSKGDLDFSTLKGKVVLIVNTASKCGFTPQYTGLEELHKTYGDKGLVVLGFPSNEFGGQEPGSDDDIAQFCTLNHGVTFPLMKKSEVNGKNMNEVFAWLKSQKGENVGGLAGTTAIKWNFTKFLINKEGKCVGRYGSSTKPEKLKEEIEKLL

SEQ ID NO: 14450 - protein, 471 aa, Moorella thermoacetica ATCC 39073
MAIKFGTDGWRAVIADEFTFANVRLVTQATANYLLREAGSGKIIIGYDNRFLAPEFARAVAEVLTASGFTVYLPSRAVPTPVTAWAIKHYQAMGALMLTASHNPPEYCGLKFIPEYAGPAVPAITSAIEKEIAAVINGGEVKTLNLDEARGRGLVRELEPEADYREYLHGLIDVEALRKAGLKVVVDPLYGAGIGYLEDFLRGAGCQVQAIHNYRDPLFGGDLPDPSARGLEELSRRVRETGAHLGLALDGDADRFGVVDGDGTYLTANQVLYLVLAHLIMDRHYRGPVARTVATTHNLDRLARAHDLEIIETPVGFKYIGEALREKGCILGGEESGGLSIRGHIPEKDGILATALVAELRAVRGRSLGEILADLHSSYGHLVNQRLDIKVDPATKERVLQELPDFAPAKVAGIPVTGRLTVDGVKLTLADGSWVLLRPSGTEPLLRLYAEAPDAGRLRLLQKEITTALRI

SEQ ID NO: 14451 - protein, 313 aa, Leifsonia xyli subsp. xyli str. CTCB07
MTTAGFEVIVVGGGPAGLSAALNLARARRRVLVVDGNRPRHAATLQAHGFLTRDGVPPSELRRLGREEVDSYANAVIAFAQVDAIEVEGGGYRVRGRGVSGAPDVDAWAEDVVLATGLVETLPGIVNLRAFYGTQLHSCVECDAFEKAGEPLALIGETPDLAERALLLSQWTDDLLVLTNGVARIGEVEERALARLGIAIERCPIAEVTGERGVMTGLRLADGSFIDRAAGFVRSVWTPSLAFLDGLELDRGPDGCLLTDAQGRTSLPGIYAAGETTAPGPQQLVIAAGSGAVVAAAVNRDLIGIAVGDARML

SEQ ID NO: 14452 - protein, 307 aa, Staphylococcus epidermidis ATCC 12228
MNAAVRAVTRTAIYNNIEVYGVYQGYQGLLDDDIHKLELGSVGDTIQRGGTFLFSARCPQFKEEDVRKKAIENLRKRGIEGLVVIGGDGSYRGAQRISEECKEIQTIGIPGTIDNDINGTDFTIGFDTALNTIIESVDKIRDTASSHARTFIVEVMGRDCGDLALWAGLSVGAETIVLPEVNTDIKDVAEKIEQGIKRGKKHSIVMVAEGCMSGQECADELTKYINIDTRVSVLGHIQRGGSPSGADRVLASRLGGYAVELLKQGETAKGVGIRNNQLTSTPFDEIFAESDRKFNSQMYELAKELSI

SEQ ID NO: 14453 - protein, 520 aa, Pisum sativum
MGYGTRKLSDVYEVSEILGRGGFSVVRKGTRKSNNDDEKSQSQSKSQSQSQVAIKTLRRLGTSNNLPRKKDGGENSTETMMKFPTMRQVSVSDALLTNEILVMRRIVENVSPHPNVIDLYDVYEDTNGVHLVLELCSGGELFDRIVAQDKYSETEASTVVHQIVAGLEAIHRANIIHRDLKPENCLFLDVGKDSSLKIMDFGLSSVEEFTDPVVGLFGSIDYVSPEALSQGKITTKSDMWSLGVILYILLSGYPPFIAQNNRQKQQMILNGNFSFYEKTWKGISQSAKNLISSLLTVDPAKRPSAQELLSDPWVKGEKAKDDQMDPEIVSRLQRFNARRKLRAAAIASVWSSTIFLRTKKLKSLVGSYDLKEDEIENLRMHFKKICADRDNATLCEFEEVLKAMKMPSLIPFAARIFDLFDNNRDGTVDMREILCGFSSLKNSKGEDALRLCFQARDRSGCITKEEVASMLRALPYDCLPTDITEPGKLDEIFDLMDANSDGKVTFDEFKAAMQRDSSLQ

SEQ ID NO: 14454 - protein, 372 aa, Arabidopsis thaliana
MAANLARRLIGNRSTQILGAVNSSSGAASSVARAFCSSTTPITATLFPGDGIGPEIAESVKKVFTTAGVPIEWEEHYVGTEIDPRTQSFLTWESLESVRRNKVGLKGPMATPIGKGHRSLNLTLRKELNLYANVRPCYSLPGYKTRYDDVDLITIRENTEGEYSGLEHQVVRGVVESLKIITRQASLRVAEYAFLYAKTHGRERVSAIHKANIMQKTDGLFLKCCREVAEKYPEITYEEVVIDNCCMMLVKNPALFDVLVMPNLYGDIISDLCAGLVGGLGLTPSCNIGEDGVALAEAVHGSAPDIAGKNLANPTALLLSGVMMLRHLKFNEQAEQIHSAIINTIAEGKYRTADLGGSSTTTEFTKAICDHL

SEQ ID NO: 14455 - protein, 246 aa, Candida glabrata CBS 138
MVKPIIAPSILASDFANLGCECHRVINSGAEWLHIDVMDGHFVPNITLGQPIVTSLRRAVPRSQEEEKASGEVARPTAFFDCHMMVEEPEKWVADFAKAGADQFTFHYEATKDPLSLVKLIKENGIKAACAIKPGTPVDVLFELAPYLDMALVMTVEPGFGGQKFMPDMMPKVEALRTKFPHMNIQVDGGLGKETIGVAAKAGANVIVAGTSVFTASDPHEVISFMKEEVRKELKAKHILGDETKH

SEQ ID NO: 14456 - protein, 1261 aa, Synechocystis sp. PCC 6803
MFWQPVSPLNADQLNYQGSYDPKLVLLSVAIAIFTAYMAFLMASSALSLPGRWSRKIALALSGTVMGLGIWAMHFIGMLGFELPCPISYDPLITFISVIPAIAASIYALNFLSFQAPTAKNLMVGAIWFGLGIGTMHYSGMAALELHGNIYYELPLFVLSLVIAVMLAFVALLFRFHSAKIFHTTHGPALGSSALVMGLSTSGMHYTAMTATHFICRPWGEFFIQGIDIQEVAIAVTISITLLTGGVMLFVLREISIQNQQQKILVATESWYRQIIEYAPEGIMVLDAQGNIILANTSIEKLFGYSQTELIGQSIALLGLAELLQQSLHLLQEGEDVGPTCPLDQEEFEILGTRYDGSEFPIEVSLTSLPSLSQREMNIFASVRDISARQEAQQQILRQREHLQSVLDSAPVGVAITVNGITQFANPHIGELVDLKVGDSPQKIYVDLGDRQQMLEELTQFGRSQSRVYKMYNPRGEIRDILATFLATDYEGQKGILGWLADITPIKAAEAEMKRAKELAEEASRIKADFLANMSHEIRTPMNAVIGMTHLALKTDLTPRQREYLHKIRFSGQHLLGVINDILDFSKIEAGKLPMESIDFDLDKVLDNVATLISEKATNKGLELLFDIDRNLPRHFIGDPLRLGQILINYANNAVKFTEQGDITIVVRLQEYRDQDVVLYLAVKDTGIGIKPEHIANLFNSFQQADSSTTRNFGGTGLGLAICKRIAELMGGEVGVESEYGQGSTFWAKVCLQKSNVIPHRLVLSKDLEGKRVLVVDDNDHARLVMKDLLEQMKFVVETVESGPEALNFLAEADRENHPHSIVFIDWQMPNMDGLEVARRLKAMGLNHQPSIFIVTAYGREELFVKAKSLGIDDVLVKPISPSVLFDSLARVLGDPTALAQEMRQSSGIGAEDLALEKLRRIRGARILLVEDNEINQEVAAELLRDVGFNVDVAANGLIALERLNNNAYALVLMDMQMPEMDGIEATIAIRQNPRYAQLPIVAMTANVMQGDRERCLQAGMNDHLGKPIEPEELWNKLLHWIPVDSPLAPETIEESAINTSDPEISIPHIPGLNSDDGLRRVLGKKSLYLKMLHKFVASQSSFLPEITQALGEKDYGFAERLAHTLKGVAGNIGAQELQQEAAELEKAIKEQWPQPEVENLLTNLGDRLDNLIAQLTSNLPPEPATVAITLDQGQLEEICDHLAQLLGEDDAEAADLLQNHGDLLRQAFPDHYSAIAAGINNFDFEAALAALTTARQFSQP

SEQ ID NO: 14457 - protein, 572 aa, Pseudomonas syringae pv. phaseolicola 1448A
MSKTIADHLAQTLAAADVSHIWGVSGDSLNGLTDSLERTDSIRWMHTRHEEVAAFAAGAQAASSGKLAVCAGSCGPGNLHLINGLYDCHRNRVPVLAIAAHIPSSEIGLDYFQETHPQELFKECSHFVELVSNPEQFPRVLERAMRAAISQKGVAVIVLPGDVALSESPDVAAKWIEATPPAVVPADNDLQSMADMLNDSKAVTLLCGAGCAGAHEQILALADTLGAPIVHALRGKQHVEYDNPFDVGMTGLIGFSSGYHAMLSCDTLVILGSSFPYRNFYPEKANIIQIDLDPTQLGRRTPVALGLVGGVRETLDALQPKLKPHADRRFLDKALKHYAKAREELDELATPTPDGTPIHPQYLTRLVDEQADADAIFTVDVGTPTLWAARYLHMNGKRSLLGSFNHGSMANALPQALGAKAEHPDRQVVALCGDGGLSMLLGDLLSIRQLNLPIKMVVFNNSSLGFVDMEMKASGYVPHGTDLHETNFAGIALGAGILGLRVENAEELPAALRKAFDHPGPVLIDVVTAKQELGIPPKIKLAQAKGFSLYMMRAIMSGRGSEVLELAKTNLR

SEQ ID NO: 14458 - protein, 357 aa, Leifsonia xyli subsp. xyli str. CTCB07
MSRTVQLVVIPGDGIGPEVIAEAVKALDAVTAGSGLAFQKTYFSLGADRYLATGDVLTDDDLAAIRGHDAILLGAVGGRPGDPRLAGANVERGLLLRLRFSLDHYVNLRPTTLFPGIASPLAAPGEVDFVVVREGTEGQYVGNGGAIRPGTPHEVANEVSVNTAYGVERVVRYAFEQAGQRRKKLTLVHKTNVLTFAGSLWKRIVDALAAEHPEVAVDYLHVDAATIFLVTDPARFDVIVTDNLFGDILTDLAAAISGGIGLAASGNINPVGEFPSMFEPVHGSAPDIAGEQRADPTAAILSVALLLRHLGERPLAERVERAVTTDLAARSGQMATASQTRTTSQIGDAIAALAAQN

SEQ ID NO: 14459 - protein, 366 aa, Wolinella succinogenes
MSLLMLYLTISVSLSFVCSVLEAVILSVTPSFVETFSRQNQAAGKILKYLKENIDASVGSILVLNTFAHTMGAAGVGAEAEKIFGAQWQTLIAVGLTLIILYLSEILPKTIGAVYWRRLLVPSVYTIYFFTKVTVPFLFISKGITKIFKKQPPHAMSREEIIVMAEMGERSGTLQSQESDLIENLLELKNYRARDILTPRSVVFALDAEIKVKDAIEQDGLYMHSRIPIYEGSLDNVIGMVMSQTILEESIEGHHEMSVRELMKPMFAVSENLPVLRLIDVFVKRKEHLFLVRDGYGQTAGVVSLEDAIETLLGVEILDEMDEVADMQQFAKERARIQKNHADKQSKISREDEKKRDEDEKDQKTE

SEQ ID NO: 14460 - protein, 377 aa, Ricinus communis
MADAEDIQPLVCDNGTGMVKAGFAGDDAPRAVFPSIVGRPRHTGVMVGMGQKDAYVGDEAQSKRGILTLKYPIEHGIVSNWDDMEKIWHHTFYNELRVAPEEHPVLLTEAPLNPKANREKMTQIMFETFNVPAMYVAIQAVLSLYASGRTTGIVLDSGDGVSHTVPIYEGYALPHAILRLDLAGRDLTDALMKILTERGYMFTTTAEREIVRDMKEKLAYAALDYEQELETAKSSSSVEKNYELPDGQVITIGAERFRCPEVLFQPSLIGMEAAGIHETTYNSIMKCDVDIRKDLYGNIVLSGGSTMFPGIADRMSKEITALAPSSMKIKVVAPPERKYSVWIGGSILASLSTFQQMWISKGEYDESGPSIVHRKCF

SEQ ID NO: 14461 - protein, 423 aa, Thermus thermophilus HB27
MKKSKRKNAQAQEAQETEVLVQEEAEELPEFPEGEPDPDLEDPDLALEDDLLDLPEEGEGLDLEEEEEDLPIPKISTSDPVRQYLHEIGQVPLLTLEEEVELARKVEEGMEAIKKLSEITGLDPDLIREVVRAKILGSARVRHIPGLKETLDPKTVEEIDQKLKSLPKEHKRYLHIAREGEAARQHLIEANLRLVVSIAKKYTGRGLSFLDLIQEGNQGLIRAVEKFEYKRRFKFSTYATWWIRQAINRAIADQARTIRIPVHMVETINKLSRTARQLQQELGREPTYEEIAEAMGPGWDAKRVEETLKIAQEPVSLETPIGDEKDSFYGDFIPDEHLPSPVDAATQSLLSEELEKALSKLSEREAMVLKLRKGLIDGREHTLEEVGAFFGVTRERIRQIENKALRKLKYHESRTRKLRDFLD

SEQ ID NO: 14462 - protein, 401 aa, Clostridium acetobutylicum ATCC 824
MNFKFNTVEEAILDIRQGKMVIVVDDEDRENEGDLVAAGATITGETINYMARYARGLICTPMDSDSMERLGINTMVEKNTEYFGTDFGVSVDAARTRTGISAYERAETIKKLSDKDAKEEDFVKPGHTFPLRAKKNGVLDRNGHTEATVDLVRLAGFYPSVGVCCEIMNEDGTMARLPKLMEFSRKNDIKIITVEKLIEYRKKNEALIKREAEAKLPTKYGEFKIVGYKSLIDNKENLAIVKGELKAEEEVLVRVHSKCLTGDVFGSLRCDCGNQLSYALSAIEKQGAGVVLYMDQEGRDIGLLNKLKAYMLQEKGLDTVEANLKLGFEADLREYWAAAEMLKDLGVKKVKLMTNNPEKINELNKYGIDVVSRVPINTEHVKENEFYLRTKKQKMGHLIEI

SEQ ID NO: 14463 - protein, 128 aa, Triticum aestivum
MAPAGTRGARAAAPAAVLLVAALLVALALAPRGTSAALTCSTVYNELMPCLGYVQSGGAVPRACCSGIKTLVSRARATPDRRAACACLKTVAAAAAGGPYLGRAAGLPGRCGVQPPFKIDPNVNCNAV

SEQ ID NO: 14464 - protein, 238 aa, Thermosynechococcus elongatus BP-1
MTIDRERMTQSTADEKAIVQNYFNTTGFDRWRRIYGTDQVSKVQADIRKGHQQTIDTVLAWLKADASLKGKLICDAGCGVGSLSIPLAQLGARVYASDISEKMVAEARDRAAAQLNGHHELILSVSDLEALRGQYHIVICLDVLIHYPDNQMAGMLAHLSSLAMERLILSFAPKTPKYTLLKKIGEFFPGASKATRAYLHSEEFIVEILGNLGWRIERNAMTKTRFYFSRLLEAVPAK

SEQ ID NO: 14465 - protein, 339 aa, Mycobacterium leprae
MTVRVGINGFGRIGRNFYRALLAQQEHGIADVQVVAINDITDNSTLAYLLKFDSILGRLPHDVSLEEEDTIVVGSEKIKALAVREGPAALPWHAFGVDVVVESTGLFTNAAKAKGHLEAGAKKVIVSAPATDPDITIVFGVNDDKYDGSQNIISNASCTTNCLAPLAKVLHDQFGIVKGLMTTVHAYTQDQNLQDGPHSDLRRARAAALNVVPTSTGAAKAIGLVMPELKGKLDGYALRVPIPTGSVTDLTADLSKCVSVNEINAVFQDAAEGRLKGILKYVDAPIVSSDIVTDPHSSIFDSGLTKVIASQAKVVSWYDNEWGYSNRLVDLVGLVGKSL

SEQ ID NO: 14466 - protein, 475 aa, Zea mays
  misc_feature (248)..(248): Xaa can be any naturally occurring amino acid
  misc_feature (254)..(254): Xaa can be any naturally occurring amino acid
  misc_feature (310)..(310): Xaa can be any naturally occurring amino acid
MGKRSGGRKLPFFTRSSSSSSKRNRSGRRLPSPSKQDNATRALLASPTAASPSATPDSAAAGQTAQPPSPLSVTAGAGGALSGKITKKKPGARLWMRLDRWGASEVVELDKATIIRRAGLPSRDLRILGPVFSRSSSILAREKTMVINLEFIRAIVTAEEVLLLDPLMHEVLPFVDQLRQHLPLRSLVGGNGECAPDGNGEKQGGSHGGQVPRLNEATGAEHEFPFEFHVLEVALEIVCSSLDLAVMXERHATXVLDELTKNVSTRNLERVRSLKSHLTRLLARVQKVRDEIEHLLDDNEDMEHLYLTRXQVHNQQDEAVMSSADSNSIGLAGPGVPRLNSSVRRSLSVATSMHLHNDVEDLKMLLEAYFMHLDGIRNRILSVRQYIDDTEDYFNIQLDNQRNELIQLQLTLTIASFGIAANTFIVGAFAMNIPSSLYNTDNTLFWPFVGGTSSGCFVITILLFGYAWWKKLLGP

SEQ ID NO: 14467 - protein, 170 aa, Glycine max
  misc_feature (29)..(29): Xaa can be any naturally occurring amino acid
MAETTQSNAELLEWPKKDKRRFLHVVYRXFYTECFGMKLLRKRDIPEEKYANAFLGFGPEQSHFVVELTYNYGVTSYDIGTGFGHFAIATPDVYKLVEDIRAKGGNVTREPGPVKGGKSVIAFVKDPDGYAFELIQRPSTPEPLCQVMLRVGDLERSIKFYEKVCMGHHE

SEQ ID NO: 14468 - protein, 422 aa, Thermus thermophilus HB27
MLTFSFKPPGGAGKEGSVALVVQKYGGTSVGDLERIHKVAQRIAHYREKGHRLAVVVSAMGHTTDELIALAKRVNPRPPFRELDLLTTTGEQVSVALLSMQLWAMGIPAKGFVQHQIGITTDGRYGDARILEVNPARIREALEQGFVAVIAGFMGTTPEGEITTLGRGGSDTTAVAIAAALGAKECEIYTDTEGVYTTDPHLIPEARKLSVIGYDQMLEMAALGARVLHPRAVYYAKRYGVVLHVRSSFSYNPGTLVKEVAMEMDKAVTGVALDLDHAQIGLIGIPDQPGIAAKVFQALAERGIAVDMIIQGVPGHDPSRQQMAFTVKKDFAQEALEALEPVLAEIGGEAILRPDIAKVSIVGVGLASTPEVPAKMFQAVASTGANIEMIATSEVRISVIIPAEYAEAALRAVHQAFELDKA

SEQ ID NO: 14469 - protein, 424 aa, Wolbachia endosymbiont of Drosophila simulans
MNVPRVTKLDNGLRIITEQVRDIDSVALSIRVGVGSRAESAKQNGISHFLEHMAFKGTKTRTAFEIAKAFDDIGGVFNASTGRESTTYYAKVLKKDIKTGIDILIDILMNSTFPEDELEREKGVVIQEIFQTNDSPSDIVFDKYFEAAYKDQPFGRSILGTQDTVKSFTRGDLDNYINEHYFGENMLFAVAGNVEHEEVVALTKDFFSKIHSKKLKKSQNATSHTGGEYLEHRKLDQVHLLIGLPSVSRHDDKYHTFQVLDSILGSGMSSRLFQEVREKQGLAYSVYSFNSSYTDTGMFSIFAGTDSSNLDKLLKSITTELKKLSTDDLREEEVNRVKERVKSQILMSRESVSSRAETLGHYYGNYNRYISKNELIEKISAVTTANVKKAAEELLSQHEKATLAAIGEIKSLPSYDKVVSMLKA

SEQ ID NO: 14470 - protein, 288 aa, Thermus thermophilus HB27
MILVNRETRVLVQGITGREGQFHTKQMLSYGTKIVAGVTPGKGGTEVLGIPVYDTVKEAVAHHEVDASIIFVPAPAAADAALEAAHAGIPLIVLITEGIPTLDMVRAVEEIKALGSRLIGGNCPGIISAEETKIGIMPGHVFKRGRVGIISRSGTLTYEAAAALSQAGLGTTTTVGIGGDPVIGTTFKDLLPLFNEDPETEAVVLIGEIGGSDEEEAAAWVKDHMKKPVVGFIGGRSAPKGKRMGHAGAIIMGNVGTPESKLRAFAEAGIPVADTIDEIVELVKKALG

SEQ ID NO: 14471 - protein, 475 aa, Streptococcus agalactiae NEM316
MTKEYQNYVNGEWKSSVNQIEILSPIDDSSLGFVPAMTREEVDHAMKAGREALPAWAALTVYERAQYLHKAADIIERDKEEIATVLAKEISKAYNASVTEVVRTADLIRYAAEEGIRLSTSADEGGKMDASTGHKLAVIRRQPVGIVLAIAPYNYPVNLSGSKIAPALIGGNVVMFKPPTQGSVSGLVLAKAFAEAGLPAGVFNTITGRGSEIGDYIVEHEEVNFINFTGSTPVGQRIGKLAGMRPIMLELGGKDAGIVLADADLDNAAKQIVAGAYDYSGQRCTAIKRVLVVEEVANELAEKISENVAKLSVGDPFDNATVTPVIDDNSADFIESLVVDARQKGAKELNEFKRDGRLLTPGLFDHVTLDMKLAWEEPFGPILPIIRVKDADEAVAIANKSDFGLQSSVFTRDFQKAFDIANKLEVGTVHINNKTGRGPDNFPFLGLKGSGAGVQGIRYSIEAMTNVKSIVFDMK

SEQ ID NO: 14472 - protein, 315 aa, Phaseolus vulgaris
MSNFPVINFEKLNGEERKDIMEKIKDACENWGFFELVDHGIPHDLLDTVERLTKEHYEKCMEEKFKESMASKGLEAIQTEVKDMDWESTFHLRHLPESNISEVPDLVDEYRKVMKDFALRLEKLAEQLMDLLCENLGLEKGYLKKAFYGSRGPTLPTKVANYPPCPNPRVVKGLRAHTDAGGIILLFQDDKVSGLQLLKDDQWVDVPPMRHSIVVNIGDQLEVITNGKYKSVEHRVIAQTDGARMSIASFYNPGSDAVIYPAPELLEKEAEEKAQLYPKFVFEDYMKLYADLKFQAKEPRFEAFKESNFDPIATA

SEQ ID NO: 14473 - protein, 330 aa, Shigella flexneri
MSQNTLKVHDLNEDAEFDENGVEVFDEKALVEEEPSDNDLAEEELLSQGATQRVLDATQLYLGEIGYSPLLTAEEEVYFARRALRGDVASRRRMIESNLRLVVKIARRYGNRGLALLDLIEEGNLGLIRAVEKFDPERGFRFSTYATWWIRQTIERAIMNQTRTIRLPIHIVKELNVYLRTARELSHKLDHEPSAEEIAEQLDKPVDDVSRMLRLNERITSVDTPLGGDSEKALLDILADEKENGPEDTTQDDDMKQSIVKWLFELNAKQREVLARRFGLLGYEAATLEDVGREIGLTRERVRQIQVEGLRRLREILQTQGLNIEALFRK

SEQ ID NO: 14474 - protein, 318 aa, Betula pendula
MATFPVIDMEKLNGEERGATMELIEDACENWGFFELVNHGISHDLLDTVEKLNKEHYRKCMEERFKDMVASKGLEAAQSEVRDMDWESTFFLRHLPASNMSEIPDLDEDYRKAMKEFAGNLEKLAEQLLDLLCENLGLEKGYLKKSFYGSKGPNFGTKVSNYPPCPKPELIQGLRAHTDAGGLILLFQDDKVSGLQLLKDGKWVDVPPMRHSIVINLGDQLEVITNGKYKSVLHRVLAQPDGNRMSLASFYNPGSDALIYPAPVLVEKEAEKGQVYPKFVFEDYMKLYAGLKFQAKEPRFEAMKAMESTVKLGPIATA

SEQ ID NO: 14475 - protein, 528 aa, Geobacter metallireducens GS-15
MSLVKLYDTTLRDGTQAEDISFLVEDKIRIANRLDEIGIHYIEGGWPGSNPKDVAFFKDIKKEKLSQAKIAAFGSTRRAKITPDKDHNLKTLVQAEPDVCTIFGKTWDFHVREALRISNEENLELIFDSLEYLKTRVPEVFYDAEHFFDGYKANPDYAIKTLKAAQDAKADCIVLCDTNGGTMPFELAEIIREVRKHISAPLGIHTHNDSECAVANSLHAVNEGIVQVQGTINGFGERCGNANLCSIMPALRLKMKAECVSDEQLKKLRDLSRFVYELANLSPDKHQPYVGNSAFAHKGGVHVSAIQRHPETYEHMRPELVGNMTRVLISDLSGRSNILAKAEEFNINMDSKDPVTLEILDNIKEMENRGYQFEGAEASFELLMKRALGTHRKFFSVIGFRVIDEKRHEDQKPFSEATIMVKVGGKVEHTAAEGNGPVNALDNALRKALEKFYPKLKEVKLLDYKVRVLPAGQGTASSIRVLIESGDKEARWGTVGVSENIIDASYQALIDSIEYKLHRTEDAEGVNK

SEQ ID NO: 14476 - protein, 213 aa, Wigglesworthia glossinidia endosymbiont of Glossina brevipalpis
MNKKLLSEFGDPVQRVKNALQSLKRGNGILVLDDENRENEGDMIFAAENMTVNQMALAIRFGSGIVCICLTKEKCKILNLPMMVKKNNSKYKTAFTVSIESAYGITTGVSAYDRIITIKTAIKDNAKPDDLNRPGHVFPLQAHPGGILSRAGHTEAAVDLTKLAGLKPAGVICEVMNDDGSMARMPEIINFSKKYNMPVLIIKDIIEYYNFIN

SEQ ID NO: 14477 - protein, 328 aa, Thermoplasma volcanium GSS1
MITVVGGTFSKLHKGHKALLEKAIETGNEIVIGLTSDEYVKRNKVYPAIPYKERYRNLYNYMVKKTNKFRIRPIDDRNGNAPYERDYEIIVVSPETYQRSLKINEIRIQNGLPPLKIIRVPYVLAEDLFPISSTRIINGEIDGNGRRLKPVKVAIATNNSAKLKATNDFFHKLMKNFDVIQNTDYKLETQQPFGEVTMNMATKRAMQSLGDNDYAIGIESGIVYERFSRKYFDFHYCVVIDRFGNVTRGSSSGFEVPDRIIDLIKRDMSFSQAYGKVIDTNGIDDSTGIVGKISNGRVRRYDLIMECIRNAFIPRFDPDFYDTTYTPP

SEQ ID NO: 14478 - protein, 562 aa, Rhodopirellula baltica SH 1
MPECMCGGCDSGAPKFIFFPFRDCSPMSDQPTPDAMNQSAEAPSSENVATRQIRIFDTTLRDGEQSPGASMNLAEKLEVASALVDLGVDIIEAGFPIASPGDFESVRQIATTIRGATICGLARCAEKDIDRAWEALKTAPQARIHVFLATSAIHREFKLRMTPDEIVERAVAGVRRAASHCDDVEFSPEDACRTEHDFLCRVVEAAIDAGATTINVPDTVGYTTPGEIYDRFKMLRDRVPNMDKAVLSTHCHDDLGMAVANSLAAVDAGAGQIECTINGIGERAGNAALEELVMAMKTRQDFYHCQTNINSKRLVPVSRLVSKTTGINVQRNKAIVGRNAFAHESGIHQDGMLKERTTYEIMSPEEVGFTKTDLVLGKHSGRAALADRAKQLGMTLTGEQLQEVFEAFKELADKKKEIYDGDIVALVQQKISETVAPEWTLVDYEVTSGKNQTPNVRVTLRRDEQDITEQVAQGDGPIDAAFWAVEKITGIQVVCKDFRVRSATLGRDAIGEVNLEVEHEGKTYRGTGVSTDSVESTILAMLNAINRIVAGIASDPGELPQP

SEQ ID NO: 14479 - protein, 405 aa, Geobacter metallireducens GS-15
MALVVQKYGGTSMGSIERIRNVAKRVAKTYDAGNDMVVVVSAMSGETNKLVALANEVCEFPDNREYDVLVASGEQVSIALLAMCLKSMGYKAKSYHGWQVPIITDSVFSKARIEEIPDAKVRADLKDGTIVVVAGFQGIDKDGNVTTLGRGGSDTSAVAMAAAMKADVCEIYTDVDGVYTTDPNICEDARKIDKISYDEMLELASLGAKVLQIRSVEFAKKYNVDIHVRSSFNDNQGTMVTKEDKDMEAVLVSGIAYDKNEAKIAVLGVPDKPGIAAKILSSLSDANISVDMIVQNVSGGDLTDFTFTVTKADFKKALAITKEIATEIKATGVSADESISKVSIVGVGMRSHAGVATKMFQTLANEGINIQMISTSEIKVSVVIDAKYTELAVRVLHEAFGLSGK

SEQ ID NO: 14480 - protein, 837 aa, Dechloromonas aromatica RCB
MKLNRRDFIKANAAAAAISAAGLSVPGAAVAQGKDEIRWDKAACRFCGTGCGVLVGTQDGRVVATQGDPDAPVNRGLNCIKGYFLSKIMYGADRLKTPMLRMKDGKYDKNGEFTPISWTKAFDIMEEKAKATMKAKGPNGLAMFGSGQWTIWEGYAASKLMKAGFRTNNLDPNARHCMASAVAGFMRTFGIDEPMGCYDDIEHADAFVLWGSNMAEMHPILWTRITDRKLSNKGVKVAVLSTFEHRSYELADIPMIFTPQTDLAILNYIANYIIQNGKVNQAFVDKNVNFKKSATDIGYGLRPTHALEKNATSNGYPDADGKPKGDTGKSDPITFDEFKKFVSEYTVEKVSKLSGVAEKDLKALAELYADPKVKVISFWTMGFNQHTRGTWANNLCYNIHLLTGKISEPGNSPFSLTGQPSACGTAREVGTFSHRLPADMVVTNPEHRKHTEELWGLPEGTIPDKVGYHAVAMARALKDGKVNFYWQQCNNNMQAGPNINEELYPGWRKPENFIVVSDPYPTVSAMAADLILPTAMWVEKEGAYGNAERRTQFWRQQVKAPGEARSDLWQLMEFSKRFKVEEVWPAELVAKAPKLKGKTLFDVLYANGVVNKYKLNETAAGFDNDDSKLIGFYIQKGLFEEYASFGRGHGHDLAPFDSYHQARGLRWPVVGGKETLWRFREGYDPYVKKGEGVKFYGHKDGKAVIFALPYQPPAESPDKEFDMWLSTGRVLEHWHTGTMTRRVPELYKAFPDAVVFMHPDDAKARGLQRGMEVKVASRRGEIQLRVETRGRNKPPRGLVFIPFFDAGRLVNKLTLDATCPISKETDYKKCAVKVTKV

SEQ ID NO: 14481 - protein, 513 aa, Chenopodium rubrum
SAKLACLHCDSRGSPLHLFYQYNPDSAVWGNITWGHAVSRNLIHWKYLPISMVPDQWYDINGVWTGSATILDGNIMLACLQVDSRGSPGTELEFAAALSDPLLLDWVKYSGNPVLTPPEGIGAKDFRDPTTAWLGPNGVWRFIIGSKKGKTGISLVYKTKDFKSYELEGNLHGVPDTGMWECVDFYPVSTTGQNGLDTSAYGPGMKHLLKASLDDNKQDHYALGTYDVASQTWTPDNPEMDVGIGLRLDYGKYYASKTFFDQNKQRRILWGWVGETDTEADDLLKGWSSLQSVPRVVTYDAKTGTNVIQWPVKEVESLRTDSIVYDNLVLQPGSIINLNITSAAQLDVSAEFMMDQEALKSTVGDDVINNCSAAAIRQALGPFGVLVLADGSLSEFTPVYFYIAKTSDGTVKNWFCTDQSRSSKASSVDKQVYGGPVPVLEGEKYSMRLLVDHSIVEAFGQGGRTCITSRIYPTKAINGEARVFLFNNATDLSVTASVKIWKLKSADISPYKF

SEQ ID NO: 14482 - protein, 139 aa, Medicago sativa
YRYLPPDLQVCLISATLPHEILEMTNKFMTDPVRILVKRDELTLEGIKQFFVAVEREEWKFDTLCDLYDTLTITQAVIFCNTKRKVDWLTEKMRNNNFTVSSMHGDMPQRERDAIMGEFRAGTTRVLITTDVWARGLDV

SEQ ID NO: 14483 - protein, 646 aa, Mesorhizobium sp. BNC1
MCGFGGYFGAGVSEAEPLLRRMASAIAHRGPDERGTAVLDGAGLCHTRLSIVGLADGQQPMSLDGGRLTIAFNGEIFNYVELREALIARGRTFRTASDTEVILHLYDEKGPDCLADLNGDFAFAIWDAPRRRMFLARDRMGVRPLFYTSVGDRLFFASEVKTLLQVPGVEAEMDPFALDQMFTLWAPIAPRTAFKNIHELEPGHMMLVEEGRQAIRPYWSLSFPEHGAPSRHTDERAVAEELRALLTDATRLRMRADVPVGSYLSGGLDSSVISALAAGMTPEILRTFSVAFESAEHDESAFQNEVAAALGTMHASVNCGDGDIAAVFPDVIRFTERPILRTAPAPLFKLSALVRERGLKVVLTGEGADEVFAGYDIFKEARVRRFCARQPGSRMRPHLFRKLYPYLPGLKQQSAEYLAAFFGAGADSLDDPLFSHKPRMRATGAAKLFFSAQLRETLAGYDAAEELASRLPQEFPRWHPLHQAQYLESRFLLPGYILSSQGDRMAMAHGIEGRFPFLDHRLVEFATTLPPEMKLKGLVEKHILREATKGLLPESILRRTKQPYRAPDSASFRGAGEKDYVREAMSAEKLADCGLFNPASVSKLFAKSRQQPLSGFRDNAAFVGILSSQLWLETFTGSRIRAVEAA

SEQ ID NO: 14484 - protein, 291 aa, Wigglesworthia glossinidia endosymbiont of Glossina brevipalpis
MASKLCKKKLLHYHPKLNIKLVPILTTGDLINKIRNNITNEKGLFIKELEKSLLKYQSDIAVHSMKDFSSSFLDSLGLAAICKRDDPRDAIVSNYYNNIISLPNNAKVGTSSLRRKCQLLSIRPDLKIFPCKGNIHSRLKKLNQGVFDALILATAALKRLKINEQMYTPIDPSYLLPAMGQGSIAIQCRLYDNKIIDIVRNINNKKTALCINSEKIVVSMLGTGCRVPIGSYAKIENKNTIWIRALVGSIDGSNIIRSEGKSCVSNAEKLSKKQVKNLINLGAKNILKKFK

SEQ ID NO: 14485 - protein, 268 aa, Candidatus Kuenenia stuttgartiensis
MKDIRMNRGDTSGYDHIEFEEIKAKNGKAIGIIYMKKPPRNSIGSWLLDAIYDKMDQYEGDDSIGAIIIASRIRGVFSDGADRDELFGSWISGLVAEKNYERFRKAHEIFVEIENCKKPVLAAINGVTIGAGLELAMLCDLRIASDISFYSLPEAKPELGIIPGLGATQRLPRLVGVARAKEMLFLGKLIRADTALEWGLINQIVPHKDVLKHTIEIAKTLLERDARVLKEMKKCINYAMENDLQKGIEYEVRLFAEMMRLKLVGKGC

SEQ ID NO: 14486 - protein, 283 aa, Wigglesworthia glossinidia endosymbiont of Glossina brevipalpis
MIAKVINGKNIAKKIISKINLKIKKYSKLGMRPASLAMINVGNNPASKIYISNKEKICKKIGLISYLYNFSKNISEIDLINLIIKLNKNNLIDGILVQLPLPKEINKLNVLEKIIPKKDVDGFHPYNIGRLCQRKPTIVPCTPKGIIRLLKYYKINLLGLNAVVVGASNIVGRPMSLELLLEGCTVTITHRFTINLKKYIENAELLIVAIGKAEFIPGSWIKPGAIVIDVGINRLKSGKIVGDVNYEDAIEKASYITPVPGGIGPMTIAMLIENTMQIYINNY

SEQ ID NO: 14487 - protein, 435 aa, Streptomyces coelicolor A3(2)
MTGRFEFMHQSSHPDRPTTPADDWSGANAAHLAAPARIAAAPASVTDEDVALVRASLTVVTPHVSELAAHFYSILFSRYPQVRDLFPAELDVQRERLVRALLRIVELVDDPDNLVAFCSRLGRGHRKFGTQSGHYPAVGECLLQALSHFAGPAWHPALATAWQRAYTAAADVMVRAAEEDARSRPAVWDAHIVGHVHRGHGIAEITVRPHQPYPFVAGQYVSIETPWAPRQWRQYSPANAPRPNSELTFHVRAVREGKVSNALVHHARPGDPVRLGPPEGDMVLRPTRQRDLLFVAGGTGLAPIRALIEEVAQGSISDAREVSLFIGARTANELYGLDDMLRMSQRYHWLRVRAAVSDERIPGLEGTLPEVLAEFGPWYRHEAYLCGPPQMLSGAVHALRRHGVPPRHIHYDPWDTPVLTAPLGPPPPDEEDDQL

SEQ ID NO: 14488 - protein, 281 aa, Thermoplasma volcanium GSS1
MAVKLLKGEEIAEKKAEELKERIEKMGVSPRLVLLQVGNYSAATIYARAKIKRGKKIGADVVLEKYEDLTKQELVRRIEELSADKDVNGIMVENPLPKTIDYYDIVKSIPYYKDVDALSPYNQGSIAINREFLVPATAMAVVDILKYYGYEKTTATIINRSPVVGRPLSMMMLNRDYTVSICHSKTPDIRSIAKASKIIVVAVGRPGFLDDTYVTESSVVIDVGINYVQDKVIGDIDFDKVSEKVEAVTPVPGGVGPITATNILSNLVKAAEYQSNTNIGR

SEQ ID NO: 14489 - protein, 250 aa, Rickettsia typhi str. Wilmington
MEDIDIWQEKFEFCNYSKKLIGRIEYLNTIVDSPIDIIEVKKGIYYTRKYHATQMRQSGEPYYSHPIEVAIMLADFTALEAPKLYKSYMINVALLHDTIEDTILTHADISKIFDKNIADNVERLTRIKPYGKISSGEMLNLLIQEQRYDIALIKVFDRLHNLQTINAKSTEKALETVKETIESFLLIAAYLEIRTVEQQLLNVCNNFIKQHFPSEQKAIFRSVYEISFFNFKIIQNKLKRMQYYFRKKKA

SEQ ID NO: 14490 - protein, 113 aa, Rickettsia typhi str. Wilmington
MTGRIKHPISILYKLYRKGIKLEELTDIFAIRIVVIDEEKCYKALKIVHELYDHEKDKFKNYILNPKPNGYQSLHTIIITEDNYKIEIQIRDYNMHYNAESGDAAHWKYKNSF

SEQ ID NO: 14491 - protein, 323 aa, Yarrowia lipolytica CLIB122
MSVLLTGSTGFIATHVLDQLLSKGLSVVATYRSESKVDFLKKRFEGKSVEFVLLSDIESESEVKDIFNKNPQITKVIHTASPFHFNFTDPLTEVLQPAVNGTKAVLNAIPEHVTHVVVTSSVAAVVDIKYIDDYNEIITEDSWNGISWEDAEKKGGSFTYRGSKTFAEKAAWELHKKAKYNLVTILPPLVFGPVYGQTDTLNTSNEQLVDALKKGSNFRYAGTYVDVRDTAAAHVAAIDATESARWLTIGGYYTRQEILDITNKEFPEFHADKGTPGDYSGLKRAFRYDNSKTNKVFPRKYITLKQTVEDTFRGIDPKYINKL

SEQ ID NO: 14492 - protein, 493 aa, Thermoplasma volcanium GSS1
MDGKLYIDGQWVDSSNGDTLTKYNPVTGEVIGKFAAASRDDVDRAFDAAEDAFQKWMDLGSVERSKIIYKAKELIEENRKELENIIIQENGKPVKEAAEEVDGVLDQMQYYAEWARKLNGEVVEGTTNHRKIFQYKVPYGTVVALTPWNFPAGMVARKLAPALLTGNTVILKPSSDTPGSAEWIVKKFIQAGVPKGALNYITGRGSVIGDYIVEHKKVALITMTGSTSTGQRIMQKASANMAKLMLELGGKAPFMVWKDADINNALKTLLWAKYWNAGQSCIAAERLYVHEDIYDTFINKFVELSKKIVVGDPSRADMGPLINTTALKGTEEVVEEAKESGARILYGGSKPDLSGPYKNGYFFLPTIIDNVDQKSKIFQEEIFAPVIGARKVSDVEEMYSLANDSKYGLASYLFTKDPNLIFEAAERIRFGELYINMPGPEASQGYHTGFRLTGQAGEGSRYGILEYLKIKNIYVDYSGKPLQINTVRDDLFQ

SEQ ID NO: 14493 - protein, 104 aa, Yarrowia lipolytica CLIB122
MAVTQITSVSDFQNAIKSDKLTVIDFYATWCGPCKMIAPTFDKFSETFTDAQFYRCDVDEASAVAQEVGVTAMPTFAFYKNGEKITTVMGANPSALNAAIKQNV

SEQ ID NO: 14494 - protein, 357 aa, Staphylococcus epidermidis ATCC 12228
MMEVHYMTKIKEIKKVLQQEDADAAWITTPLNIFYFTGYRSEPHERLFALLIPSNEEPVLFCPKMEVEEVKQSPFKGKIIGYLDTENPFDKYSKTFSKMLIESEHLTVKRQRELTKAFNIEHYQDVDQSIKDLRNIKSEDEIINIKKAAALADKCIEIGKSFLKEGVEEREVVNHIENEIKKYGVNEMSFDTMVLFGDHAASPHGTPGDRKLQQNEFVLFDLGVVYHHYCSDMTRTIHFGTPNKEAQNIYNIVLKAETEAIKSIKPGVTIKDIDKIARDIIEEAGYGDYFPHRLGHGLGLEEHEYQDISSVNNNQLEAGMVITIEPGIYVPHVAGVRIEDDILVTENGYEILTQYEK

SEQ ID NO: 14495 - protein, 342 aa, Yarrowia lipolytica CLIB122
MSILVTGATGFIAAHCIDQLLKNGHSVIGTIRSPQKGAALEAAFPDAVANKKLILETVSDIRSAKEFDQLFDKHPEIGKVLHTASPFHFNIKDPIKDMLEPAVEGTNTVLQSVLKHGPQVTKVVVTSSFVSMLTADDMFDPSVTVDEKSWNRITWEQGAGNVEFLTYFASKKFAEKAAWDFVENEKPFFQLTTVNPSLVFGPSITKPDLKSLNTSNGDIVTHALEVKDSDEGVGQYNSFCVDVRDVAKGHVVALDDKTNGKRLMLCSDKFCSQRLLNYINEDFPELKGKIAVGHPDQVEAIEAKTFNFDNTETKKLLGFEFTPLRETIHDFVAQWLEVKKEE

SEQ ID NO: 14496 - protein, 950 aa, Synechocystis sp. PCC 6803
MKSFFLNTFSPLRSTARFWVLVALLTSMELSASQLRDTEQAVAIEESKCTDCVEGRGTGIVRGESFAQVETVPTEAKVEQIKPMIERISPHLGLVGFGLAFIGVLWLTYLLKKDRQTKAQLAFQARRSDVLLELPQYADRLSEVEFLQRGQEFAEELTKSKIAFIHFVNDDEQTIELVAWSRATLANYCRVVAASHYPVEEAGIWADALRLRRPVLINDYATHQGKKGLPEGHAYLARLISVPVIDDGKVVMLTGVGNKDVFYTDQDVETVQLISNEIWRIARSRRLVKKLTESENRYRLAQAIAKIGNWELDYATNVLFWSPEVFNLFEIAPQDFAGTYEAFLNLIHPGDRELVDEAYQCHLQKYQPYDIVHRLLMPDGRIKYVQEQCNTVFDKNNLPLLSRGTIQDVTELQEAQISLEHLNEKLEQRIQERTQELENSQESLLEAKLVAEGATKAKSEFLANMSHEIRTPMNAIIGMSELVLQTDLTSQQRNYLQKVQYAGELLLGIINNILDFSKMEAGKLELEQKPFSVEEVMGNLHSILGIQAEAKGLTLNFHLDPRIPPILVGDRLRLSQILINLGNNAVKFTNQGEITIRGQLLKTENEQTKLQFSVTDTGIGLTPDQQSKLFQWFNQGETSTSRQYGGTGLGLAISKSLTELMGGDIWLESVVGQGSTFHFTVCLGTASPAVAQDYLVSRVSILEAKPSVTQAITQLEGASILLVEDNEINREFAHDLLTSKGLRVQVANNGQEALTLLTSNTYDAILMDIQMPMLNGYDATRAIRQQEYHRNLPIIAMTANAMAGDQEKALDAGMNDHLTKPIKPDLLFQTLAHWIPPNSAREKKNPSSNLKADLSFSSMTGINQQIGMQYIENVELYHRLLVKFGDRYSNFADQFRTEQASDDPTAATRYAHSIKGAAALLGIENVHHTAQQLEDSCREHESPEMIDRHL

SEQ ID NO: 14497 - protein, 108 aa, Anabaena variabilis ATCC 29413
MPTDTVAYVQENEFDAVLSEDKVVVVDFTATWCGPCRLVSPLMDQLADEYKGRVKIVKVDVDNNKPLFKKFGLRSIPAVLIFKDGELAEKIVGVSPYEQFSAAVEKLL

SEQ ID NO: 14498 - protein, 303 aa, Xanthomonas axonopodis pv. citri str. 306
MTASAPAASASARLLDGRRIAEELLDGLKLRVDARVAAGKARPGLAVVLVGGDPASSVYVRNKRRAAEKVGIEAFDYDLPQGTSEAQLASLIDELNADPKIHGILIQLPLPGIPDANRLIQRIDPRKDVDGFHPQNVGHLALREFGLRPCTPRGIVTLLGHTDQPVRGRNATIVGVSNHVGRPMGLELLIAGCTVTSCHKFTPPDVLEASVRNADILVVAVGRPGLIPGEWVKPGAVVIDVGINRLDDGRLVGDVGFDAAAQRAAWITPVPGGVGPMTVATLMQNTIEAADAAGIQDSGFGIR

SEQ ID NO: 14499 - protein, 261 aa, Clostridium beijerinckii
MELKNVILEKEGHLAIVTINRPKALNALNSETLKDLNVVLDDLEADNNVYAVIVTGAGEKSFVAGADISEMKDLNEEQGKEFGILGNNVFRRLEKLDKPVIAAISGFALGGGCELAMSCDIRIASVKAKFGQPEAGLGITPGFGGTQRLARIVGPGKAKELIYTCDLINAEEAYRIGLVNKVVELEKLMEEAKAMANKIAANAPKAVAYCKDAIDRGMQVDIDAAILIEAEDFGKCFATEDQTEGMTAFLERRAEKNFQNK

SEQ ID NO: 14500 - protein, 606 aa, Leifsonia xyli subsp. xyli str. CTCB07
MSSDANHTTASPSTVALSASTGTAAPEQLTGSESVVRTLELLGVTDVFGLPGGAILPIYDAIMDSDTIRHILVRHEQGGGHAAEGYAAASNKVGVAMATSGPGATNLVTAIMDAHMDSVPVVFITGQVFSTLMGTDAFQEADIVGITMPITKHSFLVKSAEEIPVTIAAAYHIAGTGRPGPVLVDITKDAQQSRAPFVWPLKVDLPGYRPVTKAHGKQILAAAQLLAEAKKPILYVGGGVIRSRASQELLELAETTGLPVTTTLMARGAFPDTHAQHLGMPGMHGTVPAVLALQESDLIVSLGARFDDRVTGKTSLFAPHAKIVHVDVDPAEISKIRVADVPIVGDAKEVIVGLTVAYRDVAKDGEPDLAEWWTYLNGLREEFPLGFTPTSDGLLAPQHIIQRIGELTGPEAIYAAGVGQHQMWAAQFIKYERPNSWLNSGGAGTMGYSVPAAMGAKVAQPDCVVWAIDGDGCFQMTNQELATCTINDIPIKVAIINNSSLGMVRQWQTLFYDGRYSNTDLNTGHDTVRVPDFVTLAEAYGALGIRVTKEDEVDDAIRLALETNDRPVVIDFVVSADAMVWPMVPQGVSNSYVQYARDHSPSFGEE

SEQ ID NO: 14501 - protein, 346 aa, Oryza sativa (japonica cultivar-group)
KDPIKLWERYVEWLYQHKELGLFVDVSRMGFTEEFLRRMEPRMQRAFAAMRELEKGAIANPDEGRMVGHYWLRDPGLAPNSFLRTKIETTLDRILAFSQDVVSGKIKPPSSPAGRFTQILSIGIGGSALGPQFVSEALAPDNPPLKIRFIDNTDPAGIDHQIAQLGPELASTLVIVISKSGGTPETRNGLLEVQKAFRDAGLDFSKQGVAVTQENSLLDNTARIEGWLARFPMFDWVGGRTSEMSAVGLLPAALQGIDIKEMLVGAALMDEETRNTVVKENPAALLALCWYWASEGIGNKDMVVLPYKDSLLLLSRYLQQLVMESLGKEFDLDGNRVHILPFYSHC

SEQ ID NO: 14502 - protein, 120 aa, Brassica napus
MAVFATAGACDSNAGLISNGDLRALHPIFKIYGQRRCFSGPIVTLKVFEDNGLVRNQLETKGEGAVLVIDWGGSIRCALVGGNLRQIAHNNGWAENEVNGCDRGVDANYVWDAGDGRLDI

SEQ ID NO: 14503 - protein, 256 aa, Kluyveromyces lactis NRRL Y-1140
MSAATASNTAQQPISLRVNAALFDVDGTLIISQPAIAEFWRDFGKDKPYFDSQHVIDISHGWRTYDVIKQFAPDYANEEYVTKLEGEIPEKFGQHAIEVPGASKLCGELNKLPKEKWAVATSGTYEMAHKWFDILGIKRPSNFITANDVKNGKPHPEPYLKGRNGLSYPINKENPAASKVIVFEDAPAGILAGKAAGCKIVGIATTFDKEFLIEKGCDIVIKDHTKLRVAAYHPETDEVEFIFDEYLYAKDDLLEW

SEQ ID NO: 14504 - protein, 446 aa, Methanopyrus kandleri AV19
MRVVVVGGGAAGVVAARTAREHGADVVLISADEHIAYSPCAIPFVISGEIERPEDILMRDPTHYERLGIDVRLGVRVEEVDPEEKVVTTEDGDTVEYDSMVLATGGEPLVPPIEGSELDGVFTVRRFSDIEPLLRAVQESERAVIVGAGPIGVEMAYALHERGLEVTLVEMLDRVLPQFLDDDVAAIVQERMEKEGVRVLLGSPVEAIEGDDRVEAVVVNGEEIEADLVVMAAGVRPVTDLFESIGASVLPFGVEVDPALRVKREDGGVFDDIYAAGDCVADWCPITGERVPSQLGTVAVRQGKIAGKNAAGGPRATWMGTLNTAVIRVFDLEAAGAGLTQTRAEELGLEVVSATVETTTRARYYPGGEPIAVKLIADADTHRIVGVQSVGGERVRERVDGVALAIRLAAKVEDLLSWDYSYSPPVARVIEPIYEAAELLREELHS

SEQ ID NO: 14505 - protein, 411 aa, Brassica napus
  misc_feature (99)..(99): Xaa can be any naturally occurring amino acid
FWKTIPPTEPYRVILGDVRDKLYHTRERSRQLLSNGISDIPEEATFTNVEQVKKLYDQLVLSLTCPALCLLLFCSLLRSSWSLLSYVTAHYVHVVTAQXLMELLDFLRQVSTFGLSLVRLDIRQESERHTDVLDAITKHLDGSSYRDWSEERRQEWLLSELSGKRPLFGPDLPKTEEIADVLDTFKVISELPSDCFGAYIISMATSPSDVLAVELLQRECHVKTPLRVVPLFEKLADLEAAPAAVSRLFSLDWYKNRINGKQEVMIGYSDSGKDAGRLSAAWELYKAQEELVKVAKKYGVKLTMFHGRGGTVGRGGGPTHLAILSQPPDTVNGSLRVTVQGEVIEQSFGEEHLCFRTLQRFTAATLEHGMNPPVSPKPEWRALLDAMAVVATEEYRSVVFQEPRFVEYFRL

SEQ ID NO: 14506 - protein, 563 aa, Haemophilus influenzae Rd KW20
MRLKFQLFLMKGNTMKNINPTHTHAWKSLEAHKAELSNITIQDLFKQEKNRFDDYSLTFNNQILIDFSKNNINQTTLSHLRQLAQECALDSAKEAMFTGEKINRTENRAVLHTALRNRTNTPVLVDGKDVMPEVNAVLAKMKDFCQRIISGEWKGYTGKAITDVVNIGIGGSDLGPYMVTEALRPYKNHLNMHFVSNVDGTHIAETLKKVNPETTLFLVASKTFTTQETMTNAQSARDWLLKAAKDESAVAKHFAALSTNAKDVEKFGIDTNNMFEFWDWVGGRYSLWSAIGLSIALSIGFENFEALLNGAHEMDKHFLSTPIEQNIPTTLALVGLWNTNFLGAQTEAILPYDQYLHRFAAYFQQGNMESNGKYVDRDGNVIKNYQTGPIIWGEPGTNGQHAFYQLIHQGTTLIPCDFIAPAQRHNPLADHHNKLLSNFFAQTEALAFGKTKEEVEAEFVKAGKSLDDVKNIVPFKVFTGNKPTNSILVQKITPFTLGALIAMYEHKIFVQGVIFNIFSFDQWGVELGKQLANRILPELTDSEKVASHDSSTNGLINQFKAWR

SEQ ID NO: 14507 - protein, 429 aa, Kluyveromyces lactis NRRL Y-1140
MSLKRVVVTGLGAYTPLGSTVSKSWAGLLAAKQSLIPLDAFYNREDFAKVKKLVPLDTAVSRLHADPLDTFPEYDQRRMTPAHQIVLEKTKEALLQANLIADENLNTLTEDIDKTKVGCVIGTGMPSMPDLESTISTLFTKPKVSPFLIPRVLPNMAMGNVMIKYGIQGPSSCPSTACATGNSSIIEGFNSIQLGLADVMICGSYEFSIDPISIAGFYRSKTISKKHQTRPFDVERDGFIMGEGCGILTLESLESALKRGSPILAEISGVGLSNDGYHITSPLPDGSGGKLAMQNALKRANIAPQQVGYINAHATSTQLGDVAESTAITELFGTKSTGTAPYVSSNKGHIGHLLGASGSVESIFTVLSLKYGRFPHTLNLKTVDETSIINELNLIKNESMIDNSIEYALTNSFGFGGVNTSILFRKYHQ

SEQ ID NO: 14508 - protein, 934 aa, Mycobacterium leprae
MVEFSDAILEPIGAVQRTRVGREATEPMRADIRLLGTILGDTLREQNGDEVFDLVERVRVESFRVRRSEIDRADMARMFSGLDIHLAIPIIRAFSHFALLANVAEDIHRERRRHIHLDAGEPLRDSSLAATYAKLDLAKLDSATVADALTGAVVSPVITAHPTETRRRTVFVTQRRITELMRLHAEGHTETADGRSIERELRRQILTLWQTALIRLARLQISDEIDVGLRYYSAALFHVIPQVNSEVRNALRARWPDAELLSGPILQPGSWIGGDRDGNPNVTADVVRRATGSAAYTVVAHYLAELTHLEQELSMSARLITVTPELATLAASCQDAACADEPYRRALRVIRGRLSSTAAHILDQQPPNQLGLGLPPYSTPAELCADLDTIEASLCTHGAALLADDRLALLREGVGVFGFHLCGLDMRQNSDVHEEVVAELLAWAGMHQDYSSLPEDQRVKLLVAELGNRRPLVGDRAQLSDLARGELAVLAAAAHAVELYGSAAVPNYIISMCQSVSDVLEVAILLKETGLLDASGSQPYCPVGISPLFETIDDLHNGAAILHAMLELPLYRTLVAARGNWQEVMLGYSDSNKDGGYLAANWAVYRAELALVDVARKTGIRLRLFHGRGGTVGRGGGPSYQAILAQPPGAVNGSLRLTEQGEVIAAKYAEPQIARRNLESLVAATLESTLLDVEGLGDAAESAYAILDEVAGLARRSYAELVNTPGFVDYFQASTPVSEIGSLNIGNRPTSRKPTTSIADLRAIPWVLAWSQSRVMLPGWYGTGSAFQQWVAAGPESESQRVEMLHDLYQRWPFFRSVLSNMAQVLAKSDLGLAARYAELVVDEALRRRVFDKIADEHRRTIAIHKLITGHDDLLADNPALARSVFNRFPYLEPLNHLQVELLRRYRSGHDDEMVQRGILLTMNGLASALRNSG

SEQ ID NO: 14509 - protein, 528 aa, Synechococcus elongatus PCC 7942
MTAQQLWQRYLDWLYYDPSLEFYLDISRMGFDDAFVTSMQPKFQHAFAAMAELEAGAIANPDEQRMVGHYWLRDPELAPTPELQTQIRDTLAAIQDFALKVHSGVLRPPTGSRFTDILSIGIGGSALGPQFVSEALRPQAALLQIHFFDNTDPAGFDRVLADLGDRLASTLVIVISKSGGTPETRNGMLEVQSAFAQRGIAFAPQAVAVTGVGSHLDHVAITERWLARFPMEDWVGGRTSELSAVGLLSAALLGIDITAMLAGARQMDALTRHSDLRQNPAALLALSWYWAGNGQGKKDMVILPYKDSLLLFSRYLQQLIMESLGKERDLLGKVVHQGIAVYGNKGSTDQHAYVQQLREGIPNFFATFIEVLEDRQGPSPVVEPGITSGDYLSGLLQGTRAALYENGRESITITVPRVDAQQVGALIALYERAVGLYASLVGINAYHQPGVEAGKKAAAGVLEIQRQIVELLQQGQPLSIAAIADDLGQSEQIETIYKILRHLEANQRGVQLTGDRHNPLSLIASWQR

SEQ ID NO: 14510 - protein, 397 aa, Oryza sativa
  misc_feature (26)..(26): Xaa can be any naturally occurring amino acid
MATFSGTDRLRDLHAFDDTKAGVNGXLVDAGVTTVPYFFRHHPEPLPVAAPSEAAAAIPLIDLAKADVNRGHVVSQVRSAAESAGLFQVVNHGVAGELMDAMLAAARRFNEQPAEAKAPYYTRDLGSKVRFFCNFDLFQSPAAQWRDTLYVEMVPDAPSPEEIPPPLRGVAEEFAAAVWRLGERVTELLSEALGLPPGYLAEHAGCMDGMSMVAQYYPPCPEPEKTMGTTRHSDPSFLTVLLQDESGGLQAVLPRPPEERWVDVPPVAGALVVNVGDLLQLVSNGRLRSMEHRVLPTAASAARARVAVACFFRLEYSASLTRPRSYGPIVDSGEGGARRAAAVYRSTTPRDFLAYFNGKGLDGRSALEHFRIPEAAAASSAVDVVSSSTTAAASIPR

SEQ ID NO: 14511 - protein, 521 aa, Dechloromonas aromatica RCB
MLDTAIKGQLKAYLERLQRPIELVGTLDDSAKGQEMRALLNDILECSDKVTLRENGGATRIPSFAVALPGETPRIHFAGLPMGHEFTSLVLALLQTGGHPPKVEQSVIDQINALPGSFKFETYISLSCHNCPDVVQALNLMAVLNPNVTSTMIDGAMFQDEVNARQIMAVPTTYLNDAEFGAGRMLIEEILAKVDTGATARAAEELGKKETFDVLVVGGGPAGAAAAIYAARKGIRTGIVAERFGGQVMDTLGIENFISVPYTEGPKLVASLEQHVKEYAVDVMNLQRANKLTPASENGGLVGLELENGAKLQAKTVILSTGARWREMNVPGENQYKAKGVCFCPHCDGPLFKGKRVAVIGGGNSGVEAAIDLAGIVAHVTLLEFADTLRADAVLQSKLNSLPNVTVIKSAQTTEVTGDDQKVNGITYKDRITGEEKHVELEGIFVQIGLLPNTDWLKGSLDLSKFGEIIIDAKGQTSAPGVFAAGDCTTVPYKQIIIAMGAGATASLSAFDHLIRSSAPA

SEQ ID NO: 14512 - protein, 474 aa, Propionibacterium acnes KPA171202
MADEIEFGTGGWRAIIADTFTRLNVERVAQALADRIHDENQEHRPVVIGYDQRFLSPEFAWWAAEVLAGNDIVVRIIDRPAPTPMIMWTVRDLGCAYGMAVTASHNPATYNGLKVFTEGGRDAKVEITEPIQHRANSISPKDIRRVHRTDALRDGVIEVQTSMNWYIDAILDHVDLEAIRHAHLKVVLDPMFGVSRTCLQTILMTARCDVDTIHERRDTLFGGRLPSPNSRTLQTLAQEVVERGADIGIATDGDADRLGIIDDQGHFLHPNQILVLLYTYLLEDKGWQGPCVRNLATTHLLDRVAEAHGQTCYEVPVGFKWVSSKMAETNAVIGGESSGGLTVQGHIAGKDGVYAGTLLVEMIAKRGKKLSQIYADIEERYGRLEMVEDDFSFAPEDKEYLKRRIYQDKDLPDFGLEVDHISDMDGVKVYFANGGWIIVRFSGTEPLLRVFCEMPVAQMARECIDKVVKHYHFE

SEQ ID NO: 14513 - protein, 481 aa, Bradyrhizobium sp. BTAi1
MEMFIDGRWVGALGGATFDVLDPATGETIDSVPEAGPADVDAAIRSAEMAFQAWKATPVAERARLQKAAARLMRENAEQLGRLLTRELGRPLAGAITEIQRSAELLDVYAEEGLRLHAEMPLTGVAGEKIIITREPAGVVIAITPFNYPVTLLCFKLGAALMAGCTVVAKPAEDTPLSTLRLAELFRKAGYPTGCFNVVTGRGPDVGMQMIAHPTPRKIAFTGGTQAGKAIAAAAAGTMKRVTLELGGQCPAIVCADADIGAASAAIARHAFANSGQFCYRVNRVYVERPVYTRFLDALADRVLQLDVGNGLTSTCALGPLVNEKIYRNSDRQIADARASGATILTGGARLTGGLYDKGWFLPPTVIADAGPSSLIMTEETFGPVLGVAPFDHHSEALRLANATIYGLAAFVFSRNLATGLTLAERLEAGSVWINDIQRSNQRAPFGGMKQSGIGREKGRYGVEDYLEYKTIYLTYDAELR

SEQ ID NO: 14514 - protein, 1077 aa, Pichia anomala
MKVEEHIGGVPPLPGKTDGVKQYSDMKNMVIVGLGMTGIAFLEKMLNNDTAQEYFYTVIGEEPYLAYNRVGLTEYFEHKNFDKLLLSPKTFYEERNKNRWNFKVDEAVVEVDRDHKVAKTSKGNSYEYDTLVFATGSNGVLPLQLLPDPVNGKSKQDYRNYREMGCFVYRTIDDLNSMLSFSEELSIPKDSTKRAIVVGGGLLGLEAGKALLDMKTFDNVTVVHRSKWLLSQQMDEKGGALLTEKVRDLGVTARTGTTVDELLFDNNGKLKAVKYNDGEIEECQLLCYTIGIQPRDEVAAESGLVCSKRGGVAINNFMQTSDPNIYAIGECASWNDKTFGLIAPGITMADILSFNLIQSKFHSPKEFSEPDIGTRLKLMGVEVASFGDYFADKNGPKWLPKGYTLKKVRSLVYEDPIEGIYIKLILTQDGKYLLGGILVGNTKQFTKFTSIAKQRKPLPCPASEFILGKGGDDDEDADMLSDDTQVCSCQNISKGTLVENIRNGKCSSLGELKSVTKAGTSCGGCEPTMKAIFESEMKKMGKQLSNALCAHFKQSRADLFSIIMVKQYKSFKEIMQNVGLKPEAAGCEICKPTTIGSIFSTLYNRHILDSDVHGLQETNDRYLGNIQRNGTYSVIPRMSAGEITPEKLIAIGNIAQKYDLYTKITGAQRVDLFGALKQDLPKIWEELYEHGFESGQAYGKSLRNVKSCVASTWCRYGKRYKGIRSPHKMKGGVSGCVTHCAEFHSKDFGLCAVQNGFNVYVGGNGGMKPAHAQLLKSDVPPDQVIPLLDRYLMFYFRTADRLQRTARWLENLEGGIEYLRDVVVFDKLGICKELEDQMNELVGHYFDEWRESVIRKEDQIFKQFANTDKSQETVEIIRERGQRRPADWPEKETVEKKDFKNIKWSSTSWRSVCPSTELPEKEAGSSTTILISDTQIALFRLNGKLYASQNMCGHKRAFVLSQGIISTDENDNVYISCPLHKRNYVIDADKPNAGACKNDDSLSVALFDIKEEDGMILVKLPPEDELDEVLGTTKWKVKKSETVSEGIATFKKLDAKFNIKVPVRTPVPSVGGSELDW

SEQ ID NO: 14515 - protein, 560 aa, Enterococcus faecalis V583
MTEEIYDLIIIGGGSAALSAGIYAGRAMMDTLIIEKDKIGGQVTTTSEIVNYPAIRHTTGPELMEEMRIQAQDFGVAFTNDEIIDVDFSQTIKTVQSASQTYQAYAVLIATGASARKIGFPGESEFTGRGVAYCSTCDGEFFQGLDIFVIGGGYAAAEEAVYLTRYGKSVTMIIREPDFTCAKLTAEAAKNHPKIKIVYNIEVKEITGDDFVRKAVFVNNQTGEETVYEAPKDSTFGLFVFAGNKPSTEIFEGKIALDRGYVPTTENMETNIPGVYAAGDLRIKELRQIVTAVADGAIAATHAQRYVTEQKTQAGQSIVTKRMTERLANQSAPETSSQQPKEKQPAKVTGKHQWFPESMRQQLSGIFAKLTKKVTLLQFLDASDEKSLELQSFLTEFASLDQKITLETILKDTEPAKELLYGIEKMPSVVLLDAAGNYTGIKFSGIPSGHEVNSLVLAVYNVGSEGQPLEASLQKNILALPKRKIEIFVSLTCHFCPDVVAACQRIASINPHVEAEMVDISLFPELKKEKKIMSVPAMLIDGEQMIFGSKTMTEIIEALA

SEQ ID NO: 14516 - protein, 618 aa, Gossypium hirsutum
MEQHIMWVFWFFLHWFCSVHSVSDGDSLLSPKGVNYEVAALMSVKRELRDYKQVMDGWDINSVDPCTWNMVACSAEGFVISLEMASTGLSGLLSPSIGNLSHLRTMLLQNNQLSGPIPDEIGKLSELQTLDLSGNHFVGAIPSTLGSLTHLSYLRLSKNNLSGPIPRHVANLTGLSFLDLSYNNLSGPTPKILAKGYSITGNNFLCASSEHICTDVSYPLNGSVSSSRVSGNHHWLLSVAIGIGFAFVVSVMLLACWVRWYRSQIMLPSYVQQDYDFEIGHLKRFSYRELQIATSNFNSKNILGQGGYGVVYKGCLPNRSVVAVKRLKDPNFTGEVQFQTEVEMIGLALHRNLLRLYGFCMTPDERLLVYPYMPNGSVADRLRDACHGKPALNWSRRMHIALGAARGLLYLHEQCNPKIIHRDVKAANILLDESFEAVVGDFGLAKLLDKRDSHVTTAVRGTVGHIAPEYLSTGQSSEKTDVFGFGILLLELITGQKTLDAGNGQVQKGMILDWVRTLHEERRLEVLVDRDLQGCFDTIELETVTELALQCTRPQPHLRPKMSEVLKVLEGLVQSGTEEPQGGTNHCETSAYSFSRNYSDVHEESSFIIEAMELSGPR

SEQ ID NO: 14517 - protein, 208 aa, Solibacter usitatus Ellin6076
MLATATTPMNAYDVALENFDLAANALGLDDSIRAMIKYPERILSVSVPVRMDTGKIVRFEGYRVQHSTMRGPAKGGIRFHPNVTMDEVKALATWMTWKCAVVNIPYGGGKGGVTCNPKELSMGELERMTRRYASSILPIIGPEKDIPAPDVYTTPQIMAWDSGTPCRLEYRDIPGAPGWVGRGKGRSSLRGGSARDANKSGRPRRGCF

SEQ ID NO: 14518 - protein, 503 aa, Pectobacterium carotovorum
MSNSFCVVYKGSDTDINNIQRDFDGKGEALSNGYLFIEQNGHYQKCEMERGTAYLIGSLYNRTFLIGLAGVWEGEAYLANDAELLALLFTRLGANALALAEGDFCFFIDEPNGELTVITESRGFSPVHVVQGKKAWMTNSLKLVTAAEGEGALWFEEEALVCQSLMRADTYTPVKNAQRLKPGAVHVLTHDSEGYSFVESRTLTTPASNQLLALPREPLLALIDRYLNAPLEDLAPRFDTVGIPLSGGLDSSLVTALASRHFKKLNTYSIGTELSNEFEFSQQVADALGTHHQMKILSETEVINGIIESIYYNEIFDGLSAEIQSGLFNVYRQAQGQVSCMLTGYGSDLLFGGILKPGAQYDNPNQLLAEQVYRTRWTGEFATHGASCYGIDIRHPFWSHSLISLCHALHPDYKIFDNEVKNILREYADSLQLLPKDIVWRKKIGIHEGSSVNQAFANVLGSTVDNYQTKSRFTYRVYQAFLRGRLSITDVTPSQLKDLIKKD

SEQ ID NO: 14519 - protein, 527 aa, Arabidopsis thaliana
MRKKMMISDLPHDLESEILSRVPAKSLAKWKTTCKRWYALFRDPSFVKKNFDKAGGREMIVLMNSRVYSNSVNLQGINNRFDPSMEVTGKLIKLNDSKGVDISAIFHCDGLILCTTTESTGLVVWNPCTGEIRCIKPRIFYRCNDRYALGYGNSKSSCHSYKILRSCCYYVDQNLSLMAAEFEIYDFSTDSWRDLGDITRDMIVYSSGVSLKGNTYWVSGSKEKGFFMRYFDFSKEVFGRLPLPYQSFNANHTAALSAVGNEKIAVLQQKILAMSDEMRIWVTNKIDEAKDLSWSNFLLTVDYGKFNLPCLVNVTSFLLDEENKVAVCSDVDTKDGLRSRIYIVGKDFYKEVFKDTRGSDNNWPLLLCYVPSLVSIQENIPNKAEENEIKGATSSVTMRKKMMISDLPHDLESEILSRVPAKSLAKWKTTCKRWYALFRDPSFVKKNFDKAGGREMIVLMNSRVYSNSVNLQGINNRFDPSMEVTGKLIKLNDIKRCRYFCYLSLRRFDIMHYDGKHWTCGLEPVYR

SEQ ID NO: 14520 - protein, 310 aa, Thermoplasma volcanium GSS1
MDRKELLSKPVQDLRIDGNTTLSNLMAQFSNIGGFTAAKLYEAHSIISDMFLEDNTTFLSFPADIISTGLRGLINDVVKRKLVDVIITTSGTLDHDIARTFGKYYCGSFNYSDVELREININRLGNVLVPDESYGELIEEKVMEQLEKLYSIKKEWATVDLIKEIGLSINNESSILYNAAKNDIPIFVPGITDGSFGSQLWSFYEQHHDFKINLLEDEHRLSDIIFDAKKTGAIMVGGGISKHHTIWWNQFRDGLDYAVYITTAQEYDGSLSGAKLEEAISWKKVRPNARFVNIYGDATVIMPILMAPFL

SEQ ID NO: 14521 - protein, 478 aa, Solibacter usitatus Ellin6076
MLHYDNFINGKFTPSTGTERITCLNPSTGEPICTVPESTAADMDAAIAAAATAQKAWGKRPAIQRAQALRAIAAKIREQVEPLARLITEEQGKTLGLARVEVAFTADYMDYMAEWARRIEGEILESDRPGETILLFRQPIGVIGGILPWNFPFFLIARKAAPALVTGNTIVIKPSEETPHNAVKFCELLAQTDLPPGVINIVHGRGAGAGKTLCASPKIGMISFTGSVETGSAIMAAAAPNITKLNLELGGKAPAIVMADADLDLAVNAVTSSRVINSGQVCNCAERIYVQSKVAAEFTDKLAAAMKSSVCGNPLGEAEVAYGPLINQAGYKKVDALVRGAVAAGATLVTGGNRLPLEGGYYYEPTVLSGCTQGMEIVRREIFGPVVPIVQFDDLDQAIDFANDSDYGLTSSIYTRDLNTALRACQEIHFGETYINRENFEAMQGFHAGWRKSGVGGADGKHGLYEFTQTHVVYMQRA

SEQ ID NO: 14522 - protein, 287 aa, Cryptococcus neoformans var. neoformans JEC21
MSKAVLAAAEKTKSKDKAGPSEGVKPRKDKVLMLSSRGVTQRMRHLMRDLEALLPHVKRDSKLDTKSSLHLLNELADLHSCSNTLYFEARRHEDLYLWLSRSPNGPSVKCHVQNLHTMDELKMTGNCLKGSRGLVCFDGSWEGEHWSLMKEMFTHAFSVPKTSRKLKPFIDHILLFSLLDNKIWFRNYQIIEKDPLTPSGPPQSSLVEIGPRFVLTPIKIFEGSFGGPTLFSNSEFITPAAMRASVKRIAGEKYRVRKEGEKDREERRKRVREDVEEDELARKKVFA

SEQ ID NO: 14523 - protein, 221 aa, Tropheryma whipplei str. Twist
MDNLVLLRHGNSLWNQENLFTGWVDVRLSELGEKEAKTAGQLLREANRYPDVLFTSLLTRSIQTAHIALMEIDRVWLPTFRSWRLNERHYGSLQGKNKAQVLEEFGEEQFNSWRRGYDTPPPPLHSQADDPRYEEPPPLSESLKDVQNRLLPYWQGVILPHLVAGKVVLVVAHGNSLRALVKHLECISDTDVCQLNIPTGIPLVYSIDPSGCATHPGRYLP

SEQ ID NO: 14524 - protein, 405 aa, Photobacterium profundum SS9
MTFVDNISHAVETLVQSSDTLFILLGAIMVLAMHAGFAFLEVGTVRQKNQVNALVKIIADFGFSAIAYFFIGYWVAYDVTFFSSAEQLSAINGYELVKFFFLMTFAAAIPAIISGGVAERARFYPMLVASFFIVAFVYPFFEGIMWNGNYGFQNWLTETFGFGFHDFAGSVVVHAVGGWIALVAVAMLGIRNGRYRGGRLIAFAPSNIPFLALGAWILTIGWFGFNVMSAQTMGSISGLVAVNTLMAMVGGILTSLFVGKNDPGFIHNGPLAGLVAVCAGSDLMHPIGALVTGAIAGALFVWLFTYIQNRLHLDDVLGVWPLHGVCGAWGGIAAGIFGSEAFGGLGGVSLASQVIGTLAGIAIAVIGAFIVYGIIKKTVGLRLTDEDEYKGADLAIHKIGSVSDD

SEQ ID NO: 14525 - protein, 479 aa, Synechococcus sp. WH 8102
MTSTSTRDLVSQPYKYGFVTEIETDKIAKGLSEDVVRLISAKKEEPAFLLEFRLKAFRHWLTLEEPDWAALGYPLIDYQDIVYYSAPKQQDKKSSLDEVDPRLLETFDKLGIPLSEQKRLSNVAVDAVFDSVSIATTYKEKLAEHGVVFCSFSEAVKEHPELIERYLGSVVASNDNCFAALNSAVFSDGSFVFIPKGVECPMELSTYFRINSGDTGQFERTLIVAEEGASVSYLEGCTAPMFDTNQLHAAVVELVALDDASIKYSTVQNWYAGDEDGVGGIYNFVTKRGQCRGARSRISWTQVETGSAITWKYPSCVLQGADSVGEFYSVALTNNRQQADTGTKMVHVGPRTRSTIVSKGISAGHSSNSYRGLVQMGPAAKGARNYSQCDSMLIGDQAAANTYPYIRSQQPQAAIEHEASTCRISEDQLFYLQSRGIGFEEAVSMMVSGFCRDVFNQLPMEFAAEADKLLALKLEGSVG

SEQ ID NO: 14526 - protein, 159 aa, Arabidopsis thaliana
MGKARTVGVGMDYSPTSKLALRWAAENLLEDGDTVILIHVQPQNAYHTRKILFEETGSPLIPLEEFREVNLSKQYGLAYDPEVLDVLDTLSRAKKVKVVAKVYWGDPREKLCDAVENLKLDSIVLGSRGLGSLKRILLGSVSNHVVTNATCPVTVVKAN

SEQ ID NO: 14527 - protein, 261 aa, Escherichia coli
MSESLHLTRNGSILEITLDRPKANAIDAKTSFEMGEVFLNFRDDPQLRVAIITGAGEKFFSAGWDLKAAAEGEAPDADFGPGGFAGLTEIFNLDKPVIAAVNGYAFGGGFELALAADFIVCADNASFALPEAKLGIVPDSGGVLRLPKILPPAIVNEMVMTGRRMGAEEALRWGIVNRVVSQAELMDNARELAQQLVNSAPLAIAALKEIYRTTSEMPVEEAYRYIRSGVLKHYPSVLHSEDAIEGPLAFAEKRDPVWKGR

SEQ ID NO: 14528 - protein, 319 aa, Candidatus Kuenenia stuttgartiensis
MFALPKGKPIIVGSRGSKLALTQTNWVISELKKLNPGVEFEIKKISTSGDKITDVPLSRLGGVGVFTKELEVALIKEKIDLAVHSAKDIPTEVSEKLTLGAMPKRVDPSDVLISAKNVTLERLPGNARIGTSSLRRKAQLLALRPDFEIVDLRGNLDTRLKKLEADDLDGIIVAHAGLIRIGYTGQISEIIPFEIMLPAVGQGSLGIEIRKDDERINKILSKMDDLHTRIAVEAERALLAKLQGGCQVPIGAHAKVLNDEVHLEAVICTLDGERTIRDSHKGPANQAAAVGNELAQRMLDNGGDKILQEIRQNFPKQMP

SEQ ID NO: 14529 - protein, 181 aa, Ashbya gossypii ATCC 10895
MRQLTEEETKVVFEKLAGYIGRNISYLVDNKEQPHVFRLQKDRVYYMPEHIAKLATCVARPNLMSLGICLGKFTKTGKFRLHITALTVLAQHAKYKVWIKPNGEMPFLYGNHVLKAHVGKMSDDIPEHSGVIVFSMHDVPLGFGVSAKSTSEARDLQPMGIVAFRQADIGEYLRDEDTLFT

SEQ ID NO: 14530 - protein, 738 aa, Prunus persica
MEACNCIEPQWPADELLMKYQYISDFFIALAYFSIPLELIYFVKKSAVFPYRWVLVQFGAFIVLCGATHLINLWTFSMHSRTVAIVMTTAKVLTAVVSCATALMLVHIIPDLLSVKTRELFLKNKAAELDREMGLIRTQEETGRHVRMLTHEIRSTLDRHTILKTTLVELGRTLALEECALWMPTRTGLELQLSYTLRQQNPVGYTVPIHLPVINQVFSSNRALKISPNSPVARMRPLAGKHMPGEVVAVRVPLLHLSNFQINDWPELSTKRYALMVLMLPSDSARQWHVHELELVEVVADQVAVALSHAAILEESMRARDLLMEQNIALDLARREAETAIRARNDFLAVMNHEMRTPMHAIIALSSLLQETELTPEQRLMVETILKSSHLLATLINDVLDLSRLEDGSLQLEIATFNLHSVFREVHNLIKPVASVKKLSVSLNLAADLPVQAVGDEKRLMQIVLNVVGNAVKFSKEGSISITAFVAKSESLRDFRAPEFFPAQSDNHFYLRVQVKDSGSGINPQDIPKLFTKFAQTQSLATRNSGGSGLGLAICKRFVNLMEGHIWIESEGPGKGCTAIFIVKLGFAERSNESKLPFLTKVQANHVQTNFPGLKVLVMDDNGSVTKGLLVHLGCDVTTVSSIDEFLHVISQEHKVVFMDVCMPGIDGYELAVRIHEKFTKRHERPVLVALTGNIDKMTKENCMRVGMDGVILKPVSVDKMRSVLSELLEHRVLFEAM

SEQ ID NO: 14531 - protein, 167 aa, Momordica charantia
MAEESPKSIYDFTVKDIRGNDVCLSQYSGKVLLIVNVASKCGFTDSNYKELNVLYDKYKSQGFEILAFPCNQFARQEPGTNEEIQETLCTRFKAEFPIFDKVEVNGKNAAPIYKFLKLKKGGIFGDGIKWNFTKFLVNREGKVVDRYAPTTPPLNIEKDIQNLLGSA

SEQ ID NO: 14532 - protein, 269 aa, Triticum aestivum
  misc_feature (202)..(202): Xaa can be any naturally occurring amino acid
  misc_feature (215)..(215): Xaa can be any naturally occurring amino acid
MTLGLFRCSIEQVCTKKHAGTGPEFPGYRRPTRPMTSPIHALLIPSEDAHQSEYVSERDKRRQFISGFTGSAGLALITTKEALLWTDGRYFLQATNQLSDRWRLMRMGEDPPVEVWIADNLSDEAVIGIDSWCISVDSAQRYEQAFLKKNQTLFQLSSDLVDEVWKDRPPNDATPVIVHPVEFAGRSVAQKMKELREKLQHXKASGIIITAPDEXVVWLATARANALHYPPKRPLHWHPPPRKPPSLSQGLPNTTPPHVPNSTDPKLHS

SEQ ID NO: 14533 - protein, 407 aa, Haemophilus somnus 2336
MSNFDIITPDLPESVADATVVTWHKNVGDAVKCDEVLVEIETDKIVLEIPALSDGVLETILQPEGSTVVSKQLLGKVSASAGIGEVTKSTVQNVEKTPADRHSANLNTDASSDVLSPAVRRLLAEHELNADEIKGTGVGGRITREDIALVVKQKAQQTETAQASQSIVTGLKIDHRNEKRVPMTRLRKRIAERLLEAKNTTAMLTTFNEVDMQPIMNLRKRYAEKFEKQHGARLGFMSFYIKAVVEALKRYPEINASIDGDDIVYHNYFDISIAVSTPRGLVTPVVRNCDKLSMADIEKEIKLLAEKGRDGKLTVEDLTGGNFTITNGGVFGSLMSTPIINPPQSAILGMHAIKDRPVAVNGEVVIRPMMYLALSYDHRLIDGRESVGFLVTVKDLLEDPTRLLLEI

SEQ ID NO: 14534 - protein, 536 aa, Zea mays
  misc_feature (101)..(101): Xaa can be any naturally occurring amino acid
  misc_feature (406)..(406): Xaa can be any naturally occurring amino acid
MMAAVLKTSGSFCSTQQQHFQQSRRDQFLHGSYSYFKHCKSKKIIKPAPLCARVTSSKVELDVKDPYWKQKFQEDWENRFDLPSITDIYDLKPRPVQHHLXCPSRTLTGDENVDMWNGYVNNDDRALLKVIKYSSPTSAGAECVDLDCSWVEQWVHRAGPRKEIYYEPEEVKAAIVTCGGLCPGLNDVIRQIVFTLETYGVKNIVGIPFGYRGFFEKGLKEMPLSRGLVENINLNGGSFLGVSRGGAKTSEIVDSIQARRIDMLFVLGGNGTHAGANAIHEECRKRKLKVSVVAVPKTIDNDILLMDKTFGFDTAVEEAQRAINSAYIEARSAYHGIGLVKLMGRSSGFIAMHASLSSGQVDVCLIPEVPFTLDGEFGVLRQLEHLLKSKGFCVVCVAEAAGQVCXIHSCLDLLQESGATDASGNVILSDIGVHMQQKIKMHFKDIGVPADVKYIDPTYMVRACRANASDAILCTVLGQNAVHGAFAGFSGITSCICNTHYVYLPITEVITAPKRVNPNSRMWHRCLTSTGQPDFH

SEQ ID NO: 14535 - protein, 475 aa, Bifidobacterium adolescentis
MDLFRKKSVDQLVSESTPLKRTLKTFDLTMLGIGAIIGTGIFVLTGKGALTAGPALCVSFLLAAVCCGFAGLCYAEFAAMAPVSGSAYSYAYLAFGELIAFVIGWDLILEYALQAATVSAGWSGYFNKLLEGFGLHLPVELTAAYGTTPGVTTYFNLPGFVIVLIITWVLSIGINQTKKTNDIMVMIKLAIIVLFIVCTVWYINPANWKPFSPYGIYTFQPGSTQPYGIVPAASIVFFSFIGFDAVSSSAEETINPNKTLPRGILISLAVSTVLYIIMTLIMTGVVPYKEFAKFIDAPVAGVILETGLNWLAFIVNLGALIGMTTVMLVQLYGQSRICYAMSRDGLFPKFFGEVHPKYRTPFKGTWFFGILTAIAGGFININVLFELVNIGTLSAFIIVSAGILWMRKTQPDAHRGFRAPGVPFTPICAIIFCLILIFGLNWETWVRFAVWFALGLVVYFTYSRKHSQLNEPGLF

SEQ ID NO: 14536 - protein, 316 aa, Prochlorococcus marinus str. MIT 9312
MTNFKLKIASRRSKLAMVQTLWVKDQLEKNIPNLEVSIEAMATQGDKILDVALAKIGDKGLFTKELEAQMLVGQADIAVHSLKDLPTNLPSGLKLGCITKREDPADALVVSKKNDCYKLETLPAGSIVGTSSLRRLAQLRNKYPHLNFKDIRGNVITRIEKLDAGEFDCIILAAAGLKRLGFESRIHQIIPNEISLHAVGQGALGIECKSDDKKVLEIISVLEDKPTSQRCLAERAFLRELEGGCQVPIGVNSSIQNEQLYLTGMVASLDGERLIKDQYIGNIDDPEQVGKELAKKLKLQGADKILSEIFEQFREN

SEQ ID NO: 14537 - protein, 297 aa, Wolbachia endosymbiont of Wuchereria bancrofti
GLGAGALPDVGKGAAEESINEIMEHIKDSHMLFITAGMGGGTGTGAAPVIAKATREARAGVKDKASKEKKILTVGVVTKPFGFEGVRRMRIAELGLEELQKYVDTLIVIPNQNLFRVANEKTTFSDAFKLADNVLHIGIRGVTDLMVMPGLINLDFADIETVMSEMGKAMIGTGEAEGEDRAISAAEAAISNPLLDNVSMKGAQGILINITGGGDMTLFEVDAAANRVREEVDENANIIFGATFDQAMEGRVRVSVLATGIDCSVTRDNKQETSSVNQDETSEEKKFEWSYSQTLLP

SEQ ID NO: 14538 - protein, 318 aa, Wolbachia endosymbiont of Litomosoides sigmodontis
HVVANTDAQALEKSLCNKKIQLGINLTKGLGAGALPNVGKGAAEESIDEIMEHIKDSHMLFITAGMGGGTGTGAAPVIAKAARETGAAIKDKASKKKILTVGVVTKPFDFEGVRRMRIAELGLEELQKCVDTLIVIPNQNLFRVANEKTTFSDAFKLADNVLHIGIRGVTDLMVMPGLINLDFADIETVMSEMGKAMIGTGEAGGEDRAVSAAEAAISNPLLDNVSMKGAQGILINITGGADMTLFEVDAAANRVREEVDENANIIFGATFDQAMEGRVRVSVLATGIDYSVTYNDKTEALSTNQDLTSEEEKFEWSY

SEQ ID NO: 14539 - protein, 396 aa, Geobacter sulfurreducens PCA
MAKAKFERTKPHVNIGTIGHVDHGKTTLTAAITKVLAERGQAEFRGFDQIDNAPEERERGITIATSHVEYETEKRHYAHVDCPGHADYVKNMITGAAQMDGAILVVSAADGPMPQTREHILLARQVGVPYIVVFLNKADMVDDEELLELVELEIRELLSSYDFPGDDIPIIKGSALKGLNGDKDELGEEAILKLMEAVDNYIPEPERAVDKPFLMPVEDVFSISGRGTVATGRVERGIVKVGEEVEIVGIKATAKTTVTGVEMFRKLLDEGRAGDNIGALLRGVKREDIERGQVLAKPGSITPHTKFKAEAYILTKEEGGRHTPFFNGYRPQFYFRTTDVTGVVDLPAGTEMVMPGDNVAVTINLITPIAMDEGLRFAIREGGRTVGAGVVSSIIE

SEQ ID NO: 14540 - protein, 982 aa, Bordetella parapertussis
MAAYNAPVSNCQFRLTHILPIPQRQGAPTDPFQMNAIRQQSDSAEPLRHDIRLLGRCLGEVIQACEGKRVYDTIETLRRTAVRFRRAGDPADDKLLQARVKQLRGNDPNSVARAFSYFLHLSNIAEDRDQNRRQRDRALAGAGPERGSLRQAIESLKAQGVNNARIRRLLSEACVMPVLTAHPTEVQRKSTLDVHREISSLLVQRERELTADELSELDLALIGQVATLWQTRMLRYTRLTVADEIENALSYYRSTFLNVIPRVYGDLARLLNREPVKPFTPPPPPLEPFLRMGSWIGGDRDGNPNVDAATLERALLRQATVLFEHYLQEVHALGAELSASTLLIEADPALLALADAGGDDSPHRRDEPYRRALIGIYARLAATARHLTGQELARRATVPAAPYDTPDALAADLAVIAASLSAHHGAPIARLRLSGLQQAVTVFGFHLATVDLRQSSDVHERVLAELFARAGDGIDGQAVDYLALDEAARVAVLRRELAHARPLASPWIAYSEETASELAVLRAAAAGRARYGRQAVLQSIVSHTETLSDLLEVLVLQKEAGLIAPPGETIAPGDGLMVVPLFETIPDLQRGPEIMAAWLDLPEVRQRVRLAQGDTQEVMLGYSDSNKDGGFLTSNWSLYQAERALVDVFSARSVRLRMFHGRGGSVGRGGGSSYDAILAQPPGTVAGQLRLTEQGEVIQSKYKDAEVGRWHLELLVAATLESSLAPQAAATSAEDAHMQQHAPAMSFMSELAQRTYRGLVYDTPGFADYFFAATPISEIAGLNIGSRPASRKKGQHIEDLRAIPWGFSWAQCRLMLTGWYGMGSAIEAYLETGAQGAPRSRRARLAQLREMASDWPAFRTLLSNMEMVLAKSDLAIAAGYAQLVPRRGLRERVFGAITAEHGRTLAMLRLLTRRELLADNPGLMASLRERFAYIDPLNYLQIELIKRHRAAQRRAGDDADIRVPRAIHLTINGIAAGLRNSD

SEQ ID NO: 14541 - protein, 191 aa, Triticum aestivum
  misc_feature (120)..(120): Xaa can be any naturally occurring amino acid
  misc_feature (129)..(129): Xaa can be any naturally occurring amino acid
  misc_feature (142)..(142): Xaa can be any naturally occurring amino acid
SIVFQEPRFVEYFRSATPETEYGRMNIGSRPSKRKPSGGIESLRAIPWIFAWTQTRFHLPVWLGFGAAIKHIMQKDIRNIHILREMYNEWPFFRVTLDLLEMVFAKGDPGIAAVYDKLLXVADDLQSFXGEQLRKNYEETKXLPLQVAGHKDFLEGDPYLNSRCVIHHPLQAPERYRPTQVTQRPSRRQPL

SEQ ID NO: 14542 - protein, 348 aa, Wolbachia endosymbiont of Brugia malayi
VVANTDAQALEKSLCDKKVQLGINLTKGLGAGALPDVGKGAAEESIDEIMEHIKDSHMLFITAGMGGGTGTGAAPVIAKATREARAGVKDKASKEKKILTVGVVTKPFGFEGVRRMRIAELGLEELQKYVDTLIVIPNQNLFRVANEKTTFSDAFKLADNVLHIGIRGVTDLMVMPGLINLDFADIETVMSEMGKAMIGTGEAEGEDRAISAAEAAISNPLLDNVSMKGAQGILINITGGGDMTLFEVDAAANRVREEVDENANIIFGATFDQAMEGRVRVSVLATGIDCSVTHDNKQETSSVNQDETSEEKKFEWSYSQTLLPEAKQAEQVSEGVKWSSNIYDIPAY

SEQ ID NO: 14543 - protein, 250 aa, Kineococcus radiotolerans SRS30216
MTEAAHTLVLLRHGESEWNALNLFTGWVDVALSEKGRAEAAAGGRMLVENGVLPDVVHTSVLRRAITTAFLALDAADRHWIDVKRSWRLNERHYGALQGKDKKQTLAEFGEEQFMLWRRSYDTPPPAIEAGSEFSQDGDPRYAGLGDDMPATECLADVVARMLPYWTESVVPDLRAGRTVLLAAHGNSLRALVKHLDGVSDADIAGLNIPTGIPLVYRLDADLKPLVPGGEYLDPAAAAAAAAAVANQGR

SEQ ID NO: 14544 - protein, 796 aa, Parvularcula bermudensis HTCC2503
MGSRQNKPGQRGIGARIALLTMSIVAVVLCLVVVGLLVYEGTSFRRDLLRERMDLARVTAANVSAAVLFDDRATINENLSALSQLPDLMAAKVWSVRGEPLGGYIEQTDTAIKPLTRGTTPVSIVSWEQVTVQVPISVDQEIIGYVQLVSSLDRLGFTVKRYLQIVGAVSLVGMAGAFILARLTAQGLIQPIHSLIMTMQQVQRDRNYRLRVEGLSNDESGQLAAAFNDMLDEIQRRDENLEKTVEERTADLEEAVTKAEAASLAKSAFLANMSHEIRTPMNGVLGMAELLMSTELDTYQRELIGTIMSSGTSLVTIINDILDFSKIEAGKFSLNEEPFNLREGIENVATLMAGRAAEKDLELFVRYDPSLPEGVFTDGGRLRQVITNLVGNAIKFTDEGQVLIDVTGAQSGETVDLRISVTDTGIGIPPEKLEAIFEKFEQADNTSSRMYEGTGLGLAICKTIIELMGGKIGVTSELGRGATFFIDINYKIDDRASLRPTIDTAELAGARIAIVDDNATNLRILSEQLAAWNTEIFAFSSGKEIFQWLDSRGEGEALPDVIITDYQMPEMNGIELGLGIRARTGFPPIPIIMLSSVCAPKEEGSKSLPLSAWLVKPIRSLQLAEYVFEAKMKTGRFGDVEALAEAKADRSISASSDPDAICETILVVDDNLVNQLVITNMLKGWATEILTASNGEDAIEKFSAYSPDIIFMDVSMPVMDGLEATRRIRGMEADQNLPTTPIVGATAHAMDEDRQRCLKAGMVDVLTKPVRKESVDGMVLKWAASSPQSKLASSSA

SEQ ID NO: 14545 - protein, 673 aa, Arabidopsis thaliana
MSTNSASDGDFGTNSVPAEMAEAQYVRAKTSVWWDIENCQVPNGLDAHGIAQNITSALQKMNYCGPVSISAYGDTNRIPLTIQHALNSTGIALNHVPAGVKDASDKKILVDMLFWALDNPAPANFMLISGDRDFSNALHGLRMRRYNVLLAQPLKASVPLVHAAKTVWLWTSLSAGGIPLTRAESLQLVANQTTPKPGSEIPSSQPLDSNSDSRRVFDNKSKVKYVPKPSNHQPNNNYRQQQQNTQGKQFKKAPHEFFGTSEPSVSTSRPPPPNLPSSNVNTFPGNVMTNPQNQNQYTYPPRPGPFPPRQPYPNTDPSWNNGNSIPNHAQNYYPNAARPGAATMRPPYGNVFRPYRPENLNPPVGNGFRPMQHPRNDGPRFPSPPLLTPLDISNLSVSQYPSQTQNRPNFNPQVRQEFRPKMESSYTHNGPNKSYIPRCSSAPVTQSTTTTAHTYPSSPGVPPSQPPMVTGSGSSNDRWGTQECPPPSEYVQGLIGVILHALHILKTEKVMPTEPNISDCIQYGDPKHHGTDVKKALESALEHHMIMMTNVGKLKLYIGKNEALWNCVNPLGANAKQYPKETWDRIQQFLTSSSGRVEFTATTCRDDAGDGQRKECLKEFTLGDILQILNITATTKKWITHHQTGWKPITISLAAETTNETATEADPGIQTVA

SEQ ID NO: 14546 - protein, 112 aa, Pasteurella multocida subsp. multocida str. Pm70
MKKIEAIIKPFKLDDVRESLSDVGITGMTVTEVRGFGRQKGHTELYRGAEYMVDFLPKVKMEIVVTDEQVDQCIEAIMETAQTGKIGDGKIFVYDVERVIRIRTGEENEDAI

SEQ ID NO: 14547 - protein, 453 aa, Schizosaccharomyces pombe
MLRLQNLPKLVRRFATTALPKTETTTLKNGLTVATEHHPYAQTATVLVGVDAGSRAETAKNNGAAHFLEHLAFKGTKNRSQKALELEFGNTGAHLNAYTSREQTVYYAHAPQNAVPHAVAVLADILTNSSISASAVERERQVILREQEEVDKMADEVVFDHLHATAYQGHPLGRTILGPKENIESLTREDLLQYIKDNYRSDRMIISSAGSISHEELVKLAEKYFGHLEPSAEQLSLGAPRGLKPRFVGSEIRARDDDSPTANIAIAVEGMSWKHPDYFTALVMQAIIGNWDRAMGASPHLSSRLSTIVQQHQLANSFMSFSTSYSDTGLWGIYLVTENLGRIDDLVHFTLQNWARLTVATRAEVERAKAQLRASLLLSLDSTTAIAEDIGRQLLTTGRRMSPQEVDLRIGQITEKDVARVASEMIWDKDIAVSAVGSIEGLLDYTVFVAVFL

SEQ ID NO: 14548 - protein, 233 aa, Arabidopsis thaliana
MAFSYASFSTPFNGFAANPSPITSAFLGPSLRFSTRTSKTRNPSNGVSVKSSNSHRFLVKSKNFSVYARAAAEKSVHDFTVKDIDGNDVSLDKFKGKPLLIVNVASRCGLTSSNYSELSQLYEKYKNQGFEILAFPCNQFGGQEPGSNPEIKQFACTRFKAEFPIFDKVDVNGPSTAPIYKFLKSNAGGFLGDIIKWNFEKFLVDKKGKVVERYPPTTSPFQIEKDIQKLLAA

SEQ ID NO: 14549 - protein, 447 aa, Schizosaccharomyces pombe
MSTPYEPEFQQAYKEIVGSIESSKLFEVHPELKRVLPIISIPERVLEFRVTWEDDKGNCRVNTGYRVQFNSALGPYKGGLRFHPSVNLSILKFLGFEQIFKNALTGLPMGGGKGGSDFDPKGKSDNEIRRFSQAFMRQLFRYIGPQTDVPAGDIGVTGFVVMHMFGEYKRLRNEYSGVVTGKHMLTGGSNIRPEATGYGVVYYVKHMIEHRTKGAETLKGKRVAISGSGNVAQYAALKCIQEGAIVKSISDSKGVLIAKTAEGLVPEEIHEIMALKEKRASIADSASLCKKHHYIAGARPWTNVGEIDIALPCATQNEVSGEEAAALIKQGCRYVAEGSNMGSSAEAVEVFEKSRASGEGCWLAPGKAANAGGVAVSGLEMAQNAQFSTWTHAEVDAKLAGIMQNIFEQSTDVASKYCDSGSNNIPSLVDGANIAGFLKVATAMQAV

SEQ ID NO: 14550 - protein, 319 aa, Prunus mume
MENFPIINLEGLNGEGRKATMEKIKDACENWGFFELVSHGIPTEFLDTVERLTKEHYRQCLEQRFKELVASKGLEAVKTEVNDMDWESTFYLRHLPKSNISEVPDLEDQYRNVMKEFALKLEKLAEQLLDLLCENLGLEKGYLKKAFYGTNGPTFGTKVSNYPPCPNPELIKGLRAHTDAGGLILLFQDDKVSGLQLLKDGQWIDVPPMRHSIVINLGDQLEVITNGKYRSVEHRVIAQTDGTRMSIASFYNPGSDAVIYPAPTLVEKEAEEKNQVYPKFVFEDYMKLYAGLKFQPKEPRFEAMKAVETNISLVPIATA

SEQ ID NO: 14551 - protein, 382 aa, Azotobacter chroococcum (strain mcd 1)
MASVIIDDTTLRDGEQSAGVAFNADEKIAIRRALAELGVPELEIGIPSMGEEEREVMRAIAGLGLSSRLLAWCRLCDFDLSAARSTGVTMVDLSLPISDLMLRHKLNRDRDWALGEVARLVSEARMAGLEVCLGCEDASRADQDFIVRVGAVAQAARPPPAFADTVGVMEPFGMLDRFRFLRQRLDVELEVHAHDDFGLATANTLAAVMGGATHINTTVNGLGERAANAALEECVLALKNLHGIDTGIDTRGIPAISALVERASGRQWPGRRAWLAPVFTHEAGIHVDGLLKHRRNYEGLNPDELGRSHSLVLGKHSGAHMVRNSYRELGIELADWQSQALLGRIRAFSTRTKRSPQAAELEDFYRQLCEQGTAELAAGGMA

SEQ ID NO: 14552 - protein, 226 aa, Yarrowia lipolytica CLIB122
MPRPRREMTPDEEYSRKLSYILRHGATKEKLPIREDGYLSVGVLLNRAGIKGKWNLEDTKRVVRDNDKQRYKLIFEPTEKQPKEPTDPNDCTGYWIRANQGHTINTKVEMKALKTPEDFPTLEIFHATSKQVLPIVLKEGLSKMKRQHIHLATDLVTEGGSVAGKRLNREVFIYINVPKALEAGIEFFLSENGVVLTEGKDGKISREFFSKILDKNNQPVDLEALA

SEQ ID NO: 14553 - protein, 450 aa, Hebeloma cylindrosporum
MVKPFEPEFQQALDELTTSLQPFLDANPQYKKALEIVQVPERVLQFRVVWEDDQGVAQVNHGFRVQYNSALGPYKGGLRLHPSVNLSILKFLGFEQTFKNALTGLSMGGGKGGSDFDPKGKSDSEIRRFCFSFMGELFRHIGSDTDVPAGDIGTGGREIGFLFGAYKKLRNEFTGMLTGKGLTWGGSFIRPEATGYGLIYFVEHMIAKACPEYSLDKPSTLVAISGSGNVAQFTALKVIELGATVLSLSDSKGSLISDKGYTKEFIRKVADLKLKGGSLASLANEEGYTYHAGARPWTLIPTIHIALPGATQNEVSAEEAEALLKAGVRIVAEGSNMGCTADAIDIFESSRKAGPGGVWYAPGKASNCGGVAVSGLEMAQNSQRLAWTTQEVDSKLKDIMAECYGICLTAGTKWSGEELTDEVLPSLLSGANVAGFIKVADAMKAQGDWW

SEQ ID NO: 14554 - protein, 385 aa, Azotobacter vinelandii
MASVIIDDTTLRDGEQSAGVAFNADEKIAIARALAELGVPELEIGIPSMGEEEREVMHAIAGLGLSSRLLAWCRLCDVDLAAARSTGVTMVDLSLPVSDLMLHHKLNRDRDWALREVARLVGEARMAGLEVCLGCEDASRADLEFVVQVGEVAQAAGARRLRFADTVGVMEPFGMLDRFRFLSRRLDMELEVHAHDDFGLATANTLAAVMGGATHINTTVNGLGERAGNAALEECVLALKNLHGIDTGIDTRGIPAISALVERASGRQVAWQKSVVGAGVFTHEAGIHVDGLLKHRRNYEGLNPDELGRSHSLVLGKHSGAHMVRNTYRDLGIELADWQSQALLGRIRAFSTRTKRRSPQPAELQDFYRQLCEQGNPELAAGGMA

SEQ ID NO: 14555 - protein, 451 aa, Thermus thermophilus HB8
MPKEILMPELAESVVEGEILKWLVEEGDYLKKDQPFVEVMTDKVTVELPSPYEGVLLKKLAKEGEVVKVHAPIALIAEPGEAVEGVKEAPPVQAVEERSIVEPGLPAKEEKEDLSLFKPDPTQVAVKNPFLSGEKPQEGARPGRVLAVPAARKLARELGIPIEEVPGSGPLGRVRVEDVRAYAERRKAPPERPEEGPQVLPAGFPPPPKYAPPKGYEHLEERVPLRGIRRTIAQGLWQSHLYTVRTLNVDEADLTELVRLRERLKPQAEAQGVKLTYLPFIVKAVVRALKKFPMLNTSLDEERQEIVYKRYYHIGLAVATERGLIVPVVRDADRKSVLELAQEIAELSQKAREGRLAPEEVTGSTFTITNIGSVGATLSFPIIHLPDAAILGVHSIRKRPWVMPDGSIRPRDIMFLSLSFDHRLVDGAEAAMFTREVIRLLENPDLLLLEM

SEQ ID NO: 14556 - protein, 282 aa, Glycine max
MASSLTTTLSQSQSLYIKPRLAPRPPHPQFRSLFLTSPAVAGGVRAAVMPRRTAVIVSAATAETPKKKGESKGFVEEMRFVAMRLHTRDQAREGEKEVKQPEEKAVTKWNPSVEGYLKFLVDSKLVYDTLEKIVHEAPHPFYAEFRNTGLERSASLVEDLDWFKEQGYTIPEPSSPGLTYAQYLKELSVKDPQAFICHFYNIYFAHSAGGRMIGKKVAEKLLNNKALEFYKWDGDLPQLLQNVRDKLNKVAEPWTREEKDHCLEETEKSFKLSGEILRLILS

SEQ ID NO: 14557 - protein, 391 aa, Methanocaldococcus jannaschii
MFEVKHMDGIDVFFFMWAASLIFFMKAGFIALEIGQFRAKNVSYHCVLKLLDLAAVFIAYLFIGYGISYGFENIMPLITGTFDADLGAWWMKMVMFAAAAVTIITGGVAERIKILPYFIGALIVGGILYPIVEHLVWGGGFANLGINFHDYAGSGAVHLFGGLVGLMAAYVLGPRIDKYINGKPQAIPGHNIPIAVLGAFILAFGWYGFNIGSASGIANGVELASVAMATTMALAGGIIGGALSSRNDPLYTANGMCAGLVAVCSGVDLFTPIGAFIVGLLAGIQQPFTYKFIEEKLKIDDVCAIGPVHAMSGLIGVICAGIPFLLKADAVSKVSITGQIIGAIVIALIAIVGGLIIYKGLDLTIGLRVSEEAEKVGLDTAILQTTAYSEE

SEQ ID NO: 14558 - protein, 420 aa, Methanocaldococcus jannaschii
MWGENIATADLFANATDIHSIVQALTTLANASDVFFLVVMGVLVFMMQWGFAMLEGGQVRKKNVNNVMMKNMVDWLIGCVAWLFIGGILCSKGFDLSAFIDWWKQILGTNWPNNGLDLASWFFGLVFCATAATIVSGGVAERIKFSAYVLISLIITGLLYPLFVYLGPWGASIVPWHDYAGSLVVHGLGGFLALGAIAALGPRIGRFVDGRPVPILGHNIPMAVFGAFALAIGWYGFNVGSSLALGDISGLVCATTTMAMAGGGIGALIASRNDVLFTANGIVAGLVAICSGTDVVSPIGGLIIGLIAGLQVPIVYKLVEKAGLDDVCGVVPVHGTAGVIGAILTGILGLKIFGGAGGVSLIDQIIGAVFCIIYGTGLGYILAKIVGIALGGLRVSEEEEKMGLDMAEHKMPAYPEETVI

SEQ ID NO: 14559 - protein, 481 aa, Leifsonia xyli subsp. xyli str. CTCB07
MSLQRPRTAPEGETLSSTSAPSTPRNGTLKRTLGLWAIVGLGLGYMTPTVVFDTFGMVSRETNDVVPSTYLIALTVMMLTAVSYGKMAGALPSVGSAYTYVRESVHPNVGFMVGWTSLIDYMLLPMVNCLIIRSYLEALFPGVPGWIWVVVYCAVVTSIIFLTMRGTSNLNMLLLVFSIVVIAVFVVLVIAQLAQGEAAGTVASLHPFLHDSVTIGAVLTGATIVCFSFIGFDAVTMYAEEATSPAIMPRAILFTVVTGGAIFLVAAYITQLRFPSSSAFPVEAIEDSTLPQIGFQVGGPVLQAALTAAGFCATLASGLASHASVSRMLLVMGRNNVLPRRLFGHIDPKTHTPTFNIVLVGLISLLAAAFTLKLIAAFINFGALIAFTFVNVSVIAWFAIQKGRRRTAKDIVTFIALPGVGMVLTGVLWANLHVDALVGGLVWAAIGFVYLVVLTRGFRRPVTAFDENQPVTGFNKAIAKD

SEQ ID NO: 14560 - protein, 405 aa, Glycine max
MPMATTHFQGLGVVTPSFSSSHSNKFLLSSRSERKDGIFMVRSDAARVLKTEGRKHELLVTNAVATKGGASSAASTSKSGSGHELLLFEALREGLEEEMERDPCVCVMGEDVGHYGGSYKVTKGLAPKFGDLRVLDTPIAENAFTGMGIGAAMTGLRPVVEGMNMGFLLLAFNQISNNCGMLHYTSGGQFKIPIVIRGPGGVGRQLGAEHSQRLESYFQSIPGIQMVACSTPYNAKGLMKAAIRSENPVILFEHVLLYNLKERIPDEEYVLSLEEAEMVRPGEHVTILTYSRMRYHVMQAAKTLVNKGYDPEVIDIRSLKPFDLHTIGNSVKKTHRVLIVEECMRTGGIGASLTAAITENFHDYLDAPIVCLSSQDVPTPYAGTLEEWTVVQPAQIVTAVEKLCQ

SEQ ID NO: 14561 - protein, 459 aa, Frankia sp. EAN1pec
MVRGIDTGHEKQAAGERTTGDESGVDPRTDPRADTGPVLARTIGTGDAVVIGLGAMLGAGVFAAFAPAARAAGAALLFALATAAIVAYCNATSSARLAALYPQAGGTYVYGRRRLGDFWGYLAGASFITGKTASCAAMALTVGAYTWPGHERLVAGTATAALTAVNYSGMRRAAWLTRLIVVVVLTVLVVVVVVCVTSGAAEPVRLSPTGRDGPAGPASPSLWPGLPQAAGLLFFAFAGYARIATLGEEVRDPRRTIRRAIPTALGITLVVYAAVAVALLLVLPVAALGASAAPLTDAVRAAGMPGLAPVVRVGAAVGALGSLLALILGVSRTTLAMARDGHLPTPLAAVHPRFGVPHRAELTVGAAVTALVLTTDLRGAIGFSSFGVLLYYAVANAAAWTLSPTEGRPVRAVPVVGLLGCLLLAFSLPGTSVLGGSAVLAAAAVVYAARHAGGHPARQ

SEQ ID NO: 14562 - protein, 352 aa, Frankia sp. EAN1pec
MPAHPRRRERQRPVGRGRRRRQRAGGPRLGGDQRAGEPGVDERRRHPRRDRRRAGQVPVVSDRRGRCRARRGRSDRVMRLLDGRSMAADIGRSVVDDVERLATTGVTPTLAVVLPTADEAARSYVRVIERGAAKVGVGCAVHELTGDPDELTATVDRLAADPAVHGMIVQTPLPDGLTAADVGARIPVGKDVDGMNPLSLGRLALGLPAFAPATAAAVLEILNRAAVPLAGARACVIGRSSVVGKPAALLLLAEDATVTVCHSRTKDLATVAHDADIVVAAVGRPKMVGAGHVRPGAVVIDVGTNWTDAGLVGDVDADAVAPVAGALTPVPGGVGPVTTMLLLRNTVRAAGG

SEQ ID NO: 14563 - protein, 399 aa, Bacillus cereus ATCC 14579
MAVEVVMPKLGMAMKEGIITNWNIKAGDNVAKGELIASINSEKIETEIEAPADGTVLDIAVSEDEGVPPGTVICYIGKPNEKVEMQESTHVVEEKTFNIEVQNVQNQEPNGKEVAKQRIKISPVAKKIAKSENLGIKVLVGTGPGGRITKADVLKALEVRGIVPEISEQEESNVIPVTGMRKAIANRMHASLQNSAQLTLTMKVDVTDLVALHKEIAKVVQKRYDNKLTITDFVSRAAVLALGEHKEMNSAYIDDAIHQFEHVHLGMAVALEKGLIVPAIRFANNLSLVELSKEIKNVAQKARAGSLSSDDMHGTTFTISNLGSFGIEYFTPVLNTPETGILGIGAIEHVPVYKGKKLKKGSMLPLSLTFDHRVLDGAPAAAFLRTIKHYLEEPITILL

SEQ ID NO: 14564 - protein, 344 aa, Bacillus cereus ATCC 14579
MTRTVSMSTAINEAMKISMRRDENVILIGEDVAGGAQVDHLQDDEAWGGVLGVTKGLVQEFGRNRILDTPISEAGYMGAAMAAAATGLRPIAELMFNDFIGSCLDQVLNQGAKFRYMFGGKAKVPVTVRTMHGAGFSAAAQHSQSLYALFTSIPGIKVVVPSTPYDAKGLLLAAIEDDDPVIFFEDKTLYNMKGEVPEGYYTIPLGKADIKREGSDVTIVAIGKQVHTALAAAEQLSKKGLEVEVIDPRSLSPLDEDTILASVEKTNRLIVIDEANPRCSIATDIAAIVADKGFDLLDAPIKRITAPHTPVPFSPPLEKLYLPTPEKVIETISEMIGDQSLLHV

SEQ ID NO: 14565 - protein, 394 aa, Campylobacter lari RM2100
MINALGLDKDSSFKAICDGKSGVDKITLFDATDFPVQIAAEVKNFDPLSVCDAKEVKKIDRFIQLGIKAAKEAMEDAKFDETLNKEEFGVVSAAGIGGLPNIEKNSVTCAQRGPRKITPFFIPSALVNMLGGIISIEHGLQGPNISCVTACAAGTHAIGEAYKSIALGNADKMLVVGAEAAICAVGIGGFAAMKALSTRNDDPAKASRPFDKERDGFVMGEGAGALVFEEYEAAKKRGAKIYAELVGFGESADAHHITSPTLEGPLRAMKKALKMAGNPKVDYINAHGTSTPVNDKNETAAIKELFKDQIPLVSSTKGQTGHCLGAAGAIEAVISLMALDQGVLPPTINQIVADENCDLDYIPNTARKSEVNVVMSNSFGFGGTNGCVIFKKVD

SEQ ID NO: 14566 - protein, 459 aa, Streptomyces avermitilis MA-4680
MTSRSSTATARTSSEARAVARTQTLVKGVNGIGTVRKTTLPGGLRIVTETLPSVRSATFGIWAHVGSRDETPTLNGATHYLEHLLFKGTHKRSALDISSALDAVGGEMNAFTAKEYTCYYARVLDTDLPLAIDVVCDMLTGSLILEEDVNVERGAILEEIAMTEDDPGDCVHDLFAHTMLGDTPLGRPVLGTVDTVNALTADRIRRFYKKHYDPTHLVVACAGNVDHNKVVRQVRAAFEKAGALKQPDATPIAPRDGRRAIRTAGRVELLGRKTEQAHVVLGMPGLARTDERRWALGVLNTALGGGMSSRLFQEVREKRGLAYSVYSYTSGFADCGLFGVYAGCRPSQVHDVLKICRDELDHVAEHGLSDDEIARAIGQLKGSTVLGLEDTGALMNRIGKSELCWGEQMSVDDMLARITEVTPDDVRSVARDILGQRPSLSVIGPLKDKQASRLHEAVA

SEQ ID NO: 14567 - protein, 316 aa, Escherichia coli
GTTKHSKLLILGSGPAGYTAAVYAARANLQPVLITGMEKGGQLTTTTEVENWPGDPNDLTGPLLMERMHEHATKFETEIIFDHINKVDLQNRPFRLNGDNGEYTCDALIIATGASARYLGLPSEEAFKGRGVSACATCDGFFYRNQKVAVIGGGNTAVEEALYLSNIASEVHLIHRRDGFRAEKILIKRLMDKVENGNIILHTNRTLEEVTGDQMGVTGVRLRDTQNSDNIESLDVAGLFVAIGHSPNTAIFEGQLELENGYIKVQSGIHGNATQTSIPGVFAAGDVMDHIYRQAITSAGTGCMAALDAERYLDGL

SEQ ID NO: 14568 - protein, 316 aa, Escherichia coli
GTTKHSKLLILGSGPAGYTAAVYAARANLQPVLITGMEKGGQLTTTTEVENWPGDPNDLTGPLLMERMHEHATKFETEIIFDHINKVDLQNRPFRLNGDNGEYTCDALIIATGASARYLGLPSEEAFKGRGVSACATSDGFFYRNQKVAVIGGGNTAVEEALYLSNIASEVHLIHRRDGFRAEKILIKRLMDKVENGNIILHTNRTLEEVTGDQMGVTGVRLRDTQNSDNIESLDVAGLFVAIGHSPNTAIFEGQLELENGYIKVQSGIHGNATQTSIPGVFAAGDVMDHIYRQAITSAGTGCMAALDAERYLDGL

SEQ ID NO: 14569 - protein, 540 aa, Lactococcus lactis
MRAHEILNNPFLNKGTAFTMKERQELGLIGLLPPTVQTIEEQAVQTYEQYLTKPSDLEKRHFLMEIFNTNRTLFYYLFNKHIVEFNPVVYDPTIADTIENYSHLFVDPQYAAYLDINHPENITETLKSAAGDREIRLIVVTDAEGILGIGDWGTQGVDISVGKLMIYTAAAGIDPASVLPVVIDAGTNRKELLEDHLYLGNHQERIYGDQYYSFVDQFVETAESIFPKLYLHWEDFGRSNAATILNNYKTKIPTFNDDIQGTGIVVLGGIFGSLDITGEKLTDQVYLCYGGGSAGAGIAGRVHAEMVSEGLSEEEAYKHFFMIDQQGLLFDDMEDLTPAQKPFAKKRADYKDAGDMTDLLNVVKTVKPTILVGTSTNPGAFTKEVVEAMCANTERPVIFPISNPTKKMETTAEQVIEWSDGKAFVATGVPSGTISYKGVDYQIGQANNSLIHPGLGLGMLASEAKLLTDEMIGAAAHSLSGLVDPGKPGAPVLPPFEFVADVSIKVAEAVAKKAQEQGLTESKETDMAKAVRDLKWYPEY

SEQ ID NO: 14570 - protein, 449 aa, Triticum aestivum
  misc_feature (371)..(371): Xaa can be any naturally occurring amino acid
  misc_feature (435)..(435): Xaa can be any naturally occurring amino acid
MNGAGASQQQQQQQQRLRQQQQQQQQALLMQQALQQQQYQSGVLAAAAAAAMTQMEPVSNGNLPPGFDPSTCRSVYVGNVHPNVTESLLIEVFQGSGPVERCKLIRKEKSSFGFVDYYDRRSAALAIMTLHGRHIYGQAIKVNWAYASTQREDTSGHFHIFVGDLSSEVNDATLYACFSAYPSCSDARVMWDNKTGRSRGYGFVSFRNQQEAETAITEMTGKWLGSRQIRCNWATKTNAEEKQETDNHNAVVLTNGGSSNAAMEANQDTGSKENPENNPDFTTVYVGNLGHEVNRDELHRHFYNLGVGAIEEVRVQQEKGFGFIRYSTHGEAALAIQMANGLVVRGKPIKCSWGNKPTPPGTSSKPLPPPXASYQPVAMAGVPQGFTAAELLAYQRQLALSQAAAGQIAGQHGLAGPGIRGATRLLGSQALYDGXTPNQTSAQQLMYYN

SEQ ID NO: 14571 - protein, 953 aa, Synechococcus elongatus PCC 7942
MSASPHNFAQRHLGPRPADVEQMLQKLGCESLEDLLAAVVPADIRLPRSLNLPEPCSEAEALAELRAIAHQNQILRSYLGQGYANCLTPPVIQRNILENPGWYTAYTPYQAEIAQGRLEALLNFQTMVSDLTGLEIANASLLDEATAAAEAMTLSLAVAKSKSQTYFVAHNCHPQTIAVVQTRAAALGIEVLVADLLQFDFQTPIFGLLLQYPATDGTIADYRSVIEQAHAQGAIATVACDLLALTLLTPPGEFGADIAVGNSQRFGVPLGYGGPHAAFFATKEAYKRQIPGRIVGVSKDAQGQPALRLALQTREQHIRRDKATSNICTAQVLLAVVAGFYAVYHGAEGLTAIARQVRRQTQILAEELQSLGFKIPQQPGFDTLIVEVEDPKVWQSRTEAAGFNLRCLSDRQLGISLDETTTDSDLLDLLTVFAQGRSLPAWEDLQAAVTDEVDPAFARQTPFLTHPVFQQYHSETELLRYIHRLQSRDLSLTTAMIPLGSCTMKLNATAEMLPISWPEFNQIHPFAPLSQTQGYQQLFQQLESWLAEITGFAAVSLQPNAGSQGEYAGLLVIQRYHQSRGEDHRQICLIPQSAHGTNPASAVMAGMKVVPIACDDRGNIDVSDLQQKAAQYADQLAALMVTYPSTHGVFEEAIAEICAIVHQQGGQVYLDGANLNAQVGLCQPAQFGADVCHLNLHKTFCIPHGGGGPGVGPIGVAAHLAPFLPSHPLVPEANADPQALGPIAAAPWGSASILPISWMYIRMMGAAGLTQASAIAILNANYIATRLAPYYPILYRGDRGFVAHECILDLRPLKRTAGIEVEDVAKRLMDYGFHAPTMSWPVLGTLMVEPTESESLAELDRFCEAMIGIYHEVDAIASGDLDPLDNPLKHAPHPADVLLQSDWNRAYSREQAAYPAPWTREHKFWPVVSRIDNAYGDRNLVCSCLPMSAYSDR

SEQ ID NO: 14572 - protein, 62 aa, Triticum aestivum
GTYVINKQTPNKQIWLSSPVSGPSRFDWDATANGWIYKRTGVNLVRLLEKEIGELCGTPVEL

SEQ ID NO: 14573 - protein, 362 aa, Geobacter sulfurreducens PCA
MAQVFKVAVLPGDGIGPEVMAEALRVLDAVEAKYDVKFERTHANVGGAGIDIEGKALPETTVNICKAADAILFGSVGGPKWESLPPDEQPERGALLPLRKIFGLYANLRPAIIFPSLTGASSLKEEVIAGGFNVLVIRELTGGIYFAQPKGIEGEGRDRVGFDTMRYSVPEIERITHVAFQAARKRGKKVCSIDKANVLSSSVLWREVVTGIAKEYPDVELSHMYVDNAAMQLVRWPKQFDVILCENMFGDILSDEAAMLTGSLGMLPSASLAEGTFGMYEPSGGSAPDIAGQGIANPIAQILSMGMMLKFSFGMVDAADAIDNAVATVLDQGFRTRDIYQQKDGEKLVNTKEMGDAIIAAL

SEQ ID NO: 14574 - protein, 293 aa, Blastopirellula marina DSM 3645
MTAKILDGKAIAQQIEVEIHERAAAFEARTGRRPGLAAVLVGDDPASQVYVRNKERACARVGIQSHMHRLPDDTTAAELMALIAQLNADPAVSGILVQLPLPAGIDPTPILDAIDPAKDVDCFHPQNVGLVSQGRPRFLPCTPHGVLQILHRSGISAAGKHAVIIGRSEIVGKPMALMLMQKDSTCGSSAANATVTVCHSRTADMPAICRTADILIAAIGKPKFVTADMVKPGAAVIDVGINRTDDGLCGDVDFESVKEVASAITPVPGGVGPLTVVMLMENTLRAAEWQAAQ

SEQ ID NO: 14575 - protein, 148 aa, Mesorhizobium sp. BNC1
MNETHVVCSKCSGVNRLPPARSALAGKCGKCGARLFSGHPEDVDADILERQIARSTVPVLVDVWAPWCGPCRMMAPAFEAAARELEPRLRLVKLNSDVEQSAAARLGIRGIPTMILFHGGREIARTSGAMTAAQIVQWARGRLPAAST

SEQ ID NO: 14576 - protein, 127 aa, Dechloromonas aromatica RCB
MRILHTMIRVGDLDKSIAFYTEILGMQLLRRQDYPDGRFTLAFVGYGPEDKEAVLELTHNWDTPSYELGNGYGHVALAVPDAAGACAEIKALGGKVVREAGPMKHGSTIIAFVEDPDGYKIELIQRG

SEQ ID NO: 14577 - protein, 273 aa, Ophiostoma ulmi
FYNELRVAPEEHPILLTEAPINPKSNREKMTQIVFETFNAPAFYVNIQAVLSLYASGRTTGIVLDSGDGVTHVVPIYEGFALPHAIARVDMAGRDLTDYLMKILAERGYSFSTTAEREIVRDIKEKLCYVALDFEQEIQTAAQSSSLEKSYELPDGQVITIGNERFRAPEALFQPSVLGLENGGIHVTTFNSIMKCDVDVRKDLYGNIVMSGGTTMYPGLSDRMQKEITALAPSSMKVKIIAPPERKYSVWIGGSILASLSTFQQMWISKQEY

SEQ ID NO: 14578 - protein, 229 aa, Arabidopsis thaliana
MLKSLQNAFESIHQDNSARVVMIRSLVPGVFCAGADLKERRTMSPSEVHTYVNSLRYMFSFIEALSIPTIAAIEGAALGGGLEMALACDLRICGENAVFGLPETGLAIIPGAGGTQRLSRLVGRSVSKELIFTGRKIDAIEAANKGLVNICVTAGEAHEKAIEMAQQINEKGPLAIKMAKKAIDEGIETNMASGLEVEEMCYQKLLNTQDRLEGLAAFAEKRKPLYTGN

SEQ ID NO: 14579 - protein, 333 aa, Bordetella parapertussis
MLAHPATKYRPFAPFAADHAERAWPARRPAAAPIWMSTDLRDGNQALIEPMDGARKLRLFEQLVAVGLKEIEVAFPSVSQTDFDFVRKLIDERRIPDDVTIEALTQSRPDLIARTFEALAGSPRAIVHLYNPIAPQWRRIVFGMSRAEIKEIALAGTRQIRALADANPGTQWIYEYSPETFSLAELDFAREVCDAVSAIWGPTPQRKMIINLPATVESSTANVYADQIEWMHRSLARRDCIVLSVHPHNDRGTAVAAAELAVLAGAERIEGCLFGNGERTGNVDLVALALNLERQGIASGLDFRDMAALRACVSECNQLPIDVFHPYAWLDQD

SEQ ID NO: 14580 - protein, 609 aa, Glycine max
SARAPNEPYRVILGDVRDKLYNTRERARQLLANGTSDIPEETTFTYVEQFLEPLEQCYRSLCACGDRPIADGSLLDFLRQVSTFGLSLVRLDIRQESDRHTDVMDAITKHLEIGSYREWPEEKRQEWLLSELRGKRPLFGHDLPKTEEINDVLETFHVISELPSDNFGAYIISMATAPSDVLAVELLQRECHVKQPLRVVPLFEKLADLEAAPAAVARLFSIDWYRDRINGKQEVMIGYSDSGKDAGRLSAAWALYKAQEELVKVAKEYGVKLTMFHGRGGTVGRGGGPTHLAILSQPPDTIHGSLRVTVQGEVIEQSFGEEHLCFRTLQRFTAATLEHGMHPPVSPKPEWRALMDEMAVIATKEYRSVVFKEPRFVEYFRCATPELEYGRMNIGSRPSKRKPSGGIESLRAIPWIFAWTQTRFHLPVWLGFGSAFKHVVEKDPKNLQMLQDMYNQWPFFRVTLDLVEMVFAKGDPGIASLFDKLLVSEELRPFGENLRSKFEETKRFLLQVAGHKDILEGDPYLKQRLRLRDSYITTLNVLQAYTLKRIRDPDYHVKLRPHLSKDYMESSKPAAELVKLNPKSEYAPGLEDTLILTMKGIAAGMQNTG

SEQ ID NO: 14581 - protein, 465 aa, Ralstonia eutropha JMP134
MSLFRTKDIDAMLVNSHVGGLKKVLGPVDLVLMGIGAIIGTGIFVLTGTGALTAGPALTISFVIAAMACGFAALCYAEFASAIPVSGSIYTYSYATLGEIIAWMIGWDLLLEYGLATSAVSVGWSGYFQSLAAGFGLHLPAALTAAPGAVPGVQTLFNLPAFLIMLITTWVVSCGVRESARLNNVMVAIKVAVVVLFIAVGVWHVKPANWQPFAPFGVSGIFNAAALVFFAFIGFDAVTSAAEEVRNPHRDLPVGIIGSLAVCTVLYVIVAAIMTGVVPFAKFAGIDHPVSLVLQYAGQNWVAGFVDLGAILGMTTVILVMTFGQTRVIFAMSRDGLLPARLSSVHPVHATPFFATWTVGIVFAMIAAFVPLNVLAELINIGTLSAFTLISIAVLVLRRTRPELHRAFRCPGVPVVPLLSVGFCLFLMAHLQALTWIAFLTWLAIGLSVYFLYARRNAVLHEGSR

SEQ ID NO: 14582 - protein, 350 aa, Propionibacterium acnes KPA171202
MTTQALTPNTILGNISLSDPSEIDTTQPFPETVGADVHGNDEPRDVIIVGSGPAGYTAAVYTARAGLKPLVFEGSMDAGGALMQTTEVENYPGFSEGIMGPDLMAQMRAQAERFGAELIADDVTDIDLTGEIKKLVDTDGNTYKAHVVILAMGSAYRKLGLEDEPRLSGRGVSWCATCDGFFFTGKDIAVVGGGDSAVEEATFLTRFANSVTLVHRRDQLRASQIMADRAAADPKITFAWNSEVVAMQGESKLESITLRDTKTGEERQLEVAGVFEAIGHDPRSELVRGQVDLDDAGYVVCAEPSTRTNVPGVFACGDLVDSHYQQAVTAAGSGCRAALDAERFLTELGR

SEQ ID NO: 14583 - protein, 161 aa, Pseudomonas syringae pv. tomato str. DC3000
MSENLLNIPVTTIKGEQKTLADFAGKAVLVVNTASKCGFTPQYKGLEKLWQDYKDQGLVVLGFPCNQFGKQEPGDEGAISGFCELNYGVSFPLFKKVDVNGDQAHPLFVQLKEQAPGLLGTERIKWNFTKFLIGQDGKLVKRFAPLTKPEELTDEIEALLR

SEQ ID NO: 14584 - protein, 127 aa, Bordetella pertussis Tohama I
MSIVELTKDTFQDAITPDGTLIIDFWAPWCGPCRGFAPVFEQAAEQHPDVTFAKVNTDVEQELAGALGIRSIPTLMVFREKVLLFSQPGALSAGQLGELLTKVKEVDMAEVHRDIAQARENGEGEQA

SEQ ID NO: 14585 - protein, 123 aa, Oryza sativa (japonica cultivar-group)
MASSATETETVRALHILIKHEGSRRKASWKDPDGRVISATTRADAAARLADLRDQILSGRANFADLAARHSDCSSARRGGDLGTFGRRQMQKPFEDATFALKVGEMSDTVDTDSGVHIILRTA

SEQ ID NO: 14586 - protein, 361 aa, Schizosaccharomyces pombe
MTAPKGGARTRRQAAMYSNSSSGIRETMYDLKPHRRKDAAEMKFCQSVLKELLKKQHEAYAYPFYKPVNPTACGCPDYFKVIKHPMDLGTMQNKLNHNEYASMKAFEADMVLMFKNCYKFNSAGTPVHLMGKKLESIFQKLWANKPDFDSETYMGMSSVNTDYYYGDNEVFDSGDEFLEDDGEEFEAVNRQIHKLQSTLQAMKSRARSSSVSRRSRSRSLSVDIYPPITYEMQNELAEQCNYLSADQLSHVAEILRAALPHLRNTDEIEIDVSAMPPDVFYKVYYYVCKGDEIGAEALATASHTHQEKKKGRALSETEQAEKIRQLRAQLDRFSGIAQNKNTVTGNIAAYNTKSLGSDDSS

SEQ ID NO: 14587 - protein, 412 aa, Thermotoga maritima MSB8
MERHTVNEIEIFTIPFDKARTISCAFLIKKGSAHEPEELAGISHFIEHMAFRGTKSYDHFSLKYTVEVVGGTLNAFTDKLATAYYAKVPEFHFGKTLNVLKEITFYPIFSPEDTEIERKIILEEYKMSQDDPTSKLFDTLVETVWPGPYGRPIIGRKETIEKISSEDLREYHRKNYNLPDTKIILAGKVNDDYLSLLEKELSELERNKPGDPLPPPPSFEHTEPRYIVRNDLEQVHIAMARPICGRISEDIYPLYALNTALGSGMSSILFHEIREKEGFVYDVFSQIYALKETGIIIVYAALSPEKIDEFFSKMKDVLSNESLFMKNFEYGKMRYLGKLDMVTDNPAGMMSFVIDDLSNDSLETIEERVERIKNVSKEDYRRAYERFIAGNWSVFGIGPESGKIIEKHEMIV

SEQ ID NO: 14588 - protein, 241 aa, Arabidopsis thaliana
MAAKVSVSPTSLLNQIVVPGDVVLDLSNMNNQTIKLGSGLLQDNDAISAMRAGKLSYSKPNKYWLESSHKRYIPRPDDHVLGIVVDSRADNFWVDIKGPQLALLPVLAFEGGTRRNIPKFEACTLLYLRVVKTNIGMNPELSCTEASGKAALFGPLRDGFMFETSTGLSRMLLNSPTRPVIEALGKKLSFEIAVGLNGRVWVNATAPRIVIIVANAIMNSESLSGTQQRIMVEKLLAIISD

SEQ ID NO: 14589 - protein, 579 aa, Photobacterium profundum SS9
MFIKWRDTMTVGKYLRWKDEAGNDFRPVALTGTELLNDRNLNKSTAFSYEEREAFQLVGLLPPKVQTFDDQLNRVYDGFRNASTDIEKYLFLRALQDRNETLFYALLSRHVEEMTPIIYTPTVGKACQEFSHRYQKARGLYITEDSVDQMGDMARHFTGKDIKIIVVTDSQGILGLGDQGVGGMGIPIGKLSLYTLGAGIHPAHCLPIALDVGTDNQDLLDDPMYLGMPRKRMRGEEYKIFIRKFVKQIQQHFPKAVLQWEDFSKSNAFDNLSDYEDDLPSFNDDIQGTGAVVLAGILGAVKIKEEKLADQTYVVYGAGAGGVGVADQIYAGLLKEGCSHSAAREKIFVLDSQGLVFDDREGLDEYKKRYAKPRELANNWQTKELGKVSLTELIDNHRVTVLLGTSGIGGAFKAEHVQKMMEYTKRPMVFPLSNPTANCEALPEDVYQWSDGQVIVATGSPFSDVNYNGREYRIGQGNNVFIFPGVGLASIVSGTPKITLDMFTMASYALADCISDDDLAAGCVFPRISKLKEVSMVVATRILENMQTTEPNSPLRGKNIQQELAMHMWEPAYLPYRRV

SEQ ID NO: 14590 - protein, 409 aa, Frankia sp. CcI3
MVRGSYDVVIVGAGPAGSVAAFALKRRNPRLRVLLTDKAVFPRDKACGDGLGAGAVAALRRLGLLGVVHDAISPLSVRVSGPDGTEATAVGPTVAGRDLSGYVLPREILDARLVAAAREVGVEMREGTSYHSSELTGNSRVITFKTGSRSNSVEAALMIGADGAYSRVRRDLGVGRQDDRFSSIAMRSYAKFSDPRRAPQEVMPLRLDFSDKVLPGYGWVFPVSDDVVNLGVGLPVSTMREKSLNPHNLLSAYVEDLRARGFIVEEPNKLLSHYLPHAGKLAPMAHPRAALIGDAAASINPLSGEGIVYAMVAAEMLAAALEGWNGLGHAELSGGLQLFEQKFRRRFRLHFASCTVANILMGHRRWANLVIRAASRDSHVMDAASLMLFDERRMYLSTGARILIRGTRR

SEQ ID NO: 14591 - protein, 504 aa, Zea mays
LGTSRPAGSIYEGQGPPPLPSSIVSPAGVHRPRPFRSLAAPLSRRSEPRAGWRRQQQLLPPPRSRDGRRRRRRRDPPMDDAGRAPPPAPAAVTVSATAAPAPTPPSATVAADKSSLDPDALYEEGMWQQMAMNSGATMQPGSYPERPGEPDCTYYLRTGLCRFGMSCRFNHPPDRNLAIASARMKGEYPERVGQPECQYYLKTGTCKFGPTCKFHHPREKAGIAGRVQLNTLGYPLRPNEKECAYYLKTGQCKYANTCKFHHPELFNVVPSSRGSPIYTSVHSSASAGPQSYTGTMSSWTFPRASFIPSPRWQSPSNYAPMVVPHGLVQVPSWNSYPGQLQSPGAQQTYGSSQQGEASAGNQGMLSPYRSSSFPVPQYALQRDNVFPERPDEPECQYYMKTGDCKFGAVCKFHHPRVRSQPPPDCVLSPMGLPIRPGEELCKFYSRYGICKFGANCKFDHPTMAAPMGVYAYGFSGSASVAPASTNAPMTRHLLGSPSGSGYMS

SEQ ID NO: 14592 - protein, 365 aa, Zea mays
MALRRLLQGSVLPRIIGRDLAPAVAPFSTESGETIRATLFPGDGIGPEIAESVKQVFNVAGVPIEWEEHYVGTEVDPRTESFLTWESLESVRRNKVGLKGPMATPIGKGHRSLNLTLRKELGLYANVRPCNSLPGYKTRYDDVNLVTIRENTEGEYSGLEHQVVRGVVESLKIITRQASLRVAEYAFHYAKANGRERVSAIHKANIMRKTDGLFLKCCREVSEKYPEIQYEEVIIDNCCMTLVKNPGLFDVLVMPNLYGDIISDLCAGLIGGLGLTPSCNIGEGGICLAEAVHGSAPDIAGKNLANPTALMLSAVMLLRHMQFNDKADRIHNAILQTIAEGKYRTADLGGKASTSEFTNAVCDHI

SEQ ID NO: 14593 - protein, 395 aa, Arabidopsis thaliana
MGYEPDPDALRWGLHDLEVCTLTNAGSCSSVTRYESGGGGTQGYVREGYNQPVTGYVDNDAVIAQFYQDELSRVARAEASGINSLSPTSVVAQDWPHPHQGQENQGEAIDITQESDILHNHNGNMEDKNVARIRFEGGQSSPSRDDDSVCSVEIEEESWSEVGKRLNQMIPIAHVPKINGELPSEDEQISDHERLFQRLQLYGLVENKIEGDGNCQFRSLSDQLYRSPEHHNFVREQVVNQLAYNREIYEGYVPMAYNDYLKAMKRNGEWGDHVTLQAAADLVLTQLKLCLFCRNLVCKMKESLGNEFGVRMFVITSFKDTCYIEILPHFQKSNRLICLSFWAEVHYNSIYPEGAADTRRQEEEEILGILSSLSADGGTKLKKSAYRYVYSFYLT

SEQ ID NO: 14594 - protein, 566 aa, Oryza sativa
MPDWRVGEFEGKLKDGFARSNNSEHENGAGTVSISSKKSKHGVASEKKPHVDISGLIDSDSQKCNSEQIHSANGIVSRDVNHDHIENCKVESNDFPLNTISETRYPTDNWNSSQFALSNDGSPVLNNQSTPQTGHGYGDNDLTYIDWPAIDNFEDVDNLFRRCDSTYGQQQLPNTDELSWIPSSDAMYSSDVAMQPGFESSYSDYGILDDLSAFNCTEDKSLTTADPSSAVCDEQFDDSYLFNEQKTEDVYGEQAYQRDAMELLSSDQICTGQENLDMIGNRYSSENAMEQPEDQKFSIASGSQLSSSQNLLNQKNHLDSTSPSNITSESYPERNCQIIPSGASFAERNLKVQKKVASSASGQLISDNVTGHPGHQTLTRRASYPCENHEIGKRSLGKRGLGHSDVAMGTSMVVDGSFVSSISSDNSVEENSFRQLQDAVSQLDVKTKMCIRDGLYRLARSAQNRQVFPNTMNNNGDSHNVKDMQNAETSGKFVDPGSIETQTNPIDRSIALLLFHQPSEHVTGAVDEAASLKSHNDNHQAAAKNQRVMHASSVHSPRGQGDPMDA

SEQ ID NO: 14595 - protein, 160 aa, Bacillus cereus ATCC 14579
MTVYDFSAKTITGEEKSLKDYKGKALLIVNVASKCGFTPQYKGLQEVYDKYKDQGLEILGFPCNQFGGQEPGTEADITSFCELNYGVNFPMFAKVDVKGDKAHPLYTYMTEQAPGLLGMKAVKWNFTKFLIGKDGKVVGRFAPQTKPVDLEVEIEKVLGE

SEQ ID NO: 14596 - protein, 966 aa, Flaveria brownii
MANKNVEKLASIDAQLRLLVPGKVSEDDKLIEYDALLLDKFLDILQDLHGEDLKEAVQECYELSAEYEGKHDPKKLEELGSVLTSLDPGDSIVIAKAFSHMLNLANLAEEVQIAYRRRIKLKRGDFADEANATTESDIEETFKRLVHKLNKSPEEVFDALKNQTVDLVLTAHPTQSVRRSLLQKHGRIRNCLAQLYAKDITPDDKQELDEALHREIQAAFRTDEIRRTPPTPQDEMRAGMSYFHETIWKGVPKFLRRVDTALKNIGINERVPYNAPLIQFSSWMGGDRDGNPRVTPEVTRDVCLLARMMASNMYFSQIEDLMFEMSMWRCNSEVRVRAEELYRTARKDVKHYIEFWKQVPPTEPYRVILGDVRDKLYNTIERSRHLLAHGMSDIPDEAVYTNVEQFLEPLELCYRSLCDSGDRVIADGSLLDFLRQVSTFGLSLVKLDIRQESDRHTDVLDAITQHLKIGSYREWSEEKRQEWLLAELSGKRPLFGSDLPKTEEVKDVLDTFNVIAELPSDCFGAYIISMATSPSDVLAVELLQRECHVKHPLRVVPLFEKLADLEAAPASMARLFSIDWYRNRIDGKQEVMIGYSDSGKDAGRFSAAWQLYKAQEEIIKVAKEFGVKLVIFHGRGGTVGRGGGPTHLALLSQPPDTIHGSLRVTVQGEVIEQSFGEEHLCFRTLQRFCAATLEHGMNPPISPRPEWRELMDQMAVVATEEYRSTVFKEPRFVEYFRLATPELEYGRMNIGSRPSKRKPSGGIESLRAIPWIFAWTQTRFHLPVWLGFGTAFKHAIKKDSKNLQMLQEMYKTWPFFRVTIDLVEMVFAKGDPGIAALNDKLLVSEDLWPFGESLRANYEETKDYLLKIAGHKDLLEGDPYLKQRIRLRDAYITTLNVCQAYTLKRIRDPNYHVTLRPHISKEYAAEPSKPADELIHLNPTSEYAPGLEDTLILTMKGIAAGMQNTG

SEQ ID NO: 14597 - protein, 451 aa, Erythrobacter sp. NAP1
MAIELKMPALSPTMEEGTLAKWLKSEGDTIEPGDIIAEIETDKATMEFEAIDEGVLAKILVAEGTENVAVGTVIAEMEGEGEEASPAPAPAAKEEPAPAPTPPPVATKPEVKATPSDPEIPEGTSFTSTTVREALRDAMAEEMRADKRVFVMGEEVAEYQGAYKVTQGLLDEFGPKRVIDTPITEYGFAGIGSGAAMGGLKPIVEFMTFNFAMQAIDHIVNSAAKTNYMSGGQMRCPIVFRGPNGAASRVAAQHSQNYGPWYASVPGLIVIAPYDSSDAKGLMKAAIRSEDPVVFLENELVYGRSFEVPDLDDHVLPIGKARIVREGKDATIVTYSIGVGLALEAAEELAGQGIDAEVIDLRTLRPLDKETVLKSLAKTNRLVVAEEGWPTCSIASEIISICMEEGFDDLDAPVLRVCNEDVPLPYAANLEKLALIDAPRIVEAVKKVCYV

SEQ ID NO: 14598 - protein, 966 aa, Flaveria pubescens
MANRNLEKLASIDAQLRLLVPGKVSEDDKLIEYDALLLDKFLDILQDLHGEDLKEAVQECYELSAEYEGKHDPKKLEELGSVLTSLDPGDSIVIAKAFSHMLNLANLAEEVQIAYRRRIKLKRGDFADEANATTESDIEETFKRLVHKLNKSPEEVFDALKNQTVDLVLTAHPTQSVRRSLLQKHGRIRNCLAQLYAKDITPDDKQELDEALHREIQAAFRTDEIRRTPPTPQDEMRAGMSYFHETIWKGVPKFLRRVDTALKNIGINERVPYNAPLIQFSSWMGGDRDGNPRVTPEVTRDVCLLARMMASNMYFSQIEDLMFEMSMWRCNSELRVRAEELYRTARRDVKHYIEFWKQVPPTEPYRVILGDVRDKLYNTRERSRHLLAHGMSDIPDEAVYTNVEQFLEPLELCYRSLCDCGDRVIADGSLLDFLRQVSTFGLSLVKLDIRQESDRHTDVLDAITQHLEIGSYREWSEEKRQEWLLAELSGKRPLFGSDLPKTEEVKDVLDTFNVLAELPSDCFGAYIISMATSPSDVLAVELLQRECHVKHPLRVVPLFEKLADLEAAPAAMARLFSIDWYRNRIDGKQEVMIGYSDSGKDAGRFSAAWQLYKAQEEIIKVAKEFGVKLVIFHGRGGTVGRGGGPTHLALLSQPPDTIHGSLRVTVQGEVIEQSFGEEHLCFRTLQRFCAATLEHGMNPPISPRPEWRELMDQMAVVATEEYRSIVFKEPRFVEYFRLATPELEYGRMNIGSRPSKRKPSGGIESLRAIPWIFAWTQTRFHLPVWLGFGTAFKHAIKKDSKNLQMLQEMYKTWPFFRVTIDLVEMVFAKGDPGIAALNDKLLVSEDLWPFGESLRANYEETKDYLLKIAGHKDLLEGDPYLKQRIRLRDSYITTLNVCQAYTLKRIRDPNYHVTLRPHISKEYAAEPSKPADELIHLNPTSEYAPGLEDTLILTMKGIAAGMQNTG

SEQ ID NO: 14599 - protein, 275 aa, Triticum aestivum
CAARGPPSSPTSSSLPLRLPLPTTTLPSGPAAPRPAPSTTPPRPTGGRRCSTTFAPSSLTWDPQLLERALEASGDDLDFAIRSLNDLRLESAEAIFSAAVGEPENGLSTALKLSAEGNGQLDAISGNPPATDNCQTNHHSSEWVELFVREMMSASDINDARARASRALEVIEKSIMERTGAEAVQNLHKENTMLKEQLAIALRENAVLKRGVAIQHERQKEFDDKTQEVHNLKQLILQYQEPLKTLEINNYALRMHLQQAQQNSSMPGRFHPDVC

SEQ ID NO: 14600 - protein, 509 aa, Magnaporthe grisea 70-15
MSLSTIIAQVALALIASVWIWRSITLYYRRRKLKLLHGCMPVTKIPDWDPIFGLGFTYTLIKSDINNHRLINNTVERLQTYGYTHMANVMRHRMFFTCEPENLKAIMHGQFDHFDNELRSVPAGHFMGMGIFLADGEKWQRSRALVRPNFARDQVADLGSLERHFQILLSIIPKDGSAVDLAPLFFAFTMDSITDFLFGESVKALQAHASGAHASSSPWSQKGIEQFAEAWEYAQNDMLFRFILGPARYVYQDKKANQCVKMIHAHVDRYVEQAVRFRNEELARGGDEKEPKSEGRYIFLQALAKQTQDRKVLRDELMNLLMAGRDTTAALLSNLFHTFARRPDVWAKLKNEVMFLEGRLPTYEDIRNMKYVRWCINEFGILGKQASFDTTLPRGGGPNGRSPIFLPKGSIVLYSMLAQHRRKDLFGEDALEFRPERWETLRPGWNYVPFNGGPRICVGQQYALTEASYLVVRFVQTFATVESRDPEPWSIGKRLLTCPMNGTIVSLSR

SEQ ID NO: 14601 - protein, 331 aa, Thermus thermophilus HB8
MKVGINGFGRIGRQVFRILHERGVEVALINDLTDNKTLAHLLKYDSTYGRFPGAVGYDEENLYVDGKAIRATAIKDPREIPWKQAGVGVVVESTGVFTDGEKARAHLEAGAKKVIITAPAKNEDITVVLGVNHEQYDPAKHHILSNASCTTNSLAPVMKVLEEAFGVEKALMTTVHSYTNDQRLLDLPHKDLRRARAAALNIIPTTTGAAKATALVLPSLKGRFDGMALRVPTPTGSISDITALLKREVTAEEVNAALKAAAEGPLKGILAYTEDEIVLRDIVMDPHSSIVDGKLTKAIGNLVKVFAWYDNEWGYANRVADLVELVLKKGV

SEQ ID NO: 14602 - protein, 309 aa, Bacillus subtilis
SRKKMGLLVMAYGTPYKEEDIERYYTHIRRGRKPEPEMLQDLKDRYEAIGGISPLAQITEQQAHNLEQHLNEIQDEITFKAYIGLKHIEPFIEDAVAEMHKDGITEAVSIVLAPHFSTFSVQSYNKRAKEEAEKLGGLTITSVESWYDEPKFVTYWVDRVKETYASMPEDERENAMLIVSAHSLPEKIKEFGDPYPDQLHESAKLIAEGAGVSEYAVGWQSEGNTPDPWLGPDVQDLTRDLFEQKGYQAFVYVPVGFVADHLEVLYDNDYECKVVTDDIGASYYRPEMPNAKPEFIDALATVVLKKLGR

SEQ ID NO: 14603 - protein, 284 aa, Burkholderia sp. 383
MNAPFARDGSAARLLVGYVTHERLRPVRHAFTYPLFQVCCDVERLHEIDGRWFGIDRWRPLGLASRDYGPRDGRPLAPWMRARLAEAGIPADGPIWLQTIPRMFGHAFNPVSFWYCYDRAGRLRALYADVRNTFGAHHGYLLSAPCHAPIGGGTVLVCRKTFHVSPFCDVVGHYAFRVRQCGDRLLVAIDYRDDGGLLLRTALGMRAQPLTAARAWRALTRQPLNALAVVVRIHWQALRLWLKRVPFHGRTPPAQPPSGDAPASPPVQASPPCSPAMSDHEVRP

SEQ ID NO: 14604 - protein, 616 aa, Actinobacillus pleuropneumoniae serovar 1 str. 4074
MKAIKQCSQSYVNWVLRLGRGKAALLGFFVLASCAIVAQSLLTYLFTGGILAQDILRSISFGLISAPFVIYFFNLIVEKLEKSRIQLEQSVYDLGILREQDAFLNATLEKNNRDKSVLMATISHELRTPLNGIIGLSRILLEGELTDQQREYLKTINISAVSLGHIFSDIIDLEKIDSRRVELFRKEIEFSQLISDISNFGNLMAEQNKIKFHIDYSDDLPNFIYVDNARLSQILWNLVSNAVKFTPAGGDIYLSVKRIDNDHFSFSLRDTGIGIPKHEQRKVFAMFYQAENSQERKAQGSGIGLAISKRIAKLMGGDLTLRSEMGKGSTFTLTIQADPVEAKKSVKINAHALKVLLVEDIEVNVVVARAMLEKFGCDVDVAMTGAQAFELFERNSYDLILLDIQLPDMTGFDIAQRLRERYENEEVDYLPLLVALTANIMQTKEEYQQQGMDDVLRKPLSLEALSECLNHYFNSDFSEKTAEIPPLVETEETLNLPYDRKILSEFIEVMGAKAVLANFALFAKLMPEYLANLQHYLTEWQATDSPEMRKCTADEAHKIKGALASVSLKRLQEVAQLAQSDNGEVWEQHIAQWVFQIAQQWQADLALAENWVKENY

SEQ ID NO: 14605 - protein, 349 aa, Thermus thermophilus
MKVAVLPGDGIGPEVTEAALKVLRALDEAEGLGLAYEVFPFGGAAIDAFGEPFPEPTRKGVEEAEAVLLGSVGGPKWDGLPRKIRPETGLLSLRKSQDLFANLRPAKVFPGLERLSPLKEEIARGVDVLIVRELTGGIYFGEPRGMSEAEAWNTERYSKPEVERVARVAFELARKRRKHVVSVDKANVLEVGEFWRKTVEEVGRGYPDVALEHQYVDAMAMHLVRSPARFDVVVTGNIFGDILSDLASVLPGSLGLLPSASLGRGTPVFEPVHGSAPDIAGKGIANPTAAILSAAMMLEHAFGLVELARKVEDAVAKALLETPPPDLGGSAGTEAFTATVEAFTATVGI

SEQ ID NO: 14606 - protein, 234 aa, Photobacterium profundum SS9
MNALSTISELSSSPLNGTISVINANFMDPIFMTDKPIRIATRKSPLAMWQAEFVQAELEKAHPSLVVELVPMVTKGDIILDTPLAKVGGKGLFVKELEVAMLEGRADIAVHSMKDVPVEFPEGLGLVTICEREDPRDAFVSNTYNSIAELPAGSIVGTSSLRRQCQLRAQRPDLIINDLRGNVNTRLRKLDEGQYDAIILACAGLMRLEMHDRIRSAIEPEESLPAVGQGAGRY

SEQ ID NO: 14607 - protein, 488 aa, Burkholderia sp. 383
MQTQLFIDGRFVDAVDRGTIDVLNPHDGSVITKIAAATAADVDLAVEAATRAFPKWSALPAAERGRLLLRLADAIEANAEELAQLESLDTGHPIRDSRALDVPRTAACFRYFGGMADKLQGSVIPVETGFLNYVQRAPIGVVGQIVPWNFPLMFTSWKMGPALAAGNTVVLKPSEITPLSTLRIVELMAEVGFPAGVVNIVPGYGHTAGQRLAEHPGVGKIAFTGSTATGRRIVEASQGNLKRVQLELGGKGANIVFDDADLDAAINGAAWAIFHNQGQACIAGSRLVLHERIADAFLERFVALASSIRIGNPLDANTEMGPLTSKQHLDRVLSFVDVAREQGGRVLTGGSAPQDPALANGYYVRPTVIEAKSAADRVAQEEVFGPFVTVLRFGSDDEALAIANATEYGLGSGLWTKDLSRAHKMASQINAGMCWINCYKRVNPGSPFGGVGQSGYGREMGFEAMHDYTEARSVWVNVDGNVPPHFKR

SEQ ID NO: 14608 - protein, 301 aa, Candidatus Protochlamydia amoebophila UWE25
MAILVNKQTRVITQGITGKAGRFHTEQSMLYAPTYVGGVTPGKGGEEISGLPVFDTVWEAKQKTQCNASLIFVPPPFAAEAILEAEEAGIELIVCITEGIPIQDMLKVSQVMRASQTSRLIGPNCPGVITPGECKMGIMPGYIHQKGNVGIVSRSGTLTYEAVWQTTQLGLGQSTCVGIGGDPLNGTNFIDVLKLFENDSETDAILLIGEIGGKAEEEAAEWIKQFCSKPIAAFIAGQTAPIGRRMGHAGAIVSGGKGTASDKIKTLKQAGVLIAETPADMGLSVQLLLNSKSPNSSPSLK

SEQ ID NO: 14609 - protein, 509 aa, Oryza sativa (japonica cultivar-group)
MEGNARGGGHSEALKNYNLGRTLGIGSFGKVKIAEHKLTGHRVAIKILNRRQMRNMEMEEKAKREIKILRLFIHPHIIRLYEVIYTPTDIYVVMEYCKFGELFDYIVEKGRLQEDEARRIFQQIISGVEYCHRNMVVHRDLKPENLLLDSKYNVKLADFGLSNVMHDGHFLKTSCGSPNYAAPEVISGKLYAGPEVDVWSCGVILYALLCGTLPFDDENIPNLFKKIKGGIYTLPSHLSALARDLIPRMLVVDPMKRITIREIREHQWFQIRLPRYLAVPPPDTAQQAKMIDEDTLQDVVNLGYEKDHVCESLRNRLQNEATVAYYLLLDNRFRATSGYLGADYQESLERNLNRFASSESASSNTRHYLPGSSDPHASGLRPHYPVERKWALGLQSRAQPREIMIEVLKALEDLNVCWKKNGQYNMKCRWSVGYPQATDMLDVNHSFVDDSIIMDNGDVNGRLPAVIKFEIQLYKSRDEKYLLDMQRVTGPQLLFLDFCAAFLTKLRVL

SEQ ID NO: 14610 - protein, 371 aa, Archaeoglobus fulgidus DSM 4304
MAIYAFPEFDGESRRASRIYASARYPSRQEGNVFFDSEEVPNLKYADEMPLKIRNFYSVVAFRPSHIFLSRDVLGGRPLYYGSDMSISSFKSYIDGEVYEVMPGEVVKMDYTGEILERRKYAFEDVFRVGREDVNEMADRILNSLSSYKPRVGCIAFSGGVDSSLLAALYDAPLVSVTASDAEEEWLKTAARMLGKEIEILKVGESAIREVVDTVRKTIETGDFLQLSIAVPVYLTMQFAKSLGFTEIIFGQGADELFGGYKRYEGLSEHELEDALVKDLKSIGESNLVRDCKLAYKNEIKLVTPYLCWDVIDAALKIPPEYKVRREGGKVVRKYILRKIAEKFLPEEIAWRDKKAIQYSTGIAKILKKCL

SEQ ID NO: 14611 - protein, 550 aa, Haemophilus somnus 2336
MMQNINPTQTNAWKALEQHQKDLEQVTIQQLFEQEPTRFNDYSLKFAEQILVDYSKNNINQQTLSLLRQLAKECALNEATESMFNGEKINRTENRAVLHTALRNCANTPVYVDGKDVMPEVNAVLAKMKSFCQRVISGDWKGYTGKAITDVVNIGIGGSDLGPYMVTEALRPYKNHLTMHFVSNVDGTHIAETLKKVNPETTLFLVASKTFTTQETMTNAISARKWFLAAAQDESQIAKHFAALSTNVKEVEKFGIDTHNMFEFWDWVGGRYSLWSAIGLSIALSIGFDNFEQLLAGAHEMDKHFRTAPMEQNIPITLALIGIWNCNFLGAETEAMLPYDQYLHRFAAYFQQGNMESNGKYVDRSGQVINNYQTGPIIWGEPGTNGQHAFYQLIHQGTKIIPCDFIAPAQTHNVLSDHHNKLLSNFFAQTEALAFGKTQQEVEAEFIQAGKSLDEVKNIVPFKIFTGNKPTNSILVQKITPFTLGALIAMYEHKIFVQGVIFNIYSFDQWGVELGKQLANRILPELVGDEQINSHDSSTNGLINQFKSWR

SEQ ID NO: 14612 - protein, 123 aa, Brassica napus
GVRALFKVCDGATTVFIQDCWGLDDDSFSLAKAFRRVRFLSLEGCSVLTTGSLKSVVLRWEKLESIRVMSCKNIKASEFSPALSSLFSLLKELTWRPDTRFLFSSRLQGAGIGKKGSKFFKKK

SEQ ID NO: 14613 - protein, 131 aa, Hordeum vulgare subsp. spontaneum
HGHATDKVEEYGQPVAGHGGFTDGPTGTHGAAGVGGAQLQATRDGHKTDGVLRRSGSSSSSSDDGVGGRRKKGMKEKIKEKLPGGAHKDAAGQQQQTAMAGEYAGTHGTEATGEKKGVMDKIKEKLPGGQH

SEQ ID NO: 14614 - protein, 258 aa, Legionella pneumophila str. Paris
MNLIEQDIDNNGILTLTLNRPEKLNALSTDVLSALNELFFQAKSNPKVKALLLTGNGKAFCAGADINRLAECNAQTGYEFACQGQEVFRLLETMGKPSLAAVNGFAFGGGCELAISATLRIASNKAMFGQPEVKLGVIPGYGGTQRLARLIGKGRAMDLCLTGRFINAETALNWGLVSEVVAPEDLLTQGKNILNGILSMAPLAVASVMEVIDHGYDLSLTEALHLEAIHFAKVCATEDKKEGVAAFLDKRTADFKGV

SEQ ID NO: 14615 - protein, 159 aa, Propionibacterium acnes KPA171202
MVRDASFDRDFSHRVMAASCSTPRVRLAFVNERCRSNRHDLDSSGRLRKAVMNNVIEVTDATFASEVLGASKPVLVDYWADWCAPCKQLSPIIEELAGTYGDRMVFAKVDTNANTRVAAEQGIMSLPTIQVWQGGQLVKSLQGGKTKKALVKIIEEFVA

SEQ ID NO: 14616 - protein, 1053 aa, Dechloromonas aromatica RCB
MSERKQLRILCFGNPLHGDDGFGPTVSLALRRKVLPAGVEVVDCGTRGLDVLHLFEDCTSVIVIDAMAGERPGTLHELSPHQVPVENTASGGHGAGVGYLLAAVREMIARPPVIKIIAVEIGAVKSFSPGLSLEVAAAVSEAIELIQDCCAAMAGHDPDELANELETLRQANRALEAELTKCTEALDQLISEQENQNDELRHRSRQLAMLQGTVDRAIDTMAEIIVMLGPDGRVTRTNRLLEIELGYTAESLVGGYFEDCLPLAGQNALRALLPAGAKPPLLLNAIRAAGGHFVAELNFRRADAASEHDLEGTVPYLVHASLIHSQAGKLEGAIVISTNISVLKAREKALRNNERQLHETAEELRNHRDNLAAMVEEQTRDLRQAKEQAEEASRAKSEFLSNMSHEVRTPLNAILGLSDLCLQTPLNPQQNQHLSKIRLAADHLLGIINDILDFSRIEAGKLSIEKLIFELPSLLEEISDLLIGRIEEKNLELCVDIAAEASRSFVGDPLRLKQVIINLLGNAIKFSDQGSVRLGCRIDSTDHNSTSLHFSVSDEGIGISEEQQNALFSAFSQADTSTTRRFGGSGLGLVISKRLVELMGGRIWLESTPGNGSTFHFTIRLDNAPDVPLLIDELRKHLAKHAGRTVLITDDNPFAAQALAAQCQQLGLLTETCPSGESALAALNHPGANYLAALIDWHLPAGLDGVETMKRIRSNLGVQAPPLILLSSQKASGASALDDLPADALLIKPCSVRHLYAALARPLHLPEITMRAPAVPALDLSGIALLSNTDILVVDDIELNRDLMRELFATAGLNIRLACNGREAITAIHSKKPDLVLMDCQMPVMDGFSATRELRARPEYAELPIIALTAGALDHDREQCLAAGMNAYVTKPVNLEKLLRVIAEQLSPGTAGSMPERRTALPPPPPNSVTTTPHAETTKLPELPGIDVTAGLMRVRNKADFYCRMLVKFRDTHCAALAADLRAALDEGNRPEAIRLAHSVKGIALSLGIDMLGERALNLEMKLKDPTASDVAPEVELLLTELAQIRQVLQALG

SEQ ID NO: 14617 - protein, 365 aa, Mesorhizobium loti MAFF303099
MTDLGLYRHLDQMAPWNDRLQVLEVIGVSDEAPDVKTFTFRSDNQTWFRYKPGQFVTLELPTPDGPLMRTYTLSSSPSRPFSIAVTVKAQAGSIGTRWMFDHLVPGSHVKAYGPSGDFSLHSHPAAKYLFISAGSGVTPMMSMLRWLNDCAPWTDVGFVNCARRPEEIIFRKELELLGGHMPGLSLGFMIEERSSREGWYGHMGRIDAIRLPLLAPDFREREIFCCGPDPFMRAVRGMLEAAGFDMTKYHQESFAAPAVEEVPAPFVSPGEDGVTVPVEATPIRFALSVVDAECVAGQTVLQTARASGVRIPAACEFGLCGTCKVKKVSGAVEMSHNGGILDHEIDDGFILACCSKPLSALEIEA

SEQ ID NO: 14618 - protein, 278 aa, Triticum aestivum
  misc_feature (189)..(189): Xaa can be any naturally occurring amino acid
  misc_feature (251)..(251): Xaa can be any naturally occurring amino acid
  misc_feature (263)..(263): Xaa can be any naturally occurring amino acid
NKFVQKSRLVPVRNSRDIVDPRVRVLLSSHLSSHATVNARLQQCSVSLNSIGFAVIRKGCLRLRCYAIGDAGRRNDPLNENKNGPISQELNGSSASFTTVGAEITQETGDFFSSDAEGDPDKPTEGFSSIEDAINSLREGKFVIAVDDEKGDNEGDLIMAADQASPESIAFMIRNGSGIISVGMKEEDXLERLMLPMMSPVTEIGDISAAASTATVDARVGITTGVSAADRAKTILALASPDSKPSDLRRXGHIFPLKYRNGXLLKRAGHTEHRWICP

SEQ ID NO: 14619 - protein, 858 aa, Dechloromonas aromatica RCB
MAEKPVLLRSSKKQLAIPAVWLAATLVFFSLTVLLAYDLYQSYQREFASVRRDSGNLSGVLERQFTASGEKIDIVLREAVHEYTPIVTGAASRSVLNANQDLLRREEVVPETQDKSLRVIDAKGRVIFSASDSADLPEINVGDRAYFLKQKNDPAAGLVISEPILSRFTGKWLFTLSRRIDHPDGRFAGIVQTAMRADYFQNAFKSIDTGEHGSIAMFSSDFRLVARYPILDELLGKPFELTEIQTGLDKGQRIGSYQAVSRTDGVTRLYNYRQLETLPLIIALGMAPEDFLKGWKRKAWIYFISWLAFGAALSILIRLAQRRSRVIDKLNDQLAEQVSQAKAASQAKSNFLANMSHEIRTPMNAIIGLTHMLRRDKVTPAQGEKLIRIAGAADHLLSVINDILDLSKIEAGKVELEAENFSPEEMLQRICSIVLLRAQAKGIELVVDAGELPALLNGDVTRLGQALLNYLSNAVKFTEKGSIILRGNVLKETEKDVLVRFEVEDSGIGISPEKLAHLFTAFEQASASISRHYGGTGLGLAISRHIAMLMGGEAGASSTPGKGSIFWLTARLGKAHQEAIPLSTELAGRRALVADDLQITQMVHCHLLRQLGLSPEAVVSGPAAIAAIQKADAENDPFSILLLDLLMPGQGGMDTLAKIQKLSLNRPPICMLVTASGDSSIAISARAAGFADVLVKPINQSILKAALAPHFSMSPLPVSQKEVLPEQILSREYAGAKILLVEDEPVNQAIAKEFLQGAGLNVTLANNGRKALELAESRAFDLILMDMQMPVMDGLQATRQIRALPGYSEVPIIAMTANAFTEDRTKCLLAGMNDFICKPVEPEVFFSMLLKWLTSIKA

SEQ ID NO: 14620 - protein, 488 aa, Kineococcus radiotolerans SRS30216
MSTTQHEQDLVRAVPTGLFVGGGWREAEGGRTVDVEDPATGQVLVAVSDASVADGTAALDAAVAAAPAWARTPTRQRAEVLRRAFELITARADDFALLMTLEMGKPLAEARGEVAYGAEFFRWFSEEAPRIAGRYAQNPAGGSRLLTLKQPVGPVLAILPWNFPLAMGTRKIAPALAAGCTIVVKPATQTPLTTLLLAQVLAEAGVPDGVVNVVTTTSTAEVVEPLVRDPRLRKLTFTGSTPVGKKLVAQSAERLLRVSMELGGNAPFLVFDDADLDAAVEGAVAAKMRNTGEACTAANRFYVQRPVAEEFSRRLGERLGAMVVGRGTEDGVQVGPLIDARARDGVARRVSEAVDAGAQVLVGGSPVGERGYFYAPTVLTGVPAGSRLLTEETFGPVAPVVVFDEEAEGVALANDTEYGLVGYAFTRGLDRGFRVAEALETGMVGLNAGVISNAAAPFGGVKASGFGREGGAEGIEEYLETKYVGFPL

SEQ ID NO: 14621 - protein, 982 aa, Dechloromonas aromatica RCB
MGVVFNTLSVAEALVFRRTLLAIVVAINCLAICVGAYTLYDSRQLYDRQAEAESRNLARALDENLAVSLGRVEVTLGSVVDRLEEELNRHATLQEVSLASFIKRAESHLGAHVRVRVSDESGMVILGGDVVPGTTTWGGRSFFRQLKEHPETGTLINDPVLGYVTKVHLVPVAARYRYPDGRFAGIVSVAVPVSYLSDQLAKLDYGPHGLAVLRDAKLNLITRYPALNKPEGELGAPIYNKTLIAGIEDGKRSFFYHTQTTPDGVSRLITYQRLSSMPFHLIVGLAHDDYLLPWYERLQQTVIALVIFAFATFALSLLLLGMLSSLRRQGEHAVALLKNASDGVHILDRHGVIVEANDAFCALLGYSRQEVIGMAIGQWDSSVKDVDVEAMLAQRFQSPVPDQFETRHRRKDGSEFPAEVSFQPMVIEGVELLYASSRDISDRKRAELVLARERSMYRTLIDTLPDLIWLKDADGVYLSCNRRFEQFFGTSEQEIVGKTDYDFVSKELADFFREHDRKAMEKDGPSINEEEVPFASDGHRELLETTKMSMRDASGKLIGVLGIGHDITAKRRSELELDGHRQHLQELVDSQTADLMVAKEVAETASVAKSAFLANMSHEIRTPMNAITGMVHILRNMGVTPPQSEKLDIIENASKHLLGIINDVLDLSKIEAGKFTLEDVPLSIRALFGNVASMLGPKVREKGLVLNIEADDVPRNLRGDPTRLQQALLNFAGNALKFTERGHITLRARILEETELSANLCIEVEDTGVGIAPEALPKLFGAFEQADNSMTRKYGGTGLGLAITKKIAEVMGGTAGVNSTPGGGSTFWFTVILGKSDEIAEVPSRTAMTEADAMLRRDCAHRRILLAEDEPINREIAQMLLEAVDLDVEMAENGEIAVRMALANCYDLILMDMQMPVLDGLAATRRIRELPACAAVPILAMTANAFAEDKAQCLAAGMNDFIAKPVVPEVLYDTLLKWLRRL

SEQ ID NO: 14622 - protein, 152 aa, Arabidopsis thaliana
  misc_feature (115)..(115): Xaa can be any naturally occurring amino acid
  misc_feature (123)..(123): Xaa can be any naturally occurring amino acid
  misc_feature (140)..(140): Xaa can be any naturally occurring amino acid
MADEIQTEFDSADAGASLTFPMQCSALRKNGFVVIKGRPCKIVDMSTSKTGKHGHAKVHLVATDIFTGKKYEDLSPSTHNMDVPHVQRKEFQLLDVADDGFLSIMGDDGAIRDDXKKPDGEIXDKIDKFFAEGKDTNVVXLTAMGEQLAIEA

SEQ ID NO: 14623 - protein, 828 aa, Actinobacillus actinomycetemcomitans
MNLSRRDFMKANAAMAAATAAGLSIPVKNVEAAESEIKWDKAVCRFCGTGCAVLVGTKDGRVVASQGDPDAEVNRGLNCIKGYFLPKIMYGKDRLTQPMLRMKDGKYDKNGDFTPVSWDVAFKTMAEKFKAAVKELGPNGVGMFSSGQTTIFEGYAKSKLWKAGFRSNNIDPNARHCMASAAVAFMRTFGMDEPMGCYNDIEQAEAFVLWGSNMAEMHPILWSRITDRRLSNQDVKVAVLSTFEHRSFELADYSLIFKPHTDLVILNYIINYLIQNDAINRDFVNKHTKFKRGETDIGYGLRPENPLEQKAKNVKTAGKMYDSNFDELKALVAEYTLDKAHEMSGVPKDVLENLAKLYADPKKKVVSYWTMGFNQHTRGVWANHLIYNIHLLTGKISIPGCGPFSLTGQPSACGTAREVGTFIHRLPADLVVTNPKHREKAEQIWKLPAGVITDVLGFHAVAQSRALKDGKMRVLWQMCTNNMQGGPNINRETFPGWRNPDNFIVVSDPYPTVSCLAADLMLPTAMWVEKEGAYGNAERRTQFWRQQVKAPGEAKSDVWQLVEFSKYFTTDEMWPAEILDKNPEYKGKTLYDVLYRNGQVDKFPLSELAEGQLNDESYHFGFYLQKGLFEEYASFGRGHGHDLASFDTYHKARGLRWPVVDGKETLWRYREGYDPYVKEGEGVAFYGYPDKKAIILAVPYEPPAESPDEEYDLWLCTGRVLEHWHTGTMTRRVPELHRSFPNNLVWMHPTDAQKRGLRHGDKVKVASRRGEIISFLDTRGRNKVPEGLIYTTFFDAGQLANKLTLDATDPISKETDFKKCAVKVEKAA

SEQ ID NO: 14624 - protein, 206 aa, Gibberella zeae PH-1
MSKLFIGGLAWHTEEATLRQKFEEFGPVEEAVVVKDRDTGRSRGFGFVRYTQEGDAQNAIAAMNNVEYESLWFLVIQQRCYRIILRDLTMYRFDGRNIRVDKASDNGPRGGFGRGGGGGGGGGYGRNFGGPMPYGMGPPGPGYQMPAPNMYAPMPYGRGYPPQQGYGGPPQGYMPPQQQYGYHDPSQQIPPQQQQQQQHHQGGRGY

SEQ ID NO: 14625 - protein, 139 aa, Triticum aestivum
AELGPTSHAPGRHRGISVAPEVRLFREEVNDFARTGSIATQTVELKEGPLGQFSHEMEPFLRKQGLPVRLNKGVVELVADHVVCEEGKPLSPEAAHTLRVLGTKMATFRLYLVCRWSSDDFEVYKEGLAHLAGEEDESS

SEQ ID NO: 14626 - protein, 284 aa, Burkholderia vietnamiensis G4
MNAPFARDGHAARLLVGHVMHERLRPVRHAFTYPIFQVCCDVERLDEIDGRWFGVDRWRPLALASRDYGPRDGRPLGPWMRDLLARAGIPADGPIWLQTIPRIFGYAFNPVSFWYCYDRAGRLRALYADVRNTFGAYHGYLLTALHHAPIDAGTALVCRKTFHVSPFCEVVGSYAFRVRQRGDRLSVAIDYRDDDGLLLRTALGMRAEPLTAARAWRALARQPLNAVNVVIRIHWHALRLWLARVPFYGKTPPGHSAGADSSLSRSPDASSRGRPATSDHEARP

SEQ ID NO: 14627 - protein, 535 aa, Ralstonia eutropha JMP134
MATRARPVFLHSPHSQTRRATQARRPAQEIPMTAPYNDSADVIHFVSGELYAGSGTRSQAVFNPATGAVARQLRLGTVEDVDAAVASALAAFPKWADTPPIRRARVMLKFLELMNQHKDELATIITAEHGKVLSDAAGEVSRGIDIIEFACGIPQLLKGDFTDQVSTGMDNWTLRQPLGVVAGITPFNFPCMVPCWMFPVAIAAGNCFVLKPSERDPSASLFMAKLLKRAGLPDGVFNVVQGDKIVVDALLHHSDVKAVSFVGSTPIANYIYETGARLGKRVQALGGAKNHMVVMPDADIDQAVDGLIGAAYGSAGERCMAISVAVLVGDVADKIMPKLEARARELVIRNGMDPAAEMGPVVTGQALERIENYIALGVEEGAKLVVDGRNYKVPGHEQGFFTGGTLFDNVTPDMRIYKEEIFGPVLSCVRVDDFAQAVKLVNDHEFGNGVACYTRDGQVAREFARRIEVGMVGINVPIPVPMAWHGFGGWKRSLFGDMHAYGEEGVRFYTRQKSVMQRWPEDVTRGAEFAMPTAK

SEQ ID NO: 14628 - protein, 335 aa, Delftia acidovorans
MKLAHSLTVTAVSPQGSDAILLSLGVDGGQRQHFSFQSGQYLTLAVPVQGDEHWRCYSITSAPEDGQAISVLVRRVAGGRVSNWLCDHARAGQRLQVLPPAGRFTLARHGQPVLLYAGGSGIAPIFALAREALLQGAPQVRLFYACRDRATAMLLAELQALQAGSGQRLEIRHWYDAEQGLPTQALLEAQTQGLEAADAYLCGPEAFMHSVLAALAAAGIEPSRVYREDFGAALEGAVETGAEGPDAELTVQLKGQTHTVSVRGGQFLLGAMLDAGLAVPHACRVGECASCMCRLVDGEVLRLDSSVLDEDDAAEGWLLACRTRAASAQVRLRFS

SEQ ID NO: 14629 - protein, 169 aa, Kalanchoe fedtschenkoi
SDSGKDAGRLSAAWQLYKAQEELIEVAKKHGVKLTMFHGRGGTVGRGGGPTHLAILSQPADTIQGSLRVTIQGEVIERSFGEAQLCFKTLQRYTAATLEHGMIPPLTPKPEWRALMDDMAVVATERYRSIVFREPRFVEYFRLATPELEYGRMNIGSRPSKRKPSGGHR

SEQ ID NO: 14630 - protein, 89 aa, Methanopyrus kandleri AV19
MGRTKKVGPAGRFGPRYGMRIRRRVAEIESVQRQKHECPVCHKRAVKRVGTGIWRCTKCGAEFTGGAYYPETEAQRIVRRAIRKALEEK

SEQ ID NO: 14631 - protein, 122 aa, Triticum aestivum
  misc_feature (40)..(40): Xaa can be any naturally occurring amino acid
  misc_feature (117)..(117): Xaa can be any naturally occurring amino acid
MAPTVMASSATSVAPFQGLKSTAGLPVSRRSNGASSAASXNGGRIRCMQVWPIEGIKKFETLSYLPPLSTEALLKQVDYLIRSKWVPCLEFSKVGFIFREHNASPGYYDGRYWTMWXLPMFG

SEQ ID NO: 14632 - protein, 394 aa, Rickettsia typhi str. Wilmington
MAKAKFERTKPHVNIGTIGHVDHGKTSLTAAITIILAKTGGAKATAYDQIDAAPEEKERGITISTAHVEYETNNRHYAHVDCPGHADYVKNMITGAAQMDGAILVVSAADGPMPQTREHILLAKQVGVPAMVVFLNKVDMVDDPDLLELVEMEVRELLSKYGFPGNEIPIIKGSALQALEGKPEGEKAINELMNAVDSYIPQPIRATDKPFLMPIEDVFSISGRGTVVTGRVESGIIKVGEEIEIVGLKNTQKTTCTGVEMFRKLLDEGQSGDNVGILLRGTKREEVERGQVLAKPGSIKPHDKFEAEVYVLSKEEGGRHTPFTNDYRPQFYFRTTDVTGTIKLPFDKQMVMPGDNATFSVELIKPIAMQEGLKFSIREGGRTVGAGVVTRINN

SEQ ID NO: 14633 - protein, 102 aa, Brassica napus
SGRVGSVYERKASIREFYAVIFPSLLQLQRGITDLEDRKQKEVCSMRYRKKDEGKKCELSEIEMEREEECGICMEMNSLVVLPNCTHSLCIKCYRDWRGRSQ

SEQ ID NO: 14634 - protein, 452 aa, Rickettsia typhi str. Wilmington
MILNIKAPENIVLKPTITVFGVGGAGSNAVNNMIHANLQGANFVVANTDAQSLEHSLCINKIQLGVSTTRGLGAGASPEVGALAAQESENEIRSSLENSNMVFITAGMGGGTGTGSAPIIARIAKELGILTVGVVTKPFHFEGGHRMKTADKGLIELQQFVDTLIVIPNQNLFRIANEQTTFADAFKMADDVLHAGVRGVTDLMIMPGLINLDFADIKAVMSEMGKAMMGTGEDSGEDRAIKAAESAISNPLLDHSSMCGARGVLINITGGPDMTLFEVDNAANRIREEVDNIDANIIFGSTFNPELKGIIRVSVVATGIDADKVPKYKLAIDENTNTVPKETYNESMIQHTQIEEIPAFNNYSTENIEITDSSIKQNYTENEQELRLHVNAVNKPENNSQKSSFLWKIWGSLRASNNQTLERKNVIVNTLDQDNKESDIHDIPAFLRKKRD

SEQ ID NO: 14635 - protein, 215 aa, Tropheryma whipplei str. Twist
MRHIPDALNALRAGRPVVVLDDKNRENEADVIMAAQFATQEWVAWIIRHTSGFLCVPLSNQRADKLQLPSMVAANEDRFKTAYTISVDAADAAITTGISAADRSLTIRTLAARDSSAKHLVRPGHILPLRARDGGLLERRGHTEAAIELMRQAQLEPVAVIAELVSDTGELLRGRALDEFIRKNNLVLVEISQIIEYMKMSDLKDISMNLNRDCL

SEQ ID NO: 14636 - protein, 123 aa, Triticum aestivum
MASPATGEETVRASHILIKHEGSRRKASWKDPEGRVISATTRADAAARLGELRAQILAGRASFADLAAQHSDCSSARRGGDLGTFGRRQMQKPFEDATYALKVGEISNIIDTESGVHIILRTA

SEQ ID NO: 14637 - protein, 459 aa, Bacteroides fragilis NCTC 9343
MKQTRGYLLLICIVSAMGGLLFGYDWVVIGGAKIFYEPYFGIENSAALRGWAMSSALIGCLAGALLSGIWSDKYGRKKMLVIASFLFALSAWGTGAVDHFSYFIFYRIVGGLGIGIASNISPVYIAEVSPAHVRGKFVSLNQLTIVLGILLAQLANWQIGEYYTQGSDILSETSVQWAWRWMFWAELIPAGIFFLLSFIIPESPRWLATVHQQEKAQKTLTRIGGETYARQTLEELNQLTQSQGNRQNNEWKSVFRPEMRKVLIIGIVLAIFQQWCGINVIFNYAHEIFSSAGYAVSDVLMNIVVTGITNVIFTFVAIYTVDKWGRRTLMLIGSAGLALIYLILGTCYFLDVNGLPMLLLVVLAIACYAMSLAPVVWVVLSEIFPVKIRGMAIAISTFFLWVACFILTYTFPVLNESIGAEGTFWLYGGICLAGFLFIRQNLPETKGKTLEEIEKELIK

SEQ ID NO: 14638 - protein, 623 aa, Lolium perenne
MESRAIPSAAYAPLLPSAADDVALAKQDRPSVGWRGFLTVLAASGVVVLLVGATLLAGSRMGQAGDGEGNTDEDGAGGFPWSNEMLQWQRAGFHYQPEGHFMSDPNGPVYYRGYYHLFFQYNRRGVAWDDYIEWGHVVSQDLVHWRPLPLAMRPDHWYDKKGVLSGTITVLHNGTLVLLYTGVTEDPMAESQCIAVPTDPNDPLLRHWTKHPANPVLAHPQGVQGMDFRDPTSAWWDKSDSTWRILIGSKDDDNGSHAGIAFIFKTKDFLSFERVPGIVHRVEGTGMWECIDFYPVGGGHNSSSEELYVIKASMDDERHDYYSLGRYDAAANTWTPLDAELDLGIGLRYDWGKLYASTSFYDPLKQRRIMLGYVGEVDSARADVAKGWASLQSIPRTVALDEKTRTNLLLWPVEEVEALRYNSTDLSGITVENGSIFHLPLHQATQLDIEASFRLDASDVAAINEADVGYNCSSSGGAAARGALGPFGLLVHAAGDLRGEQTAVYFYVSRALDGSLRTSFCNDETRSSRARDVTKRVVGSTVPVLDGEALSMRVLVDHSIVQSFAMGGRVTATSRVYPTEAIYARAGVYLFNNATGASVTAERLIVHEMASAVYDETVMVKDS

SEQ ID NO: 14639 - protein, 1104 aa, Emericella nidulans
MPLLDGPRNGETVTASAHNGIPIIDGVDPSTLRGDIDQDPNRRQKIVVVGLGMVAVAFIEKLVKLDSERRKYDIVVIGEEPHIAYNRVGLSSYFEHRKIEDLYLNPKEWYGSFKDRSFDYYLNTRVTDVFPQHKTVKTSTGDIVSYDILVLATGSDAVLPTSTPGHDAKGIFVYRTISDLERLMEFAANHKGQTGVTVGGGLLGLEAAKAMTDLEDFGSVKLIDRNKWVLARQLDGDAGSLVTKKIRDLGLEVLHEKRVAKIHTDDDNNVTGILFEDGQELDCCCICFAIGIRPRDELGGSTGIQCAKRGGFVIDESLRTSVNDIYAIGECASWENQTFGIIAPGIEMADVLSFNLTNPDKEPKRFNRPDLSTKLKLLGVDVASFGDFFADRDGPKFLPGQRPSAESIGAADPNREEEPQVKALTYRDPFGGVYKKYLFTMDGKYLLGGMMIGDTKDYVKLNQMVKSQKPLEVPPSEFILGAQSGGEENADDLDDSTQICSCHNVTKGDVVESVKSGTCKTIADVKSCTKAGTGCGGCMPLVQSIFNKTMLDMGQEVSNNLCVHIPYSRADLYNVIAIRQLRTFDDVMKSAGKCPDSLGCEICKPAIASILSSLFNPHLMDKEYHELQETNDRFLANIQRNGTFSVVPRVPGGEITADKLIAIGQVAKKYNLYCKITGGQRIDMFGARKQDLLDIWTELVDAGMESGHRYAKSLRTVKSCVGTTWCRFGVGDSVGMAIRLEQRYKSIRAPHKFKGAVSGCVRECAEAQNKDFGLIATEKGFNIFVGGNGGAKPRHSELLAKDVPPEEVIPILDRYVIFYIRTADKLQRTARWLESLPGGIEYLKDVVLNDKLGIAAEMERQMQELVDSYFCEWTETVRNPKRRKYFQQFANTDETVENVEIVKEREQVRPTYWPKDGANEDFKGHQWSSLSWQPVIKADYFSDGPPAISSANIKRGDTQLAIFKVKGKYYATQQMCPHKRTFVLSDGLIGDDDNGKYWVSCPYHKRNFELNGEQAGRCQNDEAMNIATFPVEEREDGWIYMKLPPVEELDSVLGTEKWKVKKGEAVDPFEAYDKKYSGMKGKRAGAKGIEGSKPTRSPSNTIDW

SEQ ID NO: 14640 - protein, 527 aa, Arabidopsis thaliana
MEFDEYEYLEKTVEEGAGSNKKKEESGNERSERSYRKREGVERQGEEGGEEERVSSRSKKSRGDGEENGGGKRDRERERHRSSRDKDRERDKVREGSRDKESDRERSSKERDRSDRDKPRDRERREREKRSSSRSRREEKEPEVVERGSRRHRDKKDEPEADPERDQRTVFAYQMPLKATERDVYEFFSKAGKVRDVRLIMDRNSRRSKGVGYIEFYDVMSVPMAIALSGQLFLGQPVMVKPSEAEKNLAQSNSTTVGGTGPADRKLYVGNLHFNMSELQLRQIFEAFGPVELVQLPLDPETGQCKGFGFIQFVQLEHSKAAQIALNGKLEIAGRTIKVSSVSDHIGTQDSAPKSADFDDDDGGGLALNAQSRAMLMQKLDRSGIATSIVGSLGVPGLNGAAFNQPGMNPSFPTSVLPTTAIPSFVNEHVGLPSECLLLKNMFDPATETEPNFDLEIRDDVADECSKYGPVNHIYVDKNSAGFVYLRFQSVEAAAAAQRAMHMRWFAQKMISATFMPPHEYEAKAKA

SEQ ID NO: 14641 - protein, 252 aa, Medicago truncatula
MASSTLISDTQPWKDLKDHVEDIKKTHLRDLLSNEERSKSMTVEFDGILLDYSRQQATLETTEKLFKLAEAASLKQKINQMYNGEHINSTENRAVLHVALRAPRDAVIESDGKNVVPDVWNVLDKIKEFSERVRSGSWVGATGKELKDVVAIGIGGSFLGPLFVHTALQTEPEAIESARGRTLRFLANVDPIDVAKTITGLNPETTLVVVVSKTFTTAETMLNARTLREWIISALGDLPIGYGDFTLWTLFE

SEQ ID NO: 14642 - protein, 112 aa, Shigella flexneri 2a str. 301
MKLVTVIIKPFKLEDVREALSSIGIQGLTVTEVKGFGRQKGHAELYRGAEYSVNFLPKVKIDVAIADDQLDEVIDIVSKAAYTGKIGDGKIFVAELQRVIRIRTGEADEAAL

SEQ ID NO: 14643 - protein, 112 aa, Photobacterium profundum SS9
MEWKMNDKIVQLTDATFDSDVVNAAGPVLVDFWAEWCGPCKMIAPILDEIANEYEGKVTIGKLNIDQNAATPPKFGIRGIPTLLLFKDGSVAATKVGALSKTQLKEFLDANL

SEQ ID NO: 14644 - protein, 255 aa, Pseudomonas putida KT2440
MRWSTPIDTNQPSSLSLSYNARHREFANRCAMQPYAIAPSILSADFARLGEDVDKVLAAGADIVHFDVMDNHYVPNLTIGPMVCTALRKYGVTAPIDVHLMVSPVDRIIGDFIEAGATYITFHPEATQHIDRSLQLIKDGGCKAGLVFNPATSLDALKYVMDKIDMVLLMSVNPGFGGQKFIPGTLDKLREARALIDASGRDIRLEIDGGVNVNNIREIAAAGADTFVAGSAIFNAPDYQEVIAKMRAELALARP

SEQ ID NO: 14645 - protein, 274 aa, Bradyrhizobium sp. BTAi1
MPTIIITGASDGIGAAAARQLKANGHNVVLVGRSKAKTEALARELNAPFHLADYTQLADVQRLAGELLDHGRIDVLANNAGGIMGQRALTSDGFEMTFQVNHLAPFLLTRLLLERLIASRAKVIQTASAAANIFGRNFDVDDLNNERGYTPQGAYGYGKLENILFTRELDRRHRADGIAAVSFHPGIVRSNFANDTTHLMRLFYHSPLKYLITISPERSAQRLTWLAESAPGTDWQLGECYSGRKPMPVAFKDDGTAARRLWEHSETFVKPWLG

SEQ ID NO: 14646 - protein, 407 aa, Pisum sativum
MATTSVVPANRGRTVISNEDMDFETTEGVKAIATFEGMGIKEDLLRGIYAYGFEKPSAIQQRAVAPIIQGRDVIAQAQSGTGKTSMIALTVCQVVDTSVREVQALIVSPTRELATQTEKVILAIGDHINIQAHACIGGKSVGEDIRKLEHGVHVVSGTPGRVCDMIKRRTLRTRAIKLLVLDESDEMLSRGFKDQIYDVYRYLPPDLQVCLISRTLPHEILEMTNKFMTDPVRILVKRDELTLEGIKQFFVAVEKEDWKFDTLCVIFMILSPSLKLLYSVNTKRKVDWLTEKMRNNNFTVSSMHGDMPQKERDAIMGEFRAGTTRVLITTDVWARGLDVQQVSLVINYDLPNNRELYIHRIGRSGRFGRKGVAINFVKSDDIKILRDIEQYYSTQIDEMPMNIGDLI

SEQ ID NO: 14647 - protein, 131 aa, Hordeum vulgare subsp. spontaneum
HGHATDKVEEYGQPVAGHGGFTDGPTGTHGAAGVGGAQLQATRDGHKTDGVLRRSGSSSSSEDDGVGGRRKKGMKEKIKEKLPGGAHKDAAGQQQQTAMAGEYAGTHGTEATGEKKGVMDKIKEKLPGGQH

SEQ ID NO: 14648 - protein, 231 aa, Triticum aestivum
  misc_feature (45)..(45): Xaa can be any naturally occurring amino acid
RVELAFLPSAPFSLVPVAPMQIPNEFSPAFNHSPRVRSDESTNNXPREVEIPTLITWSQGGNEVFVEGSWDNWTSRKVLERSGKDHAVLLVLPSGIYHYRMIVDGVPRYVSELPHVTDERGQEYIPDSLDSVAEFDAPPSPEHSYNMEFPTDEELTKQDPPALPPQLLMTALGGIDHFDEHALKPKPQHVVLNHLFIEKGWGAQSLLALGLTHRFQSKYVNFVLYKPLVRR

SEQ ID NO: 14649 - protein, 488 aa, Ralstonia eutropha JMP134
MIQTQLYIDGRWQSPLEGSTRDILSPADESVIAQAAEGTRADARIAIAAARRAFDGPWRQTTIRDRARLLNRIAALIDRDAEELARFESLNTGKTLTESRTDMGDIAATFRYFAGLVASESGAVNEAPHHVISRTLREPVGVCGLITPWNYPLLQAAWKIAPALGAGNTVIIKPSNLTPLTTHHFTKLIAELDLPAGVFNLVTGGAEVGAELAESRDVDLVSFTGGAFAGESIMKAATGNFKRIGLELGGKNPNIVFADADLDVAVDYALNAAFFHAGQVCSAGSRLMIEDSIYDAFVAKLAERLPRIAIGNGFHAETQMGPVQSAQQHEKILRMVQAGVAEGARLVYGGKRPEGDVYRKGYWLQPTLLADVTADMNIAKDEIFGPVVTAERFRSEDDALRAANDTPYGLAAAVWTRDLDKANRMSRALRFGTVWVNDYHPYFPEAPWGGYKASGIGRELARIGLDEYTELKHSYINLAPKAMGWFGA

SEQ ID NO: 14650 - protein, 205 aa, Crocosphaera watsonii WH 8501
MLRNPHRLEFFGNLLDAGKATLCGEESFGTGSNHIREKDGLWAVLFWLNILAVKGESVEKIVRDHWQVYGRNFYSRHDYEEVESGPANELMERLRSQVGEMKGKTYGNYEVDYADDFAYTDPVDGSVSQKQGIRIGFTDGSRIVFRLSGTGTKGATLRVYIESYEPDANKHGVETQEALSPLIQLAEEIAQIKQFTGRDKPTVIT

SEQ ID NO: 14651 - protein, 363 aa, Escherichia coli O6
MSKNYHIAVLPGDGIGPEVMTQALKVLDAVRNRFAMRITTSHYDVGGAAIDNHGQPLPPATVEGCEQADAVLFGSVGGPKWEHLPPDQQPERGALLPLRKHFKLFSNLRPAKLYQGLEAFCPLRADIAANGFDILCVRELTGGIYFGQPKGREGSGQYEKAFDTEVYHRFEIERIARIAFESARKRRHKVTSIDKANVLQSSILWREIVNEIATEYPDVELTHMYIDNATMQLIKDPSQFDVLLCSNLFGDILSDECAMITGSMGMLPSASLNEQGFGLYEPAGGSAPDIAGKNIANPIAQILSLALLLRYSLDADDAASAIERAINRALEEGIRTGDLARGAAAVSTDEMGDIIARYVAEGV

SEQ ID NO: 14652 - protein, 297 aa, Novosphingobium aromaticivorans DSM 12444
MTAAVIDGKAFAATLRGRVGDLATAFEARAGRKAGLAVVLVGEDPASQVYVRSKGKSTLEAGMASFEHKLPADTAEADLLAVVEQLNADPAVDGILVQLPLPRHMDEQKVIAAINPDKDVDGFHVINAGRLAVGQPGFVPCTPLGCLMLLKDRLGDLSGLDAVVIGRSNIVGKPMAQLLIAESCTVTVAHSRTKNLPEVVRRADIVVAAVGRPEMVKGDWIKPGATVIDVGINRVPGKEEGKTRLVGDVDYASAAEVASAITPVPGGVGPMTIAVLLRNALVAAYRNAGIDLSADAI

SEQ ID NO: 14653 - protein, 512 aa, Geobacter metallireducens GS-15
MAELKTIKIFDTTLRDGEQSPGNSMNIDEKLRVAKQLLKLNVDVIEAGFPIASEGDFEAVKRVAQTIKGPEIAGLCRSSDKDIDRAWEALKYAGEKGRIHTFIATSDIHMKYKLKMTREQVLENAVKAVKRAKSYTPNVEFSCEDAVRTDLAFLVQMVEAVIDAGVTTVNIPDTVGYTIPFEYFNIIRHLKENVSNIEKAVISVHCHNDLGLSVANSIAAVQAGAGQVECTINGIGERAGNCSLEEFVMAIKTRHDILPFRTNVDHEQIVPASRLLSTITGIGVQPNKAIVGANAFAHESGIHQHGVLMEKSTYEIMTPESIGLKTNVLVLGKHSGRHAFKKRLAELGYELSDEDLNRAFERFKALADLKKEVFDEDLDALVADEVMRPAEKFRLSHITVTCGSFAVATSTVQMEIDGTAVRTAELGDGPVDATLKAIKKLTKTKAKLQQYNVGSITGGTDAQGEVTVRVTDGNETVVGRGSSTDIIEASAKAYINALNRLNAKIERIHESL

SEQ ID NO: 14654 - protein, 259 aa, Brassica napus
  misc_feature (250)..(250): Xaa can be any naturally occurring amino acid
STPRPDKANQDSFAVHTPFGSNSDDHFFGVFDGHGEFGAQCSQFVKRRLCENLLRHGRFRVDAAEACDAAFLTTNSQLHADLVDDSMSGTTAITVMVRGRTIYVANAGDSRAVLAEKRDGDLVAVDLSIDQTPFRDDELERVKLCGARVLTLDQIEGLKNPEVQCWGTEEDDDGDPPRLWVPNGMYPGTAFTRSIGDSIAETIGVVANPEIAVVELTPDNPFFVVASDGVFEFISSQTVVDMVAKHKDPXDAWAAIVAE

SEQ ID NO: 14655 - protein, 336 aa, Zea mays
MKGLFKTKPRTPVDIVRQTRECLVHLDLHSGSRSGDAKRDEKMTELSKNIRDMKSILYGNGESEPVTEACVQLTQEFFRENTLRLLIIHLPKLNLETRKDATQVVANLQRQQVSSKIVASEYLESNKDLLDILILGYENMDIALHYGAMLRECIRHQSIARYVLESEHMKKFFDYIQLPNFDIASDASATFKELLTRHKATVAEFLSNNYDWFFEEFNSRLLSSTNYITKRQAIKLLGDMLLDRSNVAVMMRYVSSKDNLMILMNLLRDSSKNIQIEAFHVFKLFAANKNKPPEVVNILVTNRNKLLRFFAGFKIDKEDEQFEADKEHVIKEISAL

SEQ ID NO: 14656 - protein, 557 aa, Arabidopsis thaliana
MGKSKSATKVVAEIKATKPLKKGKREPEDDIDTKVSLKKQKKDVIAAVQKEKAVKKVPKKVESSDDSDSESEEEEKAKKVPAKKAASSSDESSDDSSSDDEPAPKKAVAATNGTVAKKSKDDSSSSDDDSSDEEVAVTKKPAAAAKNGSVKAKKESSSEDDSSSEDEPAKKPAAKIAKPAAKDSSSSDDDSDEDSEDEKPATKKAAPAAAKAASSSDSSDEDSDEESEDEKPAQKKADTKASKKSSSDESSESEEDESEDEEETPKKKSSDVEMVDAEKSSAKQPKTPSTPAAGGSKTLFAANLSFNIERADVENFFKEAGEVVDVRFSTNRDDGSFRGFGHVEFASSEEAQKALEFHGRPLLGREIRLDIAQERGERGERPAFTPQSGNFRSGGDGGDEKKIFVKGFDASLSEDDIKNTLREHFSSCGEIKNVSVPIDRDTGNSKGIAYLEFSEGKEKALELNGSDMGGGFYLVVDEPRPRGDSSGGGGFGRGNGRFGSGGGRGRDGGRGRFGSGGGRGRDGGRGRFGSGGGRGSDRGRGRPSFTPQGKKTTFGDE

SEQ ID NO: 14657 - protein, 418 aa, Novosphingobium aromaticivorans DSM 12444
MARIVMKFGGTSMAGTERIRRVARIVQRQQAAGHEVAVVVSAMAGETDRLVNFCREANPLYDPAEYDVVVASGEQVTSGLLAMHLQALGCKARSWLGWQLPIHTDDAHSKARIEGIDSEALLASMGAGEIAVIPGFQGLTADNRVTTLGRGGSDTSAVAVAAAVKADRCDIYTDVDGVYTTDPRIVAKARKLKNVTYEEMLELASVGSKVLQTRSVSLAMKEGVRVQVLSSFIDDDAPAADTIPGTMIVSDEELEGLDMERQLITGIAADKNEAKVTLTRIADRPGAVAAIFGPLAAANINVDMIIQNIAKDKGETDVTFTVPISDLARTQALLEERKDTIGYYRMLANSKVAKISVVGVGMRSHAGVASTMFRALADRGINIQAITTSEIKVSVLIDEDETELAVRVLHTAYGLDGE

SEQ ID NO: 14658 - protein, 499 aa, Methanopyrus kandleri AV19
MPDRVRIFDTTLRDGEQTPGVSLTVEEKVEIARKLDEFGVDTIEAGFPVASEGEFEAVRAIAGEELDAEICGLARCVKGDIDAAIDADVDCVHVFIATSDIHLRYKLEMSREEALERAIEGVEYASDHGVTVEFSAEDATRTDRDYLLEVYKATVEAGADRVNVPDTVGVMTPPEMYRLTAEVVDAVDVPVSVHCHNDFGMAVANSLAAVEAGAEQVHVTVNGIGERAGNASLEQVVMALKALYDIELDVRTEMLVELSRLVERLTGVVVPPNTPIVGENAFAHESGIHSHGVIKKAETYEPIRPEDVGHRRRIVLGKHAGRHAIKKKLEEMGIEVTEEQLDEIVRRVKELGDKGKRVTEDDLEAIARDVVGEVPESEAAVKLEEIAVMTGNKFTPTASVRVYLDGEEHEAASTGVGSVDAAIRALREAIEELGMDVELKEYRLEAITGGTDALAEVTVRLEDEDGNVTTARGAAEDIVMASVKAFVRGVNRLARRRRD

SEQ ID NO: 14659 - protein, 197 aa, Brassica napus
  misc_feature (143)..(143): Xaa can be any naturally occurring amino acid
MCGILAVLGCTDDSQAKRVRVLELSRRLRHRGPDWSGIYQHGDNYLAHERLAIVDPDSGDQPLFNEDKTIVVTVNGEIYNHEELRKDLKNHKFRTGSDCDVISHLYEEHGENFVDMLDGVFSFVLLDTRDNSFMVARDAIGVXSLYIGWGLDGSVWISSEMKGLHEDCEHFEVFPPGVLYSSKSGGFKQWYNPPWYN

SEQ ID NO: 14660 - protein, 521 aa, Yarrowia lipolytica CLIB122
MLLPLLFAGCVFFFLHQRLNYYRRKQRAYEKWLASGKFGAGQKVADIQVQNNFLRNPFGLVQFVEFLNRTKGAFFVDFVNQNFQKYGYILPTRTLGKVNIITCDPELIKTVLATNFKDWSIGIRRKAMFPVLGNAIFSVEGDQWTHSRAMLRPQFARDSIANVADLERHVTRLINVFRGYGVQSFDCQKYFFQFTLDSASDFLFGESTNSLSVQDDKSESEDTGESFNVLTQQGENAESFAQAFKVAFTFTAIRLRLQQFYWLLRPSNKKYRDSIDTVHRLVDGYVERALENKEDTDRYIISNQLVKVCDDKKYIRDQLLGILLAGRNTTAAVLAWIMYESARRPEIWNKMRQEVTDTFSDGPVTSDELRKCVYVRSVINEALRVYPSVPMNQRVAVRDTFLPTGGGPDGSLPLYCPRGTKVAYSVFALHMREDFYGSDSHIFRPERWNEGVGKGWQYLPFNGGPRICLGQQFALMEASYTLVRLVQEFDTVELDMEVVDPPPKMSSFSMVHRDGVRIRVK

SEQ ID NO: 14661 - protein, 321 aa, Prymnesium parvum
SKVGINGFGRIGRLVCRAAMMKEGAEVVAVNDPFCDVKYAAYLFKYDSTHGIYKGTVECDEASQMLIVDGKKIAFLAVKNPTEVPWGEKGADIVCESTGIFTVIEKASMHLQGGAKKVIISAPSADAPMFVMGVNHTDYKKDINILSNASCTTNCLAPLAKIIHDEFGIVEGLMTTVHATTATQKTVDGPSGKDWRGGRGAGQNIIPSSTGAAKAVGKVIPSLNGKLTGMAFRVPTPDVSVVDLTVKLGKETTYDAIKALVKAKAATPEWKGIMGYTEDEVVSTDFQGDSHSSIFDAKAGIMLTPTFVKLVSWYDNEWGYS

SEQ ID NO: 14662 - protein, 801 aa, Bacillus cereus ATCC 14579
MKKRLVMIGNGMAGIRCMEEILKHDSDSYEITIFGDEPHPNYNRIMLSHVLQGKTNMQDIIMNEYSWYEENEITLYTNEKVQSINREEKIIITEKNRTLTYDKLIIATGSSAFILPVEGSTLPGVTGFRTIEDTQFMIDTANEKKKAVVIGGGLLGLEAARGLIDLGMDVHVVHLMPNLMEQQLDTKAASLLREDLEAQGMKFLMEKKTVKILGTDHVEGIQFEDGEVVDCDLIVMAVGIRPNTQIAKDAGLIVNRGIVVNDYMLTNDESIYAVGECAEHDGIAYGLVAPLYEQGAILAKHITNLQTDGYSGSIVGTQLKVAGCDLFSAGQIYEDDQTKAISIFDECKRSYKKVLIRDNKVVGIVLYGDTADGTRLFSMLKKEEDIQEYTPASLLHKAGEESEFDVATMSADDTICGCNGVTKGSIVHAILEQELTTFEEVKGCTKAAGSCGKCRPLVEQVLSHTLGDAFDASAQSAGMCGCTPLSRDEVVAAIHEKGLKSPKEVRNVLGFAHEDGCSKCRPALNYYLRMAIPEEYEDDKSSRFVNERMNGNIQHDGTFSVIPRMYGGVTTADDLMKIAEVAKKYDVPLVKITGASRIGLYGVKKQDLPNVWADLHMTSGYAYSKSLRNVKSCVGSRFCRFGTKDSLGLGMLLEQSLEMVDTPHKMKMGVTGCPRNCAEVLTKDFGVVCVENGYQLYIGGNGGTEVREADFVMIVPTEDDVLRIAAAYMQYYRETGIYGERTAYWTERLGFDHIKEILQDASMVTTLNERFQTARRTYTEAWGQALETKSLKAMYEVETVK

SEQ ID NO: 14663 - protein, 499 aa, Erwinia carotovora subsp. atroseptica SCRI1043
MARSTVDVPDDVQIWMGDGRYKEGFFTQLETDELAHGINEDVVRAISAKRNEPEWMLEFRLNAYKAWLEMEEPHWLKAHYEKLDYQDYSYYSAPSCGNCDDSCGSEPGAKQQSGITDVNNYLTSEVENAFNQLGVPVREGQKVAVDAIFDSVSVATTYRHELAEKGIIFCSFSEAIQEHPDLVRQYLGTVVPANDNFFAALNSAVASDGTFVYIPKGVRCPMELSTYFRINAAKTGQFERTILIADDDSYVSYIEGCSAPVRDTYQLHAAVVEVIINKNAEVKYSTVQNWFSGKDDTEGGILNFVTKRALCAGDHSKMSWTQSETGSAITWKYPSVILRGDYSVGEFFSVALTNGRQQADTGTKMIHIGKNTRSTIISKGISAGRSENTYRGLVKIMPSATNARNFTQCDSMLIGSECGAHTFPYVEVRNNTAQLEHEATTSKIGDDQLFYCLQRGISEDDAISMIVNGFCKDVFSELPLEFAVEAQKLLAISLEHSVG

SEQ ID NO: 14664 - protein, 265 aa, Brassica napus
MAQTMLLTSGISANHFLRNKNPLAQPKVHHLFLSGNSPVTLPSRRPSLVPLAIFKPKTKAAPKKVEKVKPKVEDGIFGTSGGIGFTKQNELFVGRVAMIGFAASLLGEALTGKGILAQLNLETGIPIYEAEPLLLFFILFTLSGAIGALGDRGKFVDDPPTGLEKAVIPPGKGVRSALGLKEQGPLFGFTKANELFVGRLAQLGIAFSLIGEIITGKGALAQLNIETGIPIQDIEPLVLLNVAFFFSAAINPGNGKFITDDGEES

SEQ ID NO: 14665 - protein, 141 aa, Hordeum vulgare subsp. vulgare
MEYQGQTGRATDKVEEYGQPVAGHGGATGGPTGTHGAAAAAGTGQLQPTRDDHKTDGVLRRSGSSSSSSSEDDGVGGRRKKGMKEKIKEKLPGGAHKDAAGQQHTPAAGEYAGTGTHGAEATGEKKGVMDKIKEKLPGGQH

SEQ ID NO: 14666 - protein, 263 aa, Vicia faba
AHIITAVIGSGVLSLAWAIAQMGWVAGPAVLLAFSLITYFTSTLLADSYRSPDPVHGKRNYTYSEVVRSVLGGRKFQLCGLAQYINLVGVTIGYTITASISMVAVKRSNCYHKHGHEAKCYTSNNPFMIVFACIQIVLSQIPNFHKLSWLSILAAVMSFAYSAIGLGLSVAKVVGGGPAVRTSLTGVQVGVDVTGTEKVWRMFQAIGDIAFAYTYSNVLIEIQDTLKSSPPENQVMKRASLIGVLTTSMFYMLCGCLGYAAFG

SEQ ID NO: 14667 - protein, 268 aa, Frankia sp. EAN1pec
MVSRRCGGLAMAVVRLEVSDGVGTIRLDRPPMNALNAALAAELRAAALEATARADVRAVVVYGGEKVFAAGADIKEMAGLDVAGITGWVRDLAAAFDLVARIPKPVVAAVTGYALGGGLELALCADFRVFAENAKVGLPEITLGVIPGAGGTQRLPRLVGPARAKDLVFSGRQVRAAEAEAIGLADKVVPADEVHAEALRMAGRFVTGPALALAAAKQAIDDGGDLALSEALRLESALFIGLFGTEDRRHGMDSFIERGPGKADFVGR

SEQ ID NO: 14668 - protein, 526 aa, Pediococcus pentosaceus ATCC 25745
MKFTELGLDEDILKAVLDNGYDEPTPIQAETIPGVLEGKDIIGQAQTGTGKTAAFGLPILQNVDLDNPNIQAIIISPTRELAAQTQAEIFKLGKYKKAKVQVVYGGSDIRRQINALKSHPQIVVGTPGRLLDHIGRKTIRLDHVKTLVLDEADDMLDMGFLPDIEHIIEQTPSERQTLLFSATMPAPIKKIGVKFMTDPKQITVKSKELTADLVDQYYVRSKEFEKFDILTRVLDVQAPKLAVIFGRTKRRVDEVSKGLVTRGYNAAGIHGDLTQQRRMSILRQFREGQLDILVATDVAARGLDISGVTHVYNYDIPQDPESYVHRIGRTGRAGATGTSVTFVTNWEMDYLRDVEHLTKKRLLPMKPPTEEEAFAGRAAMAEQSIEELVQKTDVAKFEEQVDHLLEQHDAKTLVAALLNEVTKSDASEIKVKITPERPLPRKKGGNKGGKGGGGYRGGNHRGGNGRRSNGNSSNGGGRGGKWNNDRKGGGKSRFGRDDRNHNGGKRNDRNSGNKGGSNRQFVIKEK

SEQ ID NO: 14669 - protein, 321 aa, Thraustotheca clavata
SKVGINGFGRIGRLVCRAAFANPNATVVAINDPFMDLDYMVYLFKYDSTHGGYKGTVVAEDGNLVIDGHVVRVFSERNPNEIPWGEAGADYVCESTGVFTTTEKAGLHLGGGCKKVVISAPPKGSTPMYVMGVNHDKYDGSAHVVSNASCTTNCLAPLAKVIHDNFGIVEGLMTTVHAVTANQLTVDGPSRGGKDWRAGRGAGANVIPASTGAAKAVGKVLPELNGKLTGMAFRVPVPDVSVVDLTVRLEKGASLATIKAAVKEASEGSMAGILGYTEDEVVSQDFVSDKRSSIFDANVCIALNDSFVKLVSWYDNEWGYS

SEQ ID NO: 14670 - protein, 366 aa, Listeria monocytogenes str. 1/2a F6854
MVFGELIGWLLGWALILEYGLAVASVASGWSSYLNALLSGFHISIPEAISGPFNPEVGTFINLPAIIIVLVIAFLLTLGIKESTRVNTIMVVIKVGVILLFLVVGVFYVKPDNWQPFMPFGISGVMNGAALVFFAYLGFDAVSSAAEEVKDPQRTMPIGIIGSLLICTVLYVAVSAVLTGMVPYTDLNVTDPVAYALQVINQDWVAGIVSLGAVVGMITVILVMSYGATRLIFAMGRDGLLPKVLAEINQKYQTPVKNTWIFAVIVAIISGLVPLDRLAELVNIGTLLAFMMVSIGIIFLRKNKDIQSRGFKVPLYPVLPIVSFLLCAFLISRLSVHTWILCGIWFVIGLIVYFAYGRKHSELLKK

SEQ ID NO: 14671 - protein, 121 aa, Arabidopsis thaliana
  misc_feature (113)..(113): Xaa can be any naturally occurring amino acid
MAGVMKLACLLLACMIVAGPITSNAALSCGSVNSNLAACIGYVLQGGVIPPACCSGVKNLNSIAKTTPDRQQACNCIQGAARALGSGLNAGRAAGIPKACGVNIPYKISTSTXCKTVRVMS

SEQ ID NO: 14672 - protein, 527 aa, Oryza sativa
MASSLLSSPKPSSFSSANPTSTPRPRAQTLSPFRAAAPRFSHGLATAAAAANPSASRRCYHRAFARPVRASMAQPRRPEYVPNRIDDPNYVRIFDTTLRDGEQSPGATMTSAEKLVVARQLARLGVDIIEAGFPASSPDDLDAVRSIAIEVGNTPVGEDGHVPVICGLSRCNKRDIDAAWEAVRHARRPRIHTFIATSEIHMQHKLRKTPEQVVAIAKEMVAYARSLGCPDVEFSPEDAGREFLYHILEEVIKAGATTLNIPDTVGYTLPYEFGKLIADIKANTPGIENAIISTHCQNDLGLATANTLAGAHAGARQLEVTINGIGERAGNASLEEDGMLKYKGTYEIISPDDIGLTRANEFGIVLGKLSGRHAVRSKLVELGYEITDKEFEDFFKRYKEVAEKKKRVTDEDIEALLSDEIFQPKVFWSLADVQATCGTLGLSTATVKLIGPDGDEKIACAVGTGPVDAAYKAVDDIIQIPTVLREYSMTSVTEGIDAIATTRVVVTGDVSDSKHALTGHSFNRAFR

SEQ ID NO: 14673 - protein, 163 aa, Zea mays
  misc_feature (117)..(117): Xaa can be any naturally occurring amino acid
MSAAEGAVVFSEEKEALVLKSWAIMKKDSANLGLRFFLKIFEIAPSARQMFPFLRDSDVPLETNPKLKTHAVSVFVMTCEAAAQLRKAGKITVRETTLKRLGGTHLKYGVADGHFEXVTRFALLETIKEALPADMWGPEMRNAWGEAYDQLVAAIKQEMKPSE

SEQ ID NO: 14674 - protein, 261 aa, Medicago truncatula
MQHTVIPSWYQREGYIKAMANLIEKELKGFDLPEKVMIFFSAHGVPVAYVEEAGDPYKAEMEECVDLIMEELEKRKITNAYTLAYQSRVGPVEWLKPYTDETIIELGKKGVKSLLAVPISFVSEHIETLEEIDVEYKELALESGIENWGRVPALGCEPTFISDLADAVIESLPYVGAMAVSNLEARQSLVPLGSVEELLAAYDSQRRELPPPILVWEWGWTKSAETWNGRAAMIAVLLLLFLEVTTGEGFLHQWGILPLFR

SEQ ID NO: 14675 - protein, 411 aa, Nicotiana plumbaginifolia
MNALAATNRNFKLASRLLGLDSKLEQCLLIPFREIKVECTIPKDDGSLATFIGFRVQHDNARGPMKGGIRYHPEVDPDEVNALAQLMTWKTRVANIPYGGAKGGIGCSPSDLSISELERLTRVFTQKIHDLIGVHTDVPAPDMGTNPQTMAWILDEYSKFHGYSPAVVTGKPIDLGGSLGRDAATGRGVLFAAEALLRDHGKSIAGQRFVVQGFGNVGSWAAQLITEQGGKIVAVSDITGAIKNKNGIDIASLLKHVKENRGVKGFHGADSIDPNSILVEDCDVLIPAALGGVINRDNAKDIKAKFIVEAANHPTDPEADEILAKKGVVILPDIYANSGGVTVSYFEWVQNIQGFMWDEERVNTELKDYMNRGFKDVKDMCKTHNCDLRMGAFTLGVNRVARATTLRGWEA

SEQ ID NO: 14676 - protein, 356 aa, Cordyceps bassiana
MSRANPPNNASASRKISFNVSEQYDIQDVVGEGAYGVVCSAIHKPSGQKVAIKKITPFDHSMFCLRTLREMKLLRYFDHENIISILDIQKPRGFDSFNEVYLIQELMETDMHRVIRTQVLSDDHCQYFIYQTLRALKAMHSANVLHRDLKPSNLLLNANCDLKVCDFGLARSAASQEDNSGFMTEYVATRWYRAPEIMLTFKEYTKAIDVWSVGCILAEMLSGKPLFPGKDYHHQLTLILDVLGTPTMEDYYGIKSRRAREYIRSLPFKKKVLFRTLFADTSDLALDLLEKLLAFNPVKRITVEEALKHPYLEPYHDPEDEPTAPPIPEEFFDFDKHKDNLSKEQLKQLIYQEIMR

SEQ ID NO: 14677 - protein, 543 aa, Solanum tuberosum
MAPPVIFCREISPSPANCTSYSPFLQLDTQCTSSFAASCLRLPKNCSLVARCSLKWSEKPSIVPGALLTSNPQQLSTNPVFGEGKIGVLLLNLGGPETLEDVQPFLFNLFADPDIIRLPRLFRFLQRPLAQFISVARAPKSKEGYASIGGGSPLRRITDAQAEALRKALWEKNVPAKVYVGMRYWHPFTEEAIEQIKRDGITKLVVLPLYPQFSISTSGSSLRLLESIFREDEYLVNMQHTVIPSWYQREGYIKAMADLMEKELKSFEHPEEVMIFFSAHGVPLAYVEEAGDPYKAEMEECVDLIMEELEKRRVHNAYTLAYQSRVGPVEWLKPYTDETIIELGKKGVKSILAVPIISFVSEHIETLEEIDVEYKELALESGIQNWARVPALGVEPTFISDLADAVIESLPYVGAMAVSNLEARQSLVPLGSVEELLAAYDSQRRELPPPVTVWEWGWTKSAETWKWKSSYVGSSCAAGARSNNWRRLPAPVGHIAYSVSPLRRTLLLLVLFEKELLPSRPCCLSFTCIIHIHTHKGGWLLRC

SEQ ID NO: 14678 - protein, 223 aa, Bradyrhizobium sp. BTAi1
MRQRALLFDIDGTLADTDALHIQAFNAVFGRYGHIFDRARAARELLGRSNASIGAEFLPDEPPERRAEIMAQKEAVFRSLAAGEVQPLPGLMTLLDHAEAAAIPVVAVTNAPRANAEMILHGLGIAARFRAVIIGDELPHGKPHPLPYLEGMRAVGAAPDRSLAFEDSRAGITAANAAGLVTVGMRSNLGHDDLIAAGAALTAAAFDEPEVLALVTMRLGAGA

SEQ ID NO: 14679 - protein, 131 aa, Hordeum vulgare subsp. spontaneum
HGHATDKVEEYGQPVAGHGGFTGGPTGTHGAAGVGGTQLQATRDDHKTDGVLRRSGSSSSSSDDGVGGRRKKGMKEKIKEKLPGGAHKDAAGQQQQTAMAGEYAGTHGTEATGEKKGVMDKIKEKLPGGQH

SEQ ID NO: 14680 - protein, 329 aa, Schizosaccharomyces pombe
MVTILKPEEFYVSSEADIVNDVSMTEMEDEIMEDEQMGLVDGEDVLEEFDKSIHQNLVTPGQLVTDDPQFMRGHGTYFEDGGIYASVAGSVQRVNKLISVKPLRSKYVPEIGDLIIGKIAEVQPKRWKVDIGAKQNAVLMLSSINLPGGIQRRKLETDELQMRSFFQEGDLLVAEVQQYFSDGSVSIHTRSLKYGKLRNGVFLKVPPALVVRSKSHAYALAGGVDIILSVNGYVWVSKHNENQHSSVSITRLEEEASESIYSNENDEIDGYTRLNISRVSICIKGLASRSLPLTQASITNFYESSLVFSNLQDLTVPKNMDQIAMEAMQ

SEQ ID NO: 14681 - protein, 254 aa, Arabidopsis thaliana
MSTTTTTAALPQRHQSKVDPQNVNRAVKSLLKWWDSKSKTENSESLENDGFVYLIVTLKRIAQLDRTNPLMIPLPHPLIDLVAEDPPELCLIIDDKHKNKITKEAALKKIEAEKIPITTVIKVSKLKSDLRKLEEEKRFELYFAERRLMPMLPKLLGKEFVKKNKTPIAINLRHGSWKEQIEKACESALFFVGTGTCSVVKVAKLSMGRKEIAENVVAAMNGIGDLVPGRWKNVKLFHLKLLESLALPVYQSVA

SEQ ID NO: 14682 - protein, 131 aa, Hordeum vulgare subsp. spontaneum
HGHATDKVEEYGQPVAGHGGFTDGPTGTHGAAGVGGAQLQATRDGHKTDGVLRRSGSSSSSEDDGVGGRRKKGMKEKIKEKLPGGAHKDAAGQQQQTAMAGEYAGTHSTEATGEKKGVMDKIKEKLPGGQH

SEQ ID NO: 14683 - protein, 507 aa, Candidatus Protochlamydia amoebophila UWE25
MTSTKDKTAITPTRENDYPEWYQQVVKASDLAENSPVRGSMVIKPWGYGIWENIQRQLDDRIKETGHENAYFPLFIPLSFLEKEAAHIEGFAKECAVVTHHRLEEKDGRLIPAGPLEEPLIVRPTSETIIGDSFSRWVESYRDLPLLINQWANVVRWEMRPRIFLRTTEFLWQEGHTAHATHEEALQETMTMLEVYRSFVEDVLAIPVIVGEKSPGERFPGAENTFTLEAMMQDRKALQSCTSHYLGQNFAKGSNIRFSNMEGQLEYAYTTSWGMTTRLIGSLIMCHGDDDGLRLPPRIAHKQIVIVPVIPKPELEAQVLEYAENLAAELRKQIFYGKPLTVHIDKRDKRGGEKNWEWVKKGVPLRLEVGPRDINEQAVMVARRDQSPKNKQSLPKQQFVQQAASILEDIQRNYYVQAATYRDQHIYRHLETFEEMRAFFTPKNEEKPEIHGGFVLAKWCGDPVTEEMLSDLKVTIRCLPVKQSGTKGRCILTGREATLDAIFAKSY

SEQ ID NO: 14684 - protein, 143 aa, Arabidopsis thaliana
  misc_feature (124)..(124): Xaa can be any naturally occurring amino acid
RTLASSMLSSATMVASPAQATMVAPFNGLKSSAAFPANRIANTYITSIISSCVTVNCMQVWPPIGKTKFETLSYLPDLTDSKLAKEVDYLIRSKWIPCVEFDLKHGFVYREYCNSPGYYDGRYXTMSNLPLFGCTDSAQLLNE

SEQ ID NO: 14685 - protein, 131 aa, Hordeum vulgare subsp. spontaneum
HGHATAKVEEYGQPVAGHGGFAGGPTGTHGAAGVGGTQLQATRDDHKTDGVLRRSGSSSSSSDDGVGGRRKKGMKEKIKEKLPGGAHKDAAGQQQQTAMAGEYAGTHGTEATGEKKGVMDKIKEKLPGGQH

SEQ ID NO: 14686 - protein, 434 aa, Burkholderia mallei ATCC 23344
MSSQSQSPSVAQSIPSYLHADDLGPWGNYLQQVDRVAPYLGSLSRWIETLKRPKRILIVDVPIELDNGTVAHFEGYRVQHNVSRGPGKGGVRYHQDVTLSEVMALSAWMSVKNAAVNVPYGGAKGGIRVDPRKLSRGELERVTRRYTSEIGIIIGPNTDIPAPDVNTNEQIMAWMMDTYSMNQGQTATGVVTGKPISLGGSLGRKEATGRGVFVVGCEAAKKKGLEIEGARIAVQGFGNVGGIAAKLFQEAGAKVIAVQDHTGTIHQPAGVDTVKLLEHVGRTGGVAGFEGAEPMPNDEFWTVETDILIPAALENQITEKNASKIRTKIIVEGANGPTTTAADDILSANGVLVIPDVIANAGGVTVSYFEWVQDFSSFFWTEDEINHRLERVMREAFAGVWAVAEEHNVSVRTAAFIVACKRILMAREMRGLYP

SEQ ID NO: 14687 - protein, 365 aa, Arabidopsis thaliana
MTKMSKLPNDLLEEILSRSPLYSMRAIRLTCKKWNTLAKEESFTKKQLVQTKAAKEFMVIMMMDSKFCLMNINLNKEEDVEPSIKCNGKIINPIGMCRVYHCGGLVCITKSFSNTRDVVWNPYLGQTRWIKPRSHHAYIYAIGYETKKSCRSYKILSSEHNYINIDDERVDYEIYELDSNSWRALDVNSNWATAFYKMDVSVKGNSYTYTDYRGDFLISFDFTTERFGPTLPLPFHSRCGDIVALSSVREEKLAVLLHRCNISRMEIWITNKIEPNNVSWGKLFLTVDMKPLIIDDGIFFIDEEKKVVVVFDKDKEMRNRITAYIIGENGYFRKVDLGDSESFPVRCSYVPSSVEIKQLAKGKSN

SEQ ID NO: 14688 - protein, 856 aa, Brassica rapa
MKCVRNIYYQSYTFSFVLAFVVLILFHPAISMHFNTLLSTESLTISGNRTLVSPGHVFELGFFKNTLNSRWYLGIWYKNLSDRTYVWVANRDSSLSNAIGTLKFSGSNLVLRGRSNKFVWSTNLTRGNERSPVVAELLANGNFVIRYSYNNDASGFLWQSFDFPTDTLLPEMKLGYYLKTGLNRFLTSWRNFDDPSSGEFSYKLETRRLPEFYLLKNGSPGQRSGPWNGVQFSGIPEDQTLSYMVYNFTENSEEVAYTFRMTDNSIYSRIQLSPEGLLERLTWTPTSGTWNLFWSAPVDIQCDVYMTCGPYAYCDVNTSPVCNCIQGFMPFDMQQWALRDGTGGCIRRTRLSCSSDGFTRMKNMKLPDTKMAIVDRSIDVKECEKRCLSDCNCTAFANADIRNGGTGCVTWTGELEDIRNYIGNGQDLYVRLAAADLVKKRKANGKIISLIVGVSVLLLLIMFCLWKRKKNRAKASATSIDNQQRNQNVLMNGMTQSNKRQLSRENKTEEFELPLIELEAVVKATENFSNCNELGQGGFGIVYKGMLDGQEVAVKRLSKTSLQGIDEFMNEVRLIARLQHINLVRILGCCIEADEKILIYEYLENSSLDYFLFGKKRSSNLNWKDRFAITNGVARGLLYLHQDSRFRIIHRDLKPGNILLDKYMIPKISDFGMARIFARDEIQARTDNAVGTYGYMSPEYAMDGVISEKTDVFSFGVIVLEIVSGKRNRGFYQVNPENNLPSYVWTHWAEGRALEIVDPVILDSLSSLPSTFKPKEVLKCIQIGLLCIQERAEHRPTMSSVVWMLGSEATEIPQPKPPVYCLIASYYANNPSSSRQFDDDESWTVNKYTCSVIDAR

SEQ ID NO: 14689 - protein, 464 aa, Thermotoga maritima MSB8
MMERLIIDDSRFNFVPKVKTAYKAPPGLDEKLIMEISRAKDEPEWMLKHRLESLKVFNEWHNPRFGVDISGLDLGKIVSYIKPDAKKSTSWEEVPEEVKEAFDKLGIPEAERKYLAGVGAQLDSEIVYQNMKKELEKMGVIFLDMESAVREYPDLVKKYFMKLVPITDHKFAALHGAIWSGGTFLYVPAGVKIPMPLQAYFLMSNPGMGQFEHTIIVAEEGSEVTFIEGCSAPRYNIINLHAGMVEIYVKKGAKVKYLTIQNWSKNTYNLNTKRSIVDEEGSMTWVSGSLGSQKTMLYPMTILKGKGARAESMSITYAGPGQHMDTGSKVVHLAPYTSSIVSAKSISLGGGWAFYRGLLKITKEAVKSKASVECAALMLDNRSKSDTVPIIEVETDRADVGHEARIGRIGEDQIFYLMSRGLSEQEAKAMIVKGFVEPVVKELPFEYAVELNKLLELEIEKSIG

SEQ ID NO: 14690 - protein, 666 aa, Neurospora crassa
MDGSLMAALPQGQDVIRVISTGGVTKVVKIAECNTCEEVMRVTLRKFGLREDHERNYCFWVLAGVDPDPNQCRRLGDTELWRVIKDHTRPERNRLILRRVPSGEPGKAELERAAAIAMEEAQQTHRPPIEPSDKRSQLKLQKVLGVGWEDLQQQPPLSPMSYQDRERNVSNAARDLERPAPLETPRAMPRRTQALRQFGGLRPPSELIASDLTSYFPDHSREAIDRTARLSMRRSARLSRVNHRLSVASTLSFASSIQDAPPIPTIADSWLTASNQIAKVRPRDVLPRAPHGYRDSVASSVLDTLQEEGSPTEPNRRSFVPFSDSGSDTAAVSVIDPDGNIVRHSYYDSGTNNSADSAVIQEALAEDGEDAADKELQTFLAGDAWDDSMWMKGSLIGQGSFGSVYLALHAITGELLAVKQVETPAPGADSKNDARKKSMIEALKREITLLRDLQHPNIVQYLGCSSSAEYLNIFLEYVPGGSVQTMLDQYGALPESLVRSFVRQILQGLSYVHNRDIIHRDIKGANILVDNKGTIKISDFGISKKLEATNILNGANNNKHRPSLQGSVFWMAPEVVKQTSYTRKADIWSLGCLVVEMMTGTHPFPDCTQLQAIFKIGGSKASPTIPDNASEEAKQFLAQTFEIDHNKRPSADELMLSPFLTPVPGT

SEQ ID NO: 14691 - protein, 135 aa, Oryza sativa
  misc_feature (84)..(84): Xaa can be any naturally occurring amino acid
NSRPLAAANSRPLENLRFRDESLTFKIAETQESAEELVTYQRYKYPTMSKTQGNFKLTVVEGEFTDSQIVVMLGENGTGKTTFXRHLLHQKIRDSYTHPQFVSDVMKPLQIEQLMDQEVINLSGGELQRVAICLA

SEQ ID NO: 14692 - protein, 562 aa, Methylobacillus flagellatus KT
MMLKNPSSKYRPFTPIDLPNRQWPARTITQAPIWMSTDLRDGNQALFEPMNAERKMRMFKMLVEIGFKEIEVAFPSASQTDFDFVRTLIEEEHIPGDVTIEVLTQAREDLIRRTFESLRGARRAIVHVYNATSPVFRETVFRTDKAGAKKIATDAARLIKQLADERPETEWVFQYSPETFTATELDFAKEVCDAVTDIWQATPERKVILNLPATVEIGTPNYYADQIEWMHTNLARRDSVIISVHPHNDRGTAVAAAELAVMAGADRIEGCLFGHGERTGNVDLVTLALNLYTQGIDPRLDFSQINSIARTVEDCTQLPVHARHPYAGDLVFTAFSGSHQDAIKKGFAVQQPGDLWQVPYLPIDPHDVGRTYDSIIRVNSQSGKGGIAYLLESGYGLAMPRRMQVEFSGAVQRLTDSSGQEVSAEGIWQLFNEEYIAADEPVRYIDHVLDEQDDVQHIKLIARIHGVETVLEGRGNGPIDALVHAFGSKFRIHDYEERALGAGAAARAVAFAELEKDGQPGTVYGAGIHDNLVTASILAVISGINRLYQRLDAAAQQALLPR

SEQ ID NO: 14693 - protein, 490 aa, Mycobacterium sp. KMS
MAGRWRTKSVEQSIADTDEPGTRLRKDLSWWDLTVFGVSVVIGAGIFTITASTAGNLTGPAISISFVLAAIACGLAALCYAEFASTVPVAGSAYTFSYATFGEFVAWIIGWDLILEFAVAAAVVAKGWSSYLGTVFGFGGGVANFGGFEVDWGALVIIAVVTLLLARGTKLSAEVSLIITVIKVAVVLLVVIVGSFFIKAANYSPFIPPAESGEGGTGTEQSLFSLITGAEGSAYGWYGLLAGASIVFFAFIGFDIVATTAEETKNPQRDVPRGILSSLAIVTVLYVAVAVVLSGMVSYTELRDAGSGANLATAFAANGVDWAATVISIGALAGLTTVVIVLMLGQTRVLFAMSRDALLPRQLAQTGEHGTPVRITVIVGVVVAVAATVFPIGKLEEMVNIGTLFAFVLVSAGVIVLRRTRPDLKRGFKAPFVPLLPIAAIIACVWLMLNLTGLTWIRFLIWMAIGVVVYFLYGRRHSLVGRREQEAVTE

SEQ ID NO: 14694 - protein, 495 aa, Yarrowia lipolytica CLIB122
MAFQADSFISDEEEEVCPLCVEEMDISDRNFKPCPCGYQICQFCYNNIRQNPQLNGRCPGCRRPYDDESVEYKVISPEEWKKHHVKQTKQERERKQKEREKKEMEQSSRKHLSGMRVIQKNLVYVIGLNPDIPTEDLHNTLRGEQFFGQYGRIQKIVINRRNNVNGTPGLGVYVTFSKKEDAARCIAAVDGSMNDGKYLRAAYGTTKYCSSYLRGQPCPNPNCMFLHEPGEEADSYTRQDLSTIQHAARQGIQKQQRQQQQQQRYGDFQQHSQPSPVQPNTPIRHQSGHAAVAQHATEDIHGNALPATASWAKQSPTTPAGKLHTPAQASPVKPTPVEPAVNYPMPDPDPKRQMDFTLPLFKNTLKSLSKNKFDFVFSSAILKSLDLDDDKNSLPNLFAFSKDNIMDPSKHESSEFLEGQFTPFAIFSGGKAAALPLASDETQSFQQLMKGGPTDKVPEQAATPPPGLMGDSNQKQHHSQELLAHLMNGGKKGEN

SEQ ID NO: 14695 - protein, 444 aa, Clostridium thermocellum ATCC 27405
MKLLAGVMEQVIKRNPNEPEFHQAVREVLESLEIVAEKNPEYLKAGIFERIVEPERQIIFRVPWVDDNGKVQVNRGFRVQFNSAIGPYKGGIRFHPSVNLGIIKFLGFEQIFKNSLTGLPMGGGKGGSDFDPKGKSDGEIMRFCQSFMTELYRHIGPDTDVPAGDIGVGAREIGYMFGMYRKIRNEFTGVLTGKGLTWGGSLVRTEATGYGLCYFMEEAMKTIKGKSFEGATVVISGSGNVAIYATEKAQQLGAKVVALSDSNGYVYDPDGIKLDTVKQIKEVERKRISEYVKYHPNAKYTEGCSGIWSVKCDVALPCATQNELDGNAAKTLVENGCYAVGEGANMPCTPEAIDIFMKNGVLYAPGKASNAGGVATSGLEMCQNSMRYSWSFEEVDAKLKDIMVNIFRNVRAVAKEYGQEDNLVLGANIAGFLKVANAMMAQGV

SEQ ID NO: 14696 - protein, 529 aa, Yarrowia lipolytica CLIB122
MLSRSTRLARVVQTSTRLYSTAYPTTHAKIENPVDTKAFINGQAVASKATTWFDLHDPATNNLVTRVPQSTDEEMRQAVEAAQKAFLTWKDTSIMHRQQVAFNFVRLIRDNWDRLAASITLEQGKTFADAKGDVLRGLQVAEQACSIPNTLMGESLEVAKNMRTEMYREPLGVVAAIAPFNFPAMVPLWSIPLALVTGNTLILKPSERDPGAALILAELITEAGAPPGTVNIIHGGAPTVNFICDAPEIKAISFVGGDAAGKHIHQRGGANGKRVQANLGAKNHCVLMPDADKNFALNSIVGAAFGAAGQRCMALSTLVTTQGTGSWMPELVERAKKLTINGGFEADADLGPVISPAAKARCEALIQSAIDEGATVLLDGRGQHPAKYPNGNFIGPTIITGVKPGMKCYDQEIFGPVLVVVDTTDLDDAIGLINRNKYGNGAAIFTRSGAAGNKFQKQIQAGQIGINVPIPVPLPMFSFTGNKGSFLGDLNFYGKAGVMFLTQYKTVTTQWRDEDVTSQKADVIMPTQS

SEQ ID NO: 14697 - protein, 253 aa, Debaryomyces hansenii CBS767
MTIQKQPAVFYVNAALFDCDGTLVNSTGAISEFWRDFGKTRPHVNPDEIISTSHGCRTFDVIAKWSPEDAIEEQVTEWEGSIPDSFGQFAKPIPGAVELVKSFDKFSKSETENGKQRWAIVTSGTLPLATKWLKLLTIEKPDCFITAEKVTKGKPHPQGYQSARETLGYKGAHNKVVVFEDAPAGITAGKGAGAFIVGICSTYDPEKVRKAGADIVVDDLTSFRIDSYNKETDEFKVIVDDYHYANDEFLQSV

SEQ ID NO: 14698 - protein, 486 aa, Photobacterium sp. SKA34
MVWLKRDLRLTDHQALSVAANSAFPVLLIYIMEPMLLSDPHYSERHWRFIWQSLEDMNHQLACVNSQVFIFHGNAVECLDQLMHHCPINALFSHQEIGLGCTFERDLNIKAWCDKQQIQWHEFQQGAVIRGAKNRTNWDKQWNRVMREPVFSVNLDKVNWVSTYPEQLADMLFSPPESWREREQGMQTGGSTLALQTLDDFFSRRGKEYYRSISSPTASRTACSRLSPYLAWGNISLRQVYQQVLAHWNDKGFRRSLIALSSRLHWHCHFIQKFESEPAIEYFCMNRTYDRLLAESCSKDDLKLKAWKEGNTGIPLIDACMRCLYHTGYINFRMRSMLVSFLTHHLNIDWRDGVTHLAQLFLDFEPGIHYSQLQMQAGVTGINTIRIYNPTKQAQEHDPDGEFIHKWVPELGNIPVPLLFEPWNLTELEVVMYQLDNNSCYLYPIIDLKRSAKEARQRLWGWRGRDDVKSETNAILKRHVRIKKPS

SEQ ID NO: 14699 - protein, 418 aa, Tropheryma whipplei str. Twist
MSLIVQKYGGSSLASANNLKRVAERVSCAYYGNNRLVVVVSAMGSTTDRLLTLAHEVSVEPERRELDVLLSTGECVTASLLAMAINSIGLSARSFTAAQAGIVTDEHHCNARIITITPTPIEDALNAGEIAVVAGFQGVNRKGQVTTLGRGGSDTTAVALAAALKADRCEIYSDVEGVFTADPRIVPKARLLESIPIDHMLELSTAGARILSLRSVVFAKRHNVSVKVGSTFSDTSGTILCNEGEAMEEPVITGIATDTSQARITIVGLPDIPGSAAEVFSALSVAEVAVDNIVQNFSSSNTGFIDLSFTSPKAQGPAVTSALRENQTRIGYKDLQYDDEVGKITVVGSGIQHSADISAQLFRLLSDAKVNVEMISTSEMRISFVVRANVVAEVARLIHTSFGLDADLRAVVHSEGRV

SEQ ID NO: 14700 - protein, 415 aa, Thermus thermophilus HB8
MLRLDTRFLPGFPEALSRHGPLLEEARRRLLAKRGEPGSMLGWMDLPEDTETLREVRRYREANPWVEDFVLIGIGGSALGPKALEAAFNESGVRFHYLDHVEPEPILRLLRTLDPRKTLVNAVSKSGSTAETLAGLAVFLKWLKAHLGEDWRRHLVVTTDPKEGPLRAFAEREGLKAFAIPKEVGGRFSALSPVGLLPLAFAGADLDALLMGARKANETALAPLEESLPLKTALLLHLHRHLPVHVFMVYSERLSHLPSWFVQLHDESLGKVDRQGQRVGTTAVPALGPKDQHAQVQLFREGPLDKLLALVIPEAPLEDVEIPEVEGLEAASYLFGKTLFQLLKAEAEATYEALAEAGQRVYALFLPEVSPYAVGWLMQHLMWQTAFLGELWEVNAFDQPGVELGKVLTRKRLAG

SEQ ID NO: 14701 - protein, 186 aa, Arabidopsis thaliana
MAAFTCTSRPPISLRSETRIVSSSPSASSLSSRRMFAVLPESSGLRIRLSLSPASLTSIHQPRVSRLRRAVVCEAQETTTDIQVVNDSTWDFLVLKATGPVVVDFWAPWCGPCKMIDPLVNDLAQHYTGKIKFYKLNTDESPNTPGQYGVRSIPTIMIFVGGEKKDTIIGAVPKTTLTSSLDKFLP

SEQ ID NO: 14702 - protein, 270 aa, Frankia sp. EAN1pec
MAPARGRSTAVASSLVRRGGNGDRVEHERPAGGRSARARTGEAHPSKHSAGAGWLRPAVFGAMDGLVSNVALISGFAGGDAGRPAVVLAGLAGLASGAFSMATGEYTSVRSQNEAMRAQIEVERRELALYPQAEHAELVGFFRDQGVDAPTAESVARQLAHSPDTALRVHARNELGLDVDDLPSPLGAAGASFGAFALGALVPVAPYLAGFASFAIAAVLAGLGLFALGAAVSRFTERSAFYSGARQLLLGLVAAAATYGIGVLVDAFIA

SEQ ID NO: 14703 - protein, 164 aa, Triticum aestivum
  misc_feature (126)..(126): Xaa can be any naturally occurring amino acid
MATVMAMGSFAGAAVLPRGSAGRFGARSLPALGRRTLIVRAQTNKPKTSTSIWNALAFSGPAPERINGRLAMVGFVTALAVEAGRGDGLLSQLGSGTGQAWFAYCVAVLSVASLVPLLQGESPAGXPGAIMNANAELWNGRFAMLGLVALAATEIITGAPFINV

SEQ ID NO: 14704 - protein, 1846 aa, Ustilago maydis 521
MSKQRGTAAYRGFTVSHQRVVLDLSFNGTLVGFTELTIIPTHRGLRTIHLNCRQASVQSATVNNHPADFSYSDHLTGATISETRDVHRYPELKRRIYAAASDGVHGELSILIPPDVHVQTQRAGSRDPSIAPDDAPTPGGTSTTELAPISVRVNYYLKNPTDGLQFMRPTADAPYRVPHLYTITSSPDAARTWVPCVDSLWERCTWEFELIVPKSLHIAEDEEEAAANQSANLPIEQAPTTNVDTSDPDSQVVVVCTGDLMEQVTHPNNPSKTIFCYTQAVPTSVQHIGFAAGPFHIMRIEATNRHGGQVTTGIVTEVSAGASAVVDDSGQPEILAFCLPGREDELRNSISFTRQALDFFSQQYGSYPFGAFRMVFVDEPPQDCTTQSMIAVCSNDLLHPTSVIDQAIENRQILSHAIAFQWVGINIIQATWADTWLVNGLGLYINGLFLRRLMGNNEYRFRLKKDLDRLCAWDIGMPPLYEAGAFEPPDAATLPFVNLKAPLVLHILDRRLRKMGASVGLGRVIPKVFLQAMTGEMTNNMLSTQLFLRTCRKVSGADLRLFTEHWIRGSGCPRFICSANFNRKKLLIEMNIRQEVPAAQFAAARPGDALAANAVPLFEGQMTVRIHEADGTPYEHVLEIKGPAKRYEVPFNTKYKRVRRNTKRFQARQAAAAAAAQGDQEAQEAIGLIDLGFGLGMWEDEKAREEWKVADWTEEDEEKMSSAPYEWIRMDADFEWLASIHFEQPDYMWVSQLQRDRDVVAQVSAVHALAQMPSLVTCSMLTRTVLVNKYFYRVRTEAVHALVHCAIPQLDNLGLFHLLKLFRTQFCHDPPDEASIENPLDVPCIPRANDFSDAADYFLQRALIHAISRVRNPDGRTPPQVKRFLINLLRYNDNSTNHFVDDFYLAGAINALASAFIPIESAVAATQDADMASEESFLLAHAVAEVERLQELDRLVPSYHNVITLASLDFQVAMMLANLKPKDLQLFFTYTRQGNFTPVRIAALNCLLLVGNLDHRVIARYCFALLRLDENRTVKRALARAMCEGLAVAMSTGMFGGGGLRGPEALLIEEDSGHVNAAEKARDAQLEAMLKTLKKEIGRSAGVREGFLSALLAPSVDVEARWALLKLAELLFRPAEEKELPLQHKVQLRVRMPSTPNTIDAAPLESSSISKIKLVRPSTATGGDEAVPTTPSATATNAPRVAFETPEKPPASASDKKKLKPKKAKPLAPGQASGMSFADLTACRNTLKKLMQNKFAAIFLNPVDPVRDQATNYFDIIKEPMDLGSILNKLDSGQYKDRHELRADFELMISNAKTYTPDAKAWAHKQAVGLEKVFVPLWNRMEKTLEQSAARQKAAQDAALANEQVGGVSNSPERPSPAKLDASAAAAATAPASVGKVGNGIGREASTPSPAAPKLSLKFKLKTKLAGEESPAPMSTPTPKPRAPVVETSAAPASPPSIKLKKPLIKLKKGNHDDAAAPEVRTPPPPLAAKSSEGLAQSVDDDILEALGEVPKASKAKPNKVTSNLSKVAASASPVPGPTASPSSNKKSRVVASHATGAVISNDVATGSTLAASPSKDIAKWAEADPIGATAAMAVNSKKCKVLLQVLKKAPSSIFFRFPVDPIRDGLPTYLDEIQQPMDLSTMEKKVNQGAYTTMGEFASDMELIFANCRQFNPPGTEPCQHADELERLWRKEWAKAVTPRLEANEKRALVGLMNRLKTHQSSLLFREPVDPVALGIPTYFDVIAKKDARDLSLIEAKLKGDKYDSFAALDADVKLMLRNCYTFNAADEAIVGIAKGFETYYKRELAHAKQQAGVSGSGEGSAGGAKRKLPANGTAANGSKKVKSG

SEQ ID NO: 14705 - protein, 193 aa, Arabidopsis thaliana
MASLLDSVTVTRVFSLPIAASVSSSSAAPSVSRRRISPARFLEFRGLKSSRSLVTQSASLGANRRTRIARGGRIACEAQDTTAAAVEVPNLSDSEWQTKVLESDVPVLVEFWAPWCGPCRMIHPIVDQLAKDFAGKFKFYKINTDESPNTPNRYGIRSVPTVIIFKGGEKKDSIIGAVPRETLEKTIERFLVE

SEQ ID NO: 14706 - protein, 178 aa, Archaeoglobus fulgidus DSM 4304
MAAMRILIFGDTHIPERADEIPREFTDYLVDFDMVVITGDLTSERVLRFAERVAESVIAVRGNMDDLPLPHSAKFRVEGLSFGVVHGHQVYPRGNREQLEQIALEMDVDVLISGHTHLPDVYRGAKILLNPGSMTGVWGGGAYSTYPSFMVLEVKKGSFRGSLYRLLDEEVTVEQFSF

SEQ ID NO: 14707 - protein, 596 aa, Vibrio sp. Ex25
MHNETLSRVNAIREWLIQHNINALLVPHEDEYLGEYVPAHNERLHWLTGFTGSAGAAVITKDKAAIFVDGRYTVQVTKQVPGDLFEYRHLIEEPALDWVLDNLPTNASVAIDPRMHSSAWLDMAQAKLAGKLELNILTNNPIDELWHDRPAPVVSDVRLMPTEAVGQSSESKRQEIAQLVKKAGADSAVITALDSICWLLNVRGLDVSRLPVLLSHAILHSDSSVEYFLEPARLPADFDAHVGTGVTVHHPEALQSRLEAMTGKKVLVDPAISNAWFKLVLQNSGASVIAAADPCLMPKAAKNSVEIAGMKACHIRDGVAMSKFLCWLDAEVAAGNLHDEATLADKLEAFRSEDPTLMDLSFDTISAAGGNAAMCHYNHENQPEPGKLELNTLYLVDSGGQYLDGTTDITRTIAIGQPSSEMKKQFTLALKGHIGVARARFPKGTRGYQIDTLARQHLWAEGYDYDHGTGHGVGHFLSVHEGPASISKKQIDVPLTEGMVLSNEPGYYRADAFGIRIENLELVVETPTNGDFPVLSFESLTRCPIDKRNINVDMLTRPELAWLNDYHQKVWDEISPLVEGDVKEWLRQATLPVAHS

SEQ ID NO: 14708 - protein, 339 aa, Sinorhizobium meliloti
MDANTEHPAVGYGKLGVLLVNLGTPDGTDVTSMRRYLREFLSDRRVIEWSRLFWYPILYGIVLNTRPRKVGKAYELIWNKDLNESWLRTYTRNQAALMAEAFGGQPQVVVDWAMRYGQPSIASRIEALQKAGCERILVFPLYPQYAAATTATVNDKAFEALLKMRWQPALRTVPPYHDDPVYIDALATSINKHLATLDWEPELVLASFHGIPKSYFEKGDPYYCQCQKTARLLREKLGWPQDRLQVTFQSRFGPEEWLQPYTDATVERLAKEGVKRIAVINPGFVSDCLETLEEIAGQAAESFHHNGGEKFAHIPCLNDSPEGMAVLNHVVRRELEGWL

SEQ ID NO: 14709 - protein, 564 aa, Glycine max
MAMSTILLLTFFSFIYGSAATHHVYRNLQSLSSDSSNQPYRTAYHFQPPKNWINDPNGPLRYAGLYHLFYQYNPKGAVWGNIVWAHSVSKDLVNWTPLDPAIFPSQPSDINGCWSGSTTLLPGNKPVILYTGIDLLNQQVQNLAQPKNLSDPFLREWVKSPKNPLMAPTSANKINSSSFRDPTTAWLGKDGHWRVLVGSKRRTRGIAILYRSKDFVNWVQAKHPLYSILGSGMWECPDFFPVLNNDQLGVDTSVNGYDVRHVLKVSLDDKKHDYYMIGSYNAAKDAFIPDEESNEFVLRYDYGKYYASKTFFDDGKKRRILLGWANESSSVAADIKKGWSGIHTIPRALWLHKSGKQLVQWPVVEVEKLRAYPVNLPPQVLKGGKLLPINGVTATQADVEISFEVSNLREAEVLDYWTDPQILCSKKGSSIKSGLGPFGLLVFASEGLQEYTSVFFRIFRHQHKYLVLLCSDQSRSSLNKDNDLTSYGTFVDVDPLHEKLSLRTLIDHSVVESFGGEGRACITARVYPTLAINDEAQLYAFNNGTADVNITKLNAWSMKKAQIN

SEQ ID NO: 14710 - protein, 590 aa, Bradyrhizobium sp. BTAi1
MCGICGEVRYSSPPLLHALSRMNDAMQARGPDAAGLYVQGGVALGHRRLSILDLSAAAQQPMIDAAFGLGIVFNGCIYNFRELRTELQAKGYRFFSDGDTEVILKSYHAWGKGCVQRFKGMFAFALWERDSGRVVLARDRLGIKPLYYAEGAGFFRFASSMPALLAAGDVDTSLDPTALHHFFSFHAAVPAPRTILNGVKKLAPATLLTIDPDGTQHRERYWSFNVGEQRPTDRAMSQEEWSDALLDEMTVAVDRRRVADVPVGVLLSGGLDSSLLVALLSKLGHQDIRTFSIGFDAVDEHSGDEFRYSDIIARTFGTDHEQIRIGGDRALEALPNAIAAMSEPMVSHDSVAFYLLSSEVAKRVKVVQSGQGADEVFGGYSWYPGFLAANDAVHQYQNAYFDWQHGDLRRLLAPDLLGDDVSLELVERFFADHAGVSAVDKVLQIDTEIMMVDDPVKRVDNMTMAFGLEARVPFLDHEVVELAARMPAELKVTHGGKHILKEAARRCVPAEVIDRPKGYFPVPSLRYLRGPFLAYVRDVLSDEKARSRGLYQRDFIDHMLQNPEAEMSPKGHSRLWQAGLLEAWLQTHGL

SEQ ID NO: 14711 - protein, 389 aa, Glycine max
MAALCSSGESRAAASVCETASSSLGSGSVGPEVSHLGWGRSYTLRELESATNGFSEENVIGEAGYGIVYCSLLPDGTKVAGKNLLNNKGQAEREFKVEVEAIGRVRHKNLVRLLGYCVEGEYRMLVYEYVNNGNLEQWLHGDAGPVSPMTWDIRMNIILGTAKGLAYLHEGLEPKVVHRDVKSSNILIDRQWNPKVSDFGLAKLLSADHSYVTTRVMGTFGYVAPEYACTGMLTEKSDVYSFGILIMELITGRSPVDYSKPQGEVNLIEWLKSMVGNRKSEEVVDPKIAEKPSSKALKRALLVALRCVDPDAAKRPKIGHVIHMLEAEDLLFRDDRRTGGESSRSHRDYQLEHKDSKLDKRQIGGEITDQSEDDSTTSSRLHPQPHRSR

SEQ ID NO: 14712 - protein, 171 aa, Arabidopsis thaliana
MRSYLTPPVRSCSPATSVSVKPLSSVQVTSVAANRHLLSLSSGARRTRKSSSSVIRCGGIKEIGESEFSSTVLESAQPVLVEFVATWCGPCKLIYPAMEALSQEYGDKLTIVKIDHDANPKLIAEFKVYGLPHFILFKDGKEVPGSRREGAITKAKLKEYIDGLLNSISVA

SEQ ID NO: 14713 - protein, 88 aa, Arabidopsis halleri subsp. halleri
LTESVPFFREIVTGAFEKFIKVTMKLPLTGQQYSEKVTENCVAIWKSLGIYTDCEAKAVEKFLEIFKEETFPPGSSILFALSPTGSLT

SEQ ID NO: 14714 - protein, 494 aa, Paxillus involutus
  misc_feature (141)..(141): Xaa can be any naturally occurring amino acid
KLQQIYDAEHPRLILKELFSQDPHRFSKFSKEYVDPTDPNTTFLLDYSKNLVTQPILDTLLSLASEAQLETYRDKMFAGERINTSEDRAVLHVALRNFDDFKIQENGVEEVASVLAHMKEFSEAIRSGSWKGYTGKTINTXVNIGIGGSDLGPVMVTEALKPYAKRDLTALFVSNIDGTHLAETLRECDPERTLFIIASKTFTTQETITNAESARAWFLSFAKDKAHVAKHFVALSTNTKAVTAFGIDEANMFQFWDWVGGRYSLWSAIGLSIALYIGYDNFESLLKGAHGMDKHFKETPLESNLPVLLAVVGVWYNDFYGAQTHALLPYDQYLHKFADYFQQGDMESNGKFVTKSGERVDYQTGPIIWGAAGTNGQHSFYQLVHQGTKLIPADFLAPATSHNPIADSKHHRILLSNFFAQPEALAFGKTEEEVRKELGSGASEALVKSKVFEGNRPSNSIMFPLLTPRTLGALIALYEHKIFTQGVIWGINSF

SEQ ID NO: 14715 - protein, 338 aa, Blastopirellula marina DSM 3645
MSHTVCLIEGDGIGAEITAAVQHIIAAAGVTIDWRPCLAGVTALEKTGSPLPPETIAAIKETGVALKGPLATAIGKGFRSVNVGLRQELQLYANFRPARTIPGVKTRYDNVDLIVIRENTEGLYSGLEHIVVPGVVESLRVITEKCSRRIAIFAFETARKYHRKTVTCVHKANILKLSDGLFLDTVRDVAKSYPDIELNDCIVDAAAMKLVMDPTQFEVLVMENLFGDIISDLASGLVGGLGVTPSGNYGDGYAIFEAVHGTAPDIAGKDMANPTALLLSATMMLKHLGETDAADRIESALLSVLQNPATRTGDLGGKLGTSKFAEAVAEACAVGSSG

SEQ ID NO: 14716 - protein, 131 aa, Hordeum vulgare subsp. spontaneum
HGHATDKVEEYGQPVAGHGGFAGGPTGTHGAAGVGGTQLQATRDDHKTDGVLRRSGSSSSSSDDGVGGRRKKGMKEKIKEKLPGGAHKDAAGQQQQTAMAGEYAGTHGTEATGEKKGVMDKIKEKLPGGQH

SEQ ID NO: 14717 - protein, 89 aa, Arabidopsis halleri subsp. halleri
SVPFFREIVTGAFEKFIKVTMKLPLTGQQYSEKVTENCVAIWKSLGIYTDCEAKAVEKFLEIFKEETFPPGSSILFALSPTGSLTVAFS

SEQ ID NO: 14718 - protein, 494 aa, Paxillus involutus
KLQQIYDAEHPRLILKELFSQDPHRFSKFSKEYVDPTDPNTTFLLDYSKNLVTQPILDTLLSLASEAQLETYRDKMFAGERINTSEDRAVLHVALRNFDDFKIQENGVEEVASVLAHMKEFSEAIRSGSWKGYTGKTINTIVNIGIGGSDLGPVMVTEALKPYAKRDLTALFVSNIDGTHLAETLRECDPERTLFIIASKTFTTQETITNAESARAWFLSFAKDKAHVAKHFVALSTNTKAVTAFGIDEANMFQFWDWVGGRYSLWSAIGLSIALYIGYDNFESLLKGAHGMDKHFKETPLESNLPVLLAVVGVWYNDFYGAQTHALLPYDQYLHKFADYFQQGDMESNGKFVTKSGERVDYQTGPIIWGAAGTNGQHSFYQLVHQGTKLIPADFLAPATSHNPIADSKHHRILLSNFFAQPEALAFGKTEEEVRKELGSGASEALVKSKVFEGNRPSNSIMFPLLTPRTLGALIALYEHKIFTQGVIWGINSF

SEQ ID NO: 14719 - protein, 523 aa, Candida tropicalis
MATQEIIDSVLPYLTKWYTVITAAVLVFLISTNIKNYVKAKKLKCVDPPYLKDAGLTGISSLIAAIKAKNDGRLANFADEVFDEYPNHTFYLSVAGALKIVMTVDPENIKAVLATQFTDFSLGTRHAHFAPLLGDGIFTLDGEGWKHSRAMLRPQFARDQIGHVKALEPHIQIMAKQIKLNQGKTFDIQELFFRFTVDTATEFLFGESVHSLYDEKLGIPTPNEIPGRENFAAAFNVSQHYLATRSYSQTFYFLTNPKEFRDCNAKVHHLAKYFVNKALNFTPEELEEKSKSGYVFLYELVKQTRDPKVLQDQLLNIMVAGRDTTAGLLSFALFELARHPEMWSKLREEIEVNFGVGEDSRVEEITFEALKRCEYLKAILNETLRMYPSVPVNFRTATRDTTLPRGGGANGTDPIYIPKGSTVAYVVYKTHRLEEYYGKDANDFRPERWFEPSTKKLGWAYVPFNGGPRVCLGQQFALTEASYVITRLAQMFETVSSDPGLEYPPPKCIHLTMSHNDGVFVKM

SEQ ID NO: 14720 - protein, 131 aa, Magnetospirillum magnetotacticum MS-1
MAKPVHTMIRVRDEARSRDYYARAFGLEPADRFDFPDFTLLYLRDPASPFELELTVNKDRSEPYNLGDGYGHLAFVVEDAEAEHARFEREGFPVTPVKTLKHGDTPLARFFFATDPDGYKIEVIQKGGRFA

SEQ ID NO: 14721 - protein, 197 aa, Zea mays
MNQLSLLHHLHRLSPGRGHGLTAASPTVVRAGLSSCEPPTPQQHAKRLLAIAPHESIAAAREEESHLRQELAAAGNNNEAGGGRTRTCALPTWALIGGITVGVTVALALSAGPGPALALGPEGPLVEEFWDNMRRYALYVVTVSTGVAYTVLQPIVELLKNPVTALLIVAVIAGSGFLVSQVLNAMVGNSDFIYRYE

SEQ ID NO: 14722 - protein, 494 aa, Paxillus involutus
  misc_feature (314)..(314): Xaa can be any naturally occurring amino acid
KLQQIYDAEHPRLILKELFSQDPHRFAKFSKEYVDPTDPNTTFLLDYSKNLVTQPILDTLLSLASEAQLETYRDKMFAGERINTSEDRAVLHVALRNFDDFKIQENGVEEVASVLAHMKEFSEAIRSGSWKGYTGKTINTIVNIGIGGSDLGPVMVTEALKPYAKRDLTALFVSNIDGTHLAETLRECDPERTLFIIASKTFTTQETITNAESARAWFLSFAKDKAHVAKHFVALSTNTKAVTAFGIDEANMFQFWDWVGGRYSLWSAIGLSIALYIGYDNFESLLKGAHGMDKHFKETPLESNLPVLLAVVGXWYNDFYGAQTHALLPYDQYLHKFADYFQQGDMESNGKFVTKSGERVDYQTGPIIWGAAGTNGQHSFYQLVHQGTKLIPADFLAPATSHNPIADSKHHRILLSNFFAQPEALAFGKTEEEVRKELGSGASEALVKSKVFEGNRPSNSIMFPLLTPRTLGALIALYEHKIFTQGVIWGINSF

SEQ ID NO: 14723 - protein, 524 aa, Medicago truncatula
MASSTLSTPSPNLLKHQNRPSSTTSSRRSSTFLPPIRSSVSEKPPFQVSISQPQTTKLPIRKIPGDYGIPFIQPYKDRLDYFYNQGRDEYFKSRIQKYQSTIFRTNVPPGPFIAQNPNVVVLLDGKSFPVLFDASKIDKTDVFTGTYTPSTELTGGYRVLSYLDPSEPKHEQLKKLMFFLLKSRSRHVIPEFQSCYREFFNALENQLAENGHASFADNNDQAAFNFLNRALFGVNPVDTELGLDGPKMVQKWVLFQLGPVLKLGLPKFVEDSMIHNFRLPFRLIKKDYQRLYDFFYASSGFALEEAERLDVSKEEACHNLLFATCFNSFGGMKLFFPNLMKWIGRGGVRLHTKLATEIREAVRSAGGEITMAAMENMPLMKSVVYEAFRIDPPVPLQFGRAKRDMVIENHENGFLVKKGELLLGYQPFATKDPKIFERAEEFVADRFVGDEGEKLLKHVLWSNGPESQSPTVGNKQCAGKDFTTLISRLLVVELFLRYDSFEIQVGNSPLGPSITLTSLKRSSF

SEQ ID NO: 14724 - protein, 598 aa, Triticum aestivum
MAARLPLAACVVAFHLCLLLSSLVRSPSTALRRLSEAESSLVRHGHGVGIRPAYHFLPAKNWQNDPNGPMYHNGVYHMFYQYNPLGAMWQPGNLSWGHSVSRDLVNWDALDTALDPTAPFDYNGCWSGSATILPGGIPALLYTGRIDADKEVQVQNVAFPKNPADPLLREWVKPAYNPVIPLPADVPGDNFRDPTTAWVGRDGLWRIAVAAKVGGPNGIASTLIYRSKDFRHWKRNASPLYTSRAAGMVECPDLFPVAEPGVEEGRLGYASGPASGAVRHVLKLSVMNTTQDYYAVGRYDDVADTFVPEVDVERNADDCRTWRRFDYGHVYASKSFFDSSKNRRVLWAWANESDSQDNDIARGWSGVQTVPRKVWLDEDGKQVRQWPIEEIETLRSKRVVGLLGAQVNAGGVNKITGVGAQADVEAIFEIPSLEEAETFQPNWLLDPQKLCEENGASVPGKVGPFGLLVMASSNMQEHTAIFFRVFRHNQKYKVLMCTDLTRSTGRDNVYKPSYGGFVDIDIEQQGRTISLRTLIDHSVVESFGGGGRTCITARVYPEHAENKNSHVFVFNNGTGLVKVSKLEAWRLAMASVNVVHGR

SEQ ID NO: 14725 - protein, 522 aa, Candida tropicalis
MTVHDIIATYFTKWYVIVPLALIAYRVLDYFYGRYLMYKLGAKPFFQKQTDGCFGFKAPLELLKKKSDGTLIDFTLQRIHDLDRPDIPTFTFPVFSINLVNTLEPENIKAILATQFNDFSLGTRHSHFAPLLGDGIFTLDGAGWKHSRSMLRPQFAREQISHVKLLEPHVQVFFKHVRKAQGKTFDIQELFFRLTVDSATEFLFGESVESLRDESIGMSINALDFDGKAGFADAFNYSQNYLASRAVMQQLYWVLNGKKFKECNAKVHKFADYYVNKALDLTPEQLEKQDGYVFLYELVKQTRDKQVLRDQLLNIMVAGRDTTAGLLSFVFFELARNPEVTNKLREEIEDKFGLGENASVEDISFESLKSCEYLKAVLNETLRLYPSVPQNFRVATKNTTLPRGGGKDGLSPVLVRKGQTVIYGVYAAHRNPAVYGKDALEFRPERWFEPETKKLGWAFLPFNGGPRICLGQQFALTEASYVTVRLLQEFAHLSMDPDTEYPPKKMSHLTMSLFDGANIEMY

SEQ ID NO: 14726 - protein, 213 aa, Arabidopsis thaliana
MNSFSAFSEMFGSDYEPQGGDYCPTLATSCPKKPAGRKKFRETRHPIYRGVRQRNSGKWVSEVREPNKKTRIWLGTFQTAEMAARAHDVAALALRGRSACLNFADSAWRLRIPESTCAKDIQKAAAEAALAFQDETCDTTTTNHGLDMEETMVEAIYTPEQSEGAFYMDEETMFGMPTLLDNMAEGMLLPPPSVQWNHNYDGEGDGDVSLWSY

SEQ ID NO: 14727 - protein, 366 aa, Pseudomonas fluorescens PfO-1
MSNSFLNPVTTQTWANGRHIVRCVKVIQETWDVRTFCFMADQPILFFFKPGQFVTLELEIEGQPIMRSYTISSSPSVPYSFSVTIKRVPGGKVSNWLHDTLHEGQELAVHGPVGLFNAIDFPSPKVLYLSGGVGITPVMSMARWFYDTNGNVDMTFIHSARSPKDIIYHRELEHMASRIDNFSLHLICEKHGLGEPWAGYRGYLNHKMLELMVPDFLEREVFCCGPTPYMTAVKRLLENAGYDMKRYHEESFGATPPEARADAVEQAEQAAEAPEVPAADLHLVEFTSSDKSIRVAPGETVHAAAAKVGLMIPKACGMGICGTCKVLKLGGEVEMDHNGGITEDDEAEGYILSCCSVPKGDVRIEY

SEQ ID NO: 14728 - protein, 482 aa, Medicago truncatula
MASSSETSSTNLPLKPIPGSYGLPIIGPLHDRHDYFYNQGRDKYFQTRIEKYNSTVLKLNMPPGGFIAPDPKVIALLDGASFPILFDNAKVEKRDVLDGTFMPSTDFFGGYRTCAFQDTAEPSHSLLKRFIFHILSSKHDTFIPLFQTNLTEHFTDLEKELAGKHQKASFNTSIGGITFNFLFKLITDKNPSETKIGDSGPTLVQTWLAAQLAPLATAGLPKIFNYLEDVLIRTIPIPAWTVKSSYNKLYEGLMEAGTTVLDEAEKMGIKREEACHNLVFTLGFNAFGGLTNQFPILIKWVGLAGADLHKKLADEIRAIVREEGGVNLYALDKMTLTKSTVYEALRIEPAVPYQYAKAREDLVVQSHDASFEIKKGEMIFGYQPFATKDAKIFDKPEDFIAERFIGDGEKLLKHVFWSNGRETDEATPDNKICPAKNLVVLLCRLYLVEFFLNYDTFTFDFKPSVLGPTITIKSLVKASSTV

SEQ ID NO: 14729 - protein, 522 aa, Candida tropicalis
MTAQDIIATYITKWYVIVPLALIAYRVLDYFYGRYLMYKLGAKPFFQKQTDGYFGFKAPLELLKKKSDGTLIDFTLERIQALNRPDIPTFTFPIFSINLISTLEPENIKAILATQFNDFSLGTRHSHFAPLLGDGIFTLDGAGWKHSRSMLRPQFAREQISHVKLLEPHMQVFFKHVRKAQGKTFDIQELFFRLTVDSATEFLFGESVESLRDESIGMSINALDFDGKAGFADAFNYSQNYLASRAVMQQLYWVLNGKKFKECNAKVHKFADYYVSKALDLTPEQLEKQDGYVFLYELVKQTRDRQVLRDQLLNIMVAGRDTTAGLLSFVFFELARNPEVTNKLREEIEDKFGLGENARVEDISFESLKSCEYLKAVLNETLRLYPSVPQNFRVATKNTTLPRGGGKDGLSPVLVRKGQTVMYGVYAAHRNPAVYGKDALEFRPERWFEPETKKLGWAFLPFNGGPRICLGQQFALTEASYVTVRLLQEFGHLSMDPNTEYPPRKMSHLTMSLFDGANIEMY

SEQ ID NO: 14730 - protein, 116 aa, Triticum aestivum
  misc_feature (2)..(2): Xaa can be any naturally occurring amino acid
  misc_feature (5)..(5): Xaa can be any naturally occurring amino acid
  misc_feature (9)..(9): Xaa can be any naturally occurring amino acid
  misc_feature (13)..(13): Xaa can be any naturally occurring amino acid
  misc_feature (17)..(17): Xaa can be any naturally occurring amino acid
  misc_feature (19)..(19): Xaa can be any naturally occurring amino acid
  misc_feature (22)..(22): Xaa can be any naturally occurring amino acid
  misc_feature (32)..(32): Xaa can be any naturally occurring amino acid
  misc_feature (39)..(39): Xaa can be any naturally occurring amino acid
  misc_feature (53)..(54): Xaa can be any naturally occurring amino acid
  misc_feature (62)..(62): Xaa can be any naturally occurring amino acid
  misc_feature (89)..(89): Xaa can be any naturally occurring amino acid
  misc_feature (98)..(98): Xaa can be any naturally occurring amino acid
  misc_feature (102)..(102): Xaa can be any naturally occurring amino acid
  misc_feature (110)..(110): Xaa can be any naturally occurring amino acid
  misc_feature (114)..(114): Xaa can be any naturally occurring amino acid
MXRAXATQXVVVXLVGXMXLVXTDAGISWGQXSSGLSPXISYGRGNGANPTGXXCSGVRSLXAGAARSTADKQAACKCIKSAAGGLNAXKGAGIPSKXGGSXPYGISGSXDWSXIR

SEQ ID NO: 14731 - protein, 540 aa, Candida tropicalis
MSSSPSFAQEVLATTSPYIEYFLDNYTRWYYFIPLVLLSLNFISLLHTRYLERRFHAKPLGNFVRDPTFGIATPLLLIYLKSKGTVMKFAWGLWNNKYIVRDPKYKTTGLRIVGLPLIETMDPENIKAVLATQFNDFSLGTRHDFLYSLLGDGIFTLDGAGWKHSRTMLRPQFAREQVSHVKLLEPHVQVFFKHVRKHRGQTFDIQELFFRLTVDSATEFLFGESAESLRDESIGLTPTTKDFDGRRDFADAFNYSQTYQAYRFLLQQMYWILNGSEFRKSIAVVHKFADHYVQKALELTDDDLQKQDGYVFLYELAKQTRDPKVLRDQLLNILVAGRDTTAGLLSFVFYELSRNPEVFAKLREEVENRFGLGEEARVEEISFESLKSCEYLKAVINETLRLYPSVPHNFRVATRNTTLPRGGGEDGYSPIVVKKGQVVMYTVIATHRDPSIYGADADVFRPERWFEPETRKLGWAYVPFNGGPRICLGQQFALTEASYVTVRLLQEFAHLSMDPDTEYPPKLQNTLTLSLFDGADVRMY

SEQ ID NO: 14732 - protein, 509 aa, Zea mays
  misc_feature (64)..(64): Xaa can be any naturally occurring amino acid
  misc_feature (267)..(267): Xaa can be any naturally occurring amino acid
MSDTELSQSTVVFGLRMWVLVGIGVGAAFVLLLVLISVLCLLAFRRRRRRRQRAGQPRAAAPHXTAPPKNPTNAKAPKDIQEVPSHAAAAAPAKTPLALAQVLQLPTPPVSEQLVTGKEHHVTHPEQQQHPSHRSDGPSPHGNGESRGGAAERAPPAVPEVSHLGWGHWYTLKELETATGMFADGNVIGEGGYGIVYRGVLENGTQVAVKNLLNNRGQAEKEFKVEVEAIGRVRHKNLVRLLGYCAEGNQRMLVYEYVDNGNLEQWXHGDVGPRSPLAWDDRMKIILGTAKGLMYLHEGLEPKVVHRDVKSSNILLDKQWNAKLSDFGLAKLLGSERSYVTTRVMGTFGYVAPEYAGTGMLNETSDIYSFGILIMEIISGRVPVDYNRPPGEVNLVDWLKTMVSTRNSDGVVDPKIPKKPSSRALKKALLVALRCVDPDALKRPKISHVIHMLEVDDFPYRDDRRGTRAPGQARLPETPAGGSGRPETDSSGNGGSTQAEPFRWRNPEA

SEQ ID NO: 14733 - protein, 512 aa, Ocimum basilicum
MAALLLLLLLPLLLPAIFLLHHLYYRLRFRLPPGPRPLPIVGNLYDVKPVRFRCFADWAQSYGPIISVWFGSTLNVIVSNTELAKEVLKEKDQQLADRHRSRSAAKFSRDGQDLIWADYGPHYVKVRKVCTLELFSPKRLEALRPIREDEVTAMVESIYHDCTAPDNAGKSLLVKKYLGAVAFNNITRLAFGKRFVNSEGIIDKQGLEFKAIVSNGLKLGASLAMAEHIPSLRWMFPLDEDAFAKHGARRDQLTREIMEEHTRAREESGGAKQHFFDALLTLKDKYDLSEDTIIGLLWDMITAGMDTTAISVEWAMAELIKNPRVQQKAQEELDRVIGYERVMTELDFSNLPYLQCVAKEALRLHPPTPLMLPHRSNSNVKIGGYDIPKGSNVHVNVWAVARDPAVWKNPCEFRPERFLEEDVDMKGHDFRLLPFGAGRRVCPGAQLGINLVTSMIGHLLHHFNWAPPSGVSSDELDMGENPGLVTYMRTPLEAVPTPRLPSDLYKRIAVDL

SEQ ID NO: 14734 - protein, 444 aa, Bacillus cereus ATCC 10987
MNYVIIGGDAAGMSAAMQIVRNDENANVVTLEKGEIYSYAQCGLPYVISGAIASTEKLIARNVKTFRDKYGIDAKVRHEVTKVDTEKKIVYAEHTKTKDVFEFSYDRLLIATGVRPVMPEWEGRDLQGVHLLKTIPDAECILKTLETNKVEDVTIIGGGAIGLEMAETFVELGKKVRMIERNDHIGTIYDGDMAEYIHKEADKHHIEILTNENVKAFKGNERVEAVETDKGTYKADLVLVSVGVKPNTDFLEGTNIRTNHKGAIEVNAYMQTNVQDVYAAGDCATHYHVIKEIHDHIPIGTTANKQGRLAGLNMLDKRRAFKGTLGTGIIKFMDLTLARTGLNEKEAKGLHIPYKTVKVDSTNMAGYYPNAKPLYLKLLYRSDTKQLLGGQVIGEEGVDKRIDVIAMALFNKMSIHDLEDVDLSYAPPYNSVWDPIQQAARRAE

SEQ ID NO: 14735 - protein, 193 aa, Triticum aestivum
MVDLQAAALVIVVAAEVYRAAAAMVKYSTDPANPTKSAKAMGRDLRVHFKNTREAAFALRKMSLNKAKRYLEDVLAHKQAIPFRRYCRGVGRTAQVKNRQPNGQGRWPAKSAKFVLDLLKNAESNAEVKGLDVDALYISHIQVNQAQKQRRRTYRAHGRINPYMSNPCHIELILSEKEEPVKKEAESQIARKA

SEQ ID NO: 14736 - protein, 213 aa, Debaryomyces hansenii CBS767
MASLPPAKRDIAISKSLSYLLRHGAVKEKLNIDQTGYININELLNHNRLKTNKVTLDDIRRIVGNNDKKRFSIVEKEGEIMICANQGHSIKTVNDSNLIQLSKDTIPEEIYHGTYKNKLPAIFNSGGLSKMNRNHIHFASSISDVSGIRNSSNVLIYLNIEKCLQSGIVFYRSSNNVILTSGDANGLIGLEFFGKVVDAKNGTPIDINQYANI

SEQ ID NO: 14737 - protein, 499 aa, Erwinia chrysanthemi
MARSNVDVSDDVQTWLDDGRYKEGFFTELAMDQLAHGINEDVVRAISARRNEPEWMLEFRLSAYRAWLQMEEPHWLKAHYERLNYQDYSYYSAPSCGQCDDSCGSQPGAQQQPAGDAAHGNYLTREVEDAFDKLGVPVREGKDVAVDAIFDSVSVATTYRDELAQQGIIFCSFSEAIQAHPELVRQYLGTVVPANDNFFAALNAAVASDGTFVYIPKGVRCPMELSTYFRINAAKTGQFERTILIADDDSYVSYIEGCSAPVRDSYQLHAAVVEVIVNKNAEVKYSTVQNWFAGQGSESGILNFVTKRALCAGDHSRMSWTQSETGSAITWKYPSVILRGDYSVGEFFSVALTSGHQQADTGTKMIHIGKNTRSTIIAKGISAGHSENTYRGLVKIMSSATNARNFTQCDSMLIGGDCGAHTFPYVEVRNNSAQLEHEATTSRIGEDQLFYCLQRGISEDDAISMIVNGFCKDVFSELPLEFAVEAQKLLSISLEHSVG

SEQ ID NO: 14738 - protein, 320 aa, Candida albicans SC5314
MVHHKVTIIGSGPAAHTAAIYLARAEIKPTLYEGMLANGIAAGGQLTTTTDIENFPGFPNGIGGSELMEKMKEQSQRFGTEIITETISKVDFSKRPFKLWTEWNEDAEPITTDAVIIATGASAKRMHLPGEDTYWQQGISACAVCDGAVPIFRNNPLAVIGGGDSACEEAIFLTKYASKVFLLVRRDVLRASTIMQKRVTNNEKIEVLWNTEALEAKGDGKLLKSLRIVNNKTKEEKDLQVNGLFYAIGHIPATKIFADQLKTDEAGYIQTTPGTASTSIEGVFAAGDVQDKIYRQAITSAGSGCMAALECEKFISEQEA

SEQ ID NO: 14739 - protein, 501 aa, Candidatus Kuenenia stuttgartiensis
MDNIIIFDTTLRDGEQSPGASLDIGEKLQIARQLALLNVDVIEAGFPIASPGDFQSVSNIAKEIRGVSIAALARAMEKDIDSAAKALEKAEKPRIHIFLATSEIHRKYKLLKAKDEIINLAVKAVAYARKFVEDIEFSSEDASRTEMDFLAQVVESVIAAGATTVNIPDTVGYAVPEHYASIITGLKEKVKNISKAVLSVHCHNDLGLAVANSLAAVKAGAKQVECTMNGLGERAGNAALEEVVMAIKTRQDYYRCSTRIKTRELTNSSRLVSVLTGMRVQRNKAIVGENAFAHQSGVHQDGVLKERTTYEIMHPEDIGLQKTKIVLGKLSGRHAFKERIKELGYDLTEIEFEKAFEEFKRLADKKKEIFDEEIEAIIDTEKMEIPHIFQLESLSISCGPNVVPTAGVRIRLSDGSVADNATIGDGPIDALFKAIDLATGISGKLLDYHIQAITSGKDAMGEVYVNVDIHGKNVKGRAVSTDIIEASAKAYLNALNKVAAK

SEQ ID NO: 14740 - protein, 190 aa, Magnetospirillum magnetotacticum MS-1
DRERDGFVMGEGAGIVVLEEYEHAKARGAKIYAEVIGYGLSGDAYHITSPAPDGDGGFRCMTAAVKRAGIDPSEIDYINAHGTSTPLGDELELKAVERLLGASASKVSMSSTKSAIGHLLGAAGAVEAIFSVLAIRDGVMPPTLNLDNPSVETQIDLVPHEAKRKRVDTVLSNSFGFGGTNASLLMRRVA

SEQ ID NO: 14741 - protein, 515 aa, Glycine max
  misc_feature (249)..(249): Xaa can be any naturally occurring amino acid
  misc_feature (513)..(514): Xaa can be any naturally occurring amino acid
MWRQRALLVFLLLLVHQICATSEQEHACPPSSCGKITHITYPFRLKSDPKGCGNRYELACENNVTVLYLYSGKYHVQAINYNNFTIRVVDPGVQQTNCSSLPRYFLSRSNFTDLTYSDFVDPYQAGLAFQHIVYMNCSNPVTQNGKYVDTASYVNWDSKDKYIYAIAGDLKAEDFQVGCHVKLVALTSWWGLDTNNYSYAAMHTGLVYGFEISWMRLICDQHCPSKHGCDDCFFDSVSQEVHYWNWDTXVLIIFTMLWAWKILLTVSLFIVILTCKWRKRHLSMFESIENYLEQNNLMPIRYSYKEVKKMAGGFKDKLGEGGYGSVFKGKLGSGSCVAIKMLGKSKGNGQDFISEVATIGRTYHQNIVQLIGFCVHGSKRALVYEFMPNGSLDKFIFSKDESIHLSYDRIYNISIGVARGIAYLHYGCEMQILHFDIKPHNILLDENFTPKVSDFGLAKLYPIDNSIVPRTAARGTIGYMAPELFYNNIGGISHKADVYSYGMLLMEMAGKRXXL

SEQ ID NO: 14742 - protein, 347 aa, Zea mays
  misc_feature (269)..(269): Xaa can be any naturally occurring amino acid
HLPLPLSPPSSDLLAAADDRRRRCRCRCEPFVNLRCPVFNVAGVPIEWEEHYVGTEVDPRTESFLTWESLESVRRNKVGLKGPMATPIGKGHRSLNLTLRKELGLYANVRPCNSLPGYKTRYDDVNLVTIRENTEGEYSGLEHQVVRGVVESLKIITRQASLRVAEYAFHYAKANGRERVSAIHKANIMRKTDGLFLKCCREVSEKYPEIQYEEVIIDNCCMTLVKNPGLFDVLVMPNLYGDIISDLCAGLIGGLGLTPSCNIGEGGIXLAEAVHGSAPDIAGKNLANPTALMLSAVMLLRHMQFNDKADRIHNAILQTIAEGKYRTADLGGKASTSEFTNAVCDHI

SEQ ID NO: 14743 - protein, 333 aa, Bacteroides fragilis NCTC 9343
MIKVGINGFGRIGRMVFRAAVKNFGNDIQIVGINDLLDAEYLAYMLKYDSVHGRFEGEVAVEDGALIVNGNKIRLTAEMDPANLKWNEVDADVVVESTGFFLTDETARKHIQAGAKKVIMSAPSKDSTPMFVYGVNHTSYAGQDIISNASCTTNCLAPIAKVLNDKFGIVKGLMTTVHAATATQKTVDGPSKKDWRGGRGILENIIPSSTGAAKAVGKVLPVLNGKLTGMAFRVPTSDVSVVDLTVVLEKAATMAEINAAMKEASEGELKGILGYTEDAVVSTDFRGCANTSIYDSKAGISLDSNFAKVVSWYDNEWGYSNKVCEMARVIAAK

SEQ ID NO: 14744 - protein, 383 aa, Escherichia coli
MFEPMELTNDAVIKVIGVGGGGGNAVEHMVRERIEGVEFFAVNTDAQALRKTAVGQTIQIGSGITKGLGAGANPEVGRNAADEDRDALRAALEGADMVFIAAGMGGGTGTGAAPVVAEVAKDLGILTVAVVTKPFNFEGKKRMAFAEQGITELSKHVNSLITIPNDKLLKVLGRGISLLDAFGAANDVLKGAVQGIAELITRPGLMNVDFADVRTVMSEMGHAMMGSGVASGEDRAEEAAEMAISSPLLEDIDLSGARGVLVNITAGFDLRLDEFETVGNTIRAFASDNATVVIGTSLDPDMNDELRVTVVATGIGMDKRPEITLVTNKQVQQPVMDRYQQHGMAPLTQEQKPVAKVVNDNAPQTAKEPDYLDIPAFLRKQAD

SEQ ID NO: 14745 - protein, 92 aa, Ricinus communis
VDCGQVNSSLASCIPFLTGGVASPSASCCAGVQNLKTLAPTSADRRAACECIKAAAARFPTIKQDAASSLPKKCGVDINIPISKTTNCQAIN

SEQ ID NO: 14746 - protein, 479 aa, Candida glabrata CBS 138
MDSLLEKFNSKRTSTHEKPLQRARINEDFEQDNAFALDFDKRDYSPQYHFLYQYRLTVLKNRIREQCYKKWDAGFQLNGKEVVEKKNVLDIQGKEPCWCIGTIYREMKYKPNVLEEVMNDTYGTVDINPESYTDPDGTDEIMLEDESGRLILVGDMIAETPFITGTVIGVLGMEADAGTFQVLDLCYPKALPQEPMPAATSKGKIALVSGINISTTAQERVIKLQLLQEYLMGRLGNEEAVAQIGRLLICGDSIDFNPSSEDPGALVNKLDEFGKFLGNTLQSISIDIMPGANDPSDRTLPQQPLHKALFRENLGQYFDKVNANLLNLVTNPYVFSINGLELLTTAGQNITDICKYVIPAKSDTESTTNVSTDDTDAKCAKTTEHILDLMECTLKWQNIAPTAPDTLWCYPYKDRDPFILNKWPHVYIVGNQPYFGTRKVSLDGVEVVMISVPTFSETGQIVLLDLEDLSTEVVTIGSI

SEQ ID NO: 14747 - protein, 250 aa, Shigella flexneri 2a str. 301
MAVTKLVLVRHGESQWNKENRFTGWYDVDLSEKGVSEAKAAGKLLKEEGYSFDFAYTSVLKRAIHTLWNVLDELDQAWLPVEKSWKLNERHYGALQGLNKAETAEKYGDEQVKQWRRGFAVTPPELTKDDERYPGHDPRYAKLSEKELPLTESLALTIDRVIPYWNETILPRMKSGERVIIAAHGNSLRALVKYLDNMSEEEILELNIPTGVPLVYEFDENFKPLKRYYLGNADEIAAKAAAVANQGKAK

SEQ ID NO: 14748 - protein, 1112 aa, Kluyveromyces lactis NRRL Y-1140
MNGNGITTLKGDTIGPWKLGSTLGVGSTGKVVMAYNETKGQQAAVKIISKSIFNAQGSTMIGGNDPDVLPYGIEREIIIMKLLNHPNVLRLYDVWETSKDLYMVLEYVEKGELFNLLVERGPLPENEAVRFFRQIIIGISYCHALGIVHRDLKPENLLLDHKFNVKLADFGMAALESKDKLLETSCGSPHYAAPEIVSGLPYHGFESDVWSCGVILYALLTGRLPFDEEDGNIRNLLLKVQSGKFEMPGDDEISSEAQDLIARILTVDPEQRIKTREILKHPLLRKYPSIKDSKSIRNLPREDTYLNPLSLEGGNQCVDETILQNLVVLWHGRNKEDIITKLMEPGANLEKTFYALLHRFKHDNYQDQLKQQELQKKQSVSSNSLMYVGSLPSPNKSDSPVTTPKKKRTSIIVASSSHKRPVSMQKLSSQHSSPVKNGSIGKRLSKTFPSNKRISQLVSNSSSPTPAAHKRVSRINDSAAPPVPKEMLRDYKRQSKRQSKRFSLLPNMKRGSITTKLIATYAKLSEDSEWEYIEKETKRTSQDFATLMDQIFEHEKYEQIRKEKEELERKVNEAREKEEAERKERERIEREEQERLEREERKRAERQKELQDQMEDEIAKLKAEYEAVQGSSDERNTANGRSVSAPIETDRTANKRDSTFGIKNDINELINTRNFSLQTRPVSRLDPGIIAAESRLSANLEDDQASKEKTILETIRRSKFLGSQFNLNVELEKAQKDLVSKERQEQLRKYSEQTAKYEVQKLPKNAKAVATLRDDEVEPRKLSEVKVPQFTRRSKHFSSSNKRFSVLSLYSTKTSFTNLVDHLKNDNYLEPLPGQPEYSSSKVAQEPEFMFETVEELDENSKLFEVPETEEGKLASAARKESTDARKQSTNDKDINLPSLPPLQVSHDVADENGALGLGIYQPNDQTQKPHKTMLIDESIDENISSTSDVSRTEVVKKPPLNDVVRKNNNERKPLEEITPKVENKRKISFFRKFSQGSEKKLGPESFDSQLKAGVSAPKMYKALDRLLNEWTNYGLKHVESSPNDFVISGKLTSDNILSLRSTGFKITVLPGEGNGSIIQFTKKSGSTKTFNRLVKEIEKILEKEKVLVFSF

SEQ ID NO: 14749 - protein, 445 aa, Streptococcus agalactiae NEM316
MTEKYVNKVIVILGASFAGMTCAQKLRQLNPNWDIVLIDKEIHPDYVPNGLNWYYRHEISGLNQAMWQTEEEQRLQNIRCLFGLKVEKINKEDRELMLSDGSSVYYDQLICAMGSQAESTYIDGADAQGVLTTKTYATSQNAKQVLDKSHKVAVVGAGIIGLDIAYSLHESGKAVTLLEAQERPDFRHTDPDMSLPLLDAMAESKLHFFQNQKVEKITVTREEKLCLRTLTGDTFTVDAVILAVNFRPDSRLLTGLVDLSVDNSVVVNDYFQTSDPNIYAIGDLIWSYFKGLNSAYYMPLINQAIRSAQMLAYHLSGHAVPKLKITRATGSKHFGYYRANIGLTELEAGLYEDTVSVTYFPKEQYDLRIKLIANQKTGHLLGAQLISKENCLATANQLVQAISCDMTDFDLAFQDFIYTARESEMAYMLHQAAINLYEKRIGLCE

SEQ ID NO: 14750 - protein, 120 aa, Gossypium hirsutum
MASSMSLKPACVAVLCMVVGAPLAQGAVTCGQVTSSLAPCIGYLTGNGAGGVPPGCCGGIKSLNSAAQTTPDRQAACKCIKSAAAGISGINYGIASGLPGKCGVNIPYKISPSTDCNSVK

SEQ ID NO: 14751 - protein, 879 aa, Haemophilus influenzae Rd KW20
MTQEYSTLRNNISMLGRFLGETINDAQGEDILELIENIRKLSRNSRAGDDKARQALLDTLGSISNENIIPVARAFSQFLNLTNIAEQYQTISREHSLAQSSSQSLSELFKRLKEQNASVEEVHKTVEKLLIELVLTAHPTETTRRSLIHKHIEINKCLSKLEHHDLTEKERNIIERLLLRLIAEAWHTNEIRTVRPTPFDEAKWGFAMLENSLWQAVPEFLRQLNETAREFLGYDLSVGLKPVRISSWMGGDRDGNPFVTAQITKKVLYFARWKAADLFLQDISKLADELSMMKCSDEFRDKYGEHLEPYRFVVKNLRNQLTATLAYFDDHLSNRTPRVSESEIILEDNQLWEPLYDCYQSLIQCGMRIIANGSLLNILHRISCFGVTLSQMDIRQESTRHTDAIAEITRYIGLGDYSQWMEDDKQAFLIRELSSRRPLIPQNWTPSPETKEILDTCKVIAQQKQGVIACYVISMARSASDVLAVHLLLKESGVPYHIPVVPLFETLEDLDAAEKVMTQLFNVGWYRGVINNRQMVMIGYSDSAKDAGMMAASWAQYRAQEALVNLTEKLGIELTLFHGRGGTIGRGGAPAHAALLSQPPRSLKNGLRVTEQGEMIRFKLGLPAVAVETFDLYASAILEANLLPPPEPKPEWRTIMDELSTISCDIYRGVVRGDKDFVPYFRSATPEQELSKLPLGSRPAKRNPNGGVESLRAIPWIFAWMQNRLMLPAWLGAGAAIRQVIEQGKGDIIHKMCENWPFFSTRIGMLEMVFSKSDTWLSQQYDQRLVKKELWYLGENLRKQLEDDIQTVLSLSHQSELMSDLPWIADSIALRNIYTDPLNLLQVELLHRFRENPEQVNPDVEQALMITITGIAAGMRNTG

SEQ ID NO: 14752 - protein, 547 aa, Leptospira interrogans serovar Lai str. 56601
MGRTDLSRILKIGSRKSALAKLQTYLVLGALKKKFPEIQVELFFREASGDQDLQTPLWKMGTKGVFTQDLTADLVEKKVDIVIHSWKDLDLEGHPDTTIIGVLDRADQRDVLLWKKSSLSKYSPSVLKIHTSSPRREYNLRKFLSFSLPSRYTNSSLVFLPIRGNIQTRIRKWKESDSDGLVLAKAALDRLLSEDFFNSDELEYQEIRKFLKDSMDESVYQIFPLSLNPTAPGQGAIAAEVRTEDNWVLDRIRTLSKSEVVLAVEEERKILKRFGGGCHQKIGVSILQKAYGKILYQRGLSDSGEVLEVEEQFSEIFAPPADSVSKVYPVPGEAVKQKRTPLDSSNGLIFSEDGQNNKTIFPTELILKDWLVTRGNAFPNLSPALEHTGLIWTSGLKTWFQLAQRDIWVHGSLDALGEDELPKHSIFGKPLDFIKCTHLGSTEIASGLGRVLTYQTQAMEDHPDLSEKTHFFWMSASQFDKALSIFPQICNGFHACGPGITYSHIRKVLGESANLSIFIRYESWLASLGLEEFKGKKIGNQTEKNSP

SEQ ID NO: 14753 - protein, 98 aa, Zea mays
MGPQQGRRSNGGAAARSKQEEEGGAKVVRYRECQRNHAASLGGHAVDGCREFMAAGADGTAAALACAACGCHRSFHRREVEQQPAADCCDCSSTTSGA

SEQ ID NO: 14754 - protein, 88 aa, Arabidopsis lyrata subsp. petraea
LSESVPFFREIVTGAFEKFIKVTMKLPLTGQQYSEKVTENCVAIWKSLGIYTDCEAKAVEKFLEIFKEETFPPGSSILFALSPTGSLT

SEQ ID NO: 14755 - protein, 122 aa, Triticum aestivum
  misc_feature (2)..(2): Xaa can be any naturally occurring amino acid
  misc_feature (10)..(10): Xaa can be any naturally occurring amino acid
  misc_feature (17)..(18): Xaa can be any naturally occurring amino acid
  misc_feature (28)..(28): Xaa can be any naturally occurring amino acid
  misc_feature (37)..(37): Xaa can be any naturally occurring amino acid
  misc_feature (43)..(43): Xaa can be any naturally occurring amino acid
  misc_feature (47)..(47): Xaa can be any naturally occurring amino acid
  misc_feature (52)..(52): Xaa can be any naturally occurring amino acid
  misc_feature (62)..(62): Xaa can be any naturally occurring amino acid
  misc_feature (66)..(66): Xaa can be any naturally occurring amino acid
  misc_feature (68)..(68): Xaa can be any naturally occurring amino acid
  misc_feature (87)..(87): Xaa can be any naturally occurring amino acid
  misc_feature (91)..(91): Xaa can be any naturally occurring amino acid
  misc_feature (95)..(95): Xaa can be any naturally occurring amino acid
  misc_feature (101)..(101): Xaa can be any naturally occurring amino acid
  misc_feature (106)..(106): Xaa can be any naturally occurring amino acid
  misc_feature (109)..(109): Xaa can be any naturally occurring amino acid
  misc_feature (115)..(116): Xaa can be any naturally occurring amino acid
MXARRAHAAXGLGLLVXXLVLSAATAPXEGAVANCGXVVSYLXPCIXYAMGXVSVPGGGCCXGVRXLXAGAGNPAERKNNCTCLKQXANGXGGIXPKLLAXIPRKXGVXIPYAIXXRNHCSK

SEQ ID NO: 14756 - protein, 494 aa, Paxillus involutus
KLQQIYDAEHPRLILKDLFSQDPHRFSKFSKEYVDPTDPNTTFLLDYSKNLVTQPILDTLLSLASEAELETYRDKMFAGEHINTSEDRAVLHVALRNFDDFKIQENGVEEVASVLAHMKEFSEAIRSGSWKGYTGKTINTIVNIGIGGSDLGPVMVTEALKPYAKRDLTALFVSNIDGTHIAETLRECDPERTLFIIASKTFTTQETITNAESARAWFLSFAKDKAHVAKHFVALSTNTKAVTAFGIDEANMFQFWDWVGGRYSLWSAIGLSIALYIGYDNFESLLKGAHGMDKHFKETPLESNLPVLLAVVGIWYNDFYGAQTHALLPYDQYLHKFAEYFQQGDMESNGKFVTKGGERVDYQTGPIIWGAAGTNGQHSFYQLVHQGTKLIPADFLAPATSHNPIADSKHHRILLSNFFAQPEALAFGKTEEEVRKELGSGASEALVKSKVFEGNRPSNSIMFPLLTPRTLGALIALYEHKIFTQGVIWGINSF

SEQ ID NO: 14757 - protein, 131 aa, Hordeum vulgare subsp. spontaneum
HGHATDKVEEYGQPVAGHGGFTGGPTGTHGAAGVGGAQLQATRDGHKTDGVLRRSGSSSSSSDDGVGGRRKKGMKEKIKEKLPGGAHKDAAGQQQQTAMAGEYAGTHGTEATGEKKGVMDKIKEKLPGGQH

SEQ ID NO: 14758 - protein, 332 aa, Triticum aestivum
  misc_feature (44)..(44): Xaa can be any naturally occurring amino acid
  misc_feature (59)..(59): Xaa can be any naturally occurring amino acid
  misc_feature (242)..(242): Xaa can be any naturally occurring amino acid
  misc_feature (262)..(262): Xaa can be any naturally occurring amino acid
  misc_feature (286)..(286): Xaa can be any naturally occurring amino acid
DPRVRKSKGQRLGARNQEGFHQQESDRHTDALDAITSVLGRTQXSGILSVEWSDEHRQXGLLVGTQLGSGPLFGADLPMTEGVADVMGAFQVIAELPGDNFGAYVISMATSPSDVLAVELLQRECHIKTPLRVVPRGEGLAVLQAAPPALARLFSIDWYRQRINGKQEVMIGYSDSGKDAGRLSAAWQMYKAQEDLVEVAKQFGVKLTMFHGRGGTVGRGGGPTHLAILSHPPDTINGSLRXTVQGEVIDQSFGEEHLCFRXTLQGFTAATLEHGMRSPISPKPEXWQALLTKKACGCTAQIIGSIFFPKPRPGRSISALSTTVQHCFGQAY

SEQ ID NO: 14759 - protein, 494 aa, Paxillus involutus
KLQQIYDAEHPRLILKDLFSQDPHRFSKFSKEYVDPTDPNTTFLLDYSKNLVTQPILDTLLSLASEAELETYRDKMFAGEHINTSEDRAVLHVALRNFDDFKIQENGVEEVASVLAHMKEFSEAIRSGSWKGYTGKTINTIVNIGIGGSDLGPVMVTEALKPYAKRDLTALFVSNIDGTHIAETLRECDPERTLFIIASKTFTTQETITNAESARAWFLSFAKDKAHVAKHFVALSTNTKAVTAFGIDEANMFQFWDWVGGRYSLWSAIGLSIALYIGYDNFESLLKGAHGMDKHFKETPLESNLPVLLAVVGIWYNDFYGAQTHALLPYDQYLHKFADYFQQGDMESNGKFVTKGGERVDYQTGPIIWGAAGTNGQHSLYQLVHQGTKLIPADFLAPATSHNPIADSKHHRILLSNFFAQPEALAFGKTEEEVRKELGSGASEALVKSKVFEGNRPSNSIMFPLLTPRTLGALIALYEHKIFTQGVIWGINSF

SEQ ID NO: 14760 - protein, 485 aa, Medicago truncatula
MASSKQEQSSTNKELPLKQIPGSYGLPFIGPIFDRHDYFYNQGRDKFFSTRIQKYNSTIFRTNMPPGPFISSNPRVIALLDAASFPILFDNKKVEKLNVLDGTFMPSTKFTGGYRVCAYLDTTEPNHALIKGFYLNTLLLRKDTFIPLFKTILSDGFNEIEDGLSSKSGKADFNSMVSVASFNFMFKLFCDDKNPSETILGDQGPKMFDTWLLFQLAPLATLGPPKIFNYLEDILLRTVPFPACLTRSSYKKLYEAFSTSATTMLNEAEKAGLKRSEALHNIIFTAGFNAYGGLKNQFPILFKWLGSSGEELHKELANEIRTVVKQEGGVTIQSLEKMPLVKSVVYEAMRIEPAVPYQYAKAREDLIVKSHDAAFEIKKGEMIFGYQPFATKDPRVFDDPEVFVAKRFVGEGEKLLKYVLWSNGKETEEPSVGNKQCPGKNLVVLLCRLLLVEFFLRYDTFENETKNNAFGAAVSITSLTKASSV

SEQ ID NO: 14761 - protein, 687 aa, Zea mays
PRVREGRYLFSVPFSPSERSTSNKLLRFQHLPSGGRVRIAAAPADETMASARDEHLDGIRALMAAHSPPLHGLVVPSEDAHQSEYVSEQDKRREFISGFTGSAGLALITMKEALLWTDGRYFLQATQQLSDRWKLMRMGEDPPVEAWIADNLADEAVIGINPWCISVDSAQRYENSFSKRHQTLFQLSSDLVDEVWKDRPLVEPRPVIVHPVEFAGRSVPEKMKELREKLVHEKATAIIITALDEVAWLYNIRGSDVDYSPVVHSYAIVTLHSAFFYVDKRKVTVEVQKYMSGNGIEIREYETVQSDASLLASGKLQSSVHVEKYMDEVESSKIWIDSGSCCLALYSKLIPHQVLTLQSPIALPKAVKNPTELDGLRKAHIRDGAAVVQYLAWLDNQMQENYGASGYFSEIKGSHKNEHLATKLTEVSVSDKLEGFRATKENFKGLSFPTISSVGPNAAVIHYKPEASTCSEMDADKIYLCDSGAQYLDGTTDITRTVHFGKPSAHEKSCYTAVLKGHIALDIAVFPNGTTGHALDILSRAPLWREGLDYRHGTGHGIGSYLNVHEGPHLISFRPSARNVPLQASMTVTDEPGYYEDGAFGIRLENVLICKDANAKFNFGDKGYLAFEHITWAPYQTKLIDTELLTPVEIDWVNTYHSDCRKILEPHLNEQEKQWLMKATEPVAARG

SEQ ID NO: 14762 - protein, 546 aa, Shigella flexneri 2a str. 301
MAIHNRAGQPAQQSDLINVAQLTAQYYVLKPEAGNAEHAVKFGTSGHRGSAARHSFNEPHILAIAQAIAEERAKNGITGPCYVGKDTHALSEPAFISVLEVLAANGVDVIVQENNGFTPTPAVSNAILVHNKKGGPLADGIVITPSHNPPEDGGIKYNPPNGGPADTNVTKVVEDKANALMADGLKGVKRISLDEAMASGYVKEQDLVQPFVEGLADIVDMAAIQKAGLTLGVDPLGGSGIEYWKRIGEYYNLNLTIVNDQVDQTFRFMHLDKDGAIRMDCSSECAMAGLLALRDKFDLAFANDPDYDRHGIVTPAGLMNPNHYLAVAINYLFQHRPQWGKDVAVGKTLVSSAMIDRVVNDLGRKLVEVPVGFKWFVDGLFDGSFGFGGEESAGASFLRFDGTPWSTDKDGIIMCLLAAEITAVTGKNPQEHYNELAKRFGAPSYNRLQAAATSAQKAALSKLSPEMVSASTLAGDPITARLTAAPGNGASIGGLKVMTDNGWFAARPSGTEDAYKIYCESFLGEEHRKQIEKEAVEIVSEVLKNA

SEQ ID NO: 14763 - protein, 540 aa, Candida tropicalis
MSSSPSFAQEVLATTSPYIEYFLDNYTRWYYFIPLVLLSLNFISLLHTKYLERRFHAKPLGNVVLDPTFGIATPLILIYLKSKGTVMKFAWSFWNNKYIVKDPKYKTTGLRIVGLPLIETIDPENIKAVLATQFNDFSLGTRHDFLYSLLGDGIFTLDGAGWKHSRTMLRPQFAREQVSHVKLLEPHVQVFFKHVRKHRGQTFDIQELFFRLTVDSATEFLFGESAESLRDDSVGLTPTTKDFEGRGDFADAFNYSQTYQAYRFLLQQMYWILNGAEFRKSIAIVHKFADHYVQKALELTDDDLQKQDGYVFLYELAKQTRDPKVLRDQLLNILVAGRDTTAGLLSFVFYELSRNPEVFAKLREEVENRFGLGEEARVEEISFESLKSCEYLKAVINEALRLYPSVPHNFRVATRNTTLPRGGGKDGCSPIVVKKGQVVMYTVIGTHRDPSIYGADADVFRPERWFEPETRKLGWAYVPFNGGPRICLGQQFALTEASYVTVRLLQEFGNLSSDPNAEYPPKLQNTLTLSLFDGADVRMF

SEQ ID NO: 14764 - protein, 1005 aa, Cryptococcus neoformans var. neoformans B-3501A
MTSFNPAPAQIQAAQDHTYGSMPTPTYMGMVDTGAQWDYVGRRGSSRSREPSASPQRAATESGIPRTSTHAASASASSSYAPVAGASGQASSAPHEPTIREEATAVVDRSMRAHQQTTGPSNGNGNSQPKKSKVRMVGDWQLNKTLGAGSMGKVKLATNIVTKEKCAVKIIPRYTDANRKEETTRTPEEVEKQRLKDESKEIRTIREAHISLLLHHPYICGMREFISHQNHHYMVFEFIDGGQMLDYIISHGRLRERAARKFARQIGSALNYCHQNSIVHRDLKIENILISKNGNIKLIDFGLSNLYSPSRHLSTFCGSLYFAAPELLNARPYTGPEVDVWSFGIVIYVLVCGKVPFDDQSMPALHAKIKRGVVEYPSWLSAEVKSLLSRMLVTNPAERATLAEVLSHPFMTKGYDGPPDSFLIRRELLRAEEIDMNVVEAMEGFTFGDANTIYRNLHSILTSEDYLHCVATFEAHREKLRTSSPGVSTNDPSDSPKKKRFSGFDLKKRLFKEDKKVEEAPFKEKVRDPTKGYDPLISIYFLAREKIERERVFGPGFFASSQLSLDTFNTSQGYGMAVPNLPPPASTHVMGHDSSRGPDFASEPRPRSDDVPNPVLAHPSADREQSKLADIPSAVHRRQPSLSQPPLPSSMPAAVERSADEGLTKKFSMLGRGPRPPSAGPSGPSRSASTKRESMTASPSMPIQEHRRATTVVHSDKSKQERRVSVGSFTNSVSKASGLARRASQRDRPPATPPDSRWLNAPAEAEEYHQVETSVRPSSTPREPEPDTANEPRSYDDVKPSYLKGIFSVSTTSTKPANVLIRDIAMVLDRIGIKHRPIKGGFECVHMPSIDLASVVNGDEASTSLSNVPSHASGARRKQSLRRKGSKVNMNGISSNGAGSRATSPGPHRVLTGNSSGTVSGGDVAHLSVPSGKNRHHVGTVEEDEVDAWALAQSGGAGSSLIVRFEIFVVKVPVLPLHGIQFRRVGGDGWQYQMLAKAILREMRL

SEQ ID NO: 14765 - protein, 1480 aa, Chromobacterium violaceum ATCC 12472
MLQSILDNSSAAIFVKDLDGRYLLANLGSQTLLGLPRVPEAGLRDHDLFPEAFADRLAAADRQVLSSGRPQEFEVLMEHLDPPRTYLSLKFPLRAPSGEIYAIGGIATDISERKRLESQISEHDELLRDMSAIARIGGWWFDPISGQGNWTAEVARIHDLPEAAPVNVEDGLSYYSGESRERIEAAVQAAIRDGKPYDLELELISATGRRKWVRTLGRPQVRDGRVVKVRGAMQDISDRKQAELALRESEELLHLFVEHAPAALAMFDRQMRYLAVSRRWLRDYGLEGRDILGQSHYAVFPEIPPAWRAVHRRGLDGEVVREEEALFIRANGDQQWQKWEVRPWRRRDGTIGGILIYTEDITARKQAEKDKHWLAEALNQAAQPILMVDAEDRVTYANPAYTALMGYSRDELIGIQANQLAPGADQAERDIIKQKILTEGSWSGELARLDSQGRSIPVYASAAALHDQAGTLEGYVVTYADLRPLQEKSLALAESQARYQTVLDHAADAVFIADPAGRYLYANRQASQLLGYSQQELLKLSIADITPPEDAGNAARAFQSLLAGSHVTAELLLKRKDGGQVPVEINAIQLPDGTFYGACRDIAERKRTEEEIRKLSLVVEQSPESIMITDRQARIEYVNDAFVRKTGYSPDEVIGRDPSLLASGKTPKSTYEDLWRQLQDGQSWKGEFHNRCKDGRELVELARIAPIREKDGRISHYLALQEDITEKKRLGLELDNYRHRLEELVEARTAEVREAHARLQITQFAMDSVGIGIQWIDPDSGRFVYANRHTAELLGYSEQEMLTLTVSDIDPAFPLPAFHATMARLRQSRYTQFQSQIETRGGVPIPVEITLYYMEGDADAPARVIAFLTDISRRKETEQTLVQAKEAAEKANLAKTAFVANMSHEIRTPMNAILGMVYLLSQGRLSAQQQHQLDTIDRSARHLLNLINDILDLSKADVGKLQLALSDFDLARLPADVMGLVADQAKAKGLQLSLQADAGPLPVRGDATRLTQCLLNLLSNAVKFTERGRIAISLSIDGEDEYGVLARFEVRDTGIGIPAEVQPRLFGAFEQADASTTRRYGGTGLGLAITKRLAELMGGAVGVESAPGQGSLFWFTARVARSGQAAADQYPQQTGVAQPRTRWDGLRVLLVEDDAINREVAQALLQDVGLEADMAENGKIAVERVQAAPARYALILMDVQMPEMDGLEATRRIRALDAGENIPIMAMTANAFAEDRSACREAGMNDFVAKPVDPDQLFAALRRWLPAGRTEAPAPPAPPVSELQGMLGNIPGLDLRQGLACLGGDLERYRAMLTRFLAGHGDDAAKLRALRDQGREQDAMRLAHSLKGSSGTLGLTELQASAAALEAELNRDHPDAAGHIARLEAILGQLARCLASTTTGNPAAPMPPVDAAAVLKQLENALRAGDFAAYSLYIGNREALNGHCGADALLELERRMRGFDFAEALAIVQSIEGGGQPPGG

SEQ ID NO: 14766 - protein, 509 aa, Ocimum basilicum
MAALLLLLLLLPAIFLLHHLYYRLRFRLPPGPRPLPVVGNLYDVKPVRFRCFADWAQSYGPIISVWFGSTLNVIVSNTELAKEVLKEKDQQLADRHRSRSAAKFSRDGQDLIWADYGPHYVKVRKVCMLELFSPKRLEALRPIREDEVTAMVESIYHDCTAPDNAGKSLLVKKYLGAVAFNNITRLAFGKRFVNSEGIIDKQGLEFKAIVSNGLKLGASLAMAEHIPWLRWMFPLDEDAFAKHGARRDQLTREIMEEHTRAREESGGAKQHFFDALLTLKDKYDLSEDTIIGLLWDMITAGMDTTAISVEWAMAELIKNPRVQQKAQEELDRVIGYERVMTELDFSNLPYLQCVAKEALRLHPPTPLMLPHRSNSNVKIGGYDIPKGSNVHVNVWAVARDPAVWKNPSEFRPERFLEEDVDMKGHDFRLLPFGAGRRVCPGAQLGINLVTSMIGHLLHHFNWAPPSGVSTDELDMGENPGLVTYMRTPLEAVPTPRLPSDLYKRIAVDL

SEQ ID NO: 14767 - protein, 517 aa, Candida tropicalis
MIEQLLEYWYVVVPVLYIIKQLLAYTKTRVLMKKLGAAPVTNKLYDNAFGIVNGWKALQFKKEGRAQEYNDYKFDHSKNPSVGTYVSILFGTRIVVTKDPENIKAILATQFGDFSLGKRHTLFKPLLGDGIFTLDGEGWKHSRAMLRPQFAREQVAHVTSLEPHFQLLKKHILKHKGEYFDIQELFFRFTVDSATEFLFGESVHSLKDESIGINQDDIDFAGRKDFAESFNKAQEYLAIRTLVQTFYWLVNNKEFRDCTKSVHKFTNYYVQKALDASPEELEKQSGYVFLYELVKQTRDPNVLRDQSLNILLAGRDTTAGLLSFAVFELARHPEIWAKLREEIEQQFGLGEDSRVEEITFESLKRCEYLKAFLNETLRIYPSVPRNFRIATKNTTLPRGGGSDGTSPILIQKGEAVSYGINSTHLDPVYYGPDAAEFRPERWFEPSTKKLGWAYLPFNGGPRICLGQQFALTEAGYVLVRLVQEFSHVRSDPDEVYPPKRLTNLTMCLQDGAIVKFD

SEQ ID NO: 14768 - protein, 519 aa, Glycine max
MASSASTTLSSPFLRLEFPSSTKQRSSISIRASVSEKPPLPAVSVTSPEPSKLPIRKIPGDCGFPVIGPFKDRQDYFYKQGRDEFFKSRIQKYQSTVFRTNMPPGPFLAPDPNVVVLLDAKSFPVLFDNSKVEKKDVFTGTFMPSTELTGGYRVLSYLDPSEPKHALLKQLMFFLLKSRRAHVISEFHASYKELFHALEANLAEAGKASFGDANDQAAFNFLSRSLFNSNPADTKLGLDGPKIVQKWVLFQIGPILRLGLPQFLEESTIRTFRLPFSLIKKDYQRLYDFFYESSGLVLDEAERLGITRDEACHNLLFATCFNSFGGMKLFFPNVLKWIGRAGVKLHARLAEEIRSAVRSGGGEISMAAMEKMPLMKSVVYEAFRIDPPVALQFGRARRDLIIESHDHAFQVKEGEMLFGYQPFATKDPRIFERAEEFVGDRFVGEEGEKLLKHVLWSNGPETESPTLGNKQCAGKDFVTLVSRLFVVEFFLRYDSFEIQVGTSPLGSSVTITSLKRASF

SEQ ID NO: 14769 - protein, 517 aa, Candida tropicalis
MIEQILEYWYIVVPVLYIIKQLIAYSKTRVLMKQLGAAPITNQLYDNVFGIVNGWKALQFKKEGRAQEYNDHKFDSSKNPSVGTYVSILFGTKIVVTKDPENIKAILATQFGDFSLGKRHALFKPLLGDGIFTLDGEGWKHSRSMLRPQFAREQVAHVTSLEPHFQLLKKHILKHKGEYFDIQELFFRFTVDSATEFLFGESVHSLKDETIGINQDDIDFAGRKDFAESFNKAQEYLSIRILVQTFYWLINNKEFRDCTKSVHKFTNYYVQKALDATPEELEKQGGYVFLYELVKQTRDPKVLRDQSLNILLAGRDTTAGLLSFAVFELARNPHIWAKLREEIEQQFGLGEDSRVEEITFESLKRCEYLKAFLNETLRVYPSVPRNFRIATKNTTLPRGGGPDGTQPILIQKGEGVSYGINSTHLDPVYYGPDAAEFRPERWFEPSTRKLGWAYLPFNGGPRICLGQQFALTEAGYVLVRLVQEFSHIRSDPDEVYPPKRLTNLTMCLQDGAIVKFD

SEQ ID NO: 14770 - protein, 647 aa, Cryptococcus neoformans var. neoformans B-3501A
MAMSSSKLADLRQLMKEQGVDAYVVPSEDAHASEYLAPCDARRAYITGFTGSAGCAVITHDKALCWTDGRYWLQAEKQLGEGWALMKSGLPEVPTWAQWLSTEVSPNSLIGIDPTVIPYSEALSLLSSLPSLSPAPSAASPSRLIATPNLIDSLWVPPSRPLRPSQPIFHLADRYTGEPVSSKLRRLRDKLIRIGSPGTVVASLDEIAWVFNLRGADIPYNPVFFAYTIITPDDCTLFVSPSSLTIEVRSYLHSNGIAVLDYSHVWTSLEAWKKRVKFDQENKSREQRDGVKRARLEEEAKKEEEGERLKKTDKILIGNKTSWAVAKAVGEDNVEVRRSLIEEMKAKKNATEIEGFRQCHIRDGAALVRYLAWLEEALENGESWTEYDAATKLEDFRKENKLFMGLSFETISSTGANAAVIHYSPPAEGSKMIEKKQMYLCDSGAQYLDGTTDVTRTLHFGTPNEDQKRAFTRVLQGHISLDTIVFPQGTTGYILDVLARRALWSEGLDYRHSTSHGIGSFLNVHEGPQGIGQRPAYNEVPLQEGMVISNEPGYYKDGEWGIRIEGVDVIERRETRENFGGKGWLGFERITMCPIQTKLVDSSLLTIEEKDWLNEYHAEVLAKLAPVLKEMGDERAGKWLERECQPL

SEQ ID NO: 14771 - protein, 503 aa, Muscari armeniacum
MSFTDHHYLLLILFLIPILVYTIRRKISSTKSKLPPCPPKLPLIGNLHQMGTLPHQSLHALSVKYGPLMLLKLGQIPTLIVSSADMAREIMKTHDHIFASRPSLMTAGIILYGSMDVVFAPYGEHWRQMRKLCVNHLLSPKAVQSFRRMHEEEVATMVAKISEVSSSSGVVNMSETLNLFASNAMLKAISRKLFRDERRSRVICELNEETAAILGQFSVSDFMPLLAWFDMVFGVGARAKKTARLWDRVLHEIIEDCRNRRDSEVNTDFVNVLLALLEDNDMDFSLNKDIIKAVLQDMIAAGTETSSTAMDWCMAELVRNPEAMKKLQDEVRGIANTKPMITDDDLSKMGYLKAVIKELLRLHPPVPLLIPRESMDHCEVQGFDIPKQTRVIVNAWSIGRDPNVWEAPEEFRPERFLDCAINFRGHDFELIPFGAGRRICPGMQFAVSTLELALANLVRSFDWELPDGMNNEDLGMGDGPGLSARRRQSLLLVAKPFLGLKCM

SEQ ID NO: 14772 - protein, 512 aa, Candida tropicalis
MLDQILHYWYIVLPLLAIINQIVAHVRTNYLMKKLGAKPFTHVQRDGWLGFKFGREFLKAKSAGRSVDLIISRFHDNEDTFSSYAFGNHVVFTRDPENIKALLATQFGDFSLGSRVKFFKPLLGYGIFTLDAEGWKHSRAMLRPQFAREQVAHVTSLEPHFQLLKKHILKHKGEYFDIQELFFRFTVDSATEFLFGESVHSLKDEEIGYDTKDMSEERRRFADAFNKSQVYVATRVALQNLYWLVNNKEFKECNDIVHKFTNYYVQKALDATPEELEKQGGYVFLYELVKQTRDPKVLRDQSLNILLAGRDTTAGLLSFAVFELARNPHIWAKLREEIEQQFGLGEDSRVEEITFESLKRCEYLKAVLNETLRLHPSVPRNARFAIKDTTLPRGGGPNGKDPILIRKDEVVQYSISATQTNPAYYGADAADFRPERWFEPSTRNLGWAFLPFNGGPRICLGQQFALTEAGYVLVRLVQEFPNLSQDPETKYPPPRLAHLTMCLFDGAHVKMS

SEQ ID NO: 14773 - protein, 162 aa, Pseudomonas aeruginosa PAO1
MHYVTPDLCDAYPELVQVVEPMFSNFGGRDSFGGEIVTIKCFEDNSLVKEQVDKDGKGKVLVVDGGGSLRRALLGDMLAEKAAKNGWEGIVVYGCIRDVDVIAQTDLGVQALASHPLKTDKRGIGDLNVAVTFGGVTFRPGEFVYADNNGIIVSPQALKMPE

SEQ ID NO: 14774 - protein, 424 aa, Bacillus cereus ATCC 10987
MIEIKVPELAESITEGTISQWLINVGDKVEKGGSVVELETDKVNVEIIAEDSGIVSKLLGEPGDTVEVGATIAILDANGAPVAVSTPAPAAEQPKQETAEAPKAEAPKAAAPSAEQTATLQGLPNTNRPIASPAARKMARELGIDLNDVRSTDPLGRVRPHDVQAHAAAPKEAPAAPKSPAPAPVAKTEFEKPVERVKMSRRRQTIAKRLVEVQQTSAMLTTFNEVDMTAIMELRKERKDAFEKKHDVRLGFMSFFTKAVVAALKQFPLLNAEIQGDELIIKKFYDIGIAVAAPDGLVVPVVRDANQLNFAEIESEIRELGKKARDNKLSLKELQGGTFTITNGGVFGSLMSTPILNSPQVGILGMHKIQVRPVAIDAERMENRPMMYIALSYDHRIVDGKEAVSFLVAVKDMLEDPKSLLLEG

SEQ ID NO: 14775 - protein, 337 aa, Novosphingobium aromaticivorans DSM 12444
MQRPADHPTVLTGKVGVLLVNLGTPDAPDAGAVKRYLKEFLSDRRVVEIPALVWQPILRGIILNTRPRKSAHAYAQVWTDEGSPLAAITAAQARALQARLGESAIVRHAMRYQSPAMAKELDALLQAGCERILVAPLYPHYSGATTASALDAVADWIKARRRLPALRTLPPYHDDPAYIGALHADLSRQIDALDFAPELLLLSYHGMPERTLHLGDPYHCHCRKTSRLLGERFAQSNPALRLETTFQSRFGKAKWLEPATDAVLVDEARKGTRRIAIAAPGFSADCLETLEELAIRGKEDFVAAGGTHFASLACLNAGDDGMDMIEALVRRELSGWI

SEQ ID NO: 14776 - protein, 439 aa, Pediococcus pentosaceus ATCC 25745
MEFSMDESKSTGANIKVIGVGGGGGNAVNRMIAEGVKGVEFIVANTDVQALQASNADVKIQLGPKLTKGLGAGSTPDVGAKAAEESQQTISSALEGADMIFVTAGMGGGTGTGAAPMVAQIAKEQGALTVGVVTRPFTFEGPKRARFAAEGVANLKEHVDTLIIIANNRLLDLVDKKTPMMEAFNEADNVLRQGVQGISDLITSPGYVNLDFADVKTVMQNQGSALMGIGSASGENRTEEATKKAISSPLLETSIDGAEQVLLNITGGPDLSLFEAQAASQIVTEAANDDVNIIFGTSIDNDLQDGVRVTVIATGIDKKAGRASLHRQPARTSFETPSSSVNTTTTNVSNNTEIRGAGSTESLNTSSNSEQPTQAANDPFGDWQLRQSNASNGVRPTSRDNDSFRNVEKKEFNAFNDNNNISSDDDSLDTPPFFKRRGK

SEQ ID NO: 14777 - protein, 464 aa, Novosphingobium aromaticivorans DSM 12444
MASIAPDSRTDLHTERANPHWVRLGGDHKLDHVPGEDGWPVLGTTLMQLADPLGFQRRMVETHGPVFRTRSFGRRGVNLIGADANELVLFDRDRLFSNEQGWGPVLNLLFPRGLMLMDFEAHRVDRRALSIAFKPEPMRAYCSVLNTGIAQAVQGWGGQMRFYDAIKALTLDTAASSFLGLPLGPEADRLNKAFVDMVQASGGVVRRPLPFTRMGKGVAGRRLMVEYFGRLVRERRADPGQDMFSQFALATREDGSLLPEDVVVDHMIFLMMAAHDTITSSATVLFWQLARNPDWQDRLRAEARAVTGGDGLPLAYEDLGRMELTEMAFKEALRFMPPVPNMPRRALRDFEFGGYRIPAGTPVGISPAAVHADPAHWPEPDRFDPLRFTPENVSGRHKYAWVPFGGGAHMCLGLHFAYMQVKLLVSHILTRYEVAMQPGPAPSWQAWPIPKPRDGLRVEMRRIC

SEQ ID NO: 14778 - protein, 406 aa, Thermus thermophilus HB8
MQELKVPSVGESIVEVEIGAWLKGEGESFAQDEPLVELITDKATLELPAPFAGTLKQILKRTGETARVGEAIALLEEGRAEAAPKAQAPAEAPKEPSPEPLAMPAAERLMQEKGVSPAEVQGTGLGGRILKEDVMRHLEERAPAKPQEAPPPPPPSRPAPPPSTPPQPPADKPWRVSEAVPMTPLRRRIAERLLMVRQTTAMLTTFNEADMSAVIALRKEFGEAFQKKYGVKLGFMSFFVKAVVQALKEIPELNAEIRDNHIVYHRYYDIGIAVGGGEGLVVPVIRDADRLSFAEIEQKIADFAERARTKKLKPEELMGGTFTITNGGIYGSLNSTPLLNPPQVGILGMHAIQERPVVRDGQVVIRPMMYLALSYDHRIVDGREAVTFLRRVKELIENPARLLLEV

SEQ ID NO: 14779 - protein, 1548 aa, Staphylococcus aureus subsp. aureus COL
MNKNSKKKLDFLPNKLNKYSIRRFTVGTASILVGATLIFGVANDQAEAAENNTTQKQDDSSDASKVKGNVQTIEQSSANSNESDIPEQVDVTKDTTEQASTEEKANTTEQASTEEKADTTEQATTEEAPKAEGTDKVETEEAPKAEETDKATEEAPKTEETDKATTEEAPKAEETDKATEEAPKTEETDKATTEEAPAAEETSKAATEEAPKAEETSKAATEEAPKAEETEKTATEEAPKTEETDKVETEEAPKAEETSKAATEKAPKAEETNKVETEEAPAAEETNKAATEETPAVEDTNAKSNSNAQPSETERTQVVDTVAKDLYKKSEVTEAEKAEIEKVLPKDISNLSNEEIKKIALSEVLKETANKENAQPRATFRSVSSNARTTNVNYSATALRAAAQDTVTKKGTGNFTAHGDIIHKTYKEEFPNEGTLTAFNTNFNPNTGTKGALEYNDKIDFNKDFTITVPVANNNQGNTTGADGWGFMFTQGNGQDFLNQGGILRDKGMANASGFKIDTAYNNVNGKVDKLDADKTNNLSQIGAAKVGYGTFVKNGADGVTNQVGQNALNTKDKPVNKIIYADNTTNHLDGQFHGQRLNDVVLNYDAATSTITATYAGKTWKATTDDLGIDKSQKYNFLITSSHMQNRYSNGIMRTNLEGVTITTPQADLIDDVEVTKQPIPHKTIREFDPTLEPGSPDVIVQKGEDGEKTTTTPTKVDPDTGDVVERGEPTTEVTKNPVDEIVHFAPEEVPQGHKDEFDPNLPIDGTEEVPGKPGIKNPETGEVVTPPVDDVTKHGPKAGEPEVTKEEIPFEKKREFNPDLKPGEEKVTQEGQTGEKTTTTPTTINPLTGEKVGEGEPTTEVTKEPVDEITQFGGEEVPQGHKDEFDPNLPIDGTEEVPGKPGIKNPETGEVVTPPVDDVTKHGPKAGEPEVTKEEIPFEKKREFNPDLKPGEEKVTQEGQTGEKTTTTPTTINPLTGEKVGEGEPTTEVTKEPVDEITQFGGEEVPQGHKDEFDPNLPIDGTEEVPGKPGIKNPETGEVVTPPVDDVTKHGPKAGEPEVTKEEIPYETKRVLDPTMEPGSPDKVAQKGENGEKTTTTPTTINPLTGEKVGEGEPTTEVTKEPIDEIVNYAPEIIPHGTREEIDPNLPEGETKVIPGKDGLKDPETGEIIEEPQDEVIIHGAKDDSDADSDSDADSDSDADSDSDADSDSDADSDSDSDSDSDSDSDSDADSDSDADSDSDSDSDSDADSDSDADSDSDADSDSDADSDSDSDSDSDADSDSDSDSDSDADSDSDADSDSDADSDSDADSDSDSDSDSDADSDSDSDSDSDSDADSDSDSDSDADSDSDADSDSDADSDSDADSDSDSDSDSDSDSDSDSDSDRDSDADSDSDADSDSDSDSDSDADSDSDSDSDSDADSDSDADSDSDSDADSDSDSDSDSDADSDSDADSDSDADSDSDADSDSDSDSDSDSDSDSDADSDSDADSDSDADRDHNDKTDKPNNKELPDTGNDAQNNGTLFGSLFAALGGLFLVGRRRKNKNNEEK

SEQ ID NO: 14780 - protein, 957 aa, Kluyveromyces lactis
MTQSLPLLNGTEAYKLVTTQGLYDKTVKFYEKYLQLVHDKRVGTLTNSLITLKLVVDNSFKPLDVVNDKDWRAIVSSALVFSCTNIQHFRDLAAGETIQAYPNETNPIEIYLKDPNGYIIGITETKNAISIKPTLPKQSVEASLISSRSSRIDIASSGVSTDSSYPAIPKTAKAQKSIAVMTSGGDAPGMNANVRAIVRTAIFKGCNAFVVMEGYEGLVKGGPNYIKQVYWETVRNWSCEGGTNIGTARCKEFREREGRLLGALHLIEAGVDALIVCGGDGSLTGADLFRSEWPSLIRELLDQGRINKVQFDRYQHLNICGTVGSIDNDMSTTDATIGAYSALDRICQAIDYIEATANSHSRAFVVEVMGRNCGWLALLAGISTSADYILIPEKPASSREWQDQMCDIISKHRSRGKRTTIVIVAEGAISADLTPISSKDVHKVLVDRLGLDCRITTLGHVQRGGTAVAYDRILATLQGVEAVNAVLESTPDTPSPLIAINENKITRKPLVESVQLTKSVAEIHSKDFKKAMQLRDSEFVEHLDNFMAINSAHHIEPKLPEHTHMKIAIVNVGAPAGGMNSAVYSMATYCMSQGHKPYAIYNGWTGLTRHESVRSLNWKDLLGWQSRGGSEIGTNRHTPEEADIGLIAYYFQKYGFDGIIIVGGFEAFVSLHQLERARENYTAFRIPMVLIPATLSNNVPGTEYSLGSDTALNSLMQYCDIIKQSAASTRGRVFVVDVQGGNSGYLATHAAVAVGAQVSYVPEEGISLEQLTQDIENLTESLREAEGRGKFGQLILKSTNASKVLTPEVLAEVITQEAEGHFDAKCAIPGHVQQGGLPSPIDRTRGTRFAIRAVGFIESQHKVLAAEANLDDDDFDFDTPKIIATASVLGVKGSDIVFSSIRQLYDFETELNKRTPKTIHWQSTRPLRTICRKEKTYEIKNVSASSKFPLKWMYIIM

SEQ ID NO: 14781 - protein, 344 aa, Methylobacillus flagellatus KT
MAYYLKEPSIPTQEPERTGILVMNLGTPEAPTAKALRPYLRQFLSDRRVIELPRPLWWFILNGVILVLRPRQSAHKYATIWDKEGPPLMVNSQKQARLLEGYLHEAISSPYAVELGMRYGSPSIASALGKLKAKNCNRILLFPLYPQYAASSSASALDEAMRTLIRTRNMPEIRTIRDYHDHPAYIHAVAKSIRLYWQQHGKPEKLVMSFHGVPRRTYDLGDPYYDQCQTSGKLVAQALGLEEDQYMIAFQSRFGTAEWLQPYFAPSIQALGKQKLRRVDVVCPGFSSDCLETLEEIAMEGKSLFLEGGGGEYHYIPALNDNDTWIKAMREIALDNLQGWVTRR

SEQ ID NO: 14782 - protein, 424 aa, Rickettsia typhi str. Wilmington
MTTILVIVIIIMISLSALFAATETAITASSPGKIHKLKITGNKRAKTVLGLLKKKEKVIGTLLIGNSLINTICTTIATTLFISLLGNNGTIVASGVMAFIIIVFAEVVPKAIAVAKPEQLALKMASTIVIFLKLFKPINIALDYITKIFCFIFRINLNPQISSTEEVRGVIEHYHQEGGVYKSERNMLGGILDIRNMSVSEIMTHRSNIIALNIDLPHELIIKTLLSGAHTRIPLWKDNRDNIIGILNLKDLLKALYENNNDDKKVDINTLLTPPWFIPDNALVVDQLHAFRERNNHFACVVDEYGTLLGIITLEDVIEEIVGPITDEHDRLNNEIIKKSNTEFIIKGTTTIRDINRELDWNLSDEDANTIAGLIIHKIARIPNQGEVIEIFNLKIIILKKIANKIDSVKITVLPMTEGTINSE

SEQ ID NO: 14783 - protein, 254 aa, Thermus thermophilus HB8
MVLKERQDGVLVLTLNRPEKLNAITGELLDALYAALKEGEEDREVRALLLTGAGRAFSAGQDLTEFGDRKPDYEAHLRRYNRVVEALSGLEKPLVVAVNGVAAGAGMSLALWGDLRLAAVGASFTTAFVRIGLVPDSGLSFLLPRLVGLAKAQELLLLSPRLSAEEALALGLVHRVVPAEKLMEEALSLAKELAQGPTRAYALTKKLLLETYRLSLTEALALEAVLQGQAGQTQDHEEGVRAFREKRPPRFQGR

SEQ ID NO: 14784 - protein, 92 aa, Ricinus communis
VNCGQVNKALSSCVPFLTGFDTTPSLTCCAGVMELKRLAPTVKDKRIACECVKTAAARYPNIREDAASSLPYKCGVVINVPISKTTNCHEIN

SEQ ID NO: 14785 - protein, 191 aa, Rickettsia typhi str. Wilmington
MWHEVDVICDIMNLLSKDLDKADIEHEIYMRLKEPYSVLKKMKRKEVHIYSLKDLIACRIIVKSKDLCYNALDVVKNSPYLDCLYTKDYINRPKSNGYQSLHNIMQLLHSKRTVEIQIRSRDMNQYAEFGSAAHLNYKEEQDRHFKKAFDITNDTMLSKARQMLKQFAGLEEQIVEYEKEIMCIWLNTMKW

SEQ ID NO: 14786 - protein, 341 aa, Synechococcus sp. WH 7805
MTLRVAINGFGRIGRNVMRGWLSRGADTGLEIVGMNSTSDPKTSAHLLTYDSILGHIDRSVQIETTDETMIVNGKEIKFFADRNPLNCPWKDWGVDLVIESTGVFNTDEKASMHLEAGASKVILTAPGKGDGVGTFVVGVNDDQYRHEDWNILSNASCTTNCLAPIVKVLDQSFGLDWGLMTTIHSYTGDQRILDNSHRDLRRARAAALNMVPTTTGAAKAVALVYPEVKGKLTGFAMRVPTPNVSAVDLTFGPSRATNVEEVKAVIKAASENGMKGIIKYSDLPLVSTDYAGTNESTIFDADLTYAMGDKAVKILAWYDNEWGYSQRVVDLAEVVARNWK

SEQ ID NO: 14787 - protein, 405 aa, Yarrowia lipolytica
MEPETKKTKTDSKKIVLLGGDFCGPEVIAEAVKVLKSVAEASGTEFVFEDRLIGGAAIEKEGEPITDATLDICRKADSIMLGAVGGAANTVWTTPDGRTDVRPEQGLLKLRKDLNLYANLRPCQLLSPKLADLSPIRNVEGTDFIIVRELVGGIYFGERKEDDGSGVASDTETYSVPEVERIARMAAFLALQHNPPLPVWSLDKANVLASSRLWRKTVTRVLKDEFPQLELNHQLIDSAAMILIKQPSKMNGIIITTNMFGDIISDEASVIPGSLGLLPSASLASLPDTNEAFGLYEPCHGSAPDLGKQKVNPIATILSAAMMLKFSLNMKPAGDAVEAAVKESVEAGITTADIGGSSSTSEVGDLLPTRSRSCSRRSKSFLRRIDGRSKLTRLRVGLPAGSASV

SEQ ID NO: 14788 - protein, 1104 aa, Kluyveromyces lactis NRRL Y-1140
MPSAQDYHVNPHFHMGDREGEHQQPPMAPATPRMMGRRVSESSAPGLMPAANIVNDTTQQPQQQPQLQTVPQSVPVPAQSFNDVVSNKPFHRKSLGDWDFLETVGAGSMGKVKLAKHRLTNEVCAIKIVNRAAKSYMHKQNQLPPPKTEEELMERKKKLEKELSRDRRTIREASLGQILYHPHICRLFEMCTMSNHFYMLFEYVSGGQLLDYIIQHGSLRERHARKFVRGIASALQYLHLNNIVHRDLKIENIMISTSGEIKIIDFGLSNLYDNKKQLHTFCGSLYFAAPELLKANPYIGPEVDIWSFGVVIYVLVCGKVPFDDENASVLHEKIKKGKVEYPQHLSIECISLLSKMLVVDPLKRASLKQVCNHQWMQRGFDFPPPSYIPHRVPLTVEMLDVNVIKEMHRLELVNDVNDALQALRDIIDSHEYKELSREYWYNVQNSNNQEDGTRAFHPLLSIYYLVDEMLKRKLAKRLQKQQQLQQQQQQQLQAGYQSKPFQGQSQPIFPSDQVDTSIPLPDQSQPKTLQQPVSVNNSDYIVRPSSIKEVSPEHTTSPAAYIPSNLERNSTVVASPVRNKELPQIMIPPKLAIPELAHTSPTRKSSDANPELDAVMSPSPAPMDYPSQQEQTKQQQANKYNMGSVKTSTTSSEKPKIGSIFRRLSQRHRHAQTINQGSLQVQEPKSVALQTNAAPKVRKTHTRTVSEHVPSTSRYADPYYSENAPRDMQGDLPALPANADVLVKQQQERLNDLKLNNELDDESETQSTKYDENQPLALLSLPKGKKLHPSARAKSVGHARRESLKYNRPPVLTTSAANTSSDGSTAPGRINTNDDGFLQSSSEGNALQIDDISPWEELTDEQIIERASKAPPGSMPSIDFPRSLFLKGFFSVQTTSSKPLPVVRYKIISTLKKLNIEFTEVKGGFICCHRQSYVSQEQPPNHGRHPSIVINETSSLESNSSTANSHRKQLSIPSRHGSIRRHGSLKQPGIPATPLAAATHERNLSVTSPRTSTGQILEEVSTASFETLNNQEDILTNSKAQDMNKVVIGNKNEAGNKERPPLKFEIHIVKVKLVGLAGVHFKKVSGNTWMYKELATHILKELNL

SEQ ID NO: 14789 - protein, 321 aa, Tropheryma whipplei str. Twist
MYPLRIGTRSSLLATAQTAQVQKTMRDVFLLDTQQVLIQTGSVRRRDGSFVAALRTALLEGECDLAVHSLKDIPIAPHEGTLITAVLPREDPCDVLCARKDLTLTTLPSGAKVGTASARRRAQILNFRPDLDVVSLRGNIDKRLIHLDTLDAIVLSAAGLKRIDREDAITESFDIHDWPTAAGQGSLAIEVCRAQLDDPQNRVAVTYRLDNPMARVTTTAERGVLSLLQADCFSPIAVHAVYTANDKSLGLHAKVFSRDGKIFCESIRFARLVKQLTDTNQNHTKNSGSDDIGNALEVAMTLAKTVVDELLSKNAREILKQ

SEQ ID NO: 14790 - protein, 579 aa, Glycine max
MCGILAVLGCSDSSQAKRVRVLELSRRLKHRGPDWSGLHQYGDNYLAHQRLAIVDPASGDQPLFNEDKTVVVTVNGEIYNHEELRKQLPNHTFRTGSDCDVIAHLYEEHGENFMDMLDGIFSFVLLDTRDNSFIVARDAIGVTSLYIGWGLDGSVWISSELKGLNDDCEHFESFPPGHLYSSKERAFRRWYNPPWFSEAIPSAPYDPLALRHAFEKAVVKRLMTDVPFGVLLSGGLDSSLVAAVTARYLAGTKAAKQWGTKLHSFCVGLEGAPDLKAAKEVAEYIGTVHHEFHYTVQDGIDAIEDVIYHIETYDVTTIRASIPMFLMSRKIKSLGVKMVISGEGSDEIFGGYLYFHKAPNKEEFHQETCRKIKALHKYDCLRANKSTFAWGLEARVPFLDKEFIRVAMNIDPECKMIKKEEGRIEKWALRRAFDDEEHPYLPKHILYRQKEQFSDGVGYGWIDGLKAHAEKHVTDRMMLNAANIFPFNTPTTKEAYHYRMIFERFFPQNSARLTVPGGPSVACSTAKAVEWDAAWSNNLDPSGRAALGVHASAYGNQVKAVEPEKIIPKMEVSPLGVAI

SEQ ID NO: 14791 - protein, 402 aa, Xanthomonas campestris pv. campestris str. 8004
MRRVVVTGMGINSCLGNDLDTVSSALRESRSGITALPDHAEAGLRSQVGGAVDIDLDGLIDRKLKRFMGDASAYAYLAMRDAIADAGLSPEQVSDLRTGVIAGSGGGSSQWQVETADLLRARGVRKVGPYMVPRTMCSAVSASLATAFKIRGLSYSLSAACATSAHCIGAAADLIRHGAQDVMFAGGGEELHWTMSVMFDAMGALSTGFNDRPAVASRPYDAQRDGFVIGSGGGMLVLEDYDHAIARGARIHAELLGYGVTSDGADMVAPSGEGAVRCMHMAMQGLDRPIDYLNTHGTSTPLGDATELGAVREVFGDNVPPLSSTKALSGHSLGAASVHEAIYSMLMLRDGFMAGSAHIDELDPRAEGFPILRATREATLNTVMSNSFGFGGTNGVLVFGRV

SEQ ID NO: 14792 - protein, 424 aa, Bartonella henselae str. Houston-1
MQYNDHFGRPIVAITGAGIVTSLGKGKHENWQKLTSGVSGIHKITRFPVDELKTRIAGTVDFLKESTYGASALSEKLANLAAEEALEQADLGKTNFNGPLFLAAPPVELEWKARLTLDQEGELNSAPSYVHLLEICSHKLHETLFETTQFGAIAENLQKKFGTKGLPITLSTACASGATAIQLGVEAIRRGETNRALTIATDGSVSAESLIRFSLLSALSTQNDPAEKAAKPFSRDRDGFVMAEGSGALVLESLKSALDRNAIILGILAGCGETADDFHRTRSKPDASPAIEAVRKALEDANITINEIDYINAHGTSTPENEKMEYLALSTVFGDRLEHIPVSSNKSMIGHTLTAAGAIEAVFSLLTIQSGILPPTINYDDPDPAIPLDVVPNHSRKACVNAVLSNSFGFGGQNMSLVITAYKG

SEQ ID NO: 14793 - protein, 355 aa, Burkholderia sp. 383
MKIAVLPGDGIGPEIVNEAVKVLNALDEKFELEQAPVGGAGYEASGHPLPDATLKLAKEADAILFGAVGDWKYDSLERALRPEQAILGLRKHLELFANFRPAICYPQLVDASPLKPELVAGLDILIVRELNGDIYFGQPRGVRTAPDGLFAGEREGFDTMRYSEPEVRRIAHVAFQAARKRAKKLLSVDKANVLETSQFWRDIMIDVSKEYADVELSHMYVDNAAMQLAKAPKQFDVIVTGNMFGDILSDEASMLTGSIGMLPSASLDKNNKGLYEPSHGSAPDIAGKGIANPLATILSAAMMLRYSLNRAEQADRIERAVKTVLEQGYRTGDIATPGGQQVGTTAMGDAVVAAL

SEQ ID NO: 14794 - protein, 338 aa, Arabidopsis thaliana
TLKRSSKVWLQELRSNLNIFWGTIESEISKNGAASYIFPLQRCIFSFLCASLAGVDASVSPDIAENGWKTINTWLALQVIPTAKLGVVPQPLEEILLHTWPYPSLLIAGNYKKLYNFIDENAGDCLRLGQEEFGLTRDEAIQNLLFVLGFNAYGGFSVFLPSLIGRITGDNSGLQERIRTEVRRVCGSGSDLNFKTVNEMELVKSVVYETLRFSPPVPLQFARARKDFQISSHDAVFEVKKGELLCGYQPLVMRDANVFDEPEEFKPDRYVGETGSELLNYLYWSNGPQTGTPSASNKQCAAKDIVTLTASLLVADLFLRYDTITGDSGSIKAVVKAK

SEQ ID NO: 14795 - protein, 548 aa, Photobacterium profundum SS9
MTGAELVVHALQQQGITTIFGYPGGAIMPIYDALYDGGVEHILCRHEQGAAMAAIGMARATQDVAVCMATSGPGATNLVTGLADAFLDSVPMVAITGQVASSHIGTDAFQEMDVIGMSLSCTKHSYLVTDINDLAPTLAEAFIVAKAGRPGPVIVDIAKDVQLAQAPVELLPFIEEPSIPVATPESIAKAQCLLAASQRPVLYVGGGVQIAKATDTVRTFLKLNPMPAVSTLKGLGTVERHAPHYLGMLGMHGTKAANLVVQESDLLIVVGARFDDRVTGKLDTFAPHAKVIHLDIDASEFNKLRIANAPLRGDVNVILPQLELSQDISAWVQHSETLRSDFKWRYNHPGDLIYAPLLMKQLSDMMPDSSVISTDVGQHQMWAAQHIQPREPQNYITSAGLGTMGFGLPAAMGAKVARPNDESILISGDGSFMMNVQELGTLKRKQIPVKMVLINNQRLGMVRQWQSLFFNERHSETILDDNPDFVVLASAFGIPGKTITKKEEVEPALREMLASKTAYLLHVLISEEENVWPLVPPGAANQDMLENT

SEQ ID NO: 14796 - protein, 490 aa, Xanthomonas campestris pv. vesicatoria str. 85-10
MPRFSDQLLYIGGRYVPARGGHTFEVVNPATGEVLANVHNAGADDLDAAVDSAQAGQRQWAALTTVERSRILLRAVALLRERNDALAELETLNTGKPLSETRSVDVVTGADVLEYYAGVAQALQGAQVPLREGSFFYTRHEPLGVVGAIGAWNYPIQIALWKAAPALAAGNAMIFKPSEVTPLTALKLAEIFTEAGLPDGVFNVLPGDGASVGTALTEHPQIEKISFTGGTATGRKVMASASSSSLKEVTMELGGKSPLIVCADADLDLAADIAMMANFYSSGQVCTNGTRVFVPRALRHAFEARLLARVQRIHIGDPLDERTTFGPLVSAAHMQRVLEHIEQGKAEGARLLCGGERLQDGALAQGYYVAPTIFSDCTDVMTIVREEIFGPVLSLLTYDDEDEAVTRANATTYGLAAGVVTPDLARAHRLIHRLEAGICWVNTWGESPAPMPVGGYKQSGVGRENGLATLQAYTRTKSVQIELERYASVF

SEQ ID NO: 14797 - protein, 394 aa, Vibrio sp. Ex25
MLSNQTIEIVKATAPLIAETGPKLTAHFYERMFTHNPELKDIFNMSNQRNGDQREALFNAICAYAANIENLPALLGAVEKIAHKHTSFLITEDQYQIVGKHLLATIDELFNPGQEVLDAWAEAYGVLANVFIQREEQIYQQNEALEGGWRGLREFELVDKQIESEHICSFVFKPTDGQKVAPYKPGQYLGIYINSDQLENQEIRQYSLSSAVQENTYRISVKREEGGKVSNFLHDSLNIGEKVQLAAPAGDFFMDAEPQTPVVLISAGVGLTPTLSMLESLSAHQAPVTWVHATENGQQHAFKQHVNQLVAAKENMNALVWYNHPTAEDKLGEDFHFKGFVNLYEIEAALKQDNVQVYFCGPVGFMQHVAKQLLELGVPEEQFHYECFGPHKVV

SEQ ID NO: 14798 - protein, 98 aa, Leptospira interrogans serovar Lai str. 56601
MLEDLGKKGVKRVAVYPISFVSDHLETLEEIGEQLKKVAYQNGILEYYRIPAPGIYPKFIKAMAKIALESSQTSKKECLCKKLGGYNLNSVVCTRLIS

SEQ ID NO: 14799 - protein, 92 aa, Arabidopsis lyrata subsp. petraea
LTESVPFFREIVTGAFEKFIKVTMKLPLTGQQYSEKVTENCVAIWKSLGIYTDCEAKAVEKFLEIFKEETFPPGSSILFALSPTGSLTVAFS

SEQ ID NO: 14800 - protein, 162 aa, Pseudomonas syringae pv. tomato str. DC3000
MSAFHDIRLKALGGQELPLADFKNKVVLVVNVASKCGLTPQYAALENLYQQYRDKGLVILGLPCNQFAGQEPGTEQEIAEFCQLNYGVTFPLGEKLDVNGPNRHSLYRLLAGEGAEFPGDITWNFEKFLVGKNGGVSARFSPRTAPDDPAVIQAIEKALAHN

SEQ ID NO: 14801 - protein, 207 aa, Guillardia theta
WKFFGNLMDCEQYQPFLCGEESFGTGSNHIREKDGMWAVLAWLQILASKNPDQSKPLVTVEDIVRAHWSKYGRNYYVRYDYEGVELAQAENMMKYMSDMAGKWPADAFNGMEIETADVFKYNDPVDKSVSDNQGIRFIFKNGSRIVFRVSGTGVVGATIRLYLEKYEGPSGNLNAHPLETVKPIAELALKLSKLEEFTGRKAPSVMT

SEQ ID NO: 14802 - protein, 512 aa, Candida tropicalis
MLDQIFHYWYIVLPLLVIIKQIVAHARTNYLMKKLGAKPFTHVQLDGWFGFKFGREFLKAKSAGRQVDLIISRFHDNEDTFSSYAFGNHVVFTRDPENIKALLATQFGDFSLGSRVKFFKPLLGYGIFTLDGEGWKHSRAMLRPQFAREQVAHVTSLEPHFQLLKKHILKHKGEYFDIQELFFRFTVDSATEFLFGESVHSLRDEEIGYDTKDMAEERRKFADAFNKSQVYLSTRVALQTLYWLVNNKEFKECNDIVHKFTNYYVQKALDATPEELEKQGGYVFLYELAKQTKDPNVLRDQSLNILLAGRDTTAGLLSFAVFELARNPHIWAKLREEIESHFGSGEDSRVEEITFESLKRCEYLKAVLNETLRLHPSVPRNARFAIKDTTLPRGGGPNGKDPILIRKNEVVQYSISATQTNPAYYGADAADFRPERWFEPSTRNLGWAYLPFNGGPRICLGQQFALTEAGYVLVRLVQEFPSLSQDPETEYPPPRLAHLTMCLFDGAYVKMQ

SEQ ID NO: 14803 - protein, 92 aa, Arabidopsis lyrata subsp. petraea
LSESVPFFREIVTGAFEKFIKVTMKLPLTGQQYSEKVTENCVAIWKSLGIYTDCEAKAVEKFLEIFKEETFPPGSSILFALSPTGSLTVAFS

SEQ ID NO: 14804 - protein, 115 aa, Arabidopsis halleri subsp. halleri
TALSPITRNEAHYSIIRQGQYVHLDDLCKTHIFLYEQAAAKGRYICSSHDATILTISKFLRQKYPEYNVPSTFEGVDENLKSIEFSSKKLTDMGFNFKYSLEEMFIESIETCRQK

SEQ ID NO: 14805 - protein, 320 aa, Pseudomonas syringae pv. tomato str. DC3000
MSDVRHSRVIILGSGPAGYSAAVYAARANLKPLLITGMQAGGQLTTTTEVDNWPGDPHGLTGPALMERMREHAERFETEIVFDHINSVDLAGKPFSLQGDSATYTCDALIIATGASARYLGLPSEEAFMGKGVSACATCDGFFYRNREVAVVGGGNTAVEEALYLANIASKVTLVHRRETFRAEKILIDKLHARVAEGKIVLKLNATLDEVLGDNMGVTGARLKNNDGSSDELKVDGVFIAIGHTPNTSLFEGQLALKDGYMVVHGGREGNATATSVEGVFAAGDVADHVYRQAITSAGAGCMAALDVERYLDGLANATF

SEQ ID NO: 14806 - protein, 402 aa, Burkholderia mallei ATCC 23344
MTQMTAEQMARVKATAPVLAEHGATITKHFYQRMFGRHPELKNVFNQTHQKTGSQPETLAKAVYAYAANIDNLGALGGAVSRIAHKHASLNIRPEHYPIVGENLLASIVEVLGDAVDADTLEAWRIAYGQLAAILIGAEANLYENAAWSGFRPFKVAKKVRESDEITSFYLTPADGGAAPGFEPGQYISVKRFVGDMGVDQPCQYSLSDAPHGKWLRISVKREAGHSEAVPAGKVSTLMHDGVDVDSVVEVTAPMGDFTLNRHAATPVVLISGGVGITPMMSMASTLVAAGSEREVRFLHACRAANVHAFRDWLNDTTDAHPNVKRAVFYEVVGPNDRVGVDHDHEGRITPAALERHALVPDADYYICGPIAFMKQQRDALVALGVAPERVQTEIFGSGALE

SEQ ID NO: 14807 - protein, 777 aa, Dechloromonas aromatica RCB
MKASRQREWRLPVYLGLLLTLTSVLTFLIVGGVFLLTRIPQMEEEIRARGESEARELAFRIEMQMLAQQEQMALVATALRNTQSPSTLIADAIGEGKVFRALYLISSQGDVLAAGLTPEYRHLESEVIGSDLSGTPLFQEVRQRREIVWSDKYLSALSGVITVGLAIPIAGDQVLLAEIPINYLLSILDRNPANKQRSIWVVDQRGELLADTQAFMRPGELNIYNSPVLNAVLKDEPLPSRFSFNGHDYYVGGARSEALGWSFISRLPAGFDHPEIRMTTLIVCGGFLASLVIGALLAMYGASRLLRPLARVVKQAHEVASGRPVRLWPQGRIKEFNDLSTDIGQMASAILEREHELRELNSKLEARVVKRTEELSRAKEVAEEANRAKSTFLANMSHEIRTPLNAIAGMAALMRRAGLEQEQETRLDKLEAAGGHLLEIINMVLDLSKIEAGKLTLQEDVFPLGSLFENVISMLHERALEKHLSLSFELPDLPPLLCGDRIRLQQSLLNYATNAVKFTEQGSVFMTAALLEETEEDVLIRFEVRDTGIGIAPEVQKRLFKAFEQADGSTTRQYGGTGLGLAITAKIAAAMGGETGLESEIGNGSTFWFTARLRKAILGSQEAHQEPTCGAEQGLLKDFAGIRVLLVDDEPINREITQILLEDLHFRIDSAENGEEALALACIYPYDLILMDMQMPVMDGLEATRRIRALPDGHRFLIIAMTANAFSEDRERCLAAGMDDFTTKPIDPEAFFSLIHRQLSVRNDPGRRPTGPGRESA

SEQ ID NO: 14808 - protein, 346 aa, Medicago sativa
MEEVADEEKEVKQRKAEAQKEKEAGNAAYKKKDFDTAILHYSKALELDDEDVSFLTNRAAVYLEMGKYEDCIKDCDKAVERGRELRADYKMIARALTRKGTAMGKTAKCSKDYEPVIETYQKALTEHRNPDTLKKLNEAEKAKKELEQQEYFDPNLADEEREKGNEYFKQQKYPEAIKHYTESIKRNPKNPKAYSNRAACYTKLGAMPEGLKDAEKCIELDPTFTKGYTRKGAVQFFMKEYEKALETYQEGLKHDANNQELLEGVRSCVKQINRTSRGDVTPEELKERQAKAMQDPEIQNILQDPVMRQVLVDFQENPKAAQEHTKNPGVMDKIQKLISAGIVQMK

SEQ ID NO: 14809 - protein, 410 aa, Pseudomonas syringae pv. tomato str. DC3000
MALIVQKFGGTSVGSVERIEQVADKVKKFREAGDDLVVVLSAMSGETNRLIELARQISDQPVPRELDVIVSTGEQVTIALLAMALMKRGVPAVSYTGNQVRILTDSAHNKARILQIDDQKIRSDLKAGRVVVVAGFQGVDEHGNITTLGRGGSDTTGVALAAALKADECQIYTDVDGVYTTDPRVVSQAQRLDKITFEEMLEMASLGSKVLQIRAVEFAGKYNVPLRVLHSFKEGPGTLITIDEEESMEQPIISGIAFNRDEAKLTIRGVPDTPGVAFKILGPISAANIEVDMIVQNVSHDNTTDFTFTIHRNDYQAALQVLETTAREISAREVSGDTKIAKVSIVGVGMRSHAGVASRMFEALAKESINIQMISTSEIKVSVVIEEKYLELAVRALHTAFELDAPRQGE

SEQ ID NO: 14810 - protein, 365 aa, Mycosphaerella graminicola
MPTYNIVVFGGDHCGPEVTAEALKVLDVIDNSNADVHFNIQPHLLGGASIDAHGEPLTDEALAAAKAADAVILGAIGGPKWGTGKVRPEQGILRLRKEMGTYGNLRPCFFASESLVKTSPLKEEVCRGVNFNIVRELTGGIYFGERTEDDGSGYAVDTEPYSRAEIERVARLAGFLALAEDPPCPVWSLDKANVMATSRLWRKTVTDVFANEFPQLKIGHHLIDSAAMLMVKNPRALNGVIVTSNLFGDIISDEASVIPGSLGLLPSASLTASPDGKSKCNGIYEPIHGSAPDISGKGIVNPVAMILSLGMMCKYSLQQPELAKKIDEAVRNVIEKGINTADIGGSAKTAEVGDAIAKELEALLK

SEQ ID NO: 14811 - protein, 138 aa, Vibrio parahaemolyticus RIMD 2210633
MSNGRILHTMLRVGDLDKSIKFYTEVMGMQLLRTNENKEYEYTLAFVGYGDESQGAVIELTYNWGKTEYDLGTAFGHIAIGVDDIYATCDAIKAAGGNVTREAGPVKGGTTHIAFVKDPDGYMIELIQNKQASAGLEG

SEQ ID NO: 14812 - protein, 684 aa, Oryza sativa (japonica cultivar-group)
MVIPGPFFRRSTALQVFSVLCVLRFVVPDPDIEWPLIHGIPACPPFTCGHLSKVASPFHRRGYECGVASYELTCTDDKATIQIDNGTYFVTGIDYSDSTFWVVDANISDSRNNCPLPRWKRIPYYYDDVSSDDEESSPYNIQVELDPASRWWSFFVNCSKEINNNVMYSPVACMGTSSSFVYVLTGRLSCYIENLEPSCGYLAMTPLDGMGRVAPAVDSLSYEDVVKFMRKGFRVQFPFRHHRNRSFKDCLMESIPKSTGIGKLSDWFSLSVTENFMDCATAKIPSPYNILLGIILYALMFWTMLAPPCRYLLAPLVVLIFLAQKYLKRMITIDAVEKFLRMQQMLGPTRYAYTDIIAITGHFREKLGQGGYGSVYKGVLLPGDLHVAIKILNGYSNCNGEEFISEVATIGRIHHVNVVRLVGFCSEEMRRALVYEYMPRGSLDKHIFSSERRFSWDKLNEIALGIARGINYLHQGCDMQILHFDIKPHNILLDDNFVPKVADFGLAKLYPRDKSFVSDRALRGTVGYMAPEMVSRSFGIISGKSDVYSFGMLLLEMVGGRRNADPNADSSASKAYYPSWVYDKLIADQQVDEISNFANMHELERKLCLVGLWCIQMKSHDRPTMSEAIEMLEGGVDALQVPLRPFFCDGDGMPPPQVMDSYFHSSDLSAISEEDDGIAELASS

SEQ ID NO: 14813 - protein, 816 aa, Pseudomonas aeruginosa PAO1
MKKIKLVMVGNGMAGVRTLEELLKLNSDFYDITVFGAEPHPNYNRILLSPVLAGEQTFEEIVLNDLNWYAENGIKLLLDRKVVQIDRLRRRVVAADGSEAEYDRLLLATGSLPFILPIPGNRLQGVIGYRDIADTQAMIDCARTHSHAVVIGGGLLGLEAANGLKQRGMDVTVVHLSDWLLERQLDRTAGKLLQGALEARGIRFRLNTQTQELMDNGSGRVCAVQFNDGDVIPADLVVMAAGIRPNTELAESAGIPCNRGILVNDTLQTYDPRIYAVGECANHRGIAYGLVAPLFEQAKVCANHLAHLGYARYQGSVTSTKLKVTGIDLFSAGDFIGGEGSETITLSDPIGGVYKKLVIKDDVLVGACLYGDTADGGWYFRQIRENHNVAQIRDHLMFGENALGDVGHQGQNSAASMPDTAEVCGCNGVCKGTIVKAIQEHGLFSVDEVKKHTKAASSCGSCAGLVEQILISTVGGAADVKPKSEKAICGCSDLNHGQIRKAIREHRLTSLDAAMRFMDWKTPNGCATCRPALNYYLISTWPGEAKDDPQSRLINERAHANIQKDGTYSVVPRMWGGVTNAAELRRIADVADKYQVPMVKVTGGQRIDLLGVKKDDLPAIWKDLDMPSGHAYGKSIRTVKTCVGSEFCRFGTQNSTQLGIDLEHDLFNMWSPHKVKLAVSGCPRNCAEAGIKDVGIIGVDSGWEMYIGGNGGIKTEVAEFFVKLKTAEEVREYNGAFLQLYREEAFYLERTVHYLQRVGMEHIRKAVVEDAENRKALNDRLQFALSFEQDPWKQRIEQPQLKKEFERISLKQLENV

SEQ ID NO: 14814 - protein, 112 aa, uncultured bacterium 578
MKLVTAILRPEVLNKVREALCDVDIPGMTVTEVKGFGKQKGRTELYRGTEFTVEFVHKVKLEIAISNKNLDLLIDTISDIARSGKKGDGKIFVTEIEKVVRIRTGETDLDAL

SEQ ID NO: 14815 - protein, 564 aa, Zea mays
MAAAAVTSNGGAVAANGPAPGRLASVYSEVQTNRLLHALPLPSVLRSNFSVVDGPASSAAGNPDEIAKLFPNLFGQPSASLVPSAEPAATRPLKVGVVLSGGQAPGGHNVICGIFDYLQERAKGSTLYGFKGGPAGIMKCKYVELTSDFVYPYRNQGGFDMICSGRDKIETPEQFKQAEDTANKLDLDGLVVIGGDDSNTNACLLGEYFRSRNMKTRVIGCPKTIDGDLKCKEVPTSFGFDTACKIYSEMIGNVMTDARSTGKYYHFVRLMGRAASHITLECALQTHPNAALIGEEVAAKKQTLKNVTNYITDIICKRADLGYNYGVILIPEGLIDFIPEVQKLIAELNEILAHDVVDEAGAWKSKLQPESRELFEFLPNTIQEQLMLERDPHGNVQVAKIETEKMLISMVETELEKRKAEGRYSAHFRGQAHFFGYEGRCGLPTNFDSNYCYALGYGAGALLQSGKTGLISSVGNLAAPVEEWTVGGTALTSLMDVERRHGKFKPVIKKAMVELDAAPFKKYASMRDEWAIKNRYISPGPIQFSGPGSNDSNHTLMLELGAAL

SEQ ID NO: 14816 - protein, 377 aa, Candida albicans
MSADGEFTRTQIFGTVFEITNRYTELNPVGMGAFGLVCSAVDRLTGQNVAVKKVMKPFSTSVLAKRTYRELKLLKHLKHENLITLDDIFISPLEDIYFVNELQGTDLHRLLNSRPLEKQFIQYFTYQIMRGLKYIHSAGVIHRDLKPSNILINENCDLKICDFGLARLQDPQMTGYVSTRYYRAPEIMLTWQKYDTEVDLWSVGCILAEMIEGKPLFPGKDHVHQFSIITELLGSPPADVIDTICSENTLRFVQSLPHRDPIPFSERFASCTHVEPEAIDLLAKLLVFDPKKRISAVQGLTHPYMEAYHDPTDEPVCESKFDWSFNDADLPVDTWRVMMYSEILDFHQTVGVANETEGSEQPDSQVEQNNLDSANGA

SEQ ID NO: 14817 - protein, 500 aa, Festuca arundinacea
MEFFTEYGEASQYQIQEVIGKGSYGVVAAAVDTRTGERVAIKKINDVFGHVSDATRILREVKLLRLLRHPDVVEIKHIMLPPSRREFQDLYVVFELMESDLHQVIRANDDLTAEHYQFFLYQLLRALKYIHAGNVFHRDLKPKNILANSDCKLKICDFGLACVSFNDAPSAIFWTDYVATRWYRAPELCGSFFSKYTPAVDIWSIGCIFAELLTGRPLFPGKNVVHQLDIITDLLGTPSSETLSRIRNEKARRYLSCMRKKHPVPLTQKFPNADPLAVHLLGRLLAFDPKDRPSAEEALADPYFATLSNVEREPSRNPISKLEFEFERRKVTKDDVRELIYREILEYHPQMLQEYMKGGEQLSFLYPSGVDRFKRQFAHLEEHYSKGERGSPLQRKHASLPKRRVGASNDGNNEQHPSDQELGADPGAQSPPRSQDPGQQHPSGGQNGVSPRSYQKSASISASRCVVVNPNKQREYDEEISEETEEAIAELSEKVSKMHP

SEQ ID NO: 14818 - protein, 188 aa, Desulfitobacterium hafniense Y51
MMQLRKIALEKQAMVIGGNTTGIISTGKAMMGFFPYWLDRVYKPGRVGVMTRSGSLTNEVTAEIVKAGFGPSSIVGVGGDPVPLTRFAEILPLFEKDPDTDAVVMIGEIGGTMEEDVAEAIEQRIFTKPLIGFMGGRTAPKGQKMGHAGAIITAGKGTVEDKVEALAKAGALVADRPSMIGQLLQKVL

SEQ ID NO: 14819 - protein, 144 aa, Vibrio angustum S14
MTTITTRCPHCKSLNRMPSDRINDEASCGSCKDKLFDGMPIEGTEDNFSTLLKSDKPVVVDFWAPWCNPCVGFAPVFADVSQERDGQIRCVKIDTEAQQALAAQYRIRSIPTIMVFKEGKMVDMLNGAMPKSHFDQWLNEALTK

SEQ ID NO: 14820 - protein, 289 aa, Solanum tuberosum
MASSSSSLHFLSLTPQTLPKPTSQTTSISFFSLPPSSLNLSLSSSSTPRNFESSRFVRKVTLSDFDQIEEVEAGDDDEEEGGLSDEGASYEERNANPDLKIFVGNLPFSVDSAALAELFERAGDVEMVEVIYDKLTGRSRGFGFVTMSSKEAVEAACQQFNGYEIDGRALRVNSGPAPPKRENSFGDNSSYQGGRGGGSMDSSNRVYVGNLAWSVDQQQLETLFSEQGKVVDAKVVYDRDSGRSRGFGFVTYSSAKEVNDAIESLDGVDLGGRAIRVSPAEARPPRRQF

SEQ ID NO: 14821 - protein, 557 aa, Kluyveromyces lactis
MASKNTYSDFKLATELPAWNQLQSLYEQKGKKLNVKDEFAKDNSRYEKFAKTFVNYDGSKILFDFSKNLVDDEILKSLIQLAKEAKVTSLRDAMFNGEPINFTEGRAVYHVALRNRSLKPMYVDGTNVTPEVDAVLQHMKEFTEEVRSGAWKGYTGKSITDVVNIGIGGSDLGPVMVTEALKHYATNLKVHFVSNIDGTHIAETLKDLDHETTLFLIASKTFTTAETITNATQLELKNWFLSKNGGDQSHISKHFAALSTNATEVEKFGIDTKNMFGFENWVGGRYSVWSAIGLSVALYIGFDNFEAFLKGAEAVDKHFVETPLEDNIPLLGGLLSVWYNNFFDAQTHLVAPFDQYLHRFPAYLQQLSMESNGKSVTRGNVFANYSTGSILFGEPATNAQHSFFQLIHQGTKLIPSDFILAAQSHNPIENNLHQKMLASNFFAQAEALMVGKDEEQVKSEGATGGLVPHKVFSGNRPTTSILAQKITPATLGALIAYYEHVTFTEGRIWNINSFDQWGVELGKVLAKVIGSELATDNKISSHDSSTNGLINQFKEWI

SEQ ID NO: 14822 - protein, 828 aa, Erwinia carotovora subsp. atroseptica SCRI1043
MKLSRRHFMKANAVAAAAAVAGITIPIAVRAATEQSDAIHWDKAPCRFCGVGCGVLVGTQNGRIVASQGDPEAPVNRGLNCIKGYFLPKIMYGQDRLTQPLLRMRNGQFDKEGEFTPISWDKAFDIMAEKFKTALKEKGPNAIGMFGSGQSTIWEGYASAKLFKAGFRSNNIDPNARHCMASAVVGFMRTFGMDEPMGCYDDIEQTDAFVLWGSNMAEMHPILWSRITDRRLSNSNVTVAVLSTYQHRSFELADNGMVFTPQTDLAILNYIANYIIQNNAVNEAFFTRHVNLRRGVTDIGYGLRPTHPLEKAAKNPGSDASEPMSFEEYKAFVADYTLEKTVAISGVPADQLEALAKLYADPKKKVISYWTMGFNQHTRGVWANNLVYNIHLLTGKISQPGCGPFSLTGQPSACGTAREVGTFAHRLPADMVVTNEKHRAIAEKLWQLPTGTIPEKIGLHAVAQDRALKDGTLNAYWVMCNNNMQAGPNINQERMPGWRDPRNFIVVSDPYPTISALAADLILPTAMWVEKEGAYGNAERRTQFWRQQVKAPGESKSDLWQVVSFAKRFTVEDVWPEELLAQKPAYRGKTLYDVLFANDVTTRFPLSELAENQLNDESREFGFYLQKGLFEEYAAFGRGHGHDLAPFDAYHKVRGLRWPVVDGKETQWRYSEGHDPYVKAGEAYRFYGKPDGKAVIFALPYEPAAEAPDEEYDLWFSTGRVLEHWHTGSMTRRVPELHRAFPEAVLFIHPQDAKARDLRRGEKVRIISRRGEVISVVETRGRNKPPRGLVYMPFFDAAQMTNVLTLDATDPLSKETDFKKCAVKLAKV

SEQ ID NO: 14823 - protein, 177 aa, Brassica napus
MSCPVTVSATGLGRSIPSPMTVNPLPLVSMVYHASESAANNPGLSTVRDEATKGYIMQQTMFRVKDPKASLDFYSRVLGMSLLKRLDFSEMKFSLYFLGYEDTSTAPADPTERTVWTFGRPATIELTHNWGTESDPEFKGYHNGNSEPRGFGHIGVTVDDVHKACERFEQLGVEFVK

SEQ ID NO: 14824 - protein, 117 aa, Spinacia oleracea
MASSAVIKLACAVLLCIVVAAPYAEAGITCGMVSSKLAPCIGYLKGGPLGGGCCGGIKALNAAAATTPDRKTACNCLKSAANAIKGINYGKAAGLPGMCGVHIPYAISPSTNCNAVH

SEQ ID NO: 14825 - protein, 889 aa, Shewanella sp. MR-7
MAGNVADNVTDMYASLRSNVSMLGQILGDTMRTHLGDSFLEKVEQIRKLAKDSRRGDEAAREQMLELLTALPDEELVPFAKAFNQFLNLANLSEQFHTISRNCDELVCVPDPVEQLLGRMLNGRIDQTKMLDCLKTLDIDLVLTAHPTEISRRTLIQKYAAIVDCLAEQENNQLSDRERRQINLRLRQLIAQIWHTNEIRRERPTPVDEARWGLSTIEESLWHAVPDFLRQLNDQVQDRTGQQLPIDIAPVRFSSWMGGDRDGNPFVTAKVTQEVLDRNRHAAARLFLKDIVLLVGELSMEEANSELMAFTNNSCEPYRFVLRSLRQKLRDTIDYLNARIEGHNPEVDKSTLIWQESDLKAPLEMLYKSLCDCGMRLIANGLLLDILRRLACFGIHMLRLDIRQDAGRHCDVLAELTRYLGMGDFNHWDETEKQAFLLRELSNRRPLIPSNWQPSADVAEVLNTCRLIAKHPAKALGSYVISMASKPSDVLTVLLLLKETGCTHPMRVVPLFETLSDLNNAAECITALLDIDWYRGYTKGMQEVMIGYSDSAKDAGVMAAAWAQYRAQEQLVAVCQQAGVKLTLFHGRGGSIGRGGGPAHKAILSQPPGSVDGRIRVTEQGEMIRFKFGLPKLAVQSLALYTSAVLEATLLPPPEPKQEWRNCVERIAEESVSAYRGIVREEPDFVPYFRAATPEVELGKLPLGSRPAKRRVDGGIESLRAIPWIFAWSQNRLMLPAWLGAGEALQAACQRGEIGLLQDMEREWPFFSTRISMLEMVYAKAEPNLARYYETCLVPPNLHHLGETLRQRLDLGIKVVLELTKSDTLMAHTPWNRESVKLRNPYIDPLNFLQTELLARTRKETTEAPASEHVQLALMLTIAGVAAGMRNTG

SEQ ID NO: 14826 - protein, 508 aa, Synechococcus sp. WH 5701
MGPVQVVWFKRDLRVADHQPLLQASFLGPVLPLMVVEPELWRQSDASARQWDFCAESLEDLRRALAGLGQPLVVRIGTVEEVLERARCRFGIAGLWSHQETGNGWTYARDRRVARWAKSHSIPWIEIPSFGVIRRLGSRNGWARRWEARMAEPMVPPPEALQPLAGLDPGAIPSASELGLAPDPCPGRQVGGRQQGQAVLESFLNGRGARYHRELSSPRTAFESCSRLSPHLAWGTLSMREVVQLSRRRGAAPVGFEARLHWHCHFIQKLESQPDLEFRELHPLTAGLRSSDPERLAAWAEGRTGLPFVDACMRALIATGWINFRMRAMLMSVASYHLWLPWRESGLHLARLFVDYEPGIHWSQCQMQSGTTGINTIRIYNPIKQGQDHDPGGDFIRQWLPELAAVPAVHLHEPWTMAVITQQRVGCVLGLHYPLPIVEPNQAAREARVRIWAQRQELGFAELADAIQHKHGSRRSGLAASGGRRRRRSMGGTPTDPQIQLRLDLDLA

SEQ ID NO: 14827 - protein, 487 aa, Sinorhizobium meliloti 1021
MTFHAKFSGYADPALHAAGLYIGGKWQSGSGITVLDPSTGNLLAEVADASIEDAQRAVDAADAAAAGWRATPARQRSEILRRWYQLMTQHAEELATLIALENGKALADARGEVAYAAEFFRWYAEEATRIPGEFRHTPSGSHNILVDHEPIGIAVLITPWNFPAAMATRKIGPALAAGCTVILKPASETPLTAYAMARLGEEAGVPPGVVNVLTTSNPGGITNAMLADPRVRKLSFTGSTGVGRVLLAEAAKSVVSCSMELGGNAPFIVFDDADLEVALDGAMIAKMRNAGEACTAANRFYVQAGIHDAFVAGLTARMKSLKLGPGYDPETQCGPMITQNAVRKIDRLVSEALAAGARATTGGKPLTENGYFYPPTVLENVPVNASIAREEIFGPVAPVYKFESDDEAIRLANNTEYGLAAYIYSRDLKRAMKVGKRIETGMLGINRGLMSDPAAPFGGVKQSGLGREGGVTGILEFMEPKYFAVDY

SEQ ID NO: 14828 - protein, 295 aa, Triticum aestivum
  misc_feature (266)..(266): Xaa can be any naturally occurring amino acid
HYRTSLYKKAGWYRSGIPGISSTHASACVQLTQEFFRENTLRLLIMCVPKVNLETRKDSTQVVANLQRQQVNSRILASEYLEANKDLLDTLISGYEDTEVALHYGAMLRECIRHQSIARYVLESDHMKKFFDYIQIPNFDIASDASATFKELLTRHKATVAEFLSKNYDWFFAEFNSRLLSSSNYITKRQAIKLLGDMLLDRSNSAVMMRYVSSKDNLMILMNLLRDSSKNIQIESFHVFKLFAANKNKPAEVVKLLVTNRSRLLXRFFAGFKTDKEDEQFEADKEQVIKEISAL

SEQ ID NO: 14829 - protein, 420 aa, Oryza sativa
MDDAGRASAPAVVTLPATAAATDEPSHDPAALYGEGMWQQMTMSGSGAMQPGPYPERSGEPDCTYYLRTGLCRMKGEYPERMGQPECQYYLKTGTCKFGPTCKFHHPREKAGIAGRVQLNTLGYPLRPSEKECAYYLKTGQCKYGNTCKFHHPELFNAMASSRGSPIYPSVHSSATAGPPYTGTMASWAFPRGSFIPSPRWQNPSNYAPMIVPQGLVQVPSWNSYTGQMMPVSSSESRLQSPGAQQTYGTSQQVDASAGNQGMLSPYRSSSYPVPQYALQRENVFPERPDQPECQYYMKTGDCKFGAVCKFHHPRVRSMPTPDCVLSPVGLPLRPGEELCKFYSRYGICKFGANCKFDHPTMAPPMGVYAYGSASTNVPMIVGIGFSGSWQQGAKDPTDSSGAPPNTHVLGEDPIPYRKI

SEQ ID NO: 14830 - protein, 311 aa, Bacillus halodurans C-125
MRKIIIGSRRSQLALTQTEWVISKLKEAGAPFDFEIKKIITKGDQILDVTLSKVGGKGLFVKEIEQAMANKEIDIAVHSMKDVPSVLQEGFALGATTTRVDPRDALISNEGYTLAELPAGSIVGTSSLRRSAQILAKRPDLEVKWIRGNIETRLRKLKEEDFDAIILAAAGLERMGWSNEIVTEYLDPDLCVPAVGQGALGIECRADDDEVLEMLKTINDDTTAKTVLAERTFLHRMEGGCQVPIAGYATLTDEGEIELTALVGTPDGEQIFKEILRGKDPVQLGETMAQALMDQGAKEVLEQVKKGLESQ

SEQ ID NO: 14831 - protein, 160 aa, Oryza sativa
MEHQGQHGHVTSRVDEYGNPVGTGAGHGQMGTAGMGTHGTAGTGGGQFQPMREEHKTGGVLQRSGSSSSSSSEDDGMGGRRKKGIKEKIKEKLPGGNKGEQQHAMGGTGTGTGTGGAYGQQGHGTGMTTGTTGAHGTTTTDTGEKKGIMDKIKEKLPGQH

SEQ ID NO: 14832 - protein, 104 aa, Brassica napus
MLYGYQPLATRDPKIFERAEEFVPERFLGEEGERLLQHVVWSNGPQTENPTVGNKQCAGKDFVVLVARLFLIEIFRRYDSFDIEVGSSPLGSSVTFTSLRKASF

SEQ ID NO: 14833 - protein, 108 aa, Arabidopsis halleri subsp. halleri
TALSPITRNEAHYSIIRQGQYVHLDDLCKTHIFLYEQAAAKGRYICSSHDATILTISKFLRQKYPEYNVPSTFEGVDENLKSIEFSSKKLTDMGFNFKYSLEEMFIES

SEQ ID NO: 14834 - protein, 510 aa, Oryza sativa (japonica cultivar-group)
MAPPRANSGDGNDGAVGGQSKLSPSGLLIREIPGGYGVPFLSPLRDRLDYYYFQGADEFFRSRVARHGGATVLRVNMPPGPFLAGDPRVVALLDARSFRVLLDDSMVDKADTLDGTFMPSLALFGGHRPLAFLDAADPRHAKIKRVVMSLAAARMHHVAPAFRAAFAAMFDEVDAGLVAGGPVEFNKLNMRYMLDFTCAALFGGAPPSKAMGDAAVTKAVKWLIFQLHPLASKVVKPWPLEDLLLHTFRLPPFLVRREYGEITAYFAAAAAAILDDAEKNHPGIPRDELLHNLVFVAVFNAYGGFKIFLPHIVKWLARAGPELHAKLASEVRAAAPAGGGEITISAVEKEMPLVKSVVWEALRMNPPVEFQYGRARRDMVVESHDAAYEVRKGELLFGYQPLATRDEKVFDRAGEFVPDRFVSGAGSAARPLLEHVVWSNGPETGTPSEGNKQCPGKDMVVAVGRLMVAGLFRRYDTFAADVEELPLEPVVTFTSLTRAADGDGAARRGV

SEQ ID NO: 14835 - protein, 567 aa, Glycine max
  misc_feature (132)..(132): Xaa can be any naturally occurring amino acid
  misc_feature (251)..(251): Xaa can be any naturally occurring amino acid
  misc_feature (286)..(286): Xaa can be any naturally occurring amino acid
  misc_feature (319)..(319): Xaa can be any naturally occurring amino acid
  misc_feature (322)..(322): Xaa can be any naturally occurring amino acid
MGISSGYNPYSTQGKTSTDGTHPRSRPEYIPNHIPDPSYVRILDTTLRDGEQSPGAAMTSDQKLGIARQLVKLGVDIIDAGFPSASQEDFNAVKMIAQEVGNDCDADGYVPVIAALCRCNEKDITTAWEAVXYAKKPRLIPFIATSSIHMEYKLNKTKEEVLQIAIDMVKFTRSLGCDDIEFGVEDAARSDTEFLYKILEEVIKAGATTLCIADTVGITMPLEFGEMIAGIKANVPGVENAIISVHCHNDXGHATANTIQAACVGARQLEVTINGIGERAGNAAFXEVVMALKCRGDHALGGLYTGINTRHILKTSRMXEEXSGMYLQPHKALVGDNSFLHESGIHQAGLLKHRGTYEIISPEDIGHERSNGANMVLGKLSGRHALKNRLQELGYELRDDELESVFRNFKAMAGKKKRVTDVDLKALVSDQVCHVEPIWKLDDLQVTCGTMGSSTASVKLVTVHGSTHVACSVGVGPVDAAYKAIDLIVKETVKVLEYTLNPVTEGTDAIATTRIVIRRENNKTLTHALNGNFVYPTFSGTGEGVDVVVSSVEAYLTALNKMLDFKD

SEQ ID NO: 14836 - protein, 355 aa, Clostridium thermocellum ATCC 27405
QRLRNSILPARSKEKGIDAAIIAKSPNYFYLSGFTGSFAYLVITRDDAVLVTDFRYREQARLEAPLFEVMEYSDNIYSFLNGILKSKNIEILGFEEDYITYKKFKEFEEKFSVKELKPLEGMVEVMRMKKDKMELEIIKKAVEIADNAFSHILEFIKPGVREIEIAAELEYFMKKQGAKGTSFETIVASGVRSALPHAVASEKVIEHGDVVTMDFGAVFKGYCSDMTRTVFVGKPKEELVKIYNTVLTAQKAALEGAVKGLTGKKIDAVAREIIYREGFGFNFGHGLGHGVGIEIHEEPRLSPLGDVVMDDGMVVTVEPGIYVNGLGGVRIEDMIVINGDHPDVLTASKKDMIVL

SEQ ID NO: 14837 - protein, 492 aa, Debaryomyces hansenii CBS767
MSNRDSSEHGDSSNKIASNECNEATKLGFNFTQLWLQITTTYSLIDRNDSNMFNRDERVESEQEKKSVVILGKKYDDISVDDGVIEQDIYSKIWLTYRTGFEPIAKCLDGPQPLSFVQSMVFNRNPISSTFNNFHGLLDNDNFTTDVGWGCMIRTSQALLANTYQLLFLGRGFSYGRDRSPRHDEIIDMFMDEPRAPFSLHNFIKVASELPLKVKPGQWFGPNAASLSIKRLCDNVYESNGTGRVKVVISESSNLYDDIITQMFTTLNPVPDAILVLLPVRLGIDKVNPLYHASVLELLALRQSVGIAGGKPSSSFYFFGYKGNDLLYLDPHYPQFVRNKTSVYDTYHTNLYQKLSVDDMDPSMMIGILIKDINDYEDFKSSCTKSSNKILHFHPTSEKADRRGSLSEFKRKNSEFVCIESKDVQRREDFITIDNVSRDDLNNMEGFIDMADEFDSEIDQNNKDDNFDDDEPVNVSQTSIGEEYTSTAGSRP

SEQ ID NO: 14838 - protein, 115 aa, Arabidopsis halleri subsp. halleri
TALSPITRNEAHYSIIRQGQYVHLDDLCNAHIFLYEQATAKGRYICSSHDATILTLSEFLRQKYPEYNVPSTFEGVDENLKSIEFSSKKLTDMGFNFKYSLEEMFIESIETCRQK

SEQ ID NO: 14839 - protein, 586 aa, Lycopersicon esculentum
MDCFKKSFLFSLPFFLLYFSIILSFNNGVNASHRVFPGLQSTSAVDVKNVHRTRYHFQPPKNWINAPMYYNGVYHLFYQYNPYGSVWGNIVWAHSVSTDLINWIPLEPAIYPSKVFDKYGTWSGSATILPDNKPIILYTGIVDAKNTQVQNYAIPADLSDPFLRKWIKPDNNPLIDADVNINKTQFRDPTTCWLGQDGHWRTLIGSLWGNKGMAILYKSRDLMKWTKVQQPLHSVDGTGNWECPDFFPVLLRGTNGLDASYKGENIKYVLKVSLDVTRFEYYTVGIYDTKKDKYIPDKTSIDGWKGLRLDYGNYYASKSFYDPSKNRRIVWGWANESDTVNDDVKKGWAGIQTIPRKIWLDSSGKQLVQWPVEELESLRGHKIQLSNRKLNKGDKIAVKGITPAQADVEVIFSFSSLDKAEPFDPNWANLYAQDVCAIKGSTVQGGLGPFGLLTLASKNLEEYTPVFFRVFKAHDKYKVLMCSDASRSTLENAKTMYKPSFAGYVDVDLTNKTLSLRSLIDHSVVESFGAGGKTCITSRVYPTLAIYDNAHLFVFNNGTETIKIESLNAWSMGKPKMNWSFGHSSY

SEQ ID NO: 14840 - protein, 107 aa, Arabidopsis halleri subsp. halleri
NEAHYSIIRQGQYVHLDDLCKAHIFLYEQAAAKGRYICSSHDATILTISEFLRQKYPEYNVPSTFEGVDDNLKSIEFSSKKLTDMGFNFKYSLEEMFIESIETCRQK

SEQ ID NO: 14841 - protein, 582 aa, Lycopersicon esculentum
MEILRKSSSLWALPILVLCFFINNGVFVDASHKVYMHLQSTTSHVDASKVHRTGYHFQPPKNWINDPNGPMYYNGVYHLFYQYNPKGATWGNIVWAHSVSKDLINWIPLEPAIYPSKVFDKYGTWSGSATILPGNKPVILYTGIVDANKTQVQNYAIPANMSDPYLRKWIKPDNNPLIVADKNINKIQFRDPTTAWMGRDGYWRVLVGSVRNHRGKVIMYKSNKNFMKWTKAKHPLHSAQGTGNWECPDFFPVSLKNENGLDTSYDGKDVKHVLKVSFDVTRFDHYTVGTYDTKKDKYFPDNTSIDGWKGLRLDYGNYYASKTFFDSGKNRRILLGWANESDTVDNDVKKGWAGVHPIPRKIWLDPSGKQLVQWPVQELETLRKKKVQLNNKKLNKGEKVEIKGITVAQADVEVIFSFASLDKAEPFDSSWADLYAQDVCAIKGSTVQGGLGPFGLLTLASKNLEEYTPVFFRVFKAHDNYKVLMCSDASRSSLKNETTMYKPSFAGYVDVDLADKKLSLRSLIDNSIVESFGAGGKTCITSRVYPTLAIFDKAHLFAFNNGAETITIETLNAWSMANAKLH

SEQ ID NO: 14842 - protein, 490 aa, Pseudomonas fluorescens PfO-1
MARFELQKLYIDGAYSDAGSDATFEAINPANGEVLAHVQRATKEDVERAVVSAEKGQKIWAAMTAMERSRILRRAVDILRERNDELAALETLDTGKAFSETKYVDIVTGADVLEYYAGLVPAIEGEQIPLRDTSFVYTRREPLGVVAGIGAWNYPIQIALWKSAPALAAGNAMIFKPSEVTSLTTLKLAEIYTEAGVPNGVFNVLTGSGREVGTWLTEHPRIEKISFTGGTDTGKKVMASASASSLKDVTMELGGKSPLIICDDADLDRAADTAMMANFYSSGQVCTNGTRVFVPSHLKAAFEAKIVERVARIRVGNPEDENTNFGPLVSFPHMESVLGYIAKGKEEGARVLCGGERLTDGEFAKGAFVAPTVFTDCTDDMTIVREEIFGPVMAILSYETEEEVIRRANDTDFGLAAGIVTRDLNRAHRVIHQLEAGICWINAWGESDAKMPVGGYKQSGVGRENGISSLNNFTRIKSVQVELGDYVSVF

SEQ ID NO: 14843 - protein, 367 aa, Burkholderia mallei ATCC 23344
MSFDSVPRHALSMRFDLEPPSHASAAHRVAVLLVNLGTPDAPTPRAVRRYLAQFLSDPRVVEIPQLVWQVILCTLILPLRGRASAKKYAAVWLPEGSPLRVYTERQVESVKPLFAANGYRVIVDYAMRYGTPSIADVLAQLKRAGAERVLLLPMYPQYSSSTTATAFDAAFAALGRMRNQPEVRTVRHYADHPAYIHALAEQVRQYWAAHGRPAFDAGDKLVLSFHGVPKRTLDLGDPYHDQCQQTAALLMSALGLTTFECRVTFQSRFGKAEWLQPYTAPTLKELGAAGVRRADVFCPGFTADCLETIEEIGIEVRDEFVHGGGKEFHRIPCLNASPAWIAALGEIAAENLQGWPVRVAMAPEAVS

SEQ ID NO: 14844 - protein, 202 aa, Triticum aestivum
  misc_feature (158)..(158): Xaa can be any naturally occurring amino acid
GLHLGLLAPTRCISFHMFGAGVADLVEGVSKLSHLSKLARDNNTASRTAEADRLHTMLLAMADARAVLIKLADRVHNMRTLEALPLVKQQRFAKETMEIFVPLANRLGIASWKDQLAAPCALVHLNPEEHTELSSKFAETFDEALITSAVDTLDEGLXEAGISYHNLSGRNKNLYSVYSKMQKKNLTMDEVHDIHGLRLVVE

SEQ ID NO: 14845 - protein, 486 aa, Chromobacterium violaceum ATCC 12472
MLNLQDPSLLRQQCYLGGEWLDADGGQHIAVHNPATGEKIGQVPKMGAAEAERAVAAAARAFPAWKAKSAKERAAILRRWFDLIIAHQQDLAIILTSEQGKPLAEAKGEIAYGASYIEWYAEEAKRVYGDIVPGPAGDRRVLVTKEPIGVTAAITPWNFPSAMITRKAAPALAAGCTMVVRPASQTPLSALALAELAERAGIPAGVFSVITGGSSEIGAVLTGSDTVKKFSFTGSTEVGRKLIAQCAGTVKKVSMELGGNAPFIVFDDADLDAAVEGALISKYRNAGQTCVCANRIYVQDGVYDAFAEKFAAAVATLKVGNGLEAGVSQGPLIDHNAVAKVEEHIADALAKGGRLIAGGKRHALGHTFFEPTLIADVTRDMKVAREETFGPLAPLFRFKTEEEAIRLANDTEFGLASYFYARDVGRIFRVAEGLEYGMVAVNSGLLSNEAAPFGGVKQSGLGREGSKYGIEDYLEIKYVLLGGLDR

SEQ ID NO: 14846 - protein, 277 aa, Arabidopsis thaliana
MTREFELENNYQLCDEIGRGRFGTITRCFSPATKEFYACKTIDKRVLIDALDRECIETEPRIMAMLPPHPNIIRIFDLYETEDSLAIVMELVDPPMTIYDRLISAGGRLSESESASYAKQILSALAHCHRCDVVHRDVKPDNVLVDLVSGGVKLCDFGSAVWLGGETAEGVVGTPYYVAPEVVMGRKYDEKVDIWSAGVVIYTMLAGEPPFNGETAEDIFESILRGNLRFPPKKFGSVSSEAKDLLRKMICRDVSRRFSAEDALRKSSFFSRFFFFF

SEQ ID NO: 14847 - protein, 125 aa, Glycine max
MIAFLKARRGFVRVAMVKGKPLVPVFCFGQSNVYKWWKPGGKLVLNFARAVKFSPVYFWGIFGSPIPFKHPMHVVVGRPIELEKTPEPTPEEVAKIHSQFVEALQDLFERHKARAGYPNLELRIV

SEQ ID NO: 14848 - protein, 131 aa, Triticum aestivum
AESGNNSLFQLGASWQANKNFLLKGKLGPSKSSVALAFKSWWRPSFTFSVTAENDHSKGTTSCGFGIRVEDLRQPSYERADPNYVMMSTNKEHLAPAALREFGQRPMFQADVDSGNFDHLPTELRPMSKII

SEQ ID NO: 14849 - protein, 462 aa, Oceanicola granulosus HTCC2516
MATEILMPALSPTMEEGTLAKWLVKEGDTVSSGDILAEIETDKATMEFEAVDEGTIGKILVEEGTEGVKVNQPIAVLLEEGEDASAADDVSSGAAEPAAAPEGDTDTREAKAPAAAAQPADPPKADASPDYPEGTETKTMTVREALNSAIAEEMERDENVFIMGEEVAEYQGAYKITQGLLDRFGDKRVIDTPITEHGFAGIGVGAAFGGLRPIVEFMTFNFAMQAMDQIINSAAKTLYMSGGQMGCPMVFRGPNGAAARVGAQHSQDYAAWYASVPGLKVVMPYSAADYKGLFKSAVRDPNPVIFLENEILYGRSFEVPVLDDFTIPFGKAKIARSGSDVTIVSWGIGMSYALEAAEKLAGEGVEAEVIDLRTLRPLDYATVIESVKKTNRCVTVEEGWPVASLSNHLSAYIMENAFDWLDAPVLNCTGKDVPMPYAANLERHALITTDEVVEAVKKVTYR

SEQ ID NO: 14850 - protein, 197 aa, Synechococcus sp. WH 7805
MSIFVGNLPFRAEQEDVIELFAAFGEVTNCALPLERDTGRKRGFAFVEMADDAAEAAAIEALQGAELMGRPLRINKAEPRGSAPRRGGGGGGYGGGGGGGYGGGGGGGYGGGGGGGYRGGGGGYNDGGGGYGGGGERRSGARGWEDRSYGGGSGAAGGGGYSDGGGGDDGRSRRRRGGAAPSEGGGDDYSGYGGAEG

SEQ ID NO: 14851 - protein, 590 aa, Pyrobaculum aerophilum str. IM2
MVRVAVVDRDSCQPKKCGHECVKYCPVNKSGKVVWIDEQLKKAVISEALCIGCGICVHKCPFEAITIVNLPDELERDCVHRYGPSGFKLYRLPILRRGKVVGILGRNALGKTTMAKILAGELVPNLCETEGKTSAEDVIRQFRGTELQTYFSELYSNKLRAVHKIQYIELIPIYLKGTVGEIVKKAGIREELVKRFGLDKLLNREVDKLSGGELQKLAVAAALSKDVDVYIFDEPATHLDVVERVKVADAIREYTQNKYVLVVEHDLTVLDFLADNIVIVYGKPGAYGIVSHPAGAREAINEYLSGYISSENMRIRDRPIKFETRPPERKSGKAARLVEWEDIDVDLGGFQLEVSSSYIARGEVVGVIGPNGIGKTTFLKVLVGEIKPVKGAVSSTPRISYKPQYIRDIAVKNHDVPVSLWLAQQAGDYTENPIWPDLNAGFNLGPLLERRLGELSGGELQRVVVAAALLKKADLYVLDEPMAYLDVEQRITVARTIRRIIEESEVAALIVEHDIAMLDYMSNAIMPFIGEPGVRGYSPGPTDMRTGMNTFLKWADASFRRDVKSGRPRLNKPGSALDREQKERGELYYV

SEQ ID NO: 14852 - protein, 237 aa, Cryptococcus neoformans var. neoformans JEC21
MKVNFSNPATGAQKLIDFEDERKTRIFMEKRMGQEVAIDSLGEEFAGYVVRITGGNDKQGFPMKQGVLLQHRTRLLLSDGHSCYRARRDGERKRKSVRGCIVGSDIGVLAVAIVKQGANELPGLTDVVLPKRLGPKRATKIRKFFNLSKEDDVTKFVVRREVTKKNGKTTTKAPKIQRLVTPLRLQRKRHLRSLKKRRTEAQKETVAEYNAAVAKHAEEKKVHNAAVKAAKKARRSA

SEQ ID NO: 14853 - protein, 284 aa, Pseudomonas aeruginosa PAO1
MTAQLIDGKAIAANLRQQIAQRVTERRQQGLRVPGLAVILVGTDPASQVYVAHKRKDCEEVGFLSQAYDLPAETSQDDLLALIDRLNDDPAIDGILVQLPLPAHLDASLLLERIHPDKDVDGFHPYNIGRLAQRMPLLRPCTPKGIMTLLASTGADLYGMDAVVVGASNIVGRPMALELLLGGCTVTVTHRFTRDLADHVSRADLVVVAAGKPGLVKGEWIKEGAIVIDVGINRQADGRLVGDVEYEVAAQRASWITPVPGGVGPMTRACLLENTLHAAEHLHD

SEQ ID NO: 14854 - protein, 1462 aa, Candida albicans SC5314
MSTVVNRRSSHQFDSPSNHLDHSSSMNVDKVVQSVTNATKRLSQISTNTNNSNKKRKTQNKIGPWKLGRTLGRGSTGRVRLAKNTTTGQLAAVKIVPKSNFKKLENPKYKRSKEDATRLPYGIEREIIIMKLISHPNIMGLYDVWENKNDLYLILEYIEGGELFDYLIKRGKLQEYEAINYFKQIINGINYLHQFNICHRDLKPENLLLDFNKNIKIADFGMAALEVKEKLLETSCGSPHYASPEIVAGKNYHGAPSDIWSCGIILFALLTGHLPFDDENIRKLLLKVQSGKFNMPPELSFEAKDLITKMLKVNPRERITIDAILTHPLLAKYPEPTVSYSSTTTLDINSINIKQIESVDKIDKEILKNLSVLFHNCDEKTIISRLLSPNRCPEKMFYYLLMKYRNEHLSNSNSFNSSNDVDSARSLPRSTSYVKTTVTDHATGEKHTTVKKIQQSSSIYSNRSLLKKSTSAKGNVLSNITNRPNTPKQFSASSSFNKKKALHSKTQIYASRSRNASSRSLKSNSSTGRNGNNASVTSVNKIPEITGATVLQPIPSMAMNRGDEQQNKTKKNLTGTFGNKSLLNFQLICEEVFENDKENSKPVSKTPVSQLPPPPPPPIETPTSRTNSVKRGKTWSLARRERELAEQVRQRNEARENKLKAEELARKELEQEKKRIAEEKKRLEQQERELDEKQKLQEKQKAALEKLQKHQSAHDFEGLFASNRRSVTDMAPSSGMSSLDPRAHMVSRANTIGSPNLSSSSVNIDENASKVLHKFGIDVAPSPKRFSRASKTSTSKNLSSFLAPTVSRNLSSQLKTSSSKNLAGYLHGTTDTNGSAIAAKKKDDSTNEALTIEEFNAKERTSMSPSISKASVNKRNSNQSSYYRSMFSDNGNDDNVTKVRTGESHLSVQEEEEMDMENAIDEDISLIPNPRFSRFSFGGLLGSNTVANEEGDWTIMNSTLNHSNTVVRGTHNKSSTMLGLGIKMRDTTTIKEDEEFEDEKPFISVPSSEDDEGNTHKNKRGGLRDSGNYDFDEEHSVASTANTEYSDVASQGQQMPGSHTIHQLETELSNFDLLSYRVADIGKVNKHKPSIVDSKETLLKNHSSDEATIEVKEDNNEHDFNDKIKQHYDDNGDSEEDDEDEDEEEEDDDDDDDARSSFEARPHSHNYSLAEITSESPVGGGYESPSIANDFKKSRHSTGIFSTTQFPRSPYVVNNNGDSNKDENSQQQTKHMLNDGHKGLITSPVQDTFGSKKPVESNSLFRRLSLNPNRAAPKAPAPPPPSAPISSAAKANISQPLSSPTKGHNRFSRISIGSKNMLQKEDKSTKSNWFKKFFHSLTTPSAKDQSGNSSSKVASKDIKIIDTSLTAAQLIRVIKYQLELKKIEGSISKVDIDEEFGLISGVIPSKFANGRKLKFKIEVIDLINSSSLHVIKMKGNDKGFQSLVNIVTFIIKKEEQDKISRR

SEQ ID NO: 14855 - protein, 531 aa, Cryptococcus neoformans var. neoformans JEC21
MLSRQLTRNLFNKRAASTLAADINAAQDNGRWKGTSTLGGDAKLLIGGSWESSKTDKWSEVHDPSTQHLISKVPHATSAEMKRIVDVAENKFYEWSESSVLTRQRIMLDLQGLIRKYHKDIARNIVLEQGKTFADAMGDVTRGLQVVQMATNIPTELLGRNIEVSRDMDTLTRIEPLGVGAAICPFNFPAMIPLWSVAMAIATGNTLILKPSERDPGASAIIAELCEMAGLPSGVLNILHGGVDAVNFICDEPRIKAISFVGGDKAGKHIYDRAGALGKRVQAQLGAKNHAIILPDANKSALKAVAGAAFGAAGQRCMALSVLVTVGDADWLPGLVEEANALKMGNGFDEAADLGPVISPQARERIEQLIESCEKQGGNIVLDGRGATVKDYPNGNWVGPTILEATTDMDCYKNEIFGPALVVVKTRDLDEAIELVNRNPYGNGAAIFTQSAVSSRKFEKKIEAGQVGVNVPIPVPLPMFSWSGNKASVLGNASLYGPLGLNFWTKTKTITSLWREDAKEDKAAVAMPVHH

SEQ ID NO: 14856 - protein, 198 aa, Coxiella symbiont of Carios capensis
EAVNQALFYEMAKDDSVIVLGEDVGINGGVFRATVGLVEKFGPQRVLDTPLAESMIAGISVGMAAQGLKPVAEFQFEGFIYSALDHILSHAARLRNRTRGRLHCPIVYRAPFGGGIHAPEHHSESMEALFAHIPGVRVVIPSSPARAYGLLLASIRNPDPVLFFEPKRIYRLVKQEVPNNGKALPLDQCFLLREVGRH

SEQ ID NO: 14857 - protein, 581 aa, Acidobacteria bacterium Ellin345
MPSLISVNVGLPRDVEWQGNIVHTAIWKKPVSGKVLARRLNLAGDGQGDLAGHGGEHRAVMVYQLDSYRYWQEQLHRDAFEYGQFGENFTVDGLPDTEVCIGDRYRIGSALFEVTQPRVTCYRVGIRMNEPQMAALLVSHKRPGFYLRVIEEGEVSAGDAIVKVADGPEHVTVADIDALLYLPGHSREVLKRALQVPALSNGWKSSLEAMLNSDQPNGSAGLITVAPPPAWRGFRPLRVAEVHRETADVLSFVLASPDGEPLPVPLAGQFLIFKLEPGAHSAPILRNYSISSANGEGTYRVSVKRDSGDGSRYFHDHIHAGDVIQVGAPRGTFTLAHDEKPIVLLSAGIGATPVLSMLYSLVATDTAREIWWCYGARNSQEHPFASEVHALLSKLPNSHSIVAYSKPLETDRPGTDYNDHGHLDRSLLEAHHVPKLADFYLCGPSAFMAQITATLQAWGVPSDCIHSEIFGTVGAITPGIAATTLPPPHPPSGAIGTGHIVAFTRSGLTVPWNEKYKSLLEFAEACAVPVRWSCRTGVCHMCESGLIAGTVKYAPDPLDPPADGNILLCCSTPLSEIELDL

SEQ ID NO: 14858 - protein, 961 aa, Arabidopsis thaliana
MDPIKLTTEAKVPAKRSKATSHYLPLHKRQFYHSRTGQPLSLEQVMSDRDSENDVDKNDDAAHLEESQMLNGSMDENEIVAERFIKLWNSFVKQQRIVADAHIPWACEAFSRLHLQELRSNLSLDLDKGNTETTETAPVATEATTHGEQDGIDVGEQEAVVVEVVVAEAEVVVVVKAEAQAVVETSSTKERETNGEIFNSVIIVREDGYSDSTSPISEPPDITNWFPSYVYESLPLSSSINEIEIEVDVVNKANLGGVIDESLPSEPPDLGKWFSSYVYESPLLVTSDGLELSVPGESECVKETQTENESPKIEGNDVCPRLLEQELVSSTKVTDFSESQSVLSEPPDLRNWFSSYEYQSPQLSDIQELGFSSSEKDDLIIEESDTEEGISSGIFRNIKSRQETVGLGRLDSADYKENIATDTAKEVSLDNAVSDQKMEKRSSVRLLNASKKDVKQESSFKQEPLLCELQEEARFSPRVSRYNPKLKSPSKNDTSLHELRPIHIQESISMNSNRQKSPPIEQESYDKENVHGQSNQTGFVTMKKASFREARDQCSLKKPNTEVLVKCSSSKELKTKAGEDNTEEREKKRRVLGEMSNQLSSVAKEIAGKWRCPQKNKRKIVPPLKQLRLDAWIHKSEETPCSLNGTGIENEPRFGTGYVPMSFVKYLRRDNLLQLAGKPSLSRNYILQTCRTLIIETSPPEFVKLNRLSGSDSGIIEVNLDRPVTKNAINKEMLKSLQNAFESIHQDNSARVVMIRSLVPGVFCAGADLKERRTMSPSEVHTYVNSLRYMFSFIEALSIPTIAAIEGAALGGGLEMALACDLRICGENAVFGLPETGLAIIPGAGGTQRLSRLVGRSVSKELIFTGRKIDAIEAANKGLVNICVTAGEAHEKAIEMAQQINEKGPLAIKMAKKAIDEGIETNMASGLEVEEMCYQKLLNTQDRLEGLAAFAEKRKPLYTGN

SEQ ID NO: 14859 - protein, 582 aa, Pediococcus pentosaceus ATCC 25745
MAEKIQAGIAMLKVIESWGVDHIYGYPGGSINSTMDSLQKEQDNIKYIQVRHEQVGALAAAADAKLTGKIGVAFGSAGPGAVNLLNGLYDAKEDHVPVLAIVGQVPHTRMNYDYFQEFNESPMFDDVAVYNRIVMTPESLPYVIDKAIRMAYKEKGVAVVIIPNDFGYVEIPTGNYSTEKTRNQPEIKPQPDSELVQDAWDMIKNAKYPVIHLGQGARGATKEVEALSEKLQIPIVITGLAKGVIPDEYEGNMGPFNRAASKVSNELIKKTDLLISIGANFPFAAIVYGDRPFKYIQVDNDQAIFGRHHSLDLGIWADAKLFVEKLDEISEAVQPRPFYKAAVAAQKDWRKYLKGLMNRADGPLEYEQVYQQINRIADDDAVFSMDVGDNIINSFRFLDMNPKQKILTSALFATMGCGIPGAMASKLSYPDRQVFNIAGDGAFSMVMQDMITEKRYNLPIINIVTSNRHLSFIKSEQDDVPQDEFGVDLTDADYAKIAEGMGVKGIRVDEISQLEKAFDDAVAEVKAGRPVLIDANITDKRGIPVELDLEQDDTLYTPEFLKEWDAEELKPFDEYLAQYSAE

SEQ ID NO: 14860 - protein, 1197 aa, Arabidopsis thaliana
MAPALAVTRDLTAVGSPENAPAKGRASVYSEVQSSRINNTLPLPSVLKGAFKIVEGPASSAAGNPDEIAKLFPGLYGQPSVAVVPDQDAPSSAPKLKIGVVLSGGQAPGGHNVISGLFDYLQERAKGSTFYGFKGGPAGIMKCKYVELNAEYIQPYRNQGGFDMICSGRDKIETPDQFKQAEETAKKLDLDGLVVIGGDDSNTNACLLAENFRSKNLKTRVIGCPKTIDGDLKCKEVPTSFGFDTACKIYSEMIGNVMIDARSTGKYYHFVRLMGRAASHITLECALQTHPNITIIGEEVSAQKQTLKNVTDYMVDVICKRAELGYNYGVILIPEGLIDFIPEVQELIAELNEILANEVVDENGLWKKKLTEQSLKLFDLLPEAIQEQLMLERDPHGNVQVAKIETEKMLIQMVETELEKRKQAGAYKGQFMGQSHFFGYEGRCGLPTNFDATYCYALGYGAGVLLNSGKTGLISSVGNLAAPVEEWTVGGTALTALMDVERRHGKFKPVIKKAMVELEGAPFKKFASLREEWALKNRYISPDSNPFAGMLSTCRDREERETKKRRLLLIMGQERPNDEERPESRDLGVYGCSPPHSPRLGPTRFYVFAGDPNPKQTIKRCKRKRIQACNDQRTAKTAIGVMAILGFFCLVNWFMLSRLHEGRVWLRRGLSENPKHVSAQNEERKKFEKQKMEYNGTYGRMLSLATDALAEGMRDNRYCNGFDFEQNKLETKDLWQEPKEQASAWKPCADQRSLTPDDGKNGYIMVTANGGINQQRVAVCNIVVVARLLNAALVIPKFMLSDVWTDASQFGDIYQEEHFMEYLSPDIRIVKELPKELQSLNLEEIGSVVTDIEVMKEAKPDFYMTHILPILLKNRVIHFVGFGNRLAFDPLPFELQRLRCRCNFHALNFVPRIQETAALLVKRLRGSGSYVAPLDLHLLGPKYASLILDNKSDSPVQEEAASSSSSKYLALHLRFEIDMVAHSLCYFGGGETEQKELDSYRQKHFPSLSTLTRKKKFRSADVLRTEGLCPLTPEEAVLMLAALGFNRETRVFVAGANIYGGSKRLAVLTSLYPNLVTKEKLLTESELQPFKNFSSQLAALDFIACAAADAFAMTDSGSQLSSLVSGYRIYYGGGKLPTIRPNKRRLSDILLKNSTIEWNVFEKRVRKAIRQTKHVFARPNGRSVYRYPRCKECMCHA

SEQ ID NO: 14861 - protein, 173 aa, Candida glabrata CBS 138
MSETQEVSTGLPAPWTVRYSKSKKREYFFDPETKKSQWEEPEGTDHEQFISYLKDHPLRVRCLHILIKHKDSRRPASHRQEKITITKEEAIKELKEIQARLEEDQEQKKKHSFEAIAKERSDCSSFKRGGDLGYFGRGEMQPSFEKAAFALKIDEVSDIVESDSGVHLIKRVG

SEQ ID NO: 14862 - protein, 475 aa, Xanthomonas axonopodis pv. citri str. 306
MSSVSIDGAPDAGENTRFIILISCVATIGGFLFGFDSGVINGTVDGLKQTFQSTAAETGFEVASMLLGCAIGAFFAGRLADRWGRRAVLIISAALFLLSAIGAGASHSSAFFIFARVMGGFAVGAASVISPAYIAEVASARYRGRLATMQQIAIISGLFCAFLSNYLLANAAGASTEPLWAGQAAWRWMFWMQAVPSILFLLLLLVIPESPRYLVVKGRREQALVVLKRLYGNAAAQTKLGEISASMAADQHKPKFSDLINKATGKIRPIVWIGIGLAVFQQLVGINVVFYYGAVLWQAVGFSEQDALLINVLSGGLSIGACLVTVMLVDKIGRKPLLWIGSAGMAVSLALVTYAFATASLDPNGKLAMSDAMGMLALVAANVYVVFFNASWGPVMWVMLGEMFPNQIRGSGLAIAGAAQWTSNFAITVSFPILLGSIGLAGAYGIYTVAAFISVFFVLKYVYETKGKELEQMEG

SEQ ID NO: 14863 - protein, 337 aa, Trichodesmium erythraeum IMS101
MAKTDFKDYYSILGLTKSASAEEIKKAYRKLARKYHPDMKPGDRKAEARFKEVNEAYEVLSDSEKRQKYDQFGQYWKQVGSSGSGWPGGNSGRNVDFSEFDFSQYASFEDFINALLGRGGNPGSSNSGRRKNNSYKTNTSWPDGFNNGYYNPSSFNNPNWATSLNLEAEITLTFAEAFRGTQKRIGSGEVSIPPGVKSGSKIRVKGKGKLDQYTQQKGDLYLKVEIQSHSFYQFEGDNLLCEVPITPDEAVLGTSIKVPTPDGMVNVNIPAGIRSGQSLRLRGKGWPKPKSEERTDQLVRIIITAPKNISSLERECYEKITANRTFDPRSHLKNVSL

SEQ ID NO: 14864 - protein, 159 aa, Listeria monocytogenes str. 4b F2365
MNVHDFSEKAMNGKEIALSDYKGKVLLIVNTASKCGLTPQLEGLEAMYKKLGGANFEILGFPCNQFLRQDPGSDEEILEFCQMNYGVTFQMFSKIKVKGKDASPLYKYLTEQTGGKKVEWNFAKFLIDENGEVVERFPSKMKPADFEDKVEALVAKVNN

SEQ ID NO: 14865 - protein, 712 aa, Oceanicola granulosus HTCC2516
MTTSAELIALVRSYNPRSDAALLRRAYAFGEEMHEGQKRQSGEPYFTHPVAVAVILAEQQMDDASIVTALLHDTIEDTRANFAKVEELFGREIAELVDGVTKLTNLQLSSTETKQAENFRKLFMATSRDLRVTLVKLADRLHNMRTIRSMRPEKQAQKARETMDIYAPLAGRMGMQWMRDELEDLAFRVLNPDGRNSIIRRFITLQRETGDVIEKITADMRLELEKAGIVAEVRGRAKKPYSIWRKMQAKDQGFSRLSDIYGFRVITATEADCYRVLGTIHQRWRAVPGRFKDYISQPKSNGYRSIHTTVSGRDGKRVEVQIRTREMHEVAETGVAAHWSYRDGERVENRFAVDPQRWITALTERLDEGHDHDEFLDMVKLEMYTDQVFCFTPKGEVIKLPRGATPIDFAYAIHTRIGHACVGAKVDGMRVPLWTRLKNGQSVEIITAEGQTPQATWIDIAVTGRAKTAIRRSLREEDRERFIKLGRELARVAFENVGKRATDKALATAAKALALEGPDDLLELLGSAEITSREVVRTIYPDLAEKPAETVDARRAIVGLESGQKHLRAPCCQPVPGERIVGITFRGHGVFLHAIDCAVLAQYENQNERWIDLQWQEGVHPAVNTVTLDISISNDAGVLGRICTLIGEQSANISDLSFIDRKPDYFRLLIDVDVRDAEHLHRVMTALEADSNVASIERSRDPDRAATVPFKG

SEQ ID NO: 14866 - protein, 363 aa, Bacillus halodurans C-125
MEKQIAVLPGDGIGPEVTDAAIEVLQAVADRFGHTFSYKKALLGGCAIDEVGTPLPEETLDVCRHADGILLGAVGGPKWDTLPGHLRPEKGLLGLRKGLNLFANLRPVTVYDSLADASTLKNDVIDGVDLLIVRELTGGLYFGEPRERRGEGETEEVVDTLLYTRGEMRRIIRKAFELAMVRNKHVTSVDKANVLESSRMWREVANEVAQEFPEVTLEHMLVDNAAMQLIRRPKQFDVLVTENLFGDILSDEASMVTGSLGMLPSASLTSDGPGLYEPIHGSAPDIAGKGVANPLATIASCAMMLKYSFGLHEEAKTIEDAIEAVLKQGYRTADIAKPGEESSSTKAITDAVVEAIQASVDIS

SEQ ID NO: 14867 - protein, 1016 aa, Crocosphaera watsonii WH 8501
MLLESLQSTVEEVNIFSTSDLFLRQRLELVESLWESVLKAECGLELVDLLKKLRKISSPEGQVTDQPKTSINELIEELELNEAIRATRAFALYFQLINIVEQHYEQRDQQLNRRSTYQESEKARENYQKGEKSTNGLVGADLLEKALVGETKSQEKGGTFHWLFPQLKRLNVPPQQIQRLLEQLDIRLVFTAHPTEIVRHTIRLKQRRIATLLRRLDQAEEAFRGMGLSSSWEAESIIEQLNEEIRLWWRTDELHQFKPSVLDEVDYTLHYFDEVLCSALPQLSQRLQQALQANFPRIKPPHNTFCRFGSWVGGDRDGNPFVTTDVTWRTACYQRNLILEKYLAAVEDLTEILSSSLHWSNVSQDLLDSLERDRVAMPEIYDQLAIRYRQEPYRLKLAYIQKRLEHTRDRNNHLANPEQGQVLVEETPENIYHSGVEFEAELQLIKRNLEETGLKCQALENLIFQAQMFGFTLTQLDFRQESSRHSETIQTIASYLNILPTPYEELSEAEKVNWLVGELQTRRPLIPMEMPFDEKTIETVETMRMLRHLQQEFGIEICQTYIISMTNDVSDVLEVLLLAKEAGLYDPGTSTTTIRIVPLFETVDDLKRAPEIMEALFKLPLYRTALAGGYDYLDEDKKEQLPPPQLQPANLQEIMVGYSDSNKDSGFLSSNWEIHKAQKSLQKIAEPHNLALRLFHGRGGSVGRGGGPAYAAILAQPTGTINGRIKITEQGEVLASKYSLPELALYNLETATTAVIQGSLLGSGFDDIDPWNGIMEELASSARKAYRSLIYEQPDFLDFFLSVTPIPEISQLQISSRPARRKSGKKDLSTLRAIPWVFSWTQSRFLLPAWYGVGTALEGFLQQEPEENLKLFKYFYLKWPFFKMVISKVEMTLSKVDLQIAHHYVKELSNPEDIERFEKVFERISEEYHRTCEIILSITGQPKLLEGDAGLQRSVQLRNGTIVPLGFLQVSLLKRLRQYTRQAESGVIHFRYSKEELLRGALLTINGIAAGMRNTG

SEQ ID NO: 14868 - protein, 360 aa, Trichodesmium erythraeum IMS101
MINCRITLLPGDGIGPEIMAVAVDVLKVVGKQFNLEFEFQEAPIGGVAIDATGEPLPKETLEMCRNSNAVLLAAIGGYKWDNLPRHQRPETGLLGLRAGLGLFANLRPAKIFPQLIDASTLKREIVEGVDIMVVRELTGGVYFGTPKGVFETETKEKRGVNTMAYSESEIDRIAKVGFETAQKRGGKLCSVDKANVLEVSQFWRDRINLVAQEYQDVELSHLYVDNAAMQLVRFPKQFDTIVTGNLFGDILSDAAAMLTGSIGMLPSASLGASGPGVFEPVHGSAPDIAGQDKANPLAQVLSVAMMLRYALEQPVVADKIEQAVLQVLEQGYRTGDIMSEGMKLVGCKEMGEVLLKILSL

SEQ ID NO: 14869 - protein, 115 aa, Arabidopsis halleri subsp. halleri
TALSPITRNEAHYSIIRQGQYVHLDDLCNAHIFLYEQATAKGRYICSSHDATILTTSKFLRQKYPEYNVPSTFEGVDENLKSIEFSSKKLTDMGFNFKYSLEEMFIESIETCRQK

SEQ ID NO: 14870 - protein, 313 aa, Ehrlichia ruminantium str. Welgevonden
MSRIAVVLFNLGGPQSLSEVKSFLFNLFYDKNIINLPNPLRFIIATLISHFRNKTATKIYQYLDGKSPILEATKTQATLLENVLNKHNNNQYKVFIFMRYSNPSVKETIKHVNEYNPNRIILLPLYPHYSLTTTFSAIQHWNKYTKTENLAIPTTTICSYYHNEHYIKAQCKLITEKYYEACIYGLPRILFSAHSLPLSIIQRGDPYLYQIEHSVYLIVKFLNIPSLDYKICYQSKVGPVKWLEPSTLSEINKAIQNNTPIVLVPISFVSENSETLVELDIEYKSTVPENMFFRVPTLSENEGYIKCLEEMCI

SEQ ID NO: 14871 - protein, 392 aa, Shewanella violacea
MFEIMDSHTDEAVIKVIGVGGGGGNAVEHMVKHNIEGVEFVATNTDAQALRKSAAGTTIQLGRDVTKGLGAGANPEIGRLAAEEDRESIRNALKGSDMIFIAAGMGGGTGTGAAPVVAEIAKEEGILTVAVVTKPFPFEGRKRMAYAEQGIEELAKHVDSLITIPNEKLLKVLGRGTSLLDAFAAANNVLLGAVQGIAELITRPGLINVDFADVKTVMSEMGNAMMGTGVASGEDRAEEAAEAAVASPLLEDIDLAGARGVLVNITAGMDMSIEEFETVGNHVKAYASDNATVVVGAVIDPEMSDELRVTVVATGIGAEKKPDIQLVTKPVPRPEPVIAPEVRTEPQSEELVQSMASGNVVPAAQTAAAPATALRNETDYLDIPAFLRKQAD

SEQ ID NO: 14872 - protein, 321 aa, Crocosphaera watsonii WH 8501
MVENRQSTVVITGASSGVGLYAAKALADRGWYVVMACRNQPKAHQAAQSLGIALDAYTVMHIDLGNLDSVRQFAQDFRATGKTLDALVCNAAIYMPLLKEPLRSPEGYELSMTTNHLGHFLLCNLMLEDLSHSSAPEKRMVILGTVTHNPDELGGKIPPRPDLGNLEGFADGFKEPISMVDGKNFEPVKAYKDSKVCNVLTMRELDRRYHESTGIVFTSLYPGCVADTPLFRNHYPLFQKIFPWFQKNVTGGYVSQELAGERVADVVTKPEYGESGSYWSWGNRQKKDRQAAFVQNVSPQAQDEAKAEKMWNLSEKLVGLA

SEQ ID NO: 14873 - protein, 559 aa, Pseudomonas fluorescens PfO-1
MSMLKDPSSKYRAFPVINLPDRTWPSKTIDAAPIWCSSDLRDGNQSLIEPMDAVKKLRFWKTLVQVGVKEIEASFPAASQTDFDFVRTLIEDGHIPDDTTIQVLTQGREDLIERTFESLRGAKKAIVHLYNATSPSFRRIVFNQDKDGIKAIAVNAAKLFVKYAAMQPDTEWTFEYSPETFSATELEFAKEVCDAVIEVWNPTPEHKIILNLPATVECATPNVYADQIEWFHRNINRRDSVIISLHTHNDRGTGVAATELGLMAGADRVEGCLFGNGERTGNVDLVTVALNMYTQGINPDLDFSDIDGVRKVVEECNQIQVHPRHPYVGDLVHTAFSGSHQDAIRKGFAQQKPDTLWEVPYLPIDPADIGRSYEAVIRVNSQSGKGGIAYLLEQEYGISLPRRMQIEFSQVVQRETDRLGLEMTAQQIHALLHSEYLQANTPYALVSHRLQEENGNSAVEVEVASKGQGETNLHWRGKGNGALEALVAGLPIPVEIMDYNEHAIGAGTNAKAAAYIELRVNGERAVHGVGIDENITTASFKALFSALNRSLSQPEAKAA

SEQ ID NO: 14874 - protein, 316 aa, Oryza sativa (japonica cultivar-group)
MSHAAIVLVSVLLLCSAHPSAGARRLMELYKPPPSEQLTYHNGTVLRGDIPVSVVWYGRFTPAQKAVVSDFLLLLTVASPAPTPSVSQWWNTINQLYLSKAAAQGKNGGGGGKITTQVRLAGQLTDDQCSLGKSLKLSQLPALAARAKPKKGGIALVLTAQDVSVEGFCMSRCGTHASNAKARTAYVWVGNSATQCPGQCAWPFHQPVYGPQTPALVPPSGDVGMDGMVMNIASMVAGVVTNPFGDGFYQGPKEAPLEAATACPGVYGSGAYPGYAGNLAVDPATGASYNANGAHGRKYLLPALFDPATSTCSTLV

SEQ ID NO: 14875 - protein, 379 aa, Xanthomonas campestris pv. vesicatoria str. 85-10
MNFAPVPELIEELRAGRMVVIVDDEDRENEGDLIMAAELVKPSDINFMVTHARGLVCLSLTRERCAQLGLAPMVRNNTAQFQTNFTVSIEAAEGVTTGISAYDRAHTVRTAVRPDARPQDLSQPGHIFPLISQPGGVLTRAGHTEAASDLPMLAGLEPAGVLVEVLNPDGSMARRPQLEVFAREHGLKMGSIADLIAYRLANEHTVERVDERQITTEFGPFKLVTYRDRIAHDLHFALVRGRADPQTPTLVRVQVENPLADLLHWQRDDFGVAATDALRAIAAEGQGVMVVLSAPRDSESLLARLRQQPEAAANAKDVSQWRRNGAGAQILADLGLGKLRVLGTPRRQVGLAGFGLEVVEYLECHPGEGVRSVPPSAVP

SEQ ID NO: 14876 - protein, 115 aa, Arabidopsis lyrata subsp. petraea
TALSPITRNEAHYSIIRQGQYVHLDDLCNSHIFLYEQAAAKGRYICSSHDATILTISKFLRQKYPEYNVPSTFEGVDENLKSIEFSSKKLTDMGFNFKYSLEEMFIESIETCRQK

SEQ ID NO: 14877 - protein, 406 aa, uncultured bacterium 578
MNRVVITGMGIVSSLGGNKAEVLESLKSAKSGIEFSEKYAEMGLRSHVHGSISEVDTSDIIDRKMLRFMADAAIFNAIALDEAIKQSGLSEDMVSSERTGLIMGSGGASNVNVVEAADILREKGIKRVGPYRVPRTMGSTTSACLSTLFKIKGINYSISSACSTSAHCIGNAMEQIQHGKQDVVFAGGGEELDWSTTMLFDSMGALSSKYNKTPELASRAFDANRDGFVISGGGGALILESLEHAEARGATIIAELVGYGATSDGHDMVAPSGEGARRCMEIATSTVNGTIDYINAHGTSTPVGDIKELEAIKQVFDTTSIPLIGSTKSLSGHALGAAGVNESIYSLLMLENDFVAESVNIEILDDEAEGMPIVRETKNIKLDRILSNSFGFGGTNACLVFERFNT

SEQ ID NO: 14878 - protein, 354 aa, Aquifex aeolicus VF5
MKVKEVQELIKEKNLDAFMFSSQPNVFYLSRFRSTNAYAVITPQEKYLLTDARYYERAKNQLKDWEVVLIKGNLFKSVKNFLREKGLKYVGYEEDRVSCTFKKHLKSKHIRWVGFSNFLKNVRVLKTKEEISIMKEGVRKSDKIYRELLNFVKPGMTELQVRGFIVSKIFEKNGEGESFPAIVASGEHSAVPHWESSREKIKENAPLLIDMGLLWEGYCTDFTRTFHIGKPSEEFRKVYEIVKEAHLRALEKAKVGNTVGDVDRAAREYIEKKGYGQFFTHSTGHGVGVEIHEFPRVYYKGDDAKTPIEEGMVFTIEPGIYLPGKFGVRLENIVAVQGGVGKPLSEIDLELVVI

SEQ ID NO: 14879 - protein, 649 aa, Nostoc punctiforme PCC 73102
MCGITGFWDISKQFSGEHLDETIQKMSKTLLHRGPDDGGIWTDVEVGVALGHRRLSIVDLSPLGHQPMMSANGRYMVVFNGEIYNFLELRRELTQLGHNFRGHSDTEIMLAGFSEWGLDKAIRRFNGMFAFALWDRQKRILHLGRDRLGEKPLYYGWQGSTFLFTSELKALKAHPNFRAEINRDALTQFFRYSYLPAPYSIYQGIYKLPPGTLLSWNGIDAHPDPVTYWSAREVTELGIAEPFMGSESEAVIQLEALLREAVGLRMVADVPLGAFISGGIDSSTIVALMQAQSSQPVKTFTIGFNEEAYNEAKHAKAVAKHLGTDHTELYVNPKEALEVIPKLPFLYDEPFSDVSQIPTFLVSQLAKQQVTVSLSGDGGDELFAGYNRYLFGRKIWQAIGWIPTTVRKNSARALTSVSPQNWNRGFANVNALLPSRIKQPEFGNKLHTFSEIMALPNPTAIYTKLVSHWEDPKALVIDGLEPPTILSNSQNWPHLLDFTQCMMYFDTVTYLPDDILVKVDRASMGVSLEGRIPFLDHRLVEFAWRLPLSMKIRNGQGKWLLRQVLYKYVPPTLVERPKVGFGVPINSWLRGPLRDWAEELLNENRLKNEGFFNPKPIREKWEEHLSGAASWEYRLWDVLMFQAWLEANH

SEQ ID NO: 14880 - protein, 416 aa, Cleome spinosa
MASAKLSGPPGVSPEDDGEDQADIVPVSETDGETVAFPVFYQTDSRACNPYYPFSDSNSDSGSVSCPDAGPDPDGSFIDFFDESYEVGAVEEFYSDPDPGLRIVGDFNLWGFPDEEEDDVAELGLGLGLGPGTGSDQQRGDSGGQGLRVTGIDSDSDFEDGVFDLNASDDGNGANASGRVVDGTGTPPVWDSFFGEEAVVTNEELEWEEVQNAITWTHEPVEVRVLNRPEEEEELSSSSRISSRDDHEHDLDWQVLLAVNNVVNYIEQAEGISITADDIDANYYMYLASIDEYGENHGDFDAIFGQMLDTDTGISGSPPAAKRVVEDLPLVELTVDDLGKGDIVCAVCKDEMAIEEKVRRLPCRHFYHEDCILPWLGIRNTCPVCRHELPTDDPEYESARRLQRSGSGLARELSGR

SEQ ID NO: 14881 - protein, 341 aa, Candida albicans SC5314
MSSSTTVFVSGASGFIAQTLVKQLIEKGYKVVGTVRSNEKGDSLKENLKAAKLQSENFTYEIVKDIAVKGAFDDALKKHPEVTVFLHTASPFHFNVTDIEKELLTPAVEGTNNALQAIKTHGPQIKRVVVTSSYAAVGRFADLADPSIPATEESWNPITWEQSLSNPLAGYVGSKKFAEKAAWDFVEKEKPNFTLSVINPVYVFGPQAFEIKNKSQLNTSSEIINGLLNSKPDSKFDNLTGYFIDVRDVAKAHIVAFEKDSIQGQRLILAESPFSTQSILDLIRKDFPQLDSQLPKGDPSQADAWKKAESKIENEKTRELLGFKFIDFKKSIDDSVAQIIG

SEQ ID NO: 14882 - protein, 431 aa, Fusobacterium nucleatum subsp. vincentii ATCC 49256
MSEEKFDAIIVGGGLAGCSAAIVLANAGLAVLVVERGDFCGAKNMTGGRLYGHSLEKIIPNFAEEAPIERKITREKISLMSEDSSFDIGFGSKKLSSNNENASYTVLRSTFDRWLASKAEEAGAEIIPGILVDELILEDGKVVGVSATGEELYADVVILADGVNSLLAQSLGMKKELEPHQVAVGAKEVIKLGEDVINQRFAVNNGEGVAWLSCGDPTLGGFGGGLLYTNKDSVSVGVVATLSDIGHSDLSINQLLDRFKEHPAIAPYLEGGTSIEYSGHLVPEEGLHMVPELYRDGVLVTGDAAGFCINLGFTVRGMDFAIESGRLAAETVIKAHEIGDFSAATLSDYKKALDSSFIMEDLNQYKGFPTLLGRREIFEGLPAMVDDIATKAFTVDGKQGQSLMMYVIHSVAEHTTAAKLVDFVTTVLEAF

SEQ ID NO: 14883 - protein, 583 aa, Mesembryanthemum crystallinum
MATFKVSRVETKPYDGQKPGTSGLRKKVKVFAQPHYLENFVQSTFDALTADKIKGKTLVVSGDGRYYSEQAIQTIIKMSAANGVKSVWVGQDGLLSTPAVSAVIRERVGKDGSKASGAFILTASHNPGGPNEDFGIKYNMENGGPAQEGVTNKIYENTTTIKEYLIAKELPNVNISKTGVTSFSGPDGQFDVEVFDATETYVKLMKSIFDFQAIKKLLSIPSFTFCYDALHGVAGVYAKRIFVDELGANESSLLNCTPKEDFGGGHPDPNLTYAKELVERMGLGKSNTQGEPPEFGAAADGDADRNMILGKRFFVTPSDSVAIIAANAVEAIPYFSGGLKGVARSMPTSAALDVVAKHLNLKFFEVPTGWKFFGNLMDAGVCSICGEESFGTGSDHVREKDGIWAVLAWLSILAHKNKDNLNGEKLVTVEDIVCQHWATYGRHYYTRYDYENVDAGGAKELMAYLVNLQSDLSKVNNIVKGVHSGVANVIAADEFEYKDPVDGSVSKHQGIRYMFEDGSRLIFRLSGTGSEGATIRLYIEQYEKDSSKTGRDSQEALKPLVDVALKLSKMQEFSGRSEPTVIT

SEQ ID NO: 14884 - protein, 583 aa, Zea mays
MGLFTVTKKATTPFDGQKPGTSGLRKKVTVFQQPHYLQNFVQSTFNALPVDQVRGATIVVSGDGRYFSKDAVQIITKMAAANGVRRVWVGQNSLMSTPAVSAVIRERVGADGSKATGAFILTASHNPGGPKEDFGIKYNMGNGGPAPESVTDKIFSNTTTISEYLISEDLPDVDISVVGVTSFSGPEGPFDVDVFDSSVDYIKLMKTIFDFEAIKKLLTSPKFTFCYDALHGVAGAYAKHIFVEELGADESSLLNCVPKEDFGGGHPDPNLTYAKELVERMGLGKSSSNVEPPEFGAAADGDADRNMILGKRFFVTPSDSVAIIAANAVQSIPYFASGLKGVARSMPTSAALDVVAKNLNLKFFEVPTGWKFFGNLMDAGMCSICGEESFGTGSDHIREKDGIWAVLAWLSIIAFKNKDNLGGDKLVTVEDIVRQHWATYGRHYYTRYDYENVDAGAAKELMANLVSMQSSLSDVNKLVKEIRSDVSEVVAADEFEYKDPVDGSVSKHQGIRYLFGDGSRLVFRLSGTGSVGATIRVYIEQYERDSSKTGRDSQDALAPLVDVALKLSKMQEYTGRSAPTVIT

SEQ ID NO: 14885 - protein, 112 aa, Lycopersicon esculentum
MAGKMSIVLFVLLVVFLTQNQVSRANIMRDEQQQQQRNNQLYGVSEGRLHPQDCQPKCTYRCSKTSYKKPCMFFCQKCCAKCLCVPAGTYGNKQSCPCYNNWKTKRGGPKCP

SEQ ID NO: 14886 - protein, 125 aa, Triticum aestivum
GELGPTSHAPGRHGRGISVVAAEVFMLTGSTSAIRFGFVLGFALLALGISSLRSQRAGGRQPRLLLKGQAAIASVIFFKDLSVFFRHGWFPNVFAVLLSGMVATFYIHRIVTGGHKGSTESSSDN

SEQ ID NO: 14887 - protein, 118 aa, Glycine max
MASLKVAFVVAVLYMVVVSAHMAHARINCGRVAVAVSPCLGYLRRGGRPQARCCNGVRNLHALAKTTVDRRTACNCLKTFARGLGRGVNANNAAALPRKCRVNIPYKISISTNCNTIR

SEQ ID NO: 14888 - protein, 448 aa, Pyrobaculum aerophilum str. IM2
MVRVVVVGGGAAGASAAARARRLDPSAEVLLIERGSMITHAPCGMPYAIGGIVKSHEELMTYTPEEFEKERNIKVMINTEVVDVDADKKVVVVKKGGSEEKIPWDKLVIATGAKPLVPRIPGVELKGILTMRHPDEVPHLKGHIDKAKTVAIVGGGYIGVEMAEVLLELGKRFLLFEMFDQVLPAALDPDVAGIVAEEMKTRGVELHLGEKVVEFRGVEHVNKVVTEKGEYQVDEVILAVGVRPDVDLAVRAGAKLGETGAVYVNEYMETTVPDVYAAGDVAEKVHRVTGRRVWIPLAPTANKEGQVAGGNAVRNRILKFPGVVGTAVTKFYNLYIARTGLSEKDAAQLGFKTQSALIKARTKAHYMPGAETVHVKLIAEESTGRILGGQIVGKSPVVASYADILAVAVQSGYTVSDLFFSDIGYMPDTAPVWHPLIVAARVLSRGKL

SEQ ID NO: 14889 - protein, 515 aa, Bacillus halodurans C-125
MRKISVFDTTLRDGEQSAGVNLNFEEKMEIAKQLERLGVDIIEAGFPASSQGDFQSVKAIAETVKGSSVTGLARSVQKDIDAAWEALKSAEEPRIHLFIATSPIHMEHKLRMTPEQVIEKAVESVKYAASRFKHVQWSAEDASRSDFPFLAQIIEAVIQAGATVINLPDTVGYTTPQEIKRMFQYMKQNVPSIDKVSLSTHNHDDLGMAVANSLAAIQGGADQVECTINGIGERAGNASLEEIAVALNIRKDHYETETGLILKEIKRTSSLVSKLTGMVVPNNKAVVGANAFAHESGIHQDGVLKNKQTYEIITPEMVGVSSNSMVLGKHSGRHAFKTKVQELGFTGTDEQLNNIFKAFKDLADKKKEITEDDLFALMTEQTVGGETNHYELQTLQVNYGSNLTNTATITMKLPSGEVAEEAATGSGSVEAIYNTLERLLDAPVKLLDYRIQSITGGRDALADVYVQMDYQGVVSSGRGTAHDVLEASAKAYLNAVNRTINRKKYAEVYGSKVEV

SEQ ID NO: 14890 - protein, 542 aa, Sinorhizobium meliloti
MIRTVSTNPYGDQKPGTSGLRKKVPVFQQKNYAENFIQSIFDSLEGFEGQTLVIGGDGRYYNREVIQKAVKMAAANGFGRVLVGRGGILSTPAASNVIRKYKAFGGIVLSASHNPGGPTEDFGIKYNVGNGGPAPEKVTDAIYSRSKAIDSYKIADAPDVNLDVEGSQQVEDMTVTVIDPVADYAELMESLFDFDAIRKLIAGGFRVVFDAMSAVTGPYAKEIIEKRLGAPKGSVMNFIPLPDFGGHHPDPNLVHARALYETMMAPDAPDFGAASDGDGDRNLIIGKGIFVTPSDSLAMLAANAHLAPGYAKGLAGIARSMPTSGAADRVAEKLGVGIYETPTGWKFFGNLLDEGLATICGEESAGTGSNHVREKDGLWAVLLWLNILAARKESALEIARKHWATYGRNYYSRHDYEEVDTDAANGLIAALRDKLAALPGKSFGALTVETADDFSYHDPVDKSVSKNQGVRILFKGGSRVVFRLSGTGTSGATLRVYIERYEPDPTRHDLDTQEALADLIAVADEIAEIKANTGRDEPSVIT

SEQ ID NO: 14891 - protein, 504 aa, Xanthomonas axonopodis pv. citri str. 306
MTQTNGFDALHAHAQRLRGAAIPALLAAEPERPTQYARQVGPLYFNFARQKYDRAALDALFAIARERDLSGAFQRLFRGEQVNVTEQRAALHTALRGDLTDAPVASEAYATAEEVRQRMGSLIQQLEATDVTDIVSVGIGGSDLGPRLVADALRAPSGARFRVHFVSNVDGAAMQRTLATLDPARTAGILISKTFGTQETLLNGSILHAWLGGSERLYAVSANPERAAKAFDIAPGRVLPMWDWVGGRYSLWSAVGFPIALAIGFERFEQLLEGAAQFDAHVLNTPLEENVAVLHGLTAVWNRNLLGSATHAVMTYDQRLALLPAYLQQLVMESLGKRVKLDGSAVDSDTVSVWWGGAGTDVQHSFFQALHQGTSVVPADFIGTVHNDDPYAENHTALMANVLAQTEALANGQDSSDPHRSYPGGRPSTVILLDALTPQALGALISMYEHSVYVQSVMWGINAFDQFGVELGKQLASQLLPALKGESVDVADPVTRELLNKLRG

SEQ ID NO: 14892 - protein, 428 aa, Bacillus cereus G9241
MVAEKGTQTKTQQQREQHFELLNSTQIVISEALEKLGYPNEVYELLKEPVRMMTVKIPVRMDDGTVKIFTGYRAQHNDAVGPTKGGIRFHPNVTENEVKALSIWMSLKCGIVDLPYGGGKGGIICDPREMSFRELERLSRGYVRAISQIVGPTKDIPAPDVFTNSQIMAWMMDEYSRIDEFNSPGFITGKPLVLGGSHGRETATAKGVTICIREAAKKRDIDIKGARVVVQGFGNAGSFLAKFMHDAGAKVIAISDAYGALHDPNGLDIDYLLDRRDSFGTVTKLFNNTISNKELLELDCDILVPAAIENQITEENANDIKAKIVVEAANGPTTLEATKILTDRGILLVPDVLASAGGVTVSYFEWVQNNQGYYWTEEEVEQRLEKVMVRSFDSIYETAQVRKVNMRLAAYMVGVRKMAEASRFRGWV

SEQ ID NO: 14893 - protein, 407 aa, Methanosarcina barkeri str. fusaro
MKDMYDVLVIGAGPAGSIAARTAAEKGLDVLLIEKRQEIGDPVRCAEGVNKAYLKKYVEIDKRWICADLSASHIYAPDGTKIEMAEELSGGEVGYVLERKVFDRALAEKAAEAGAEVRVKTRATGLIIEDDFVKGARLMHLGKEYDVRAKIVIGADGVESKVGRWAGIDTSLKPIDIETCAQYLIAGANIDQHHCEFYIGNEIAPCGYIWVFPKGDGKANVGIGVLGSKTGKFKPRPVDYLNKFLENKFPDARIVEMVFGGVPVSGSIEKTSTNGLMLIGDAARQSDPITGGGILNAMNAGKMAGEAAYAAISAGDVSLEKLEEVYEKPWRATLGHDIDMSLIVKNCFINLSDEDLNSLAHSLEKVKFERMSLLDLLQALFKADKKLLWDLRVLFKDAAKEVVKNKT

SEQ ID NO: 14894 - protein, 383 aa, Yersinia pestis KIM
MFEPMELTNDAVIKVIGVGGGGGNAVEHMVRERIEGVEFFAVNTDAQALRKTAVGQTIQIGSGITKGLGAGANPEVGRNSAEEDREALRAALDGADMVFIAAGMGGGTGTGAAPVVAEVAKELGILTVAVVTKPFNFEGKKRMAFAEQGIAELSKHVDSLITIPNDKLLKVLGRGISLLDAFGAANDVLKGAVQGIAELITRPGLMNVDFADVRTVMSEMGYAMMGSGVACGEDRAEEAAEMAISSPLLEDIDLSGARGVLVNITAGFDLRLDEFETVGNTIRAFASDNATVVIGTSLDPEMNDELRVTVVATGIGMDKRPEITLVTNKKTQPVMDHRYQQHGMSPLPQEVKPAAKVVNDTTAQTNKEPDYLDIPAFLRKQAD

SEQ ID NO: 14895 - protein, 146 aa, Arabidopsis thaliana
  misc_feature (40)..(40): Xaa can be any naturally occurring amino acid
  misc_feature (50)..(50): Xaa can be any naturally occurring amino acid
  misc_feature (83)..(83): Xaa can be any naturally occurring amino acid
KRPPGAPYLAPRGSGIPPENPFLGANLAGVIKLASMVLAXMIVPGPITAXALMSCGTVTGNLAGCIALLDPGGAPLTQGCCNXGVTNLKNMASTTPDRQQACRCLQSAAKAVGPGLNTARAAGLPSACKVNIPYKISASTNCNTVR

SEQ ID NO: 14896 - protein, 177 aa, Medicago truncatula
MIPGGGGRSSTSSWAPTTSVSASGKRIQREMVELNNDPPPHCSAGPKGDNLYHWIATIIGTPGSPSSPFSLGTPYQGGIFFLDIIFPTDYPFKPPQVVFRTRIYHCNVEPDGRVSMGILKDGWSPALTITKVLLAVRSLLTNPDPYNAVVPVIAHLYLGDRAKHDDIAAEWTIRFAK

SEQ ID NO: 14897 - protein, 229 aa, Crocosphaera watsonii WH 8501
MNTATDDKTIVKDYFNATGFDRWRRIYGDGEVNKVQKDIRVGHQQTIDTVVGWLKADGNLHSLSLCDAGCGVGSLSLPLAQEGAKIFASDISEKMVTEAKERAQKDLKDASNVTFAVQDLESLTGQYNTVICLDVLIHYPTEDAAKMINHLASLAEKRLILSFAPKTLCLTLLKKIGEFFPGPSKTTRAYQHKEKDIIEILENNGFTIQRKDMTSTRFYYSRILEGVKE

SEQ ID NO: 14898 - protein, 233 aa, Glycine max
MTVTASLHRLSRLRFIAKPQPFLSPHSIPSHFSLTPKTKKANRFRFLSMAAEPKESPSNNPGLHTTPDEATKGYIMQQTMFRIKDPKVSLDFYSRVLGMSLLKRLDFPEMKFSLYFMGYENTAEAPSNPIDKVVWTFSQKATIELTHNWGTESDPEFKGYHNGNSEPRGFGHIGVTVDDTYKACERFQNLGVEFVKKPEDGKMKGIAFIKDPDGYWIEIFDRKTIGNVTQTAA

SEQ ID NO: 14899 - protein, 633 aa, Bacillus cereus ATCC 14579
MCGFVGCLCENPREFSETEKHQFENMNTMIFHRGPDDEGYFRDEHVQFGFRRLSIIDLEAGHQPLTYENDRYVIIFNGEIYNYVELREMLLEKGATFATQSDTEVIIALYAHMKEKCVDYLRGMFAFMIWDREEKKLFGARDHFGIKPLYIAQQGDTTFFASEKKSIMHVMEDKGVNPTSLQHYFTYQYGPEPETLTIDVNKIEPGHYFVKEIGKEMEIHRYWKPYFNASSATKEEHIQAIRDVLYDSVKVHMRSDVPVGSFLSGGIDSSIIASIAREMNPNLLTFSVGFEQRGYSEVDVAKETAEKLGVKNHNVFISAKEFMDEFPKNHWHMDDPLADPAAVPLYFVAKEARKHVTVVLSGEGADELFGGYNIYREPNSLKMFSYIPSPGKSVLKALSGALKEGFKGKSFLERGCTPIEERYYGNAKIFREEEKAELMKYYNESVNYMDITKPLYNEIKDYDDVSKMQYIDMFTWLRGDILLKADKMTMANSLELRVPFLDKEVFDVASKIPTEFKIANGTTKAILREAARGIVPDHVLDRKKLGFPVPIRHWLKDEMHDWAINIINESKTEHLIDKQYVLNLLEAHCADKGDYSRKIWTVLAFMVWHQIYVEHKYDTNKFHEETKRAYSLV

SEQ ID NO: 14900 - protein, 455 aa, Mesorhizobium loti MAFF303099
MDTQPAPFVPPAPKPRTSPPSTLEMIRIVYRNPLELWGEPTYNEPWISANGVGGHLIVANDPGLIRHVLVDNAKNYKMATVRQKILRPILRDGLLTAEGEVWKRSRKAMAPVFTPRHIFGFAQPMLKRTKEFVTRYEEGGASDIAHDMTLLTYDILAETLFSGEIAGEPGSFANEIDRLFETMGRVDPLDLLRAPDWLPRLTRIRGRKTMAYFRKIVTDTVKMREEKFRRDPDAVPQDFLTLLLKAEGPDGLTRSEVEDNIITFIGAGHETTARALGWTLYCLAESPWERNRVEQEIDEVLAREPDPTKWLDAMPLTRAAFDEALRLYPPAPSINREPIEPEMWKDLYIPRHAAVLVMPWVVHRHRKLWDRPDAFLPERFHPGNREKIDRFQYLPFGAGPRVCIGASFAMQEAIIALAILLSRFRFDTTAETKPWPVQKLTTQPQGGLPMQVTPR

SEQ ID NO: 14901 - protein, 257 aa, Bordetella pertussis Tohama I
MARADDIEVRVADQVAWVTINRPQRMNALARATFAQLVEVSLELDQDPGVKVVVYTGAGERAFSAGVDLKELDAAGRMTHPMGGLARNLNEVVLEMATPTIAAINGVAAGGGCELALACDIRVAASTARIGLPEARVGMGANFGSVVLPQLIPRGVALELLYTGELIDMALAHRLGLVNHVFEPAELMAQTAGLARRIADNAPLSVQRMKAMAFKSIGLPTAAALRLSVGPDPYNSEDRLEGARAFVEKRKPRFQGR

SEQ ID NO: 14902 - protein, 762 aa, Vibrio sp. Ex25
MSHVNSKSAQEFHAELTDIGHKLIEERDVIVNRYAVEDRKNYELTTSLVDIEVAAEKLLNSSRESVWFPVTPNHKKVEDTLNLFKNRVLDTTLKLDMLIGVQVENQYALLMLFNLYQQDISTDTGKTLSGHHYFEFLNQLLLTQNVVESESEANFLDRLQASDKRIELLTNELLDHGYFVFIEDAEHRLLNIAQSEARFTWLFVFIAVMLLVSAFLYQSQYRMYNLKQLNLEIEEARNKAERAAKAKSSFLAAMSHELRTPMNGVLGLSQMIAEETNEPTTKEYVKVILDSGQHLMTILNDILDFSKVEENKLEFEQAKFNLDQVISPVCSAIKPLIDEKNIELIVENEVPEYVEFTGDCARLRQILFNLAGNAVKFTSEGHVLIRTELDKVNHCLVMIVSDTGIGIALDKQEHVFNSFEQADSSTTRKFGGTGLGLAIVKKLTGLMDGKITLKSVEGVGSQFIVELPIPWVECELPKAQEPPKTRKKTHNLQILLAEDNRVNAIVAKGFCEKLGHEVDVAENGLVAVKKARDNEYDLILMDNHMPEINGVEATRVIRQELGIKTLLFAYTADVFREAHDSFIQAGADHVLTKPLQQESFSDALKQFATRLEPKENLPLTNDNNVLQLQRKPIEKLRLTEEELSSSEMLISLQEAPEAIDELLKSIIVDFESSVDELIDYFMAEDFASLEDTLHKTKGMALNLGLPILAGQTEALENTLKAKQTPEIERLQMLINRLQVNIHQANRLLDDIQKKNVDPQQIL

SEQ ID NO: 14903 - protein, 170 aa, Guillardia theta
GTRSPRRLKKMERRSRSRSKSPPRRRDDRGSYKSGDRPAGADGGTKLYVGNLSFDTRGEDLMQYFSQFGKVDDTTVIMDRDDPGRSRGFGFVTYSTIADAEYAISKTDNVEWMGRNIRVNMSRPRGDGPRGGGGGGGMRSGGFRGDGRRGGGDRYGDGGRRYGHDDRDRY

SEQ ID NO: 14904 - protein, 115 aa, Arabidopsis lyrata subsp. petraea
TALSPITRNEAHYSIIRQGQYVHLDDLCNAHIFLYEQEAAKGRYICSSHDATILTISKLLRQKYPEYNVPSTFKGVDENLKSIEFSSKKLTDMGFNFKYSLEEMFIESIETCRQK

SEQ ID NO: 14905 - protein, 450 aa, Vibrio sp. Ex25
MSHIHDTIVALQHSSPAQKEFYQAVEEVLTSLAPVIESNNKYKEQAIIQRIVEPERQIMFRVPWVDDAGNVQVNKGYRVEFNSALGPYKGGLRFHHSVNASIIKFLGFEQIFKNALTGLPIGGGKGGSNFDPKGKSDGEIMRFCQSFMNELYRHIGPVTDVPAGDIGVGAREIGYMFGQYKRLTGRYEGVLTGKSLLWGGSLVRKEATGYGTVYFAECMLNDRNDSLKGKTCLVSGAGNVAIYAIEKLYHMGATPVTCSDSRGTIYHEHGIDLQLLKQLKEVKRASLEEYLDTYPEAEYTPLGDYPNEGHAVWRYQADAAFPCATQNELTSNDALALIDNGCVLISEGANMPTTRDAANIIVDSEMAYGPAKAANAGGVATSQLEMAQNASMQNWTFEQVDSQLQTIMKNIFVNANETSREFGQPGNLVLGANIAGFRRVADAMIEQGIV

SEQ ID NO: 14906 - protein, 765 aa, Cryptococcus neoformans var. neoformans B-3501A
MSEVTETPVPPLSNVTEPPRSPNPLNPATDAQGENIQPLAEREPQNDVPGVTAAPDQPPLPVDAPLPPSPAASDEPPPSLPSSAIPTAVPTPTVITVGEDKPEVPAGAPLSTVTQGSASMDLDEATPQPVKRAGEELDGEREEKRLKEDGPAVEAAAEAGEATGEAIAVAVQSDVPLVGPDGQPLPPPAWLSYVPPAPKFAGPNTPLTLTQHKYMLNAVRSLKKRLPDAYNFLVPVDTVRFNIPHYHTVIDTPMDLGTVETKLIVSDPRGPPKDKSKMSKWDTSKGKYNNVAEVTEDVRRIWENSRKFNGKEHPVSQMATRLEEAFERSLSNLPAEPVIASPASAGPSHVRRSSISQPPVVRRSSDDTRPKREIHPPPPKDLAYEESPGSARKPKRRNDPQLQWASRAIKSLEISNKYYVAVSPFLYPVDKIIEEVPDYATVIKRPIDFNIIKNKLAENTYEDVNQVDDDIRLMVANAQKFNPPGHEVHTSATQLLQIWEEKWRTVPAKVETRDSSEDPMAEAFDDYSSDEDNAQLRSLESQVIALNQQISALRSKMTKRRAARGSKSKSKPKTAPRKSSVSKPSPNINGNSQPKKSKKAPKEANLMYREDDDESEEEEDISHLSHAQKQELAEKIGQTDGETLSKVISIIQQSTNIGGSNQEIELDIDSLPPATVIRLYNLVCRGGRGSGSKRGRGGVVKKAGGTGRKAMGGVSRRSVNEREEAERIRRMEQQLQAFESSRPVPQAVGYEEEESSSEEESSEEE

SEQ ID NO: 14907 - protein, 263 aa, Burkholderia mallei ATCC 23344
MSAELLASRPPESESTLVLTLSNPGARNALHPDMYAAGLEALNTAERDPSIRAVVLTGADRFFCAGGNLNRLLDNRAKAPSVQAASIDLLGEWITAINTVTKPVIAAVEGAAAGAGFSLALACDLLVAADDAKFVMSYARVALTPDGGGSWFLARALPRALAAEILFEGKPAAATRLHQLGVVNRLTKPGTTRDEAIAWADQLGTMSPNALARIKSLIADAQTQPLAAHLAAERDHFVASLHHADALEGITAFLDKRAPIYKR

SEQ ID NO: 14908 - protein, 115 aa, Arabidopsis lyrata subsp. petraea
TALSPITRNEAHYSIIRQGQYVHLDDLCNSHIFLYEQAAAKGRYICSSHDATILTISKFLRQKYPEYNVPSTFKGVDENLKSIEFSSKKLTDMGFNFKYSLEEMFIESIETCRQK

SEQ ID NO: 14909 - protein, 440 aa, Flavobacteria bacterium BBFL7
MSKKVNIFWFRRDMRLDDNVGFLEALKSDYPVLPIFIFDKEILDHLPEDDARVTFIYEELQRMRNNLQENHDSSLATFYGKPLNIWQEIIDNYEVNAVFTNRDYEPYAQERDLKLTSFFNEQNVAFHTFKDQVIYEKDDIVKDDGDPYVVYTPYKNKWLENFRKDYGKADNLTIHYTNDYLDNCIKNSRLPNLNLSDIGFKKSSIEIPEYNITPTLIEDYEKTRNYPAMENGTSRLGVYLRFGVVSIRKMMKKADLANEKTFMSELIWREFFMTILYHFPHTVDNAFRSKYDRIEWRNNESEFEKWKNGQTGYAIVDAGMRELNTTGYMHNRVRMLVASFLCKHLLIDWRWGERYFAEKLLDFDLSANVGNWQWAAGSGVDAAPYFRIFNPITQKDKFDKNYKYIKQWVPEFETDDYVEKMVDHKEARERCLKTYKEAVS

SEQ ID NO: 14910 - protein, 583 aa, Zea mays
MGLFTVTKKATTPFEGQKPGTSGLRKKVTVFQQPHYLQNFVQSTFNALPADQVKGATIVVSGDGRYFSKDAVQIITKMAAANGVRRVWVGQNSLMSTPAVSAVIRERIGADGSKATGAFILTASHNPGGPTEDFGIKYNMGNGGPAPESVTDKIFSNTTTISEYLISEDLPDVDISVVGVTSFSGPEGPFDVDVFDSSVNYIKLMKTIFDFEAIKKLLTSPKFTFCYDALHGVAGAYAKHIFVEELGADESSLLNCVPKEDFGGGHPDPNLTYAKELVERMGLGKSSSNVEPPEFGAAADGDADRNMILGKRFFVTPSDSVAIIAANAVQSIPYFASGLKGVARSMPTSAALDVVAKNLNLKFFEVPTGWKFFGNLMDAGMCSICGEESFGTGSDHIREKDGIWAVLAWLSIIAFKNKDNLGGDKLVTVEDIVRQHWATYGRHYYTRYDYENVDAGAAKELMANLVSMQSSLSDVNKLIKEIRSDVSEVVAADEFEYKDPVDGSVSKHQGIRYLFGDGSRLVFRLSGTGSVGATIRVYIEQYEKDSSKTGRDSQEALAPLVDVALKLSKMQEYTGRSAPTVIT

SEQ ID NO: 14911 - protein, 515 aa, Glycine max
  misc_feature (229)..(229): Xaa can be any naturally occurring amino acid
MLSSRIWQRRALISARTLFSASASHSSSSSPAIPFRFSKANASSSSHLIFNFARVNIYWFSTQPALELPASKIVDVPLAQTGEGIAECELLKWYVQEGDYVEDFQPLCEVQSDKATIEITSRYKGKISSFLYVPGDIVKVGETLLKILVDESAFPSGTPCDSENAKSPDSDQTLVNESVLTTVVDDSDNAKLIDSDPGKGRQTGVLSTPAIRSLAKQHGIDITEVCGTXKDGRVLKEDVLNFAVKKGIIKNPSTVLHSDSGEQLQGAEGYNCNVATKFYRSSEDRTLPLRGFQRAMVKSMSLAAKVPHFHYVDEINCDALVELKTSFQKNNPYPDVKYTFLPILIKSLSMALSKYPFMNSCFKEDALEVVLKGSHNVGIAMATPHGLVVPNIKNVQSLSIMEITKDLARLQQLASDNKLTSEEIYGGTITLSNIGAIGGKFGSPLINLPEVSIIAIGRIQIVPRFADNGNVYPASLMNVNIGADHRVLDGATVARFCNEWKQLIENPELLTLHLK

SEQ ID NO: 14912 - protein, 430 aa, Bacillus cereus E33L
MTIGTLPFDQETIRQRASEVNEAAWLTEFRLQALAQATELPMPTPDKTKIEKWDFIGKGDAAKQEPVSSLTELPEAVKNLIDENNSVLVQRTGTTAFVSLADEAKEKGVIFTDIVTAATEHAELVQKYLMKDGVKVDEHRLTALHAALINGGAFVYVPKNVVLETPLQAVFLVDGEEANVYNHVLFVADANSTATYVENYVANENAKGIANIVAEVIVEQGAQVKFGAVDLLAKDVTTYVNRRGVVGRDGRIDWALGLMNDGNTISENVTNLMGDGSYADTKTVTIGRGNQTQNFTTKVVHFGKHSEGWILKHGVQKDSATSIFNGIGKIEHGASKSNAQQSSRVLMLDEKARGDANPILLIDEDDVMAGHAASVGRVDPVQLYYLMSRGIPKREAERLVIHGFLAPVVNELPIEGVKAQLVEVIERKVR

SEQ ID NO: 14913 - protein, 877 aa, Vibrio vulnificus YJ016
MNEKYAALKSNVSMLGHLLGNTIQEAHGDEILEKVETIRKLSKSARAGNQADRNNLIEEIKSLPDEQLTPVARAFNQFLNLTNIAEQYHTISRHCDAHVCEPDAINTLFAKLGQNGINKLDTAQAIRELNIELVLTAHPTEITRRTMINKLVKINECLSKLELSDLSYKERHKTEKRLEQLIAQSWHSDVIRKQRPTPLDEAKWGFAVVENSLWEAVPDFLRELDEKLKDYLDQGLPIDARPVHFSSWMGGDRDGNPFVTHTVTREVLLLSRWKAADLYLKDINELISELSMTKCNDTVRQLAGEDEHEPYRAILKQLRTLLSDTKEILDAKINGQKLAVKAPLQSVEQLWDPLFACYQSLRECGMSMIAEGSLLDTLRRVKAFGVHLVRLDIRQESTRHADVLSELTRYLGIGDYNHWSEQDKIAFLTNELASKRPLLPRDWQPSEPVKEVLDTCKIIAAQSREAFGAYVISMAKTASDVLAVHLLLQESGCPYRMDVCPLFETLDDLNNAEAVIKQLMSIDLYRGFIQNHQMVMIGYSDSAKDAGVMAAGWAQYHAMEALVNVAEQEGIELTLFHGRGGTIGRGGAPAHAALLSQPPKSLKGGLRVTEQGEMIRFKLGLPDVAVNSFNMYASAILEANLLPPPEPKQEWRDLMEVLSQVSCEAYRSVVRGEPDFVPYFRQATPELELGKLPLGSRPAKRNPNGGVESLRAIPWIFSWSQNRLLLPAWLGAGEAIQYSIDKGHQALLEEMCREWPFFSTRLGMLEMVYLKCNSEISRYYDERLADKSLLPLGDRLRDQLQSDIKAVLNVENNENLMQSDPWGQESIRLRNIYIEPLNMLQAELLYRTRQAGVVSEELEEALMVTIAGIAAGMRNTG

SEQ ID NO: 14914 - protein, 307 aa, Staphylococcus aureus subsp. aureus NCTC 8325
MTKKMGLLVMAYGTPYKESDIEPYYTDIRHGKRPSEEELQDLKDRYEFIGGLSPLAGTTDDQADALVSALNKAYADVEFKLYLGLKHISPFIEDAVEQMHNDGITEAITVVLAPHYSSFSVGSYDKRADEEAAKYGIQLTHVKHYYEQPKFIEYWTNKVNETLAQIPEEEHKDTVLVVSAHSLPKGLIEKNNDPYPQELEHTALLIKEQSNIEHIAIGWQSEGNTGTPWLGPDVQDLTRDLYEKHQYKNFIYTPVGFVCEHLEVLYDNDYECKVVCDDIGANYYRPKMPNTHPLFIGAIIDEIKSIF

SEQ ID NO: 14915 - protein, 534 aa, Acinetobacter sp. ADP1
MIPIKLKNLLLWSFNMLDQNIKTQLKAYLERLESPIELVAALDDSDKAAKIKELVTEIAELSNQVTARFDGQNTRRPSFGIAKAGEQPRVFFAGLPMGHEFTSLILALLQTSGYAPKVSDEILNQIKGLNLKADFDVFVSLSCHNCPDVVQALNLIAIYNPNSTATMIDGAFFQDEVEERKIMAVPMVFQNGNHIGQGRMTLEEIVAKLDSNAAEKDAAAINAKDAFDVLVVGAGPAGGTAAIYAARKGIRTGMIAERFGGQVMDTMDIENFTSVQKTVGPKFAADMEAHVREYDVDIMNLQRVSKIVGADQTASGLVEVELENGAKVESKTVILSTGARWRKMGVPGEQEYATRGVAYCPHCDGPLFKGKKVAVIGGGNSGVEAAIDLAGIVEHVTLVEFDTKLRADQVLQDKLNSLPNATIITNALSTEVIGDGAQVTGLKYKDRATDTEHTIELAGIFVQIGLLPNTDFLKGSVELSPRGEIIINERNETNVKGVFAAGDCTTVPYKQIIIATGEGAKASLSAFDYIIRHG

SEQ ID NO: 14916 - protein, 513 aa, Arabidopsis thaliana
  misc_feature (500)..(500): Xaa can be any naturally occurring amino acid
MDHSSNRFGNNGVESILPNYKLGKTLGIGSFGKVKIAEHVVTGHKVAIKILNRRKIKNMEMEEKVRREIKILRLFMHPHIIRQYEVIETTSDIYVVMEYVKSGELFDYIVEKGRLQEDEARNFFQQIISGVEYCHRNMVVHRDLKPENLLLDSRCNIKIADFGLSNVMRDGHFLKTSCGSPNYAAPEVISGKLYAGPEVDVWSCGVILYALLCGTLPFDDENIPNLFKKIKGGIYTLPSHLSSEARDLIPRMLIVDPVKRITIPEIRQHRWFQTHLPRYLAVSPPDTVEQAKKINEEIVQEVVNMGFDRNQVLESLRNRTQNDATVTYYLLLDNRFRVPSGYLESEFQETTDSGSNPMRTPEAGASPVGHWIPAHVDHYGLGARSQVPVDRKWALGLQSHAHPREIMNEVLKALQELNVCWKKIGHYNMKCRWVPGLADGQNTMVNNQLHFRDESSIIEDDCAMTSPTVIKFELQLYKAREEKYLLDIQRVNGPQFLFLXDLCAAFLTELRVI

SEQ ID NO: 14917 - protein, 720 aa, Synechococcus sp. WH 7805
MGLNLLHLHLHGLFRSHDLELGRDADTGGQTLYVLELVRSLASRAEVDHVEVVTRLIQDRRVSADYARPEESIAPGASIRRFSFGPKRYLRKEQLWPHLDELADQLVLQLQAADRRPDWIHAHYADAGYVGALVSRRLGLPLVFTGHSLGREKLRRLLAAGGDREQIEQTYSISRRIDAEELALAHADLVITSTRQERDHQYSRYGRFEVGRADVIPPGVDARRFHPRSTPQESADVSAMVQSFLREPQRPPLLAICRADRRKNIPALVEAYGRSSVLRERHNLLLVLGNRDDSRQMDRQQRDVFQQIFDLVDRYDLYGSVAYPKHHRRDQVPAIYRWAAERKGLFVNPALTEPFGLTLLEAAASGLPMVATDDGGPRDIHRRCENGLLVDVTDRESLQDGLERAGSDPGRWRRWSDNGVEAVSRHYSWDAHVCSYLALMQGRLSPSAASVKLLDRSVAQANPLGDRLLLLDLDSSLEQPDAEPLQALRHQLTASAERSIRPGLGIITGRSLAAARQRFTELQLSDPCVWITQAGTEIHYGQEDQSDRLWAAEIGVDWQREGVEQALADLGDHITLQADDHQGPFKVSYLLRQPGPSVLPLIRQRLRQQHQAARPNLRCHWFLDVLPLRASRSEAIRFLSLRWSLPLDRFLVVASQQGDLELVQGLPAAVIPSDHDPCLDGCRQLQRVYFADRARLSGVLEGLQHYRFLSARSRADQSSI

SEQ ID NO: 14918 - protein, 327 aa, Fusobacterium nucleatum subsp. vincentii ATCC 49256
MEIEKMEKKLAILTSGGDAPGMNAAIRATAKIAESYGFEVYGIRRGYLGMLNDEIFPITGRFVSGIIDKGGTVLLTARCEEFKQARFREIAANNLKKKGIEYLVVIGGDGSYRGANLLYKEHGIKVVGIPGTIDNDICGTDFTLGFDTCLNTILDAMSKIRDTATSHERTILIQVMGRRAGDLALHACIAGGGDGIMIPEMDNPIEMLALQLKERRKNGKLHDIVLVAEGVGNVFEIEEKLRGHINSEIRSVVLGHIQRGGTPSGRDRVLASRMAAKAVEVLSKGEAGVMVGIEKNEMVTHTLEKACSVEKRKSIEKDYELALLLSK

SEQ ID NO: 14919 - protein, 307 aa, Coxiella burnetii RSA 493
MIKKRSILIVTRKSPLALWQAEFVKQQIENSHPHLACQILGCTTQGDRLTTEKLVDSGGKDLFVKDLQKALLNRDADIAVHSIKDMSACDGPELMVGAFIRREDPRDVLIVKGELSTLPPHAVIGTSSPRRQCQLKKFQPGCKIKEIRGNVGTRLAKLDAGHYEAIVLAAAGLKRLGLENRIHYYFDPHEFIPAIGQGAIGVECRSDDHEMQTLLKSLDHRETRLCVTAERAVNEKLGGDCFTPIAAHAIIKNDQLSLFAMLGKIDGRVIIRATEIGNSEEAKRIGFKVASQLLEQGGDSLLRELKQ

SEQ ID NO: 14920 - protein, 457 aa, Streptococcus mutans UA159
MSKIVIVGANHAGTAAINTILDNYGSENEVVVFDQNSNISFLGCGMALWIGKQISGPQGLFYADKESLEAKGAKIYMESPVTAIDYDAKRVTALVNGQEHVESYEKLILATGSTPILPPIKGAAIKEGSRDFEATLKNLQFVKLYQNAEDVINKLQDKSQNLNRIAVVGAGYIGVELAEAFKRLGKEVILIDVVDTCLAGYYDQDLSEMMRQNLEDHGIELAFGETVKAIEGDGKVERIVTDKASHDVDMVILAVGFRPNTALGNAKLKTFRNGAFLVDKKQETSIPDVYAIGDCATVYDNAINDTNYIALASNALRSGIVAGHNAAGHKLESLGVQGSNGISIFGLNMVSTGLTQEKAKRFGYNPEVTAFTDFQKASFIEHDNYPVTLKIVYDKDSRLVLGAQMASKEDMSMGIHMFSLAIQEKVTIERLALLDYFFLPHFNQPYNYMTKAALKAK

SEQ ID NO: 14921 - protein, 247 aa, Cryptococcus neoformans var. neoformans JEC21
MPTLILPGETVPIPSTSKAVVLGPGISQSTPTLQASSSTASGSSSAQGYIATRLGMLHSGKGKERSQKLWIEGNSKRYIPAQKDIVLGIIIARHADGYRVDLGSSQMAQLDALAFEGATKRSKPNLKVGTLVFARVMSASRDMEPELECFDPNTGKSDGFGELKGGVMVNATLQLCRRLLDRNHIVLPTIASIFPFEIAIGLNGRVWMKAETVGETLAMKRLIESVDDHIIPVEEKAIKEKLREYLS

SEQ ID NO: 14922 - protein, 691 aa, Lotus japonicus
IQSYHFSVYSTSPVSRMKPLLHPSSILTFWFTLFIISINIQTPLCADNDSKYYTNCYEAFSCDGSSVGNLKYPFWGGNRTEYCGQSQLELVCEDRAAKITINSITYRVVKWEDSTQKLTVARDDFWGGVCAVSDYQNSSFDNSPFQYDFSGDNNVTLLYNCGSIDPPSGFYRSSCDGGSRVVYYIVGVGPLSFASACTSVVVPVLASQVSALASTAGNIDEVLNEGFGLRWSGNYQECTGCLDTRGACGFDGKFRCFCEDGPHQSSCISDRAPAPDKRRGSTTRNIVIGVAASCVGGLVAIISIAIYIRRKFKSLSGQTMISRKRSTFVEHDVEAFMQSYGSLAPRRYSYSEVKRITNSFVHKLGQGGYGVVYKATLPDGRLVAVKVISESGGSGEDFINEVSSISRTSHVNIVSLLGFCYDKNRRVLIYEFMPNGSLDNFINGMGSPNAICCFDWNTLYKVAIGIARGLEYLHQGCNTRILHLDIKPQNILLDEDLCPKIADFGLAKICKRKESIVSMLGTRGTPGYIAPEVFSRAFGGVSHKSDVYSFGMLILEMVGGRKNYDSGGGSQSSEMFFPDWIYKDLEQGDVHTNFLVITEEEHEMARKMILVSLWCIQTRSSERPSMNKVVEMLEGTLESVPYPPKPILHSPEKLLLQNSDLTSGNTLETDSMTTEKDGSIELNVLSKNVPG

SEQ ID NO: 14923 - protein, 360 aa, Candida glabrata CBS 138
MCKAGFAGDDAPRAVFPSIVGRPRHQGIMVGMGQKDSYVGDEAQSKRGILTLRYPIEHGIVTNWDDMEKIWHHTFYNELRVAPEEHPVLLTEAPMNPKSNREKMTQIMFETFNVPAFYVSIQAVLSLYSSGRTTGIVLDSGDGVTHVVPIYAGFSLPHAILRIDLAGRDLTDYLMKILSERGYSFSTTAEREIVRDIKEKLCYVALDFEQEMQTAAQSSSIEKSYELPDGQVITIGNERFRAPEALFHPSVLGLESAGIDQTTYNSIMKCDVDVRKELYGNIVMSGGTTMFPGIAERMQKEITALAPSSMKVKIIAPPERKYSVWIGGSILASLTTFQQMWISKQEYDESGPSIVHHKCF

SEQ ID NO: 14924 - protein, 135 aa, Erwinia carotovora subsp. atroseptica SCRI1043
MRLLHTMLRVGDLQRSIDFYTQILGMRVLRTSENTEYKYTLAFVGYTEESEGAVIELTYNWGVDSYDLGNAYGHIALGVDDVAATCERIRKAGGNVTREAGPVKGGTTVIAFIEDPDGYKIELIENAHAGSGIGH

SEQ ID NO: 14925 - protein, 333 aa, Burkholderia xenovorans LB400
MPATSTKHAKVLILGSGPAGYTAAVYAARANLAPVLVTGLAQGGQLMTTTDVENWPADANGVQGPELMARFLEHAERFNTEIIFDHIHTAKLDEKPIRLIGDSGEYTCDSLIIATGASAQYLGLPSEEAFMGKGVSACATCDGFFYKQQHVAVIGGGNTAVEEALYLAGIAKKVTVIHRRDKFRAEPILIDRLLAKEKEGIVEIKWNHTLDEVTGDQSGVTGLRIKHTQTGETTDLALQGLFVAIGHKPNTDIFAGQLEMKNGYIITKGGLNGFATATSVPGVFAAGDVQDHVYRQAITSAGTGCMAALDAQRYLETIDEMAGEHAMSQEAGR

SEQ ID NO: 14926 - protein, 568 aa, Candida albicans SC5314
MVLSKHIDALRLESQILKKTPQAQLRKEAFIDAYDSHKNIPQFEIPQNSSNEQLIYKYLSQELALDGIPTLNLASFVNTYVDDTSARLIQDNLTKNLADNDEYPSLIDIQTRCISILSNLWHAPGKVDKVTGNRVTNSIGTATTGSSEAIMLAGLALKKRWQLKRKAEGKSTDNPNILMATCAQVALEKFACYFDVENRLIPVTEESGHLIDVSKIKENIDENTIGIFVIMGSTFTGAFEPVEEISKLLDEVEKERGLDIRIHVDGASGGFVAPFIFPHLKWDFAVPRVDSINTSGHKFGLTSVGLGWVIWKDADLLPKELRFSLDYLGGVEETFGLNFSRPGFPVITQYYNFLSLGRQGYAKIFDGCMTNARLLSRFLEESKYFDVVSVIHHKLSDSEKKAQFIREVDDKKLDSKLYTINEEFKPGLPVVAFRFSKEVRDKYPELPQELLSTLLRKRGYIIPNYHLPPSENDKEILRVVVRNSLSLNLLERLIQDITDATELLIKAADSIADYVSTSGEHTDVENRERIHKLLAAIASGGVAEVKEEKHKKDNHQGSKNKKSYRGTC

SEQ ID NO: 14927 - protein, 960 aa, Zea mays
MPERHQSIDAQLRLLAPGKVSEDDKLVEYDALLVDRFLDILQDLHGPHLREFVQECYELSAEYENDRDEARLGELGSKLTSLPPGDSIVVASSFSHMLNLANLAEEVQIAHRRRIKLKRGDFADEASAPTESDIEETLKRLVSQLGKSREEVFDALKNQTVDLVFTAHPTQSVRRSLLQKHGRIRNCLRQLYAKDITADDKQELDEALQREIQAAFRTDEIRRTPPTPQDEMRAGMSYFHETIWKGVPKFLRRIDTALKNIGINERLPYNAPLIQFSSWMGGDRDGNPRVTPEVTRDVCLLARMMAANLYFSQIEDLMFELSMWRCSDELRIRADELHRSSRKAAKHYIEFWKQVPPNEPYRVILGDVRDKLYYTRERSRHLLTSGISEILEEATFTNVEQFLEPLELCYRSLCACGDKPIADGSLLDFLRQVSTFGLALVKLDIRQESDRHTDVLDSITTHLGIGSYAEWSEEKRQDWLLSELRGKRPLFGSDLPQTEETADVLGTFHVLAELPADCFGAYIISMATAPSDVLAVELLQRECHVKHPLRVVPLFEKLADLEAAPAAVARLFSIDWYMDRINGKQEVMIGYSDSGKDAGRLSAAWQMYKAQEELIKVAKHYGVKLTMFHGRGGTVGRGGGPTHLAILSQPPDTIHGSLRVTVQGEVIEHSFGEELLCFRTLQRYTAATLEHGMHPPISPKPEWRALMDEMAVVATKEYRSIVFQEPRFVEYFRSATPETEYGRMNIGSRPSKRKPSGGIESLRAIPWIFAWTQTRFHLPVWLGFGAAIKHIMQKDIRNIHILREMYNEWPFFRVTLDLLEMVFAKGDPGIAAVYDKLLVADDLQSFGEQLRKNYEETKELLLQVAGHKDVLEGDPYLKQRLRLRESYITTLNVCQAYTLKRIRDPSFQVSPQPPLSKEFTDESQPAELVQLNQQSEYAPGLEDTLILTMKGIAAGMQNTG

SEQ ID NO: 14928 - protein, 449 aa, Haemophilus somnus 2336
MSAIVSLEDFLAKVEQRDGHQPEFLQAVREVFTSIWPFLEKNPKYRSEALLERLVEPERAFQFRVAWTDDKGQVQVNRAFRVQFNSAIGPFKGGMRFHPSVNLSILKFLGFEQIFKNALTTLPMGGGKGGSDFDPKGKSDAEVMRFCQALMSELYRHVGADTDVPAGDIGVGGREVGYLAGYMKKLSNQAACVFTGRGLSFGGSLIRPEATGYGLVYFAQAMLAEKGQSFAGKTVVVSGSGNVAQYAIEKALQLGAKVVTCSDSSGYVYDPEGFTQEKLTALLDIKNVKRGRVKDYAEQFGLQYVEGARPWGVKADIALPCATQNELELSDAQQLIANGVQLVAEGANMPTTIEATDAFLEAGVLFGPGKAANAGGVATSGLEMAQSSQRLYWTAEEVDEKLHRIMLDIHANCKKYGTVEGQKNINYVVGANVAGFVKVADAMLAQGVY

SEQ ID NO: 14929 - protein, 226 aa, Allium cepa
MEAVTKLDVEGTAFDSVIIPPGSSKTHFLGGAGVRGLEIGGKFIAFTAIGIYLETDSIPFLADKWKGKTGEELAGSLDFFRDICTGPFEKFTNVTMILPLTGEQYSEKVTENCVAYWKAIGIYTDAEASAVDKFKQAFKPESFPPGSSILFTHTPSGTLKIAFSKDGLVPKDEGVLIENKALTQAVLESIIGEHGVSPAAKLSIASRLSEIMNKVGNVEEKLPVLS

SEQ ID NO: 14930 - protein, 195 aa, Streptomyces sp.
YPRIDVMAGNAGGMFWSRTTTQDGFEATLQVNHLAGFLLARLLRERLAGGRLILTSSDAYTQGRIDPDDLNGDRHRYSAGQAYGTSKQANIMTATEAARRWPDVLTVSYHPGEVRTRIGRGTVASTYFRFNPFLRSAAKGADTLVWLAAAPAEELTTGGYYSDRRLSPVSGPTADAGLAAKLWEASAAAVGDTAR

SEQ ID NO: 14931 - protein, 226 aa, Allium cepa
MEAVTKLDVEGTAFDSVIIPPGSSKTHFLGGAGVRGLEIGGKFIAFTAIGIYLETDSIPFLADKWKGKTGEELAGSLDFFRDICTGPFEKFTNVTMILPLTGEQYSEKVTENCVAYWKAIGIYTDAEASAVDKFKQAFKPESFPPGSSILFTHTPSGTLKIAFSKDGLVPKDEGVLIENKALTQAVLESIIGEYGVSPAAKLSIASRLSEIMNKVGNVEEKLPVLS

SEQ ID NO: 14932 - protein, 226 aa, Allium cepa
MEAVTKLDVEGTAFDSVIIPPGSSKTHFLGGAGVRGLEIGGKFIAFTAIGIYLETDSIPFLADKWKGKTGEELAGSLDFFRDICTGPFEKFTNVTMILPLTGEQYSEKVTENCVAYWKAIGIYTDAEASAVDKFKQAFKPESFPPGSSILFTHTPSGTLKIAFSKDGSVSKDEGVLIENKALTQAVLESIIGEHGVSPAAKLSIASRLSEIMNKVGNVEEKLPVLS

SEQ ID NO: 14933 - protein, 525 aa, Bifidobacterium longum DJO10A
  misc_feature (359)..(375): Xaa can be any naturally occurring amino acid
MTDFTPETPVLTPIRDHAAELAKAEAGVAEMAAKRNNRWYPKYHIASNGGWINDPNGLCFYKGRWHVFYQLHPYGTQWGPMHWGHVSSTDMLNWKREPIMFAPSLEQEKDGVFSGSAVIDDNGDLRFYYTGHRWANGHDNTGGDWQVQMTALPDNDELTSATKQGMIIDCPTDKVDHHYRDPKVWKTGDTWYMTFGVSSADKRGQMWLFSSKDMVRWEYERVLFQHPDPDVFMLECPDFFPIKDKDGNEKWVIGFSAMGSKPSGFMNRNVSNAGYMIGTWEPGGEFKPETEFRLWDCGHNYYAPQSFNVDGRQIVYGWMSPFVQPIPMEDDGWCGQLTLPREITLGDDGDVVTAPVAEXXXXXXXXXXXXXXXXXHGSVTLDMDGEQIIADDAEAVEIEMTIDLAASTAERAGLKIHATEDGAYTYVAYDGQIGRVVVDRQAMANGDRGYRAAPLTDAELASGKLDLRVFVDRGSVEVYVNGGHQVLSSYSYASEGPRAIKLVAESGSLKVDSLKLHHMKSIGLE

SEQ ID NO: 14934 - protein, 227 aa, Zea mays
MDSTDPPPASPSSPGPPGGQPSPPKRPAGRTKFQETRHPVFRGVRRRGRAGRWVCEVRVPGSRGDRLWVGTFDTAEAAARAHDAAMLALCGAAASLNFADSAWLLHVPRAPAGLPGVQRAATDAVAAFLRTQQPRGGGDAPAAASQGQRANAATETELDHAGASAAAVDGGGGSVVEVDVFGGMDDAGSYYASLAQGLLIDPPPPAVECPEEEDDDCGGAGEMELWD

SEQ ID NO: 14935 - protein, 259 aa, Helianthus annuus
ANYGGDKQYGRETRHTGDYESPIHSTGGQYEQEVLQTDEYGNPVRRTGQTDEYGNPVRRTDEYGNPVHSTTGGTMGDYGSTGLGQGTGTGGIGTGGYGTTGHHGLGTGVGHTTGGTGTDYTSGGRSTGQTGYQGLGTESDFGGKTGTFQNQPSATPVGGVGLNSGTGAGVGGTGTGTGILHRSGSSSSSSSEDDGQGGRRKKKGVMQKIKEKLPGGHRQEEQYQSQTTTTTTGGGAGYGETHEKKGMMEKIKEKLPGHH

SEQ ID NO: 14936 - protein, 115 aa, Arabidopsis lyrata subsp. petraea
TALSPITRNEAHYSIIRQGQYVHLDDLCNSHIFLYEQEAAKGRYICSSHDATILTISKFLRQKYPEYNVPSTFKGVDENLKSIEFSSKKLTDMGFNFKYSLEEMFIESIETCRQK

SEQ ID NO: 14937 - protein, 444 aa, Kluyveromyces lactis NRRL Y-1140
MSNEEFIRTQIFGTVFEITNRYTNLNPVGMGAFGLVCSATDTLTSQPVAIKKIMKPFSTSVLAKRTYRELKLLKHLRHENLICLEDIFLSPLEDIYFVTELQGTDLHRLLQTRPLEKQFVQYFLYQILRGLKYVHSAGVIHRDLKPSNILINENCDLKICDFGLARIQDPQMTGYVSTRYYRAPEIMLTWQKYNVEVDIWSAGCIFAEMIEGKPLFPGKDHVHQFSIITDLLGSPPKDVIDTICSENTLKFVTSLPHRDPVPFSSRFQNLEPDAIDLLEKMLVFDPKKRITAADALAHPYLSPYHDPTDEPIAEAKFDWNFNDADLPVDTWRVMMYSEILDFHQIGDPQINTNATFDDQVAAATVAAAEAASKQQQQQQHQTEEQTQQTIASTPPQAQVTPQQLESGANSNSNSNPSFSIGPDPANETLTNFANQADQYVSKFK

SEQ ID NO: 14938 - protein, 477 aa, Acinetobacter sp. NCIMB9871
MNYPNIPLYINGEFLDHTNRDVKEVFNPVNHECIGLMACASQADLDYALESSQQAFLRWKKTSPITRSEILRTFAKLAREKAAEIGRNITLDQGKPLKEAIAEVTVCAEHAEWHAEECRRIYGRVIPPRNPNVQQLVVREPLGVCLAFSPWNFPFNQAIRKISAAIAAGCTIIVKGSGDTPSAVYAIAQLFHEAGLPNGVLNVIWGDSNFISDYMIKSPIIQKISFTGSTPVGKKLASQASLYMKPCTMELGGHAPVIVCDDADIDAAVEHLVGYKFRNAGQVCVSPTRFYVQEGIYKEFSEKVVLRAKQIKVGCGLDASSDMGPLAQARRMHAMQQIVEDAVHKGSKLLLGGNKISDKGNFFEPTVLGDLCNDTQFMNDEPFGPIIGLIPFDTIDHVLEEANRLPFGLASYAFTTSSKNAHQISYGLEAGMVSINHMGLALAETPFGGIKDSGFGSEGGIETFDGYLRTKFITQLN

SEQ ID NO: 14939 - protein, 407 aa, Terrabacter sp. YK3
MTAPHHVIVGGSAAGVAAALAMRRNGFEGRITLVEAASEEPYERPPLSKSFTDLDAPRRILPPSTYVEEDIDLLLGMPVAALDVDRKVVRLPDGEGLGADAVLVATGVNARRLGVPGEYLEHVLVLRGLADARALAARLDVGGPWVIVGGGFIGLEAAAVARGRGIDVTVVEAMPVPLAGVLGPALAAHVQRMHEREGVRILGGRTVTEFVGEREVEKVVLDDGSVLDAATVLVGCGVEPNDELARDAGVYCNGGIVADRHGRTSVPWIWAAGDVATFVSPFTGRRQRIEHWDVANRLGTVTGANMVGVPAVNTDAPYFWSDQYGHRLQMYGRHQPGDQFVVRPGVTTAQFVAFWVRDGRVTAAAAIDSPKELRATKPLIEGRVPVMASDLIDPAVSLRALGRVAHP

SEQ ID NO: 14940 - protein, 671 aa, Glycine max
MEELSAGPLVPAVVKPEPSKGASAAASGGTFPASTSEPDKDFLCPICMQIIKDPFLTACGHSFCYMCIITHLRNKSDCPCCGDYLTNTNLFPNLLLDKLILLKKTSARQISKTASPVEHFRQVLQKGSDVSIKELDTLLSLLAEKKRKMEQEEAERNMQILLDFLHCLRKQKVDELKEVQTDLHFIKEDINAVEKHRMELYRARDRYSVKLQMLDGSGGRKSWHSSMDKNSSGLLSSPLNLRGGLSSGSHTKKNDGKSHISSHGHGIQRRNVITGSDSQYINQSGLALVRKKRVHTQFNDLQECYLQKRRHAADRSHSQQERDISLISREGYTAGLEDFQSVLTTFTRYSRLRVIAELRHGDIFHSANIVSSIEFDRDDDLFATAGVSRRIKVFDFSAVVNEPTDAHCPVVEMSTRSKLSCLSWNKFAKNQIASSDYEGIVTVWDVTTRKSLMEYEEHEKRAWSVDFSRTDPSMLVSGSDDCKVKIWCTNQEASVLNIDMKANICCVKYNPGSGNYIAVGSADHHIHYYDLRNISRPVHVFSGHRKAVSYVKFLSNDELASASTDSTLRLWDVKENLPVRTFKGHANEKNFVGLTVSSEYIACGSETNEVFVYHKEISRPLTSHRFGSPDMDDAEDEAGSYFISAVCWKSDRPTILTANSQGTIKVLVLAA

SEQ ID NO: 14941 - protein, 465 aa, Chromobacterium violaceum ATCC 12472
MSLMRKKSVQGMLAAAQTSRGLRKELSAFDLTMLGIGAIIGTGIFVLTGTGATIAGPGLVLSFVISAFACGFAAMCYAEFASMLPISGSTYTYAYATLGELIAWIIGWDLLLEYLLASSAVSVGWSGYFQSLLSGFGVTLPQALTAAAGSVPGKETLFNLPAFCIAMIITALLAFGIKESKRVNNIVVLIKVAVVVLFIAIGVWHVKPANWQPALPFGFSGVFHGAAIVFFSFIGFDAVTCAAEEVKNPAKDIPRGVIWSLVVCSILYVVVAAIMTGIVPYMNFAGVDHPVSLALQVAKLDWFAGFVDLGAILGMMTVILVMTYGQTRILFAMSRDGLLPKIFSEVNPKYGTPYKATWLIGTIIALLAGFVPLHTLAELVNIGTLAAFTLIALSVIVLRKREPDLPRKFVCPAVPTIPALAILCCGFLMTQLSLLTWTCFAAWLLIGLVVYFGYSRRNSLLHNPA

SEQ ID NO: 14942 - protein, 964 aa, Setaria italica
MASKPVEKHHSIDAQLRLLAPGKVSEDDKLVEYDALLIDRFLDIFQDLHGPNIREFVQECYEVAAEYERDRDAAKLSELGSRLTKLSPNDAIVVASSFSNMLNLTNLAEEVQLAHLRRNKLKRGDFADEGFAATESDIEETLKRLVTELGKSKEEVFDALKNQTVDLVFTAHPTQSVRRSLLQKHARIRNCLTQLYAKDNTEDDKQELDEALQREIQACFRTDEIRRAQPTPQDEMRYGMSYFHETIWKGVPKFLRRVDTALKNIGIDERLPYNAPLIQFSSWMGGDRDGNPRVTPEVTRDVCLLARMMASNLYFSRIEELMFELSMWRCNDELRARAEELHASSQRISKHYIEFWRQLPANEPYRVVLGYVRDELYSTRERSRHLLTSGFSDIPEDSAFKNVEEFLEPLELCYKSLCDCGDKTIADGSLLDFMRQVSTFGLSMVKLDIRQESERHTDVIDAITTHLGIGSYREWSEEKRQEWLLSELRGKRPLLSKDMPQTEEIADVLGCFHVLAELPRDSFGPYIISMATAPSDVLAVELLQRECHVKQPLPVVPLFEKLADLQSAPASIERLFSLDWYMNRIGGKQQVMVGYSDSGKDAGRLSAAWHLYKAQEAMAKVAKRYGVKLTMFHGRGGTVGRGGGPTHLAILSQPPDTINGSLRVTVQGEVIETSFGEEHLCFRTLQRFTAATLEHGMHPPVSPKPEWRALMDEIAAVATDEYRSVVMREPRFVEYFRSATPETEYGRLNIGSRPAKRKPKGGIESLRAIPWIFSWTQTRFHLPVWLGFGAAFEHAMKKDIKNFRMLKEMYNEWPFFRVTLDLLEMVLAKGDPTIAGLYDQLLVADELKPFGEQLRNNYVETEKLILQVAGHKEILESDPGLKQQLRLRDPYITILNVWQAYTLKRIRDPNFKVTPQPPLSKEFADENQPRGIVKLNPASEYGPGLEDTLILTMKGIAAGMQNTG

SEQ ID NO: 14943 - protein, 227 aa, Pasteurella multocida subsp. multocida str. Pm70
MELVFIRHGFSEWNAKNLFTGWRDVNLTERGIEEAKSAGKKLLEAGFEFDIAFTSVLTRAIKTCNIVLEESNQLWIPQVKNWRLNERHYGALQGLDKKATAEQYGDEQVHIWRRSYDISPPDLDPQDPHSAHNDRRYAHLPSDVVPDAENLKITLERVLPFWEDQIAPALLAGKRVLVTAHGNSLRALAKHIEGISDADIMDLEIPTGQPLVYKLDDNLKVVEKYYL

SEQ ID NO: 14944 - protein, 488 aa, Coptis japonica
MEVLSIAIVSFSFLLFLFFILRDSRPKNLPPGPRPSPIVGNLLQLGDKPHAEFAKLAQKYGELFSLKLGSQTVVVASSPAAAAEILKTHDKILSGRYVFQSFRVKEHVENSIVWSECNDNWKLLRKVCRTELFTPKMIESQSEIREAKAREMVKFLRGKEGEVVKIVEVVFGTLVNIFGNLIFSKDVFDLEDPTGGSVELKEHLWKLLDMGNSTNPADYFPIMGKLDLFGQRRAVAEVLQQIYDVWGVMLKERRGTKGSESKNDFVDVLLNAGLDDQKINALLMELFGAGTETSASTIEWAITELTKKPLVVSKIRLELVNVVGDNTVKESDLPHLPYLQAFVKETLRLHPPTPLLLPRRALETCTVMNYTIPKECQIMVNAWAIGRDPKTWDDPLNFKPERFLSSDVDYKGNDFELIPFGGGRRICPGLPLASQFSNLIVATLVQNFEWSLPQGMSTSELSMDEKFGLTLQKDPPLLIVLKARASNI

SEQ ID NO: 14945 - protein, 119 aa, Vitis vinifera
MGSSGAVKLACVMVICMVVAAPAAVEATITCGQVASAVGPCASYLQKGGSVPAGCCSGIKSLNSAAKTTVDRQAACKCLKTFSGSIPGINFGLASGLPGKCGVSVPYKISPSTDCSKVT

SEQ ID NO: 14946 - protein, 363 aa, Cleome spinosa
MALPVSAIGFEGYEKRLEISFFEPSLFLDPQGKGLRALAKSQLDEILQPAECTIVSSLSNDQVDSYVLSESSLFVYPYKVIIKTCGTTKLLLSIPPLLKLAGELSLAVKSVRYTRGSFICPGGQPFPHRSFSEEVSVLDGHFAKLGLSSSAYVMGNADESKKWHVYSASANDVSRSAGGYKNVYTLEMCMTGLDRKKASVFFKTESGSTTSMTEGSGIRKILPNSAICDFEFEPCGYSMNSVEGDAVSTIHVTPEDGFSYASFESVGYDLNAAELKGMVRRVLECFEPKQFSVAIHADMAEGVHGKAIDMDDYVCVERTMEKLGEERGAVVYQGFERVAAACGSPRSILKCGWSSEDEKDEGI

SEQ ID NO: 14947 - protein, 718 aa, Nicotiana tabacum
MAVPTIALYASPPSSVCSTPYPCQINSHGSYDFDLNGRSSSSSSTSSSSGKSFVGGLSSLFSSPTVKANYSTGTEDLGSLWHDRGDELSSSFRCSSLSSSLKRDQSPVSVFQGPASTSSSGIGSCSRSPPRRIAGDVGSIRSGTGGLFNGFVRHALGSCVDHDPTTFRVLDVDSPSSGLLDELTFNMEEGFLESNSEPYAKDLLLNAQSRHKIFCDDFVIKAFYEAEKAHRGQVRASGDPYLQHCVETAVLLAMIGANSTVVAAGLLHDTLDDTFMTYDYIFRTLGAGVADLVEGVSKLSQLSKLARDFNTASKTVEADRLHTMFLAMADARAVLIKLADRLHNMMTLDALPLAKQQRFAKETLEIFAPLANRLGISTWKEQLENLCFKHLNPDQHNELSSKLVKSFDEAMITSSVGKLEQALKDDSVSYHVLSGRHKSLYSIYCKMLKKKLNMDEVHDIHGLRLIVENKEDCYKALRVVHQLWSEVPGRYKDYIANPKFNGYQSLHTVVLGEGMVPLEVQIRTKEMHLQAEYGFAAHWRYKEGACKHSSFVNQMVEWARWVVTWQCETMNRDQSSVGHTESIQPPCKFPAHSEDCPFSCKPNCGTDGPVFIIMIDNDKMSVQEFPANSTVKDLLERAGRGSSRWTPYGFPLKEELRPRLNHEPVSDPNCKLRMGDVIELTPTIPHKSLTEYREEIQRMYDRGVSPLPAANAVVGLRS

SEQ ID NO: 14948 - protein, 319 aa, Gossypium hirsutum
MELTFPVIDFSKLNGEERAAAMEMIKDACENWGFFELVNHGISHELMDTVERLTKEHYRKCMEQRFKEMVASKGLEAVQSEINDMDWESTFFLRHLPESNMSEIPDLEEDYRKVMKEFAVELEKLAEQLLDLLCENLGLEPGYLKKVFYGSKGPTFGTKVSNYPPCPKPDLIKGLRAHTDAGGIILLFQDDKVSGLQLLKDGQWIDVPPMKHSIVINLGDQLEVITNGKYKSVMHRVIAQTDGTRMSIASFYNPGSDAVIYPAPALLEKEADKSQVYPKFVFEDYMNLYADLKFQAKEPRFEAMKTVESAVNLGPIATV

SEQ ID NO: 14949 - protein, 119 aa, Vitis vinifera
MGSSGAVKLACVMVICMVVAAPAVVEATVTCGQVASALSPCISYLQKGGAVPAGCCSGIKSLNSAAKTTGDRQAACKCLKTFSSSVSGINYGLASGLPGKCGVSVPYKISPSTDCSKVT

SEQ ID NO: 14950 - protein, 112 aa, Synechocystis sp. PCC 6803
MKKVEAIIRPFKLDEVKIALVNAGIVGMTVSEVRGFGRQKGQTERYRGSEYTVEFLQKLKIEIVVDEGQVDMVVDKLVSAARTGEIGDGKIFISPVDSVVRIRTGEKDTEAI

SEQ ID NO: 14951 - protein, 488 aa, Salmonella typhimurium LT2
MKKINHWINGKNVAGNDYFQTTNPATGDVLAEVASGGEAEVNQAVAAAKEAFPKWANLPMKERARLMRRLGDLIDQHVPEIAAMETADTGLPIHQTKNVLIPRASHNFEFFAEVCQQMNGKTYPVDDKMLNYTLVQPVGVCALVSPWNVPFMTATWKVAPCLALGNTAVLKMSELSPLTADRLGELALEAGIPAGVLNVVQGYGATAGDALVRHHDVRAVSFTGGTATGRNIMKNAGLKKYSMELGGKSPVLIFEDADIERALDAALFTIFSINGERCTAGSRIFIQQSIYPEFVKRFAERANRLRVGDPTDPNTQVGALISQQHWEKVSGYIRLGIEEGATLLAGGAEKPTDLPAHLKGGNFLRPTVLADVDNRMRVAQEEIFGPVACLLPFKDEAEGLRLANDVEYGLASYIWTQDVSKVLRLARGIEAGMVFVNTQNVRDLRQPFGGVKASGTGREGGEYSFEVFAEMKNVCISMGDHPIPKWGV

SEQ ID NO: 14952 - protein, 562 aa, Photobacterium profundum
MNNDKRPLYIPYAGPALLETPLLNKGSAFSIEERMFFNLEGLLPEAIESIEEQTERAYQQYQKFDKDMDKHIYLRNIQDTNETLFYRLVENHITEMMPIIYTPTVGAACEDFSNIYRRGRGLFISYPNRDRIEDMLNNASRQNVKVIVVTDGERILGLGDQGIGGMGIPIGKLALYTACGGISPAYTLPVVLDVGTNNPQRLSDPMYMGWRHTRISGQEYDNFVDEFIQAVKRRWPDALIQFEDFAQKNAMPLLERYKNKICCFNDDIQGTAAVTVGSLLAACKAAKSKLSEQRISFLGAGSAGCGIAEAIIAQMVSEGISEAQARSQVFMVDRWGLLIDDMPNLLNFQQALVQKRDTVNEWDLADNNVSLLDVMRNAKPTVLIGVSGVPGLFSEDVIREMHAHCKRPIVFPLSNPTSRVEATPADIINWTDGNALVATGSPFEPVVHNGKTYPIAQCNNSYIFPGIGLGILAVNARRVTDEMLMASSRALAECSPLAINGHGALLPPLEDIQKVSRKIAFAVAKKAIEQGKAPKNSDERILDKIDANFWQSDYRNYKRTSF

SEQ ID NO: 14953 - protein, 148 aa, Brassica napus
  misc_feature (142)..(142): Xaa can be any naturally occurring amino acid
MAENAELLEWPKKDKRRFLHVVYRVGDLDRTIQFYTECFGMKLLRKRDVPEEKYSNAFLGFGPETSNFVVELTYNYGVSSYDIGTGFGHFAISTQDVSKMVEAVRAKGGNVTREPGPVKGGGSVIAFVKDPDGYMFELIQRXPTPEPL

SEQ ID NO: 14954 - protein, 103 aa, Anabaena sp.
MSVYVGNLSYDVTEDSLNAVFAEYGSVKRVQLPTDRETGRMRGFGFVEMGSDAEETAAIEALDGAEWMGRDLKVNKAKPKEDRGSFGGGNRGGYGGGGGPNRY

SEQ ID NO: 14955 - protein, 112 aa, Coxiella burnetii RSA 493
MSEHVHTASDENFETEVLQADMPVLVDFWAEWCQPCKMISPVVEEIAKEYAGRVKVFKLNVDENAQTPTKYGVRGIPSLLIFREGEVVDRKVGALNKSQLAAFLDESLHFSS

SEQ ID NO: 14956 - protein, 398 aa, Wolbachia sp.
MSIDLSLPELPILHPRITVVGVGGAGGNAVNNMIQSNLQGVNFVVANTDAQALEKSLCDKKIQLGINLTKGLGAGALPDVGKGAAEESIDEIMEHIKDSHMLFITAGMGGGTGTGAAPVIAKAAREARAAVKDRAPKEKKILTVGVVTKPFGFEGVRRMPIAELGLEELQKYVDTLIVIPNQNLFRIANEKTTFSDAFKLADNVLHIGIRGVTDLMVMPGLINLDFADIETVMSEMGKAMIGTGEAEGEDRAISAAEAAISNPLLDNVSMKGAQGILINITGGGDMTLFEVDAAANRVREEVDENANIIFGATFDQAMEGRVRVSVLATGIDGRNNKSETSPISQSEDSEKEKFKWPYSQSESTQDKTLETKPAEQVSEGAKWGSNIYDIPAYLRRKK

SEQ ID NO: 14957 - protein, 108 aa, uncultured marine gamma proteobacterium EBAC20E09
MSNVVEVQNRDDFVETVINSDKPVLVDFWAEWCGPCKQLAPLVEAAAEEFKNDITVCKMDVDANRETAAEYGIRSIPTLMIFTNGESVGTEIGALTKPQLDEFIRSKI

SEQ ID NO: 14958 - protein, 238 aa, Magnaporthe grisea 70-15
MGESRLLQLNITKVEQCGTGAALCQVFDSIFLDVPMSRVKFNVNSEYAYIQNFKVLQNTFTKHQVDKPIPVAGLVKCKMQDNLEFLQWVKRFWDQYYPGGEYDAVARRKGAPLGAAGGGGGGAAVRAPVAGGAARRAGGTTPTTGAARAGLGVSKANPALAQENATLKETVVGLERERDFYFSKLRDIELLVQNAVEEDPEIEKQEDGLVKQIQAILYSTEEGFEIPAEGEVDDQETF

SEQ ID NO: 14959 - protein, 343 aa, Bifidobacterium longum DJO10A
MAKTYKIAVIPGDGIGKEVTPWAQKALEKAAEGVADFEYENFDLGAERYLRDGAILPEDEEERIKANDAILLGAVGDPRIKAGILERGLLLKLRFDLDQYVNLRPSKLYKGVTSPLANPGDIDFVVVREGTEGLYCGAGGAVRRNTPQEVATEVSINTAYGVERVVRYAFKLAMKRKKHVTLVHKKNVLVNAGDMWQRIVDKVGEEYPEVTHDYQHIDAATIFLVSDPSRFDVILTDNLFGDILTDEAGSVVGGVGYSASGCINASDEFPSMFEPIHGSAPDIAGQNKANPTAAILSAAMLLEHLGFDDAAKKIHTAVEADIEELGSTVRSTDQVGKDILARM

SEQ ID NO: 14960 - protein, 292 aa, Burkholderia xenovorans LB400
MKPPGRNSDTTKRGDSAAPAPAAWLLTGKVMHERLRPKHHRFTYPVFYVRCDLDRLSSLDSGWFGIDRWRPLSLHQRDHGPRDGSDLATWMRAQLSQAGIEEANGRIWLQAFPRVFGYAFNPVSFWFCHDRDGRLRALLAEVRNTFGERHGYLLSADGNAPITAETRLMCRKVLHVSPFCRVEGGYTFRIKESPNSASVSIDYHDADGLLLRTALGGRLTPLTRATALAALLRQPLLTVGVVARIHWQALRLALRNAPFYGKNPAPGRSADASTDHAAGGQPTAAARSVSPD

SEQ ID NO: 14961 - protein, 440 aa, Methanosarcina mazei Go1
MKIYESYEDLPKLKLPYGNEVFISDSTIRDGSQMPGIVLSREHKIQIYEYLHEIGIEKLEAFVFNKRDRDAVDLMFDKGYEFPEITGWARSSRADIDKILEVDGIEETGILMSVSDTHIHSKMRLSGREEAEERYLDALQYAVDHGLKTRAHLEDMTRADNYGFVFPLVKKIMEIDPDCIIRVCDTVGYGMPFMNIDEPYGIPKIIQHLKKEIGVKNIETHIHDDYGFGSASSIAGFWHGANWTSVTFLGIGERAGNSEMEKILLFLADRVEGFDKYNLEPVTRFAEFMEKELGLRVPRNKAVVGKNIFAHESGIHAAGVLKNPFNYEPYPPELVGGTRLLLIGDSSGLEVIRYKVQETLNNLLDVETVVEKDDRRLLKIQKEIQKLYDKEERVSCISDEELLAYVEKYFLYQPISDPARTGRGKLKNRGKIQEPVEEKE

SEQ ID NO: 14962 - protein, 576 aa, Listeria monocytogenes str. 1/2a F6854
MKKVKASETLVQTLKNWGIDHVYGLPGDSIDTVVDALRKEQEAIEFIHVRHEEVATLAAAAYTKLTGKIGVALSIGGPGAIHLLNGMYDAKMDHVPILVLAGQVTTDVLNTGFFQEVNLPAIFEDVAVYNKQIDNAETLADVVDEAIRTAYKEKGVAVLTIPNDIPSQVIKASLEAKPVKFEQENPKLDEAAIQEAVTLIEKAEKPVILAGLGTKHAGPELIAFSEKLKIPIIHSLPAKTIVPDDHPNALGNLGKIGTKPAYEAMQETDLLLMFGNDYPYSDYLPKKADCIQIDIDPAKISKRFPATVGLVGDAAEIISDLTAKIAPVEERKFLQACQENMQEWWKWLEEDIAQTSDPIAPEVVMANIQKIADKDAVFSIDVGTATVWSTRYLHLTPENDFIVSAWLGTMGCGLPGAIAAKKAFPDRQAIAIVGDGGFSMVMQDFVTAVGLNMPMIVVVLNNQQLSFIKYEQQSAGELNYAIDLPDINYAKFAESCGGIGFRVEKMADLEAAFENAKLATKPVIIDVSVDSAAAPLPGKIVMDEALGYTKFEIQSVLEDHRFAKMPPLKTILRRFL

SEQ ID NO: 14963 - protein, 212 aa, Oryza sativa (japonica cultivar-group)
MSAQLLERALEASGDDIDSAIKSLNELCLESAAVGDSNSVLPAALKLSAEGVVNNGHLDVLTENPHATENFQTNHHGSEWVELFVREMMSASDIDDARARASRALEALEKSIMERAGTEAVHNLHKENVMLKEQLAIYLRENAVLKRAVAIQHERQKEFDERTQEVHSLKQLVLQYQEQIKTLEINNYALRVHLKQAQQNNSMPGRFPPDVF

SEQ ID NO: 14964 - protein, 342 aa, Methanosarcina mazei Go1
MTKTAAVIKGDGVGPELVDAMLKVAEASGTDVEFVMCEAGAGWWEEHGGNSLIPEETWQILDSSDACFKGPTTTPGGIGSPRSVAVSIRRKYDLYANVRPIKTFPNSSAPLGDVEMVCVREGTEGLYIGEEIQLTDDVSIAIRKITRTASSKIARYAFEDAKKRGYDTVVPIHKSNILKLTCGSFLEEVEKVAHDFPDIEVWPYHIDNIAQQLIKNPQIFNKKVLLSTNLFMDVISEECSALVGSIGLIYSANIGDNFAMFEPAHGSAPKYAGLDKVNPVATVLAGAWMLDYLGEKDKSDAIFKATERVISEGKYVTYDLGGSAKLSQMADEIAKYTEEILK

SEQ ID NO: 14965 - protein, 512 aa, Paenibacillus polymyxa
MKELKSNYSETYRPQFHYSPEKNWMNDPNGLVYFEGEYHLFYQHTPHDTQPDFGNMHWGHAVSKDLVHWTELPPAIPPGEDGAIFSGSAVVDKNNTSGFFDEEGSGLVAIYTNEGNKSQPGKPQVQSIAYSKDKGRTWTKYEGNPVLFPTDTLDFRDPKVIWHDESSMWIMVLAVRDRVEFYTSPNLKEWSFASEFGSDIPHIHRGIFECPDIFRIQVDEDLNTTKWILMLSVGDRNGVNPDDPEPPAGGSGMMYFVGSFDGKSFTPDEALESIDTIKWVDYGSDFYAAVSWNGISNEDGRKIWLGWMNNWRYATTLPSKEWRGKTSIPRELQLRTYPEGLRLIQTPINELSQLRKPILSLQDLTIKPGMNVLSDISAAKAEIIAEFEIGTAVEFGFKVRKSANQETIIGYNISNEELFVDRTKSSATDFHSDFTAIHKATMKPEHERIQLSIYLDWSSVEVFGNHGKAIISDMIFPDFESKGLELYAIGGELRVVSLQINDLVSIWGNENV

SEQ ID NO: 14966 - protein, 481 aa, Staphylococcus epidermidis RP62A
MKKFNIKHSFMLTGFAFMVTTSLFSHQAHAEGNHPIDINFSKDQIDRNTAKSNIINRVNDTSRTGISMNSDNDLDTDIVSNSDSENDTYLDSDSDSDSDSDSDSDSDSDSDSDSDSDSDSDSDSDSDSDSDSDSDSDSDSDSDSDSDSDSDSDSDSDSDSDSDSDSDSDSDSDSDSDSDSDSDSDSDSDSDSDSDSDSDSDSDSGTSSGKGSHTGKKPGNPKGNTNRPSQRHTNQPQRPKYNQTNQNNINNINHNINHTRTSGDGAPFKRQQNIINSNSGHRNQNNINQFIWNKNGFFKSQNNTEHRMNSSDNTNSLISRFRQLATGAYKYNPFLINQVKNLNQLDGKVTDSDIYSLFRKQSFRGNEYLNSLQKGTSYFRFQYFNPLNSSKYYENLDDQVLALITGEIGSMPELKKPTDKEDKNHSAFKNHSADEITTNNDGHSKDYDKKKKIHRSLLSLSIAIIGIFLGVTGLYIFRRKK

SEQ ID NO: 14967 - protein, 811 aa, Arabidopsis thaliana
MADIIGGEVVTELVRQLYAVSQKTLRCRGIAKNLATMIDGLQPTIKEIQYSGVELTPHRQAQLRMFSETLDKCRKLTEKVLKSSRWNMVRQLLHVRKMENLQSKVSSFLNGQLLVHVLADVHHVRADSEFRFDRIDRKVDSLNEKLGSMKLRGSESLREALKTAEATVEMVTTDGADLGVGLDLGKRKVKEMLFKSIDGERLIGISGMSGSGKTTLAKELARDEEVRGHFGNKVLFLTVSQSPNLEELRAHIWGFLTSYEAGVGATLPESRKLVILDDVWTRESLDQLMFENIPGTTTLVVSRSKLADSRVTYDVELLNEHEATALFCLSVFNQKLVPSGFSQSLVKQVVGECKGLPLSLKVIGASLKERPEKYWEGAVERLSRGEPADETHESRVFAQIEATLENLDPKTRDCFLVLGAFPEDKKIPLDVLINVLVELHDLEDATAFAVIVDLANRNLLTLVKDPRFGHMYTSYYDIFVTQHDVLRDVALRLSNHGKVNNRERLLMPKRESMLPREWERNNDEPYKARVVSIHTGEMTQMDWFDMELPKAEVLILHFSSDKYVLPPFIAKMGKLTALVIINNGMSPARLHDFSIFTNLAKLKSLWLQRVHVPELSSSTVPLQNLHKLSLIFCKINTSLDQTELDIAQIFPKLSDLTIDHCDDLLELPSTICGITSLNSISITNCPRIKELPKNLSKLKALQLLRLYACHELNSLPVEICELPRLKYVDISQCVSLSSLPEKIGKVKTLEKIDTRECSLSSIPNSVVLLTSLRHVICDREALWMWEKVQKAVAGLRVEAAEKSFSRDWLDD

SEQ ID NO: 14968 - protein, 515 aa, Triticum aestivum
  misc_feature (143)..(143): Xaa can be any naturally occurring amino acid
  misc_feature (297)..(297): Xaa can be any naturally occurring amino acid
MATAVHQLSFSAPSAGARRRQSRASASASTTDRHEVLSPNRRLPLRKVPGEHGPPLLGALKDRLEYFYGPGGRDGFFAARVRAHRSTVVRLNMPPGPFVAKDPRVVALLDAASFPVLFDTSLVDKTDLFTGTFMPSTDLTGGXYRVLSYVDPAEPNHAPLKSLLFHLLTHRRQHVIPTFREVYGGLFGRMENDLARVGKADFGNYNDDAAFGFLCQALLGRDPVDSPLRDEGPKLVAKWLLFQISPLLSLGLAGLPTLVEDGLLHSFRLPPALIKKDYGRLADFFRDAGKAVIDEGXERLGIAREEAVHNILFAMCFNSFGGIKILFPSLVKWLGRAGGRVHGRLATEVRAVVRANGGEVTMRALAEMPLVKSAVYEALRIEPPVAMQYGRAKRDMVVESHDYGYEVREGELLFGYQPMATKDPRVFPRAEDYVPDRFLGEDGERLLRYVVWSNGPESATPTLQDKQCAGKDFVVLIARLLVAELFLRYDSFDVQVGSSPLGSSVTITSLKKATF

SEQ ID NO: 14969 - protein, 445 aa, Flavobacteria bacterium BBFL7
MLVLKFGGTSVGSVENMTHVKNIINDGTKKVVVLSAMSGTTNALVEISEHIRLKERDSAHVLIQQLASSYQNTIEQLLNDSALINESQEYVNKVFAGLIELVNSEHTTLIYNQIVAQGELLSTFLFSRFLMQEGINAALLPALDFMRIDNNDEPDSFYIKQSLNRILNENSEADIYITQGFICLDVQGNISNLQRGGSDYTASIVGAAIEANEVQIWTDIDGFHNNDPRFVENTTAISNISFDEAAELAYFGAKILHPQTVIPVKDLNIPVRLKNTMSPDSYGTLITHHVHGEGIKAIAAKDGIYAIKIKSARMLQAHGFLKKVFEIFEKYETSIDMITTSEIAVSLTIDNPLHLDVIVEELEKVASVDVDQGMSIVCLVGNNIIYHQDTPHLFQVLQDVPVRMISYGGSNNNISLLINTDQKLNTLQKLQGYVFESQLEKAVAY

SEQ ID NO: 14970 - protein, 403 aa, Sinorhizobium meliloti
MLTQKTKDIVKATAPVLAQHGYAIIQHFYKRMFQAHPELKDIFNMAHQERGEQQQALARAVYAYAANIENPESLSAVLKDIAHKHASIGVRPEQYPIVGEHLLASIKEVLGDAATDEIISAWAQAYGNLADILAGMESELYGRSEERAGGWAGWRRFIVREKNPESDVITSFVLEPADGGPVADFEPGQYTSVAVQVPKLGYQQIRQYSLSDSPNGRSYRISVKREDGGLGTPGYVSSLLHDEINVGDEPKLAAPYGNFYIDVSATTPIVLISGGVGLTPMVSMLKKALQTPPRKVVFVHGARNSAVHAMRDRLKEASRTYPDFKLFIFYDEPLPTDIEGRDYDFAGLVDVENVKDSILLDDADYYICGPVPFMRMQHDKLLGLGITEARIHYEVFGPDLFAE

SEQ ID NO: 14971 - protein, 468 aa, Propionibacterium acnes KPA171202
MAEVFENAALILLFILVGGVFSAAEMALVSLRDSQIKQLAATRGSRGRSIQKLQSNPNRFLSAVQIGVTLSGFLASAFGGATLASELAPVFESWGMSASVAATVALVTITVIISYFSIVLGELVAKRLAMQRAEGFSVALGPMVNGIATLFRPIIWFLGVSTDLVVKILGGDPTAAREEVTDEEIRSMVVSSATLGDEERTILDEVFAVGEKSLREVMVPRTEVDFLQGSMKAVQAAQVVRDGSHSRYPVIDGSADRVLGFVHVRDLLELNPQIRTSRVSQLVRAVVSLPDTVKALKALTEMRRTNAHLAIVLDEYGGTAGIVTLEDLVEEIVGDITDEYDTVEPSDLAHVRQRDIDGLTTLEEFSDKVGLVLPEGPYDTLAGYFMAQTGEVPTKGAQVDVHLDPVGYVPDENDEDVEPDPNIELTVTEVDGLRAAWLRIRRLDAPGASTVPAGTSTIPRPEREAASA

SEQ ID NO: 14972 - protein, 422 aa, Oryza sativa (japonica cultivar-group)
MVEGPKFAGMMGGVVGGAGGHDDIGGNFCDMAYYRKLGESSNMSIDSLNSLQTSTHGGGSVAMSVDNSSVGSSDSHTRMLNHPGLRGHVAANYSVGHSIFRPGRVSHALSEDALARALMDPRYPTETLKDYEEWTIDLGKLHMGMPFAQGAFGKLYKGTYNGEDVAIKLLERPEADPERAGLMEQQFVQEVMMLATLRHPNIVKFIGACRKPMVWCIVTEYAKGGSVRQFLMKRQNRSVPLKLAVKQALDVARGMAYVHALGFIHRDLKSDNLLISGDKSIKIADFGVARIEVKTEGMTPETGTYRWMAPEMIQHRPYDQKVDVYSFGIVLWELITGMLPFANMTAVQAAFAVVNKGVRPAIPQDCLPVLSEIMTRCWDPNPDVRPPFTEVVRMLEHAEVVILSTVRKARFRCCISQPMTTD

SEQ ID NO: 14973 - protein, 565 aa, Escherichia coli O157:H7
MEPKTKKQRSLYIPYAGPVLLEFPLLNKGSAFSMEERRNFNLLGLLPEVVETIEEQAERAWIQYQGFKTEIDKHIYLRNIQDTNETLFYRLVNNHLDEMMPVIYTPTVGAACERFSEIYRRSRGVFISYQNRHNMDDILQNVPNHNIKVIVVTDGERILGLGDQGIGGMGIPIGKLSLYTACGGISPAYTLPVVLDVGTNNQQLLNDPLYMGWRNPRITDDEYYEFVDEFIQAVKQRWPDVLLQFEDFAQKNAMPLLNRYRNEICSFNDDIQGTAAVTVGTLIAASRAAGGQLSEKKIVFLGAGSAGCGIAEMIIAQTQREGLSEEAARQKVFMVDRFGLLTDKMPNLLPFQTKLVQKRENLSDRDTDSDVLSLLDVVRNVKPDILIGVSGQTGLFTEEIIREMHKHCPRPIVMPLSNPTSRVEATPQDIIAWTEGNALVATGSPFNPVVWKDKIYPIAQCNNAFIFPGIGLGVIASGASRITDEMLMSASETLAQYSPLVLNGEGLVLPELKDIQKVSRAIAFAVGKMAQQQGVAVKTSAEALQQAIDDNFWQAEYRDYRRTSI

SEQ ID NO: 14974 - protein, 501 aa, Sinapis alba
MSTNKKTIVWFRRDLRIEDNPALAAAAHEGSVFPVFIWCPEEEGQFYPGRASRWWMKQSLAHLRQSLKALGSELTLIKTHSTVSAILDCVRATGATKVVFNHLYDPVSLVRDHTVKEKLVERGISVQSYNGDLCMSPGRYTVKRANLLLVLILTGKKCLDMSVESVVLPPPWRLMPLSAAETVWACSVEELGLENEAEKPSNALLTRAWSPGWSNADKILNEFIEKQLIDYAKNSKKVVGNSTSLLSPYLHFGEISVRRVFQCARMKQIIWARDKNGEGEESADLFLRGIGLRDYSRIICFNFPFTHEQSLLSHLRFFPWDADVDKFKAWRQGRTGYPLVDAGMRELWATGWMHNRIRVIVSSFAVKFLLLPWKWGMKYFWDTLLDADLECDIIGWQYISGSLPDGHELDRLDNPAIQGAKYDPEGEYIRQWLPELARLPTEWIHHPWDAPLTVLKASGVELGTNYAKPIVVIDTARELLTKAISRTREAQIMIGACGDEM

SEQ ID NO: 14975 - protein, 565 aa, Escherichia coli O6
MEPKTKKQRSLYIPYAGPVLLEFPLLNKGSAFSMEERRNFNLLGLLPEVVETIEEQAERAWIQYQGFKTEIDKHIYLRNIQDTNETLFYRLVNNHLDEMMPVIYTPTVGAACERFSEIYRRSRGVFISYQNRHNMDDILQNVPNHNIKVIVVTDGERILGLGDQGIGGMGIPIGKLSLYTACGGISPAYTLPVVLDVGTNNQQLLNDPLYMGWRNPRITDDEYYEFVDEFIQAVKQRWPDVLLQFEDFAQKNAMPLLNRYRNEICSFNDDIQGTAAVTVGTLIAASRAAGGQLSEKKIVFLGAGSAGCGIAEMIIAQTQREGLSEEAARQKVFMVDRFGLLTDKMPNLLPFQTKLVQKRENLSDWDTDSDVLSLLDVVRNVKPDILIGVSGQTGLFTEEIIREMHKHCPRPIVMPLSNPTSRVEATPQDIIAWTEGNALVATGSPFNPVVWKDKIYPIAQCNNAFIFPGIGLGVIASGASRITDEMLMSASEMLAQYSPLVLNGEGLVLPELKDIQKVSRAIAFAVGKMAQQQGVAVKTSAEALQQAIDDNFWHAEYRDYRRTSI

SEQ ID NO: 14976 - protein, 108 aa, Vibrio cholerae O1 biovar eltor str. N16961
MSDKILQLTDDGFENDVIKAAGPVLVDFWAEWCGPCKMIAPILDEVADEYAGKLTIGKLNIDHNAGTPPKFGIRGIPTLLLFKDGSVVATKVGALSKTQLKEFLDANL

SEQ ID NO: 14977 - protein, 563 aa, Pseudomonas syringae pv. phaseolicola 1448A
MTKTSRPLYISYAGPSLLEMPLLNKGSAFTPQERVEFNLIGLLPQNVETIEEQVTRVYSQYKQCASDLDKHIYLRSIQDNNETLFFRLLDSHLDEMLPIIYTPTVGQACQEFSKIYRTHRGLFISYPERDRIDDILRSATKDRIKIIVVTDSERILGLGDQGIGGMGIPIGKLSLYTACGGISPAYTLPIVLDVGTNNRELLDDPMYMGWRHERVSGKEYEDFIALFIDAVQRRWPDVLLQFEDFAQSNAMPLLEKYRDELCCFNDDIQGTASVAVGTLLAACKAKNETLGQQKVVFVGAGSAGCGIAEHIIAAMRIEGLSESEARKRIFMVDRFGLLTEGMDNLLDFQKRLAQKTADVSGWTAGTEAFPQLLDVVTNAGATVLIGVSGQRGLFTEQVIRELHKHCAKPLVMPLSNPTSKVEATPEEILRWTDGNALVATGSPFAPVEINGRTVHIAQCNNSYIFPGIGLGVVACKASRITDRMLMAASNALAECSPMVTGQGDAVLPPLKEIQQVSRKIALAVAKEAQAEGLALETSEEALLEAIERNFWLPGYRAYRRRSV

SEQ ID NO: 14978 - protein, 563 aa, Pseudomonas syringae pv. tomato
MTTTSRPLYISYAGPSLLEMPLLNKGSAFTPQERIEFNLIGLLPQNVETIEEQVTRVYSQYKQCASDLDKHIYLRSIQDNNETLFFRLLDSHLDEMLPIIYTPTVGQACQEFSKIYRTHRGLFISYPERDRIDDILRSATKDRIKIIVVTDSERILGLGDQGIGGMGIPIGKLSLYTACGGISPAYTLPIVLDVGTNNRELLDDPMYMGWRHERVSGKEYEDFIALFIDAVQRRWPDVLLQFEDFAQSNAMPLLEKYRDELCCFNDDIQGTASVAVGTLLAACKAKNETLGQQKVVFVGAGSAGCGIAEHIIAAMRIEGLSESEARKRIFMVDRFGLLTEGMGNLLDFQLRLAQKSADVAGWTAGTETFPQLLDVVTHAGATVLIGVSGQRGLFTEQVVRELYKHCAKPLVMPLSNPTSKVEATPEEILRWTDGNALVATGSPFAPVEINGRTVHIAQCNNSYIFPGIGLGVVACKASRITDRMLMAASNALAECSPMVTGQGDAVLPPLKEIQQVSRKIALAVAKEAQAEGLALETSEEALLAAIERNFWLPGYRAYRRRSV

SEQ ID NO: 14979 - protein, 120 aa, Oryza sativa
  misc_feature (50)..(50): Xaa can be any naturally occurring amino acid
  misc_feature (75)..(75): Xaa can be any naturally occurring amino acid
  misc_feature (79)..(79): Xaa can be any naturally occurring amino acid
ACGRSRAQLVLVAVVAALLLVTTYADVDINCWQGNCALGPCLTYARGGAXPSEACCIGVRSLKAATSGTTHRRTXCNCXLKNAARGIKGLNAGNADSIPSKCDFRGPYTITASIDCSRVS

SEQ ID NO: 14980 - protein, 331 aa, Vibrio parahaemolyticus RIMD 2210633
MTIKVGINGFGRIGRFVFRAAQERADIEVVGINDLIDVEYMAYMLKYDSTHGRFNGTVEVEGGNLIVNGKTVRVTAERNPADLKWDEIGVDVVAEATGLFLTDETARKHIEAGAKKVVLTGPSKDATPMFVMGVNHATYAGQDIVSNASCTTNCLAPIAKVLNDKFGIESGLMTTVHATTATQKTVDGPSAKDWRGGRGASQNIIPSSTGAAKAVGVVLPELNGKLTGMAFRVPTANVSVVDLTVNLKEGASYEAICAAMKEASEGELKGVLGYTEDQVVSQDFIGEVQTSVFDAKAGIALTDNFVKVVSWYDNEIGYSNKVLDLIAHISK

SEQ ID NO: 14981 - protein, 563 aa, Pseudomonas syringae pv. syringae B728a
MTKTSRPLYISYAGPSLLEMPLLNKGSAFTPQERVEFNLIGLLPQNVETIEEQVTRVYSQYKQCASDLDKHIYLRSIQDNNETLFFRLLDSHLDEMLPIIYTPTVGQACQEFSKIYRTHRGLFISYPERDRIDDILRSATKDRIKIIVVTDSERILGLGDQGIGGMGIPIGKLSLYTACGGISPAYTLPIVLDVGTNNRELLDDPMYMGWRHERVSGKEYEDFIALFIDAVQRRWPDVLLQFEDFAQSNAMPLLEKYRDELCCFNDDIQGTASVAVGTLLAACKAKNETLGQQKVVFVGAGSAGCGIAEHIIAAMRIEGLSESEARKRIFMVDRFGLLTESMDNLLDFQKRLAQKTADVSGWTAGSEAFPQLLDVVTHAGATVMIGVSGQRGLFTEQVIRELHKHCAKPLVMPLSNPTSKVEATPEEILRWTDGNALVATGSPFAPVEINGRTVHIAQCNNSYIFPGIGLGVVACKASRITDRMLMAASNALAECSPMVTGKGDAVLPPLKEIQQVSRKIALAVAREAQAEGLALETTEEALLEAIERNFWLPGYRAYRRRSV

SEQ ID NO: 14982 - protein, 478 aa, uncultured bacterium 580
MKPKTNIVWLKRDLRLTDHAPLYEATCRDEQFLVLYIYEPSLINDSHTDERHWRFIQQSLSVMEKILAKQSKQLSIAYGEADQIFSEIINQHEITNVFSHEETGLKLTYERDKKLKKIFNAKKIQWHEYQTNAVIRGLNNRKTWEKQWNKVMREEIKTINLAEANIISHNFPNYSIPKFRNDLNYQPGGCLPGQKEMHDFFETRGQDYFKFISKPDRSRTSCSRLSPYIAYGNLSMREVYQTLLKSWNKTGWRRSMAALSSRLHWHCHFIQKYESEIDIEDLPINRGYKDFPYKVINCEHEDFLAWANGETGYPLIDASMRALKKTGYLNFRMRAMVVSFACHYFMIHWKLVAKHLATLFLDFEPGIHYPQIQMQAGVTGINTIRIYNPSKQLQDHDPDTKFIRDWIDELSDQDKEYILGLPDDNFDLFSNSQNFYPTPAYDFFERTKYAKNLLWQWKKSSLVKSYNSKILSRHVKVR

SEQ ID NO: 14983 - protein, 420 aa, Glomerella cingulata
MTTNGSDKPQVQPCRYKVGKTLGAGSYSVVKECVHIDTGRYYAAKVINKRLMAGREHMVRNEIAVLKKVSMGHQNILTLVDYFETMNNLYLVTDLALGGELFDRICRKGSYYESDAADLIRATLSAVAYLHDHGIVHRDLKPENLLFRTPEDNADLLIADFGLSRIMDEEQFHVLTTTCGTPGYMAPEIFKKIGHGKPVDVWALGVITYFLLCGYTPFDRDSDFEEMQAILNADYSFTPFDYWRGVSEHAKDFIRKCLTIDPKKRMTAHEALQHPFVAGYLNGEGEGQNLLPTVKKNFNARRTLHAAIDTVRAINKLREGQQNLMDGAKSREPDRGLKSPPNAKKDDSAISMGNTNHKDSGYGTQPEADNQNDVCHDRCGTTPTSVPASLRVRAVSRTRSLRQAKDCGAVPQCDDSLEAV

SEQ ID NO: 14984 - protein, 1001 aa, Prochlorococcus marinus
MTELDNFSMLEASKQVPDRKESSQILADHMSGRLLQKRLELVEDLWETVVRSECPLEQVERLLRLKQLSNSSGIVGEEQTNQINEIVELIKEMDLAEAISAARAFSLYFQLVNILEQRIEEDSYLESISRGQEEKINTSIDPFAPPLASQTAPATFSELFDRLRRLNVPPGQLEELLREMDIRLVFTAHPTEIVRHTVRHKQRRVASLLQQLQSDEVFSLSERDNLRLQLEEEIRLWWRTDELHQFKPTVLDEVDYALHYFQQVLFDAMPQLRRRICSALSQSYPDIDVPQEAFCTFGSWVGSDRDGNPSVTPEITWRTACYQRKLMLDRYMHSVQELRNQLSISMQWSQVSTQLLESLEMDRVRFPHIYEERAARYRLEPYRLKLSYTLERLKFTQQRNQELSEAGWATTIERTNVSNNPDEDLHYCSIDEFRRDLELIRNSLVATNLSCEQLDTLLTQVHIFAFSLASLDIRQESTRHSEAIDELTRYLNLPKSYIEMTEDEKVIWLMDELQTLRPLIPSAVQWSKSTEETFAVFRMLDRLQKEFGSRICRSYVISMSHTVSDLLEVLLLAKEYGLVDISSESSDLLVIPLFETVEDLQHAPSVMEELFQSEIYLKLLPRVGEKSQPLQELMLGYSDSNKDSGFLSSNWEIHQAQIALQNLASSHGVALRLFHGRGGSVGRGGGPAYQAILAQPSGTLKGRIKITEQGEVLASKYSLPELALYNLETVTTAVLQNSLVTNQWDATPSWNELMTRLAVRSRQHYRALVHDNPDLVAFFQEVTPIEEISKLQISSRPARRKTGAKDLSSLRAIPWVFGWTQSRFLLPSWFGVGTALEEELKSDPDHIELLRMLNQRWPFFRMLISKVEMTLSKVDLEVAYHYMTSLGSHENREAFNCIFEIISNEYKLTRRLVLEITGKPKLLSADPALQLSVDLRNRTIVPLGFLQVALLCRLRDQNRQPPMSETLLTEGDIGRTYSRSELLRGALLTINGIAAGMRNTG

SEQ ID NO: 14985 - protein, 565 aa, Salmonella choleraesuis
METTTKKARSLYIPYAGPVLLEFPLLNKGSAFSVEERRNFNLSGLLPEVVESIEEQAERAWLQYQGFKTEIDKHIYLRNIQDTNETLFYRLVQNHLEEMMPVIYTPTVGAACERFSEIYRRARGVFISYPNRHNMDDILQNVPNHNIKVIVVTDGERILGLGDQGIGGMGIPIGKLSLYTACGGISPAYTLPVVLDVGTNNQQLLNDPLYMGWRHPRITDDEYYAFVDEFIQAVKQRWPDILLQFEDFAQKNAMPLLTRYRDEICSFNDDIQGTAAVTVGTLIAASRAAGSQLSEQKIVFLGAGSAGCGIAEQIIAQTQREGLSEDAARQNVFMVDRFGLLTDRMPNLLPFQAKLVQKCDNLQHWDTENDVLSLLDVVRNVKPDILIGVSGQTGLFTEEIIREMHKHCPRPIVMPLSNPTSRVEATPQDIIVWTEGNALVATGSPFSPVIWKDKVYPIAQCNNAYIFPGIGLGVIASGASRITDEMLMSASETLAKHSPLVNNGEGLVLPALKDIQVVSRAIAFAVGKMAQQQGVAVKTSAEALQQAIDDNFWKPEYRDYRRTSI

SEQ ID NO: 14986 - protein, 355 aa, Apium graveolens
MAPSTITALSQEKTLNLDFVRDEDERPKVAYNQFSNEVPIISLAGLDDDSNGRRAEICRKIVEAFEEWGIFQVVDHGIDSGLISEMSRLSREFFALPAEEKLVYDTTGEKKGGFTISTHLQGDDVRDWREFVTYFSYPISARDYSRWPKKPEGWRSTTEVYSEKLMVLGAKLLEVLSEAMGLEKEALTKACVEMEQKVLINYYPTCPEPDLTLGVRRHTDPGTITILLQDMVGGLQATRDGGKTWITVQPVEGAFVVNLGDHGHYLSNGRFRNADHQAVVNSTSTRLSIATFQNPAQNAIVYPLKIREGEKAILDEAITYAEMYKKNMTKHIAVATQKKLAKEKRLQDEKAKMKI

SEQ ID NO: 14987 - protein, 617 aa, Gossypium hirsutum
MGLCTSKPSPNPSDSTNASINTRNNDIYRKPNSVSASPLPDGVNSKEDQGKQGEEEKESSNPNNEGKKSPFFPFYSPSPAHYLFSKKSPARSSTNSTPKRFFRRPFPPPSPAKHIRAVLARRHGSVKPNEAAIPEGSDAEAAGATGTGLDKSFGFSKHFGSKYELGDEVGRGHFGYTCTAKFKKGELKGQQVAVKVIPKAKMTTAIAIEDVRREVKILRALSGHSNLVQFYDAYEDHDNVYIVMELCEGGELLDRILSRGGKYTEDDAKAVMIQILNVVAFCHLQGVVHRDLKPENFLFTSKDENSQLKAIDFGLSDFVKPDERLNDIVGSAYYVAPEVLHRSYSTEADVWSIGVIAYILLCGSRPFWARTESGIFRAVLKADPSFDEAPWPSLSSEARDFVKRLLNKDPRKRLTAAQALSHPWIKKYNDVKVPLDILIFKLMKAYLRSSSLRKAALRALSKTLTVDELFYLKEQFALLEPNKNGTISLENIKAVLMKNATDAMKDARIPEFLASLNALQYRRMDFDEFCAAALTVHQLEALDRWEQHARCAYEIFEKEGNRPIVIEELASELGLSPSVPVHAVLHDWIRHTDGKLSFLGFVKLLHGVSSRTIAKAQ

SEQ ID NO: 14988 - protein, 576 aa, Oryza sativa
YSTAERNYARGLVSSSSSPQSKPPKQSQNPSRHRWGARASRHRQSPDQSQSQSPSPHHKHHHHHQTTRAPKPKPKPQPPPPQQPRSQPPPPPRHQPQQAPQQAAAEDGVGRVLGRPMEDVRATYTFGRELGRGQFGVTYLATHKPTGRRYACKSIAARKLARPDDLDDVRREVHIMHHLTGHRNIVELRGAYEDRHSVNLVMELCEGGELFDRIIARGHYSERAAAALCREIVSVVHSCHSMGVMHRDLKPENFLFLNKREDSPLKATDFGLSVFFKPGEQFRDLVGSAYYVAPEVLKRLYGAEADIWSAGVILYILLSGVPPFWAENEDGIFDAVLQGHIDFSSEPWPSISSGAKDLVKRMLRQDPKERLTAAEILNHPWIREDGEAPDKPLDITVISRMKQFRAMNKLKKVALKVVAENLSEEEIVGLKEMFKSLDTDNSGTITLEELRAGLPKLGTKISESELRQLMEAADVDGNGSIDYVEFISATMHMNRLEKEDHIYKAFEYFDKDHSGFITVDELEEALTKYDMGDEATIKEIIAEVDTDHDGRINYQEFVAMMKNNSPEIVPNRRRMF

SEQ ID NO: 14989 - protein, 94 aa, Arabidopsis thaliana
  misc_feature (25)..(25): Xaa can be any naturally occurring amino acid
  misc_feature (60)..(60): Xaa can be any naturally occurring amino acid
  misc_feature (65)..(65): Xaa can be any naturally occurring amino acid
PLWLRHLLKYLPPQATMVAPFTGLXSSTSFPVTRKANNYITSITNNTGRLSCIKVWPPIXRRSFXTLSYLPDLSDLELPKEVDYLLLNKYIPCV

SEQ ID NO: 14990 - protein, 261 aa, Pseudomonas aeruginosa UCBPP-PA14
MSADPSPVVLLEFPAADIALLRLNRPQARNALNDEVRQRLASHFQTLGADPAIRVIVLTGDSRCFAAGADLRDLSTSTAIGLYGRHSERYWEAIARCPKPVIAAVNGFALGGGCELAMHCDLIVAGESAQFAQPEIKVGVMPGAGGTQRLVRAVGKFQALRMLFTGCLVKAPQALAMGLVSEVVADESTLARALELATEIARLPPLALAQIKEVVLAGADLPLDSALALERKAFQLLFDSQDQKEGMHAFLEKRPPNYQGK

SEQ ID NO: 14991 - protein, 365 aa, Conium maculatum
MAPTTITALAQEKTLNLAFVRDEDERPKVAYNEFSNEIPIISLAGLENDSDGRRPEICRKIVEAFENWGIFQVADHGIDSALISEMSRLSREFFALPAEEKLRYDTTGGKRGGFTISTHLQGDDVRDWREFVTYFSYPIDARDCSRWPDKPEGWRSITEVYSERLMVLGAKLLEVLSEAMGLEKEALTKACVNMEQKVLINYYPTCPEPDLTLGVRRHTDPGTITVLLQDMVGGLQATRDGGKTWITVQPVEGAFVVNLGDHGHYLSNGRFKNADHQAVVNSSSSRLSIATFQNPAQNAIVYPLKIREGEKAILDEAITYAEMYKKNMTKHIEVATLKKLAKEKRLQDEKANMEKKSKSAHGISA

SEQ ID NO: 14992 - protein, 519 aa, Gossypium hirsutum
IKRIMLPPSKREFKDLFVVFELMESDLHQVIKANDDLTREHHQFFLYQMLRAMKYMHTANVYHRDLKPKNILANANCKLKVCDFGLARVAFNDTPTTVFWTDYVATRWYRAPELCGSFFSKYTPAIDIWSIGCIFAEVLTGKPLFPGKSVIHQLELITDLIGTPSLETISGVRNDKARKYLSEMRKKKPVPFSQKFPNADPLAVRLLQRLLAFDPKDRPTAEEALADPYFKGLSKIEREPSCQPISKLEFEFERRRVTKEDVRELIYREALEYHPQLLKDYLNGHEGSNFLYPSPVGQFKKQFAYLEENGGRSAPVFPLERKHVSLPRSTVHSNGITPNTQSTSVSYENRQDREADARKAMDVISSKPKPTRPPPRVPSEVLSCPYSKPGRVVGSVVPYEDVKNIKDGYHAKNFYRNAVPPQNVSPHCFLLNQEKSGTQTDRNLQTKPQQQFSMVAKPSPGTAFDMNSNPYYRTQAKTERRLPIDAKLLQAQSQFGAVGAAAVAVAAHRNAGTVHYGLS

SEQ ID NO: 14993 - protein, 585 aa, Glycine max
MADEAKAKGNAAFSSGDYPAAIHHFSDAIALAPTNHVLYSNRSAAYASLQNYTDALADAKKTVELKPDWSKGYSRLGAAHLGLSQYGDAVSAYEKGLKIDPNNEPLKSGLADAQKALAAASRPRSSAANPFGDAFSGPEMWARLTADPTTRAYLQQPDFVKMMQDIQRDPNNLNLHLKDQRIMQALGVLLNVKIQTPPTGADTDMPDSPSPSAAASERKRAAEAEPAKQPESEPEPEPESMELTGEEKGAKQRKAEALKEKDAGNAAYKKKDFDTAIQHYTKALELDDEDISYLTNRAAVYLEMGKYEECIKDCDKAVERGRELRSDFKMIARALTRKGNALVKLAKCSKDYEPAIETYQKALTEHRNPDTLKKLNEAEKAKKELEQQEYFDPKLADEEREKGNEFFKQQKYPEAVKHYTESIRRNPKDPRAYSNRAACYTKLGAMPEGLKDAEKCIELDPTFVKGYTRKGAVQYFMKEYEKSLETYREGLKYDSNNQELLEGIRTCIQQINKASRGDLSPEELKERQAKAMQDPEIQNILQDPVMRQVLIDFQENPKAAQEHTKNPMVMNKIQKLVSAGIVQMK

SEQ ID NO: 14994 - protein, 965 aa, Solanum tuberosum
MTTRNLEKLASIDAQLRQLVPAKVSEDDKLVEYDALLLDRFLDILQDLHGEDLKETVQECYELSAEYEAKHDPKKLEELGNVLTSLDPGDSIVIAKAFSHMLNLANLAEEVQIAYRRRQKLKKKGDFGDESNATTESDIEETFKKLVGDLKKSPQEVFDAIKNQTVDLVLTAHPTQSVRRSLLQKHGRIRDCLAQLYAKDITPDDKQELDEALQREIQAAFRTDEIRRTPPTPQDEMRAGMSYFHETIWKGVPKFLRRVDTALKNIGINERVPYNAPLIQFSSWMGGDRDGNPRVTPEVTRDVCLLARMMAANLYYSQIEDLMFELSMWRCNEELRVRADDLQRSSRRDEKHYIEFWKQVPPNEPYRVILGDVRDKLYQTRERARQLLGHGYSEIPEEATYTNIEQFLEPLELCYRSLCACGDLSIADGSLLDFLRQVSTFGLSLVRLDIRQESDRHTDVLDAITQHLEIGSYRDWSEERRQEWLLSELSGKRPLFGPDLPKTEEIADVLDTFHVIAELPADCFGAYIISMATAPSDVLAVELLQRECRVRQPLRVVPLFEKLADLDAAPAAVARLFSIEWYRNRINGKQEVMIGYSDSGKDAGRLSAAWQLYKAQEELIQVAKEFDVKLTMFHGRGGTVGRGGGPAHLAILSQPPETIHGSLRVTVQGEVIEQSFGEEHLCFRTLQRFTAATLEHGMHPPVSPKPEWRALMDEIAVVATEKYRSIVFKEPRFVEYFRLATPELEYGRMNIGSRPSKRKPSGGIESLRAIPWIFAWTQTRFHLPVWLGFGAAFKYAIEKDIKNLRMLQEMYNAWPFFRVTIDLVEMVFAKGDPGIAALFDKLLVSEDLWSFGELLRSKYEETKSLLLQIAGHKDLLEGDPYLKQRLRLRDSYITTLNVCQAYTLKRIRDPDYSVTPRPHISKEYMEAKPATELVNLNPTSEYAPGLEDTLILTMKGIAAGMQNTG

SEQ ID NO: 14995 - protein, 571 aa, uncultured marine gamma proteobacterium EBAC20E09
MLIQSLINEGVEYIFGYPGGAALHIYDSIFKQSEMQHILVRHEQGATHAADGYARATGKPGVVMVTSGPGATNAITGIATAFMDSIPMVVISGQVQSHLIGTDAFQETDMIGISRPIVKHSFTVDHQSNIPQIVKEAFHIATSGRQGPVVIDIPKDLTNPDDLFDYEYPEEVNIRSYNPPVKPEATQIERVVDAIFNSKKPVIYAGGGTISSNASKELIELNSYINVPVTNTLMGLGVYPATDDKFMGMLGMHGTYQANMAMHNADLILAIGARFDDRITNTPEKFAPKAQIVHFDVDHSSVSKIIEADIAVFGQVKDSLQAINELIKDRLSELDITKFDEWHAQISKWRSEHGLNHNLYKDNSDENPILPQAAVQHIYQESKGKAFVTSDVGQHQMFAAQYYHFDEPRKWINSGGLGTMGFGLPSAMGVKLAYPDEEVICITGEGSIQMCIQELSTCAQYKLPIKIFNINNLALGMVKQWQDMNYDGRHSSISYEDSLPDFKELVESYGHVGIKITKNSDLKKGIEEAFSIKDKLVFVDIYVDPNEHVYPMLVAPNGSLKDMWLAKGSKT

SEQ ID NO: 14996 - protein, 351 aa, Cleome spinosa
MALRSLILGLLSFILLFHLLVSSTTTMALRVGVVLRKPLEPALPVFREAPAFRNGDQCGTGESDQIHIAMTLDTNYLRGTMAAVLSLLQHSTCPENLSFHFLSLPHFETELFTSIKSTFPYLSFKIYQFDPNLVRSRISKSIRQALDQPLNYARIYLSDILPSNVDRIIYLDSDLVVVDDIEKLWHVEMEEKVVAAPEYCHANFTNYFTDTFWSDPELAKVLEGRHPCYFNTGVMVVDVEKWRKGGYTQRVEEWMAVQKQKRIYHLGSLPPFLLIFAGDIKAVNHRWNQHGLGGDNFEGKCRTLHPGPISLLHWSGKGKPWLRLDSRKPCIVDHLWAPYDLYRSSRHSLEE

SEQ ID NO: 14997 - protein, 128 aa, Vibrio parahaemolyticus RIMD 2210633
MIHTMIRVRDLDRSLQFYRDALELEIKDQYVFDGFSLTYLANEETGFELELTHNHDQSEAYTHGSGYGHLAVSVDDIEQAHKRIKSLGIEAGDIKAFDHQQKHLATFFFVTDPDGYKIEFLQRQGRYL

SEQ ID NO: 14998 - protein, 374 aa, Methanosarcina mazei Go1
MRSIVEEALARSALEGRGGQGNNSNSDYSDENIEVDAELEEILRSLKTTIKVVGCGGGGSNSIQRMMGEGIQGADLVAINTDAQHLLHIRSGKKILIGKKKTRGLGAGSLPQIGEDAAIESIDEINKIVQGSDMVFITAGLGGGTGTGSAPIVAEAARDSGALTIAVVTLPFSVEGHVRRTNAEAGLERLRDVADTVIVVPNDKLIEVVPKLPLQAAFKVSDEVLMRAVKGITELITKPGLVNLDFADIRTVMQNGGVAMIGLGESDGENKAVESVQKALRSPLLDVDISGATSALVNVVGGPDMTISEAESVVQEVYSRIDSNARLIWGAQVDPDLEKTVRTMIVVTGVTSAQIYGHGNDKDITYKYGIDFVE

SEQ ID NO: 14999 - protein, 297 aa, Streptomyces coelicolor A3(2)
MDLTGRRAVVTGGASGLGAKTVRALAAAGAEVTIATRHPQSAEPLVQEAAAAGAGRVHAEALDLSDVASVDSFARAWRGPLDILVANAGIMALPTRTLTPYGWEMQLATNYLGHFALATGLHAALRDAGSARIVVVSSGAHLGTPFEFEDPHFARRPYDPWAAYGQSKTADVLFTVGARRWAADGITANALNPGYILTRLQRHVDDETMRAFGVMDDQGNVKPLPYYKTPEQGAATSVLLAASPLLNGVTGRYFEDNQEARTVEDGDDQPGGVAAHALDPEAADRLWEYGADTLSAG

SEQ ID NO: 15000 - protein, 308 aa, Staphylococcus aureus subsp. aureus MSSA476
MRKLVVGSRRSKLALTQSQQFIDKLKAVEPNLEIEIKEIVTKGDRIVDKQLSKVGGKGLFVKEIQHELFEKNIDMAIHSLKDVPSVIPEGLTLGCIPDRELPFDAYISKTHTPLSQLPEGSIIGTSSLRRGAQILSKYPNLEIKWIRGNIDTRLEKLQTEDYDAIILAAAGLRRMGWSDDIVTSYLDRDTLLPAIGQGALGIECRSDDEELLTLLSKVHNDEVAKCVTAERTFLAEMDGSCQVPIAGYATISDQKEIEFTGLIMTPDGKERFEYTMNGTDPVELGKTVSNKLKEQGAYEIIKRLNEQH

SEQ ID NO: 15001 - protein, 638 aa, Blastopirellula marina DSM 3645
MCGITGAAWTDPQLAVSAEALRRMTDCISHRGPDDAGYLHRELENRNPYPAVPGVALGHRRLSIIDLAGGKQPLANEDETVWTIFNGEIFNFAALRGRLEGAGHTFRTHSDTETIVHLYEDEGPDCFRHFNGMFAIAIWDLRERRLVLGRDRLGQKPLYYYHHAGRIVFGSELKTLLALPDVPREIDPTAIDEYLTYQYVPHPNTILKGIKKLAPGELAVFSDAGLHVERYWKPDFTHEDRRPAALQDAELRELFDDAVRLRMQADVPLGAFLSGGVDSSLVVSSMQRQSDRPVKTFSIGFPQKEYDETSFARQVAEHLGTEHHEFQVTPSALEILPKLIWHYDEPMADSSAIPTWYVSQQTRAEVTVALSGDGGDELFAGYRRYRAVGLGAMIDRLGPLKRVLGAKLWQQLPSSGRQKSRMRQAKRFAEAIAMAPERRYLDWVSIFNETRRGQLYTDAFVAQLSDSDPFDFLKSAWRRCGKRDAITCASLADLTTYLPCDLNCKVDIASMAHGLECRQPFLDYRLVEFAAALPIGRKYQRGRGKQILRKVFGDRLPAQIWDRPKMGFGVPLDYWFRHELKELLIDSLLSEKALSRGLFREETVRQLLDEHMAGQFDHSARLWALLVLELWQREWIDA

SEQ ID NO: 15002 - protein, 406 aa, Vibrio sp. Ex25
MSVTANQVHGAVQTLTQSSDTLFLLLGAIMVFLMHAGFAFLEVGTVRQKNQVNALVKILADFGISAIAYFFIGYWVAYGGTFFADAETLSQGNGYELVKFFFLLTFAAAIPAIVSGGIAERARFYPILIATFFTVGIVYPLFEGMIWNGNFGVQAWFENTFGYGFHDFAGSVVVHGVGGWIALVAVVFLGMRKGRVRAGKHTNFAPSNIPFLALGAWILCVGWFGFNVMSAQTVSGISGLVAMNSLMAMVGGIVASLLAGKNDPGFIHNGPLAGLVAVCAGSDLMHPIGALVTGAIAGVLFVYLFTYLQNKTKIDDVLGVWPLHGLCGAWGGIAAGIFGQSALGGLGGVSIIVQLLGTLLGISIAVIGALAVYGAINASMGLRLSEEDEFNGADLAIHKISSTNED

SEQ ID NO: 15003 - protein, 412 aa, Xanthomonas campestris pv. vesicatoria str. 85-10
MAHFELIEKMAPNAVIKVVGVGGGGGNAVAHMVNTNVDGVEFITANTDSQAIKNCGAKLQLQLGTNVTKGLGAGANPEVGRQAALEDRERIMDALQGADMVFITAGMGGGTGTGAAPVVAQLAKEMGILTVAVVTKPFPFEGRRRMQVALKGIEELSQHCDSLITIPNEKLITVLGRNATMIQAFRAANDVLQGAVQGIADLIVRPGLINVDFADVRTVMSEMGLAMMGTGSARGDDRAQAAAEAAIQNPLLDDVNLAGANGILVNITAGPDFTMSEFDEIGRTIEAFASEDATVVVGTVLDPDMQDEVRVTVVATGLNRAVARQAQRPDQRAPIKLVRNATTGQPEFGDFDTTSGDAVSKAVGGSMGLGLRRPSSDSVGSGSHNGGGSSTPAADLPNDYLDIPAFLRRQAD

SEQ ID NO: 15004 - protein, 949 aa, Bacteroides fragilis YCH46
MKTDLLACRHIGVNKADAEVMLRKIGVASLDELIDKTIPANIRLKAPLALPAPMTEYEFARHIAELAGKNKLFTTYIGMGWYNTITPAVIQRNVFENPVWYTSYTPYQTEVSQGRLEALMNFQTAVCDLTAMPLANCSLLDEATAAAEAVTMMYGLRSRNQQKAGANVVFIDENIFPQTLAVITTRAIPQDIEIRTGKFRDLEFTDDLFACVLQYPNANGNAEDYREFTEKAHTANCKVAVAADILSLALLTPPGEWGADIVFGTTQRLGTPMFYGGPSAGYFATRDEYKRNMPGRIIGWSKDKYGKLCYRMALQTREQHIKREKATSNICTAQALLATMAGFYTVYHGQEGIRNIASRIHSITVFLEKSISKLGFKQVNKQYFDTLRFILPDSVSAQQIRTIALSKEVNLRYFDNGDVGLSIDETTDVAAANILLSIFAIAAGKDFQKVDDIPEATIISEELKRQTPYLTHEVFSKYHTETEMMRYIKRLDRKDISLAQSMISLGSCTMKLNAAAEMLPLSCAEFMCMHPLVPEDQAAGYRELIHNLSEELKVITGFAGVSLQPNSGAAGEYAGLRTIRAYLESIGQGHRNKVLIPASAHGTNPASAIQAGFTTVTCACDEHGNVDMDDLRAKAEENKDDLAALMITYPSTHGIFETEIVEICQIIHACGAQVYMDGANMNAQVGLTNPGFIGADVCHLNLHKTFASPHGGGGPGVGPICVAEHLVPFLPGHGLFGNSQNEVSAAPFGSAGILPITYGYIRMMGAEGLTMATKTAILNANYLAACLKDTYGIVYRGANGFVGHEMILECRKVYEETGISENDIAKRLMDYGYHAPTLSFPVHGTLMIEPTESESLSELDNFVLTMLTIWNEIQEVKNGEADKEDNVLINAPHPEYEVVSDQWEHCYTREKAAYPIESVRENKFWVNVARVDNTLGDRKLLPTCYGCFD

SEQ ID NO: 15005 - protein, 490 aa, Staphylococcus epidermidis RP62A
MEWTREERYQRIEDVDETYLEQLKHQVDTSLYRQTFHIQPEMGLLNDPNGLIYYEGYYYISHQWFPLGAVHGLKYWFNYKSKDLLHFEPQGTLLKPDTKYDSHGVYSGSAFEYQNHLYYMYTGNHRDQHWNRISSQMIARMNKDGKIEKFPKPVIHGQPEGYTSHFRDPKVFEKNSQLYAILGAQNENEMGRLLLYRSQDVVDWHFEGEIKTNLTQFGYMWECPDYFRLGNKDVILMCPQGVEAEGDKYRNIYQSGYMIGDLNFNNLFFDHESFQELDNGFDFYAPQTFVDADGQRILIGWMGLPDTEYPTDKEGWAHCLTIPRVLTIENGKLKQRPFKQLEDLRTNKETALGYANKFKRKLHPYEGKQYEMIIDILENDASEIYFELRSSRSESTLITYNKHENKLTLDRTDSGTLPSNVDGTTRSTILDSPLKQLQIFVDTSSIEIFCNDGERVLTSRIFPNEDATGIKASTESGQVYLKFTKYELKG

SEQ ID NO: 15006 - protein, 112 aa, Magnetospirillum magnetotacticum MS-1
MKKIEAIIKPFKLDEVKEALQEVGLQGITVIEAKGFGRQKGHTELYRGAEYVVDFLPKVKLEIVLSDALVEGAVEAIRKSAQTGRIGDGKIFVSTIEEAIRIRTGETGSDAI

SEQ ID NO: 15007 - protein, 316 aa, Arabidopsis thaliana
  misc_feature (92)..(92): Xaa can be any naturally occurring amino acid
MGRKRKHSETVTAAPVKDSAPERPQRTLLGWKDKKEDAENSKPAYASVFRNKEKVLVTCSRRINFRYRHLMLNMVSLLPHCKKDSKVEAKSXSRGATLNELIELKGSSSCLFFECRKHKDLYMWMVKSPGGPSVKFLVNAVHTMEELKVTGNHLKGSRPLLTFSSNFENDAHWKLLKEMLTQIFGIPEGHRKSKPYHDHVFVFSIVDDHIWFRNYQISVPHNESDKIARGDLDKMTLIEVGPRFCLNPIKIFGGSFGGTTLYENPFYVSPNQIRALEKRNKAGKFAKKIKAKTRRKMHELSNPLEPDEFTDMWNDE

SEQ ID NO: 15008 - protein, 562 aa, Vibrio cholerae
MNNDKRPLYISYAGPALLSTPLLNKGSAFSAEERASFNLEGLLPEATETIQEQVVRAYQQYRGFESDMDKHIYLRNIQDTNETLFYRLVQNHISEMMPIIYTPTVGAACENFSNIYRRGRGLFISYANRDRIDDLLNNAANHNVKVIVVTDGERILGLGDQGIGGMGIPIGKLSLYTACGGISPAYTLPVVLDVGTNNPQRLADPMYMGWRHPRITGPDYDNFVEEFMQAVQRRWPDALIQFEDFAQKNAMPLLERYKNRVCCFNDDIQGTAAVTVGSLLAACKAAGSQLSQQRITFLGAGSAGCGIAEAIIAQMVSEGISDEQARSQVYMVDRWGLLEEGMPNLLDFQQRLVQKKANTQHWTTENNGYSLHDVIRNAKPTVLVGVSGAPGLFSEEIIKEMHQHCPRPIVFPLSNPTSRVEALPSDIIRWTNGEALVATGSPFDPVLHEGKTYPIVQCNNSYIFPGIGLGVLAANARRVTDEMLMESSRALASCSPLAINGHGPLLPPLESIHSVSKKIAFAVAKKAIEQGVAPEVTDEALEASIEQHFWQPVYRRYKRTAF

SEQ ID NO: 15009 - protein, 491 aa, Bdellovibrio bacteriovorus HD100
MSVKIPATPIPCQNFVSGKFLKGSGLAMDVVSPYNGQIIGNLHASTAKDIDLAIKDAHETQKSWADVPLKERTKIMFNFRQILMRDLDEIAHLKSSESGKTFAEGKAGLMKGIEVLEFALSLQNMDLGGKMEVSRGVSCEFRREPLGVIANITPFNFPAMVPMWTIPIALTLGNAYIWKPSEKTPLTSMKIAAALQEAGLPDGLFQVLHGGKDTVEAIIDHPQVKAVGFVGSTKVAQHVYQRGTALGKRVLALGGAKNHIVLLPDANPDLTGAGISDSFTGCAGQRCMAAAVVLAVGDVDHHIQKIIQRAQSLVLGKDMGAIISKSQVQFLKDAITRAEKEGAKILLDGRNTPAPAGLDHGHWIGPTIMDNVAPNSEAATLEYFGPVLSIIRCRDITHAMQIENSNPYGNACSVFTSSGSLAEKVIRQASTGMVGVNVGVPVPREPFSFGGANASKFGHGDITGAQSLDFWSNSKKVTMKWEKQDDSNWMS

SEQ ID NO: 15010 - protein, 1044 aa, Pichia angusta
MTCSVPPLPEDISPRAAKKKLVIVGLGMVGLSFLEKLLSNDSKLNEYSIMVYGEEPYLAYNRVGLTEYFQHREFKNLLLSPEEFYQLRGEKWNYAIDEKVVDIDRRARIITTDKGNRASYDVLVLCTGSAAILPTDLLPPLTRKSYREMGCFVYRTIDDLYSMIDYCQGAKKTRAIVVGGGLLGLEAAKALYDMESFEDITIVHRSHWLLSQQMDQKGGSLLTSKVKELGITCRTGTTVSELLFDEDQNLKGVKYDNGQIEECSLLCYTIGIKPRDELTSCGLNAGSRGGFKVNNMLQTSDENIYAIGECASWNNMTFGLIAPGYEMADILAFNLTQGKLHQPKEFSEPSMGTRLKLMGVDVASFGDFFADRNGPKWLLADTTKKFVDLVFEDPIDATYTKLLFTKDGKYMLGGILVGDTSNYTKFSAMIRKPLPKSPSELLIGKSGEDDMEMLSDETQICSCHNITKGKLVEAVKNGCSSLADVKKCTKAGTACGGCEPTVKIIFEKELKKLGGKVSNNLCVHFDYSRAHWFSLIMVKNFRSFRRVMEELGNDPSSSGCEICKPTIGSILSTLYNRHLLKKEVHGLQDTNDRYLGNIQRDGTFSVVPRMSAGEITPEKLVSIGKIAKKYGVYTKITGAQRLDLFGVKKSDLLKIWKDLNEAGFESGQAYGKSLRNVKSCVGSTWCRYGIGDSVGLAVRLEERYKGIRSPHKMKGGVSGCVRDCAEFHSKDFGLCAVSGGFNIYVGGNGGMKPRHAQLLATNVRPDEVIPILDRYLMFYITTADRLQRTARWLENLDGGIEYLKDVIIRDKLGICKDLEAQMRHVVAGYYDEWAKAVSEEKENPIFKQFVNTPENQDCVEIVNERGQPRPAMWPEKAANQKFNEIRWSSVSWQEVCECSDLPLAEAGSSATVLVGDTQIALFRTSKNELYCSQNMCGHKRAFVLNQGLLSEDSDKNCYISCPMHKRNFYLKSGACKNDEALSIATFEVKEENGKVYAKLPPLKELDEVLGTSKWKVTSQETEAKQVRKITTEKNLVDKAILLDW

SEQ ID NO: 15011 - protein, 874 aa, Sulfurospirillum barnesii
  misc_feature (442)..(442): Xaa can be any naturally occurring amino acid
  misc_feature (477)..(477): Xaa can be any naturally occurring amino acid
WKWDKAVCRFCGTGCGIMVATKEGKIVAVKGDPAAPVNRGLNCIKGYFNAKIMYGADRLKQPLLRMNDKGEFDKKGQFKPVSWKRAFDEMEKHIKAALKVGGPEAIGVFGSGQYTIQEGYAAAKMMKAGFRANGIDPNARHCMASAVAGFMQTFGIDEPAGCYDDIEITDTIITWGANMAEMHPILWSRVSDRKLTSPDRVKIVNLSTYTHRCSDLADLEIIFSPSTDLAIWNYIAREIVYNHPEAIDWDFVKKNTIFTTGFANIGYGMRTEAEAKKLGYSAKELEVIKKEDAKVISEKEAPGLAHLGVKAGDVMKMDKADAAGAHWEISFEDFKKALEPYTLEYVAKISKGNPDEKLEDFKVKLQELANLYIEKNRKVVSFWTMGFNQHQRGTWVNEQSYMVHFLLGKQAKPGDGAFSLTGQPSACGTAREVGTFTHRLPXDMDVSIPKHREVSEKIWKLPAGTLNPMGYQHIMNXHRQIESGKIKFAWVNVCNPYQDTANANHWIKAARELDNFIVCSDAYPGISAKVSDLILPSAMIYEKWGSYGNAERRTQHWRQQVLPVGDAMSDTWQWVELSKRFTIKDVWGEQPIKGGKLPNVIEAAKAMGYKETDTMYDVLFATPFAKQFKADDAIGKGFDNSEVFGDARKVMGSDGKEWTGYGFFIQKSIWEEYRQFGLGHGHDLADFDTYHKVRGLKWPVVDGKETQWRFNAKYDPYAAKAGNGDFAFYGDFAKALKKGNLVKPTTEETYSLKNKAKIFFRPYMDPCEMPDREYDTWLCTGRVLEHWHSGTMTMRVPELYRAVPEALCYMHPEDAKAKGFKQGDMIWLESRRGSCKARVETRGRNRTPRGLVFVPWFDEKVMINKVCLDATCRF

SEQ ID NO: 15012 - protein, 719 aa, Cleome spinosa
MIRASSYVNSFFRHRARRNPNAQLRNLSVDGKDGVSEAEGSGSIGGERVSQDISRRNYTEMAKIVATITREKPRWEQTLVSDFPSFNFADPLFFRELVATQNNVLLSLRFFQWLCTNHDCTPDPISSNMLFEALLDAKAVRAAKMVRDIAGFIPDSASLEQYVKCLCGVGFIEEAIEVYFQLKEAGIRISIVACNSILSGCLKAGKTELLFEFYQEMIKAGTASDANTETVGCLIQAFCDSGQVARGYELLNQFLKTGLDPGNPTYNKLIAGFCQAKNYASMSEVLHTMIARNHLPTIYTYQEIINGLCKNEECLEAYRVFNDLKDRGYAPDRVMYTTMIHGLCEMGSFGEARKLWFEMMDKGMQPNAYTYNTMLHGSLKSGDFERACELYNEMCNKGYGTTTVTCNKIISELCSRGKSDEAFEVFKKMSETGIQADAITYNSLIRGFCKEGKVDERMNLLNELVAQDPQPSVSLYELLIIKSCKDGDFEAAKRLLGDMSSKGLHPNAYTYDTMLHGSLKSGDFEHVRELYNETCNKGYGTTTATCNKIISELCSRGKSDEASEMFKKMSETGIKADAITYNSLIRGFCKEGKVGKSMNLLNELVAQGLQPSASSYASLIIQLCQNGDAESAKRLWGDMVSKGIEPHANLREHLISGLCKQGRATEGMDRLMGMLENKIKPKKAAFEDLAECLIQSESSGSVGPSPSRSQRQKAHVTIH

SEQ ID NO: 15013 - protein, 353 aa, Zea mays
  misc_feature (57)..(57): Xaa can be any naturally occurring amino acid
  misc_feature (78)..(78): Xaa can be any naturally occurring amino acid
MNVPKWVIGAIDKIRRGFLWKGRKDVKGGHCLVAWDKVTRPLDLGGLGLGVDWISLXVTRKLVASSMYTHVGNGKNTXFWRDRWLNGCSIAELAPEVISKVDKKVASTRTVHQALEGMLWVRDIKSTLSLVGIQQYLTLWDTLGEIVLTLQEDHHVWRFESSGLFSSRSCYKVLFLGSITFEPWKRLWKSWAPPKCKTFLWLAMQNKCWIADRLQKRGLPHPEACPFCEQEQETVQHLLTGCVFARQFWHSILSPFGMGHLTPGPEDTNFADWWGKVTIQVHRNNSKGVNSAIILGAWCLWLYRNRVIFDGESLTIGKVHRSFVDDLSLWVLAGVKHLGSLGLAAALGATSST

SEQ ID NO: 15014 - protein, 73 aa, Arabidopsis thaliana
  misc_feature (26)..(26): Xaa can be any naturally occurring amino acid
SYDTIVASTPHATIFARFNRQKAYTXFPATLKANNDITSITSNCGRVNSIHMLPPIGKNNFETLSYLPDLTDS

SEQ ID NO: 15015 - protein, 260 aa, Acinetobacter sp. ADP1
MAMEYHFIQVEKQQHLTIITLNRPASFNALNASAHEELAQAFDQFQNDDEQWVAIVTGVGEKAFCAGHDLKQQAAGGGLVTPQSGFAGLTARFDLTKPVIAAVNGVAMGGGFELALACDLIIASENAVFALPEPRVGLAALAGGMQRLPQVIGLKRSMGMLLTGRRVSAQEGFELGFVNEVTSGPVLEAAKRWANEILACSPLSIRATKQTVLRGLESSVEQAMQEQWQYNAMQCMLNSEDVIEGPKAFAQKRTPEWKGR

SEQ ID NO: 15016 - protein, 410 aa, Streptococcus mutans UA159
MTLKRVVVTGYGVTSPIGHTPEDFWNSLHDGKIGIKPITKFDASEIPVFNAGEIQDFPFDKYFVKKDKNRMDTYSLYAIYAAMEAIENAALDMAQEIRDRVGVIVSSGIGGLQELEDQIIRMHERGMKRIKPMFIPKALSNMGAGNIALKIGAQGVCKSITTACASANDAIGEAFREIKYGFHDVILAGGSEASITKIGIGGFNALTALSTTEDPARSAIPFDKDRNGFVMGEGAAVLILESLEHAQKRGARILAEVVGYGSNCDAYHMTTPTPDGSGAAKAIKLAINEAGISPEEVNYVNAHGTSTQANEKGESKAIVAVLGKDVPVSSTKSFTGHLLGAAGGVEAIATIEAIRNHFVPMTAGTKELSEDIEANVVYGQGQEAVIKYAISNTFGFGGHNAVLAFKRWED

SEQ ID NO: 15017 - protein, 396 aa, Myxococcus xanthus
MAKEKFERNKPHVNIGTIGHVDHGKTSLTAAITKVLAKTGGATFLAYDLIDKAPEERERGITISTSHVEYQTSNRHYAHVDCPGHADYVKNMITGAAQMDGAILVVSAADGPMPQTREHILLARQVGVPYIVVFLNKVDMLDDPELRELVEMEVRDLLKKYEFPGDDIPIIPGSALKALEGDTSDIGEPAILKLMEAVDSYIPTPQRATDKPFLMPVEDVFSISGRGTVATGRVERGIIKVGEEVEVVGLRPTQKTVVTGVEMFRKLLDQGMAGDNIGALVRGLKREDMERGQVLAKPGSITPHTKFKAQIYVLSKEEGGRHTPFFKGYRPQFYFRTTDVTGSVKLPENVEMVMPGDNIAIEVELITPVAMEKELRFAVREGGRTVGAGVVAEIIE

SEQ ID NO: 15018 - protein, 418 aa, uncultured marine gamma proteobacterium EBAC20E09
MKKNAFYAQSGGVTSVINATAAALILESKKHKSKIGKVYAGKNGILGALNEELIDTSKESISAIESLRSRPGGVFGSCRVKLKSLEENKKEYERLVEVFKAHNIGYFFYNGGNDSADTAFKVSQISKKLGYPINCIAIPKTVDNDLAVTDCCPGFGSAAKYIATSTLEASLDVASMSETSTKVFILEVMGRHAGWMAASSALARKDKNDPPHIILMPEVMFNQRRFLSKIKDIVKRNGYCVIVASEGVKNSKGKFLAESDTKDAFGHAQLGGVAPYLSKLITEKLKFKNHWAVSDYLQRSARHIASKTDLLHAEAVGIHAVKYAVKGLNGVMPVIVRGKGKKYSWKIEPAPLSKIANVEKKLPKSFISKDGFNVNSKAIAYLKPLIAGEAFPEFKDGIPRISNLKLLLTPKKLKKYIP

SEQ ID NO: 15019 - protein, 339 aa, Streptococcus thermophilus
MKRIAVLTSGGDAPGMNAAVRAVVLKAISEGIEVFGINRGYAGMVEGDIFKLDAKRVENILSRGGTFLQSARYPEFAQLEGQLKGIEQLKKYGIEGVVVIGGDGSYHGAMRLTEHGFPAVGLPGTIDNDIVGTDYTIGFDTAVATATEALDKIQDTAFSHGRTFVVEVMGRNAGDIALWAGIASGADQIIVPEEEYDINEVVRKVKEGYESGEKSHHIIVLAEGVMGAEEFAAKMKEAGDTSDLRATNLGHVIRGGSPTARDRVLASWMGAHAVDLLKEGIGGVAVGIHNEQLVESPILGTAEEGALFSLTEDGKIIVNNPHKARLDFAELNRSLANLK

SEQ ID NO: 15020 - protein, 158 aa, Arabidopsis thaliana
MSDEEHHFESSDAGASKTYPQQAGTIRKNGYIVIKNRPCKVVEVSTSKTGKHGHAKCHFVAIDIFTSKKLEDIVPSSHNCDVPHVNRTDYQLIDISEDGYVSLLTDNGSTKDDLKLPNDDTLLQQIKSGFDDGKDLVVSVMSAMGEEQINALKDIGPK

SEQ ID NO: 15021 - protein, 1878 aa, Trichodesmium erythraeum IMS101
MLIPSISQVINYHPLTATAETAVEDIIISMSSTGSSCVLITEKPSFSTSIKIVTPGDRSPGSPKGNHHSNSPDAKLQYLGPVIGIFTEGDLVQLASIGAPLSGFPIAQIMIRSIVTAQLSEIPDIFALFALFEKHKINHLPIVDNLERLIGLITGHSFLLNLNNIKKKGEKSILSRKKIKSQQKLSANQNNTVNKGLKSENNLLKNPNNQLLPQEITFDSSLELPGNFIPINHLEKTHESQVIQGSFSLSIKQITQLMSTHNVSYVLIIEATEKKYQNETDIYLNQESSNSQKSIKIIGTISSRDIVQLQALKIDFNKVKAGIVCNKSPIVIGSDVTLELAVDLINKKYCLLPLIVQNYIGKIDYFISPTKVIRQILLNKSLYQSLIRFYSYVEKTYLKLHQANKKLKQYTIEQNNLEKSQLAAPETTGITLKLDQDGIWDWNIETGEIFYSTLGEKMLGYTEHEISHKISFDEWLSRIHPEDRDKVNTAIQEHLTKKNTIYKIKYRIQGKDNNFIWIFDSGQTLWKSGKPVRMVGIFVDITKEKEAEIKQSFLVEKHIQIINNLSEIVWETDIHGNLIFLNQAWEKITGFKPKNSLGKNFLDYIHPEDINKLNFLTKNHPENTELAIIHNKLVADSYQLQLLTKTGGYCPVKMKSTLVFDRENKVTGIVSTLSNISEDIATQQQLQASQKAIKELYEVTTNADISFESKIVALLEMGCHRFGMDIGLLGQVLGELYKVIAAHLPENFLFGIAEGDIFTLEQTFDQEALQYDEPFVIESAKNSQWRHHPAHTVRHVESYIGTKILASGIVYGTLSFSSRLTKNKWSSIDIEVLKLMANYIGGELLREDERKALENKYQHFLLLKQITQEICSKLDTKEIFQTTVTQIGRAFKVSRCLIHSYVTEPDLHLPCMAEYLETNHESILGLDLIITSNYYTEKLLGEDRAIASPDVFSDPLLNSDVPMYQKLKVRSILAIRTSYQGKPNGIIHLHQCDYIRQWKQDEISLLEEVAFQVGLTLAKAQILESEVTHKEELEAENQALEKAREVAEVRNRAQGELLAMMSHKSQTNMNDVMMMTSLLLSMKLNPKQRDFVKTILARGDVVINMINNILDFTKIKSGEVELELSPLDIRGCVEDLLKSLDIIAKNKKLELAYLIDKNVPRIILTDDKKLVNILFNLLKNSINFTKTGEIVVYISAIKKSEKSQEYSQLEAISYEEISDFKGAGKITDNYEIQFAVKDTGAGIPLDQIDHLFKDFSQVSPATNREYDGLGLGLVISQRLSQMMGGQMWVVSQPLEIKNLSEEKKQISLLKIEDSRDINFPKNPINVYNSSSPESKVNIAGNPPHYFVKPELSGRGSIFYFTIQAKAIAMYSPEIVDGLLRGKKILVVESNIINQEEIKQQVKQWEMIPIVADSATKALSDLEQGKVFDLGIIAMDISDMDGLTLARKIRKLEAEQNSKQNKNDKSFLPLLMLNYIDTVDISRELQEAKVSLAGFLNIPIKQSQFYNVLLEVFGTRKEEEVNDKVPSLDMEDFQDLSEKNRDYTNIRILLAENNVVNQKVVIHLLEKIGYLADVAANKVEFLDALKRISYDVVLMDVQMNNGDGIGITNQICQRYSEEKRPWIIAMTANARSGDREKYLNAGMDDYMTKPVDQEKLVEVLNKFKRIRNQKLGSKTDLENAVRSHSSVIRSTLVKTNSSRQPVIQKPSFTNFQVESTSQSDEIISLKSTLPIVIPSNIEDVPETKEITMPGLDLLNDQQLAVDPKIIEKFCNLYYDEPDTPIILIQDYLTDGNKNINMIRNYINKGNFNALKTASQKFKTSSALLGAINFSKLCEELEKMALAVIESREDFDLEKATKIFLQSKNEWERVQKELSTKMNC

SEQ ID NO: 15022 - protein, 168 aa, Triticum aestivum
GRIEKWVLRNAFDDEEKPYLPKHILYRQKEQFSDGVGYSWIDGLKDHAKAHVSDSMMTNASFVYPDNTPTTKEAYYYRTVFEKFYPKNAARLTVPGGPSIACSTAKAVEWDAAWSELLDPSGRAALGVHDAAYEEKAPASVDPVVDNVSRSPAHDVKRLKTAISAAAV

SEQ ID NO: 15023 - protein, 367 aa, Mesorhizobium loti MAFF303099
MATKHLFLLPGDGIGPEAMAEVKKLISAMNEKLGSGFATDEGLVGGCAYDAHGAAISDADMAKAMAADAVLFGAVGGPKWDAVPYEVRPEAGLLRLRKDMELFANLRPAICYPALAASSSLKQEVVEGLDILIVRELTGGVYFGEPKQIIDLGNGQKRGIDTQVYDTFEIERISGVAFELARTRKNHVTSMEKRNVMKSGVLWNEVVTQTHKARYADVKLDHMLADAGGMQLVRWPKQFDVIVTDNLFGDMLSDIAAMLTGSIGMLPSASLGAPDVKTKKRKALYEPVHGSAPDIAGKGIANPIAMIASFAMCLRYSFGMVDEADRLEGAIAAVLDQGLRTKDIFSPGMTEVGTVEMGDAIIAKFLG

SEQ ID NO: 15024 - protein, 218 aa, Vibrio sp. Ex25
MNQSSLLAEFGDPITRVENALIALKEGRGVLLLDDEDRENEGDIIYSVEHLTNEQMALMIRECSGIVCLCLTDAQADKLELPPMVVNNNSANQTAFTVSIEAKVGVTTGVSAADRVTTIKTAANPHAKPEDLARPGHVFPLRARPGGVMTRRGHTEGTIDLMQMAGLQPAGVLCEVTNPDGTMAKAPEIVAFGRLHNMPVLTIEDMVMYRNQFELKLA

SEQ ID NO: 15025 - protein, 341 aa, Staphylococcus aureus subsp. aureus MSSA476
MSTNIAINGMGRIGRMVLRIALQNKNLNVVAINASYPPETIAHLINYDTTHGKYNLKVEPIENGLQVGDHKIKLVADRNPENLPWKELDIDIAIDATGKFNHGDKAIAHIKAGAKKVLLTGPSKGGHVQMVVKGVNDNQLDIEAFDIFSNASCTTNCIGPVAKVLNNQFGIVNGLMTTVHAITNDQKNIDNPHKDLRRARSCNESIIPTSTGAAKALKEVLPELEGKLHGMALRVPTKNVSLVDLVVDLEKEVTAEEVNQAFENAGLEGIIEVEHQPLVSVDFNTNPNSAIIDAKSTMVMSGNKVKVIAWYDNEWGYSNRVVDVAEQIGALLTSKETVSAS

SEQ ID NO: 15026 - protein, 181 aa, Vibrio sp. Ex25
MKGLLKLVALVGFLSMNSLALASECPDILQGKQRLLNSTEEVDLCESFKGKTLLVVNTASQCGFTPQFEQLETLYQTYKEQNFTVIGFPSNDFRQDRGSETNTAKVCYLDYGVTFPMMARSSVLGVDANPVFSEITNQAGIKPKWNFYKFLISSEGKVIATFPSSTSPTSTTLTNMIEQQL

SEQ ID NO: 15027 - protein, 112 aa, Xanthomonas campestris pv. vesicatoria str. 85-10
MKLITAIIRPFKLDEVREALSAAGVSGITVTEVKGFGRQKGHTELYRGAEYVVDFLPKIKIETVVTDDRLDAVVEAIQNAAGTGKIGDGKIFVTAIEQVVRIRTGEIGADAL

SEQ ID NO: 15028 - protein, 966 aa, Oceanospirillum sp. MED92
MPTQNQAPLATLEQTDAFIARHIGPSAAEQQAMLKELGVADLDQLITQTVPEDILVKSPINLPDSRTEEEVLTYLKSVAAKNKINTSMIGMGYTDTIVPNVILRNVLENPGWYTAYTPYQPEVSQGRLEAILNFQTMVLDLTGLDLANASLLDESTAAAEAMTLCKRMSKAKKANTFLIDKNVHPQNISVIETRAEPLGYEVIVGDVAELIDQHECFGVLVQYPGTFGDVNDYAELIEKAHDKKALFCAAADIMSLVTLKSPGEMGADVVFGSAQRFGVPMGFGGPHAAFFATRDAYKRSVPGRIIGVSVDSRGNKALRMAMQTREQHIRREKATSNICTAQVLLANMAGFYAVYHGPQGLKTIAGRINRFASILAKGLQSKGVELVNQSWFDTITIKLDNAEAVYSKALEAGINLRNTGDNQLGMTCDECTSRETINTLWDCILGEDHGLNLEQIDAEIAASGENSYAANLARESEILTHPVFNSYHSETEMLRYLKKLENKDISLAHSMIALGSCTMKLNATAEMIPVTWPEFGKLHPFAPMDQAQGYKQLIDELEEQLKAITGFDAVCMQPNSGAQGEYAGLLAIRKYHQANGDGHRNICLIPTSAHGTNPASAALADMKVVLTACDENGNVDVADLRAKAEQHKDDLSCLMITYPSTHGVYEEDIREICQIVHDNGGQVYMDGANLNAQVAVSQPAEIGADVSHMNLHKTFCIPHGGGGPGMGPIGIKAHLAPFVANHPIQQIDGPNPENGAVSAAPWGSASILPISWVYIALMGGTGLRAATENAILNANYLSKKLGEHYPVLYTGRNDRVAHECIIDMRPLKESSGITEEDVAKRLMDFGFHAPTMSFPVAGTLMIEPTESESKAELDRFIEAMAQIREEIGQVEDGDIDAENNPLRNAPHTMADLIGGDWDRPYSFEQGAFPVARLHTSKVWPTVNRIDNVYGDRNLFCSCIPVEDYAE

SEQ ID NO: 15029 - protein, 247 aa, Mycobacterium leprae
MQQGNTATLILLRHGESDWNARNLFTGWVDVGLTDKGRAEAVRSGELLAEHNLLPDVLYTSLLRRAITTAHLALDTADWLWIPVRRSWRLNERHYGALQGLDKAVTKARYGEERFMAWRRSYDTPPPPIEKGSEFSQDADPRYTDIGGGPLTECLADVVTRFLPYFTDVIVPDLRTGRTVLIVAHGNSLRALVKHLDEMSDDEVVGLNVPTGIPLRYDLDADLRPVVPGGTYLDPEAAAAVISQARP

SEQ ID NO: 15030 - protein, 584 aa, Clostridium thermocellum ATCC 27405
MNTTMIVDTLWVVFAALLVFFMNLGFAAVESGFARSKNTVNILSKNFIVFAVSSLGFMLLGWGLMFGGDNPIIGTKELFILGGSDLGFYKDTLTSTVPFWGKFFFQLVFCGTAATIVSGAVAERIKYISFIVFSFILTLFIYPVVGHWIWGGGWLANLGFMDFAGDTVVHSVGGWAALTGAIILGPRHGKYDKDGKPKAIPGHSLALAVIGLFVLWLGWFGFNPGSTMSFQNPEDVVHIIVTTNTAAIAAILTATATSWIFIGKPDLGMTINGCLAGLVGITGSCAYVSVGSSLIIGAIAGIIVVFSVIFFDRIKVDDPVGATSVHLVCGVFGTLCVGLFAQEGVTSLSTVNGLFFGGGFSLLGAEIIGIIAVGAFVVASSALVWFILKKTIGIRVSLEEEIQGLDIGEHGNSAYPDFAIVAPITASGNGNGDSIVAISQVETIKPSSVKVTPEAAIPVVNRSHPGAKMTKVTVITNQDKYTQLQNALDKIGITGLTVTNVLGYGMQKGHTEYFRGLPVKTRLLPKVQVDIVVCKIPVETVVDTVKKALYTGNMGDGKIFIYDVENVIKIRTGEEGYDALQDEE

SEQ ID NO: 15031 - protein, 259 aa, Oceanobacillus iheyensis HTE831
MDYLNYEIVEKYTGIITLQRLQAANALSESLLNELNQLLDEIQQNDTIRCVIVTGAGTKAFCAGADLKERKGMSDDQVIHAVKQIGETINRIEKLQVPVIAAINGVALGGGLELALACDIRIAVNNTKLGLTETSLAIIPGAGGTQRLPRTIGVGHAKRLIYSAVPVNTEEALRLHLIERSVSQEELLDEAVQLAKRIASNGPLAVQLAKGVINNGLDTTLENGLEIEHLSYQKVIPTHDRREGLQAFAEKRKPDYQGR

SEQ ID NO: 15032 - protein, 348 aa, Ipomoea purpurea
MVGGNHTPASPAPTVCVTGAAGFVGSWLVMKLLQRGYIVHATVRDPGNTQKVKHLLELPKAEGKLKVWKGVLEEEGSFDEAIAGCEGVFHVAAAVNFASKDPENEVIKPAVKGILSIINSCAKAKTVKKLVFTSSTAAVHIKETQQLVYDESSWSDLDFIYANKMGGWMYFASKTLAEKEAWKAAKEKQIEFISIIPPLVIGPFLIPTFPLSLVTALSPIMGNGLHHNIIKQGKFVHLDDLCEAQIFLYQHPEAGGRFICSSHHATIHDVAKMIRHNWPEYYVPSEFKGIEKELPIVSFSSKKLQEMGFQFKYTLEDMYKGAIETLRKKGLLPYSTKEPAGIEQEPKS

SEQ ID NO: 15033 - protein, 427 aa, Vibrio parahaemolyticus RIMD 2210633
MVMTLTLMHRMSALQITEINIMSVTADQVHGVVQALTQSSDTLFLLLGAIMVFLMHAGFAFLEVGTVRQKNQVNALVKIIADFGISAIAYFFIGYWVAYGGTFFSDAQTLSQDNGYELVKFFFLLTFAAAIPAIVSGGIAERARFYPILIATFFTVGVVYPLFEGMIWNGNFGVQAWFESTFGYGFHDFAGSVVVHGVGGWIALVAVTFLGMRRGRIRAGKHTNFAPSNIPFLALGAWILCVGWFGFNVMSAQTLSGISGLVAMNSLMAMVGGIVASLLAGKNDPGFIHNGPLAGLVAVCAGSDLMHPLGALVTGAVAGVLFVYLFTYLQNRTKIDDVLGVWPLHGVCGAWGGIAAGVFGQSGFGGMGGVSFAVQVLGTFFGISIAVLGALVVYGAINALTGLRLSEEDEFNGADLAIHKISSTNED

SEQ ID NO: 15034 - protein, 386 aa, Ipomoea purpurea
MVDGNHPLPAPKVCVTGAAGFIGSWLVKTLLQRGYHVHATVRDPGNTKKVKHLVELPKADTNLTVWKGVMEEEGSFDEAIAGCEGVFHVATPMDFDSKDPENEVIKPTINGVLNIINSCVKAKTVKRLVFTSSAGTLNVQPQQKPVYDETCWSDLDFIYAKKMTGWMYFASKILAEKEAWKATKEKQIDFISIIPPLVVGPFITPTFPPSLITALSLITGNEAHYSIIKQGQYVHLDDLCEAHIFLYEHPKAEGRFICSSHHTTIHGLADMITHNWPEYYIPSQFKGIEKELPVVYFSSKKLQDMGFQFKYSLEDMYRGSIETLRKKGLLPYSTKETAAIEEEQETVPLKVEEPTAIEQKQETVPLKLEEEPIAIEQKQEVVPLKA

SEQ ID NO: 15035 - protein, 356 aa, Ipomoea purpurea
MSGGGGHAPTLPAPKVCVTGAAGYVGSWLVMKLLQRGYVVHATVRDPGNTKKVKHLLELPKAAEGKLRLWKGVLEEEGSFDDAIAGCEGVFHVAATPVDFVSDDPQNEIIRPAVKGILSIINSCAKAKTVKRLVFTSSAVTLIVQGNPKPVYDESSWSDLDLIYAKKMPGWMYFASKTQAEKEAWKAAKEKQIDFISIIPPLVIGTSIVPTVPLSFTIALSPVTGNEAHYFVIKQGQYVHLDDLCEAQIFLFEHPKAEGRFICSSHDATIHDLAKMIRQNWPEYYVPSEFKGIEKDLQVVSLSSKKLLDMGFQFKYTLEDMYREVIETLRNKCVLPYSIKPPPNEQEWENGKTLEA

SEQ ID NO: 15036 - protein, 126 aa, Methanosarcina acetivorans C2A
MKEIIAIIRPKKVEPTKEALVELGIPSVTVVPVFGRGKQRGIAEELNIDIRPGLLDQGLLAGMKYMEFIPKRLLYLIVSDEDVDTAVDTIIKVNQTAQIGDGRVFICPVDNAIRVRTDDQGDSALL

SEQ ID NO: 15037 - protein, 275 aa, Oryza sativa
MSAVVCGKRSSAIFADDLLPPSPPSPHSHHHPAKRSCRSPHRRREAHLHHLSSLFPGMDPQLLEGALDASGDDLDSAIKSLNNLRLESTEAILSATGCKSENGLPTAVYPSVEGIVNNGGVSTANEHPAAADSCQTGNNGSEWVELFVREMTNASDMGDARARASRALEVLEKSIVERTGADAAQNLQKENMMLKEQLTVVLRENAVLKRAVAIQHERQKEFDERSQEVQSLKQLVVQYQEQLRTLEINNYALTMHLKQAQQNNSIPGHFNPDVF

SEQ ID NO: 15038 - protein, 462 aa, Acinetobacter sp. ADP1
MLAPTRFFLFFTRSIARFYLLCLFYCISASPVFAAESQLARTTFETTLANGLKVIIREDHRAPIVITQIWYGIGSGDESGNLLGISHALEHMMFKGTAKVPNNEFTRLSRLYGGRVNAATFTNYTYYDQLYPKAYLPMALELEADRMQHLRLRQSDFDTEIKVVMEERRQRTDDNPSVLAFERFKWLAYPTSHYRQPVIGYMKNLQNLQLKDLKSWYKNWYVPNNATLIIIGDVDAETTLNTVKTYFGKIPSARLPPRNDLLEFDRVGYRHMEVHLPVKVPNLFMAWNVRSLVTAKNPQDAYALTIIQSLLNGGISSRLQEQLVRKKKILTSVNVSYEPYNRGDSLFTITALPVEGVSLEDAQKAIQQQIDILKNQPLDPNELERVRANFVSHLVFGQDDIVGQAHLMGNLEVNGLSYRLIDELPTHYGTVKQQDIQRVANAYLVRENLTSLYLLPDSQDKP

SEQ ID NO: 15039 - protein, 370 aa, Glycine max
MGVVTVSSSAARTPLGLNTKFCNNRLKRPLIVAFKGDKHNDSALVATQEKIPVPVETAKKTQKKRIGKTNKLPKRESSPSSMDVDYNEAAAMLENLYKLSPASDNAECIDGKIKRVSRRGKKVVDESEEKELKGDWVVRNQNKNKKPKRLNLDQRISLKNNKSGDEVIPTRKKRNVGNKIEKIEELIREYSVSTDFVSMDWKRMRIPPVLSSSEHAWLFKLMQPMKALLQVKEDLQQELTREPADGELADATNMSITQVRKAIDVGQAARNKLIKHNLRLVLFVINKYFTDFASGPRFQDLCQAGVKGLITAIDRFEPNRRFRLSTYSLFWIRHAIIRSMTLSNFTRVPFGLESVCILSFLLHLVINVLF

SEQ ID NO: 15040 - protein, 94 aa, Brassica rapa
TRSTRAGRMRSTWGDDCLEFKPERWISGSDSGRFINHDPFKFVAFNAGPRIYLGKDLAYLQMKSIAAAVLLRHRLTVVTGHKVEQKMSLTLFMK

SEQ ID NO: 15041 - protein, 452 aa, Streptococcus mutans UA159
MKVVKFGGSSLASATQLEKVLNIIKSDEERRFVVVSAPGKRDAQDTKVTDALIRYYRSYTSDKDVTADQSWIINRYRAIIDELGLGQNILEKITKAIVDLANLPIEDNDFLYDTFLAAGEDNNAKLIAEYFRKNGLSARYIHPKKAGIIVTSEPGNARIIPSSYDKLEELRDSDEVLVIPGFFGVTIDNQICTFSRGGSDITGSIVAAGVKADLYENFTDVDGIFAAHPGVVHKPHSISELTYREMRELAYAGFSVLHDEALIPAYRGKIPLVIKNTNNPEHPGTKIVLAHTGATIPVVGIAGDDDFVSINLSKYLMNREIGFGRKILQVLEELNIRWEHIPTGIDDMSIILRGRELTPIKEQEIISQLTRKLEVDEVEIERNLSIIMIVGENMKNHIGVTAKAAEAFSKKHINLEMISQGSSEVSVMFVIKTEQEKQAVRALYQTFFMKDE

SEQ ID NO: 15042 - protein, 1080 aa, Nicotiana tabacum
MLPVKRTVEVGGENDTVSVDPLTKKHKATAAAAGDSSTVTMGGAGSAITGDVNANGNATNGKSPIDARNSPDIDEDLHSRQLAVYGRETMRRLFASNVLASGLQGLGAEIAKNLILAGVKSVTLHDEGNVELWDLSSNFIFTEEDVGKNRALASIQKLQELNNAVIISTLTDALTKEQLSNFQAVVFTDISLEKAVKFDDYCHQHQPPIAFIKAEVRGLFGSVFCDFGPEFTIADVDGEDPHTGIIASISNDNPALVGCIDDERLEFQDGDLVIFSEVRGMTELNDGKPRKIKNARPYSFTIEEDTSNYAAYERGGIVTQVKEPKVLKFKPLREAIKDPGDFLLSDFSKFDRPPILHLAFQALDRFVSESGRFPLAGSEEDAQRLISFVTDLNNSLSDGKLEEIDQKLLRNFAFGARAVLNPMAAMFGGIVGQEVVKACSGKFHPLYQFFYFDSVESLPTAPLDPNDLKPLNSRYDAQISVFGNKLQKKLEEAKAFVVGSGALGCEFLKNLALMGVCCGDKGKLTITDDDVIEKSNLSRQFLFRDWNIGQAKSTVAAAAASLINPRIHIEALQNRASPETESVFDDTFWENLSVVINALDNVNARLYIDQRCLYFQKPLLESGTLGAKCNTQMVIPHLTENYGASRDPPEKQAPMCTVHSFPHNIDHCLTWARSEFEGLLEKTPTEVNAYLINPSDYISAMQKAGDAQARDTLDRVLECLDKERCDTFQDCITWARLRFEDYFADRVKQLTFTFPEEATTSSGAPFWSAPKRFPRPLQFSVDDASHLQFLLAASILRAETFGILIPDWVKSPQNLAEAVDKVIVPDFQPKKDVKIVTDEKATSMAASSIDDAAVINELVMKLETCRQKLPSGYKMNPIQFEKDDDTNYHMDLIAGLANMRARNYSIPEVDKLKAKFIAGRIIPAIATSTAMATGLVCLELYKVLDGGHKVEDYRNTFANLALPLFSMAEPVPPKVVKHQDMNWTVWDRWILKDNPTLRELLQWLQNKGLNAYSISYGSCLLYNSMFPKHKERMDRKLVDLAREVAKADLPPYRKHFDVVVACEDEEDNDVDIPQMSIYFR

SEQ ID NO: 15043 - protein, 488 aa, Listeria monocytogenes str. 4b F2365
MADVRKLKNYINGEWVESRADKYEDVINPATGEVLCQVPISTRAELDQAAVIAEQAFEKWSQVAVPRRARVLFSFQQLLIQHKEKLARLITLENGKNLSEARGEVQRGIENVEFAAGAPTLMMGDSLASIATDVEAANYRYPVGVVGGIAPFNFPMMVPCWMFPMAIALGNSFILKPSERTPLLMEKLVELFSEAGLPKGVFNVVYGAHDVVNGILENEIIKAVSFVGSKPVGEYVYKTGSANLKRVQALTGAKNHTIVLNDADLEDTVTNVISAAFGSAGERCMACAVVTVEEGIADEFLAALRTAAQNVKIGNGLDDGVFLGPVIREENQKRTIAYIEKGLEEGAKLTVDGRETGLSEGHFVGPTILEDVTTDMTIWKDEIFAPVLSVIRVKNLQEAVRVANQSEFANGACIFTNNAKAIRYFREKIDAGMLGVNLGVPAPMAFFPFSGWKSSFYGTLHANGKDSVDFYTHKKVVTARYSLKGYEE

SEQ ID NO: 15044 - protein, 296 aa, Zea mays
MGNASGRDEDAAAVDGDGADVEDGGGDSSERDFPSYGSGGANHVRRACSVGVVGGGAAAGSPPGSPGHSLSPRMFVPQTPVPPLQRAADVTPVFNQILMDEQEEYDGPPQKEIPALIVWTLGGKNVYVEGSWDNWKSRKAMQKSGKDHSLLLVLPAGVYRYRFVVDGERRCLPDLPCEIDAMGNAVNLLDVNDYVPESVESVAEFEPPPSPDSSYSFQAPEDKDFAKEPPVLPSQLHLGVLNSQNSEESCARPQHIVLNHLFIEKGWGAHPLVSLGLTHRFESKYVTVVLYKPIER

SEQ ID NO: 15045 - protein, 291 aa, uncultured marine gamma proteobacterium EBAC20E09
MTIKIASRSSKLALAQVEEFVKKFGISDYKIIKVKTEGDIKSANGETLFDKAHFVSDVQKCLLNGEADIAVHSAKDTPAGETTGLLRYFLPSQSNQDVLIFREEDKFNSEMKLGTSSLRRQLQAKHHLNAINIVNLSGNVDTRLEKLSQGEYDCIILAKAGLARLKLLNELQYEVMDWSTASGQGFLCIEVLNDPSADIYNFLLKSIREIDLNLGKNISTERSILEAINAGCNSAISIQTQSNLESENSQLIHLGEIYGVEKYISFSGTNAEKTINDIKNQDGLKLLNEHN

SEQ ID NO: 15046 - protein, 408 aa, Ipomoea quamoclit
MVDGNHPAPAPALTPPKVCVTGTAGFIGSWLVMKLLQQGYHVHATVRDPGNTKKLKHLLELPMADTNLTVWKGVMEEEGSFDEAIAGCEGVSHVATPMDFHSKDPDNELIKPAINGVLNIIKSCVKAKTVKRLVFTSSAGTLNVHPQQKPVCDETCWSDLDFIYAKKMTGWMYFASKILADKEAWKATKEKQIDFISIIPPLVVGPFITPTFPPSLITALSLITGNEAHYSIIKQGQYVHLDDLCEAHIFLYEHPKAEGRLICSSHHTTIHGLAEMITQNWPEYYIPSQFKGIEKDLPVVYFSSKKLQDMGFQFKYSLEDMFKGAIETLRKKGLLPYSTKEPAAAIEEEEETVPLKVEEPSTAIEEQKQEATTVPLKPAAIEEQKQEATTVPLKPAAIEQKQETVLCP

SEQ ID NO: 15047 - protein, 381 aa, Methanothermobacter thermautotrophicus str. Delta H
MKFINDAIKESEKREKPSSSSMNSEIDRELREIIENSRAKIYVVGTGGAGNNTVTRLSEIGVEGAETIAVNTDAQDLFYSVANRKLLIGKNVCGGLGAGGVPEVGEECAEESEDDIRRELEGADMVFVTCGLGGGTGTGSAPVISKLAKKAGALTIAVATMPFSAEGLKRRENAERGLEKLQSAADTVIVIPNDKLLEVAPNLPLNKAFMVADEILGRAVKGITELITKPGLVSLDFADVRSIMKGSGMAMIGMGEAESGDRALESVYEALNSPLLDLDISNARGALINISGSSDLTLQEAERIVEVVAEELDPDANIIWGAQIQDELQNVIRTTIVVAGVRSPYIYGAHGSAEKEFLEEKQREKDSVDESVLEEFIDGVF

SEQ ID NO: 15048 - protein, 373 aa, Bacillus licheniformis ATCC 14580
MLNLKKRIALLPGDGIGPEVLDAAVDVLKSVAEHYQHEFEFEYGLIGGAAIDEAGAPLPEETVAACKAADAILLGAVGGPKWDQNPSELRPEKGLLAIRKQLDLFANLRPVKVFESLAGASPLKTEYIEGVDFVIVRELTGGLYFGKPSEQYVNQNGEEEAVDTLFYKKSEMERVIREAFQMAQSRKGKVTSVDKANVLESSKLWRKTAEEVAKEFPDVKLEHMLVDNAAMQLIYAPGQFDIIVTENMFGDILSDEASMLTGSLGMLPSASLSSSGLHLYEPVHGSAPDIAGQNIANPLAAILSAAMMLRTSFGLEAEAQAVEHAVDQVLRAGKRTKDLAKGSEHCTTQSITGEVKAALADDNAISNIMTAYV

SEQ ID NO: 15049 - protein, 117 aa, Phoenix dactylifera
DEYGNPIPEHQGYGGAGTGGTYGTTGTTTTPHGVVHGQGGGQQQQVHLGKEEPHGGRHHRSGSSSSSSSSEDDGHGGRRKKGLKEKIKEKMPGGGHKEEEHGQTAEGQHEKKGMMEK

SEQ ID NO: 15050 - protein, 320 aa, Triticum aestivum
  misc_feature (123)..(123): Xaa can be any naturally occurring amino acid
  misc_feature (146)..(146): Xaa can be any naturally occurring amino acid
  misc_feature (161)..(161): Xaa can be any naturally occurring amino acid
  misc_feature (230)..(230): Xaa can be any naturally occurring amino acid
MARAAVSTAPLSRLHSPTPSVPCHSLSHAHSQLRIHQQRRPLAVASALPEVADLPGLSLPAAAAAAAALAAAVSLSDPERRRKAQAEAVGGGDKEAVRAYFNSTGFERWRRIYDPATDDVNRXVQLDIREGHAQTVAATLAMLRDXPDVPSAGRTVCDARXEGRGSLPIPLAAGGASVLPSDISRDMVSEAQGQGAGVPRRRDVAGVRMPRFEVPHPEYLEGRDDVGGCXKVPSHYPGQEGAKKTRQLRLGSPEGGWLSPSRPKPAQIQGLKRVGEPVPGTGQARRRSRLREKTFEEGRDLPGGRVEQGVTSPRLYFEEA

SEQ ID NO: 15051 - protein, 489 aa, Bacillus clausii KSM-K16
MAKFTQTVEVFQNYINGEWKDSTSGQVMDSVNPANKTETIGQLQSSTTEEVDEAIQSATEAKIGWRKTGAYQRGQLLASVANELEKNVDDIAETLTKEMGKTLPEAIGETQRGIAILRYYAAEGMRKEGEVIPASDKEALMFTKRTPLGVVGIITPWNFPVAIPIWKIAPALVYGNTVVFKPASESAVTAAKVVKCFEHAGLPKGVLNFITGKGSIVGEALINSKKLNGITFTGSESTGKRVAKAASANGIKYQLEMGGKNPVIVLDDADVQSAVQGILSGAFKSTGQKCTATSRVIVQEGIYEELKAALLAETKKITIGDGMNSSIWMGPCASESQLNTVLEYIQIGQEEGATLLYGGQRLTENEYAHGFYVEPAIFEQVTSTMRIAQEEIFGPVIALLKVKTVEEAIDIANDTEFGLSASLYTSNIGSALSFIDDIEAGLVRVNSESAGVELQAPFGGMKASSTGTREQGEAAKEFYTAIKTVLIRS

SEQ ID NO: 15052 - protein, 570 aa, Trichodesmium erythraeum IMS101
MNKQQNQKFKFDPIDTALADIKAGKCVVVVDDEHRENEGDVICAAQFATPNMINFMAVKARGLICLALTGDRLDQLEVPLMVTNNTDSNQTAFTVSIDASPELGVSTGISAEDRARTIQAVINSNTKPEDLRRPGHVFPIRAKEGGVLKRAGHTEASIDLARLSGLYPAGVICEIQNPDGSMARLPQLVEYAQTHNLKLISIADIISYRIKHDRFVFREAVAKLPSQFGNFQIYAYRDTQNNLEHIAIVKGNPAEFSQRDIMVRVHSECLTGDAFGSLRCDCRMQLQAAMKMIEHAGAGVVVYLRQEGRGIGLVNKLKAYSLQDIGLDTVEANERLGFPADLRNYGVGAQILHDLGVNKMRLITNNPRKIAGLHGYGIEIVDRVPLLIETTDYNSAYLATKAQKLGHILLRSYLVTIAINWNNQKIEEETFDNSDHINMKSLAQQRYQYLEKLRSLIKEYDFLLQEETRPVATAVFAQAPLIVNFGLEQATLTTSKWYQESNNPYLVAIAKVLTEIAQWQNMLKLEFIIASGLDPMIALQIKLERQTLEITELSTAMEHLETQKIYSLKI

SEQ ID NO: 15053 - protein, 633 aa, Azoarcus sp. EbN1
MFDAVRNNKRIAQIILALLIVPFAFFGLDSYFTSGPGGNEIATVGGSKISMNEFDQALRDQQDRLRQSMGGQVDRAMLESEAMRRSVVENLVNQRLLAMHAADSGLVVTQQQLQQVIATVPAFQEDGRFSLERYEAAVRAQGMTPAMFEARLGQDLRVQQVALAVGQSAFTAQASVQRFLEAQLEERKVSELKFSPDAFLAQVELPDDAAKKYYDANPERFERPARLRAEYLVFDENALLKQVSVSDDEIRKFYEANTARFGQPEERNARHILIEAAADAPAEEVAKASEKAAALLAQVRANPERFAELAKAESQDPGSAARGGELGFFGRGAMVKSFEDAVFSLEKGQISDVVRSDFGFHIIQVVDIKPAKARPFEEVRDEIAEELKRQAASRRLAEQAEHFANLVYEQADSLQPAAQELGLEIRQTDWISREEGSIGGFKNEKLLNGLFSDEAVKNGRNVEAVEVSRGTLVSARVRDFEAAQRLPFEEVKASIEKQLRAEEASKLAVARGEAALAALAKGEQASGAWSEARVVRRGSPELAPAAIDAVFGAAESKLPAYAGVAMPEGGYSVFRIESVTRPELAKDDPRLQAVSQQYQRLIAERDFNAFLASLRERYEVEINEAVLRVAQQP

SEQ ID NO: 15054 - protein, 112 aa, Burkholderia mallei ATCC 23344
MKRITAIIKPFKLDEVREALAEVGLTGLTVTEVKGFGRQKGHTELYRGAEYVVDFLPKMKIEVVVANNLVDQVIDAVIGAARTGKIGDGKIFVSDVERVIRIRTGEENEAAV

SEQ ID NO: 15055 - protein, 571 aa, Photobacterium profundum SS9
MRTSNYLLSTLKETPNDAEVISHQLMLRAGMIRKLASGLYTWLPTGLRVLRKVENIVRQEIDNAGAVEILMPVVQPFELWEETGRSEKMGPELLRFTDRHSRPFVLSPTAEEVVTSLVRNEISSYKQLPLNLYQIQTKFRDERRPRFGVMRAREFSMMDAYSFDIDKEGLEKSYQAMHDAYCKAFDRMGLEYRPVLADSGAIGGSGSQEFHVLAESGEDLIAFSSDSDYAANIEKAEALAPTAELAAATQEMELVDTPNAKTIAELVEQHGLAIEKTVKTLFVKASDEIDADIVALIIRGDHELNEVKAENLPQVASPLEMAEEAEIRALIGAGPGSLGPVGLELPFIVDRTVAIMSDFGAGANVDGKHYFGINWGRDVELAQVEDLRNVVEGDLSPCGQGTIQLKRGIEVGHIFQLGTNYSKKMNCNVLGPDGKSATLEMGCYGIGVSRIVASAIEQNNDENGIIWPTALAPFQVAIVPMNMAKSEEVKAAAESLYAELTAAGIEVLFDDRKERPGVMFKDIELIGIPHTIVIGNRSLENGEMEYKDRRDGNKVAVPVADVVEMIKQKLA

SEQ ID NO: 15056 - protein, 300 aa, Ehrlichia ruminantium str. Welgevonden
MEGNIVSGKAVADNITNILATCISDLKAQHNLTPCLIVVLVGDDPASQLYVRNKQRKAEMLGLRSETMLLPSTISESSLIEKIHQLNNDDSVHGILVQLPVPRHIDKNLIINTIDPKKDVDGFHNENVGRLFTGQKKNCLVPCTPQGCLYLIKTITRNLSGSDAVVIGRSNIVGKPMACLLLGENCTVTTVHSATRDLPDYCRRADILVAAVGIPRFVKYSWVKHGAIVIDVGINSIEEDGVKKFVGDVDFAEVNKIASAITPVPGGVGPMTIAFLMVNTIIAACNQSGIDGFLEKYLDL

SEQ ID NO: 15057 - protein, 160 aa, Coccidioides immitis RS
MADDAQHEHTFESADAGASATYPMQCSALRKNGFVVIKNRPCKIVEMSTSKTGKHGHAKVHLVAIDIFTGKKLEDLSPSTHNMEVPHVSRKEYQLIDISEDGFLSLMADDGSTKDDVKLPDGEVGDKINKLFRVEDKDINVVVLTAMGEEVAMDAKEAPK

SEQ ID NO: 15058 - protein, 322 aa, Staphylococcus aureus subsp. aureus MSSA476
MKKIAVLTSGGDSPGMNAAVRAVVRTAIYNEIEVYGVYHGYQGLLNDDIHKLELGSVGDTIQRGGTFLYSARCPEFKEQEVRKVAIENLRKRGIEGLVVIGGDGSYRGAQRISEECKEIQTIGIPGTIDNDINGTDFTIGFDTALNTIIGLVDKIRDTASSHARTFIIEAMGRDCGDLALWAGLSVGAETIVVPEVKTDIKEIADKIEQGIKRGKKHSIVLVAEGCMTAQDCQKELSQYINVDNRVSVLGHVQRGGSPTGADRVLASRLGGYAVDLLMQGETAKGVGIKNNKIVATSFDEIFDGKDHKFDYSLYELANKLSI

SEQ ID NO: 15059 - protein, 297 aa, Brucella melitensis 16M
MLSECFIEYCSTQHKMKFNSITGGSTSGTMWDGMGNKMSEATDVVIETRPADGVALLELNRPDALNAVNMDVRQKLAASADSLVEDPDIRVIVIAGRGGNFAAGSDVKVFAQTGAGSLLAQRMHRYWESLAHCPKPVIAAVEGYALGGGCELAMHADIIVAARTASFGQPEIKLGLMPGAGGTQRLLRAIGKYKTMLLALTGEMLPATEAEKYGLVSRLSEEGEALEEALKLARKIALMPALAAEQIKEAVMYGEDAPLETALRLERKAFQLLFDTEDKREGIDAFLTKRKPAFKGR

SEQ ID NO: 15060 - protein, 393 aa, Pseudomonas fluorescens PfO-1
MLSVQDRAIVKSTVPLLESGGEALITHFYRMMLSEYPEVRPLFNQAHQASGDQPRALANGVLMYARHIDQLDQLGDLVAKIINKHVALQILPEHYPIVGTCLLRAISEVLGEEIATPEVMSAWGAAYGQLAEILIGAETAIYDQKEQAVGGWRGAREFIVAAKVEESAEIISFYFEPADKGPILAAEPGQYIGMKLVLDGEEIRRNYSLSALANKGQYRISVKREPGGRASNYLHDQLHVGASIQLFPPSGEFTLTASDKPLVLISGGVGITPTLAMLEAALETERPVYFIHSARNGSVHAFRDWIDGLAARHPQLKRFYCYAEDDGVSPAADKVGLLSEEQLGEWLPAERDVDAYFLGPKGFMGAIKRHLKALGVPEKQSRYEFFGPAAALE

SEQ ID NO: 15061 - protein, 422 aa, Bdellovibrio bacteriovorus HD100
MNTKFKKSELSNGIRVVSELHPGSRAVSMGIWVLTGTRDETPDVAGISHLLEHLVFKGTKTRSAYQIAKSLEALGGELNAYTTREYTCYHALVLKDHWEKALDVLADLVSNMKLTQKEFDLEKGVILQEIAMSEDSHEDMVYDVFYEQVYGAHPLGRPILGTPVSVARMKQTQVMNYYKKTYTGKNIIVSASGCIDHDDLMAGIQKRLGAKKKSELKNTRRVPRWLNRRHVVEKQAEQVHMLLGLPTASFQDKHRFEAVVTNTLLGGGMTSKLYQSVREKRGLVYSIHSSLNTNIDSGMLTIYAGTEAKNARKVGDLISKEFAKIRKAGVTKADVEMCKTQVIGSILLGSDDIENRMTSLAVNEMVFGRYRAVESVIDEIKAVTVDSVNEYIRNVLDLDKAAGVLLGPEVTKLQDWWQDLKL

SEQ ID NO: 15062 - protein, 414 aa, Triticum aestivum
  misc_feature (215)..(215): Xaa can be any naturally occurring amino acid
MAAAGSSRRGPMDDDKLNFETSAGVDVVGSFDAMGIREDLLRGIYGYGFEKPSAIQQRAVVPIIAGRDVIAQAQSGTGKTSMVSLSVCQVIDTNIHDDSFNMKEDAEEWVQALILSPTRELATQTERVMQAVGNYMSVSVHACVGGKSIGEDIRKLEAGVHVVSGTPGRVCDMIKRRTLRTRAIKLLVLDEADEMLTRGFKDQIYDVYRYLPPRXRVVWISATLPHDILEITSKFMTDPVRILVKRDELTLEGMKQFFVAVEKEEWKFDTLCDLYDTLTITQAVIFCNTKRKVDWLTERMRTNNFTVSAMHGDMPQKERDAIMSEFRSGTTRVLITTDVWARGLDVQQVSLVINYDLPNNRELYIHRIGRSGRFGRKGVAINFVRKDDIRILRDIEQYYSTQIDEMPMNVADLI

SEQ ID NO: 15063 - protein, 123 aa, Methanosarcina acetivorans C2A
MKEVTAVVRPNKMSTTKDALDKIGFPAMTAIPVLGKGKQRGISGELNFYIQPRLLAKRYSTGMKYIPKRLLSIVVNDEDVDLVVKTIIEVNQTAQIGDGRIFVEPIDDVIRIRTGEKGELSLK

SEQ ID NO: 15064 - protein, 406 aa, Oceanospirillum sp. MED92
MFELADSIPQSAVIKVVGVGGGGGNAVQHMVSCDVDGVEFICANTDAQALDNMHSKTVIQIGGELTKGLGAGANPEVGRQAALEDRERLAEMLDGADMVFITAGMGGGTGTGAAPIVAEVARDLGILTVAVVTKPFTFEGRKRLKIAEEGIKELKENVDSLIIIPNEKLLPVLGKNTSLINAFNTCNDVLKGAVQGIADLIIRPGMINVDFADVRTVMSEMGMAMMGSGSGRGEDRATEATEAAINSPLLEDVDLKGASGILVNITAGLDLSLGEFSEVGNIVEEYASENATIVVGTVIDPELTDELTVTVVATGLGRAEEAQVEVVNTGTGRASAVATAAGAATDFDQLELPAVMRTNRSEAPKERAQPVEIHREVESEQPVMQKTGTDDLEFLDIPAFLRRQAD

SEQ ID NO: 15065 - protein, 775 aa, Oryza sativa
MAVKWDYTFDLAEIACDAIQYVGKNDSFALSQGRTVAGESWRRWHRETNLVLISIMPSGDEAGREEGVVVIVSGGRGGRRRRHCVSEVGQPSAGSPLSSPPLVVPLWLTALVGVRRGVVAPGRAEAGAPLVLALGLSVTVVPAAACCFCASGMDADSPRRPTTVPSNTPQVSGLIPWYQGLIPRYHPVSWVPSIRYRSIPNWYQSAAPPRRRRRRMEAVGVAPAPAGVPEKKLLEVKESRKAAPAAPSTSMAAKWAMKKKLVGGDAGYVLEDVPHLTDYLPELPTYPNPLQDNPAYSVVKIPLFHSPTTLGTKRLTFLHTTCAPSSSCRQYFVNTDDTVTQKIVVHKTSARGTHFRRAGPRQRVYFQSDEVNAAIVTCGGLCPGLNTVIRELVCGLYDMYGVTSVVGIEGGYKGFYSRNTVALTPKSVNDIHKRGGTVLGTSRGGHDTGKIVDSIKDRGINQVYIIGGDGTQKGASVIFQEVRRRGLKCSVVGVPKTIDNDIQVIDKSFGFDTAVEEAQRAINAAHVEAESAENGIGVVKLMGRNSGFIAMYATLASRDVDCCLIPESPFYLEGKGGLLEFIEKRLKDNGHMVIVVAEGAGQDLIAKSMNFVDTQDASGNKLLLDVGLWLSQKIKDHFKKKRNFPITLKYIDPTYMIRAVRSNASDNVYCTLLAHSALHGAMAGYTGFTVAPVNGRHAYIPFYRITEKQNKVVITDRMWARVLCSTNQPCFLSHEDVEHLKHDDDEHHLHNTQLLEGESSPVKDSSKCNGTAAPV

SEQ ID NO: 15066 - protein, 149 aa, Oryza sativa
MPVPLAPYPTPPVPFTPPNGAQSQLVCSGCRNLLMYPAGATSVCCAVCSTVTAVPAPGTEMAQLVCGGCHTLLMYIRGATSVQCSCCHTVNLAMEANQVAHVNCGNCRMLLMYQYGARSVKCPICNFVTSVGASPGTDQKPSSLTADVP

SEQ ID NO: 15067 - protein, 675 aa, Novosphingobium aromaticivorans DSM 12444
MDDTQRVANSPIWHEGERALQAHVGVVDRMGEVGARVIRPFMPDQHRTFYAQLPFVILGSVDAEGAAWATVVEGEPGFLSSPDPKSLVLGALPHADDPALGGIHDEAALGLLGIELHNRRRNRVNGTLRFPSAGAPLLEVGQSFGNCPQYIQLRDATLSRAPAAPPPHLAEELPALDAAARAMIGSADTLFVASYADRLDSGRQVDVSHRGGKAGFVRVDAEGKLTIPDFAGNLFFATLGNVLLNGQAGLVFIDFESGDLLQMSGKAEVVLDSPEIASFAGAERLWTFVPQRIVRRKGALALRWSFRDNGWSPNSLATGQWPAALHWQQLRVERIVAESASIRSFHLRPVSPDLGWQHEAGQHLPIRVRLPGEDSPAVRTYTLSSAPSDPLYRISVKREGKVSAWLHEQVREGDIIEARAPAGSFVIEPGAPRLAVLIGAGIGITPMISMLRELVSLGANGAPARPAVLIQSARSLAERAFANELASLADRVRVVRVLGDAKGAQAGADYDLEGRIDLQLLSAVLPFGDHDFYLCGPKGFMQAIYDALRGANVPDHRIHAEAFGPSSLVRRRDTTRETAPAAQPSAVPVPVLFTASLKEARWKPGEGTLLELAEARGLKPEFGCRSGSCASCKVKLVSGAVAYPRTPSAEVASGEVLLCCAVPAEGNDKPLQVEA

SEQ ID NO: 15068 - protein, 1080 aa, Nicotiana tabacum
  misc_feature (465)..(465): Xaa can be any naturally occurring amino acid
MLPVKRTVEVGGENDDVSVDPLTKKHKATAAASGDSSTVTMGGTGSATTGDVNTNGNATNGKSPIDARNSPDIDEDLHSRQLAVYGRETMRRLFASNVLVSGLQGLGAEIAKNLILAGVKSVTLHDEGNVELWDLSSNFIFTEEDVGKNRALASIQKLQELNNAVIISTLTDALTKEQLSNFQAVVFTDISLEKAVEFDDYCHKHQPPIAFIKAEVRGLFGSVFCDFGPEFTVADVDGEDPHTGIIASISNDNPALVGCIDDERLEFEDGDLVIFSEVRGMTELNDGKPRKIKNARPYSFTIEEDTSNYAAYERGGIVTQVKEPKVLKFKPLREAIKDPGDFLLSDFSKFDRPPILHLAFQALDRFVSESGRFPLAGSEEDAQRLISFVTDLNNSLSDGKLEEIDQKLLRNFAFGARAVLNPMAAMFGGIVGQEVVKACSGKFHPLYQFFYFDSVESLPTAPLDXNDLKPLNSRYDAQISVFGNKLQKKLEEAKVFVVGSGALGCEFLKNLALMGVCCGDKGKLTITDDDVIEKSNLSRQFLFRDWNIGQAKSTVAAAAASLINPRIHIEALQNRASPETESVFDDTFWENLSVVINALDNVNARLYIDQRCLYFQKPLLESGTLGAKCNTQMVIPHLTENYGASRDPPEKQAPMCTVHSFPHNIDHCLTWARSEFEGLLEKTPTEVNAYLINPSDYISAMQKAGDAQARDTLDRVLECLDKERCDTFQDCITWARLRFEDYFADRVKQLTFTFPEEATTSSGAPFWSAPKRFPRPLQFSVDDASHLQFLLAASILRAETFGILIPDWVKSPQKLAEAVDKVIVPDFQPKKDVKIVTDEKATSMAASSIDDAAVINELVVKLETCRQELPSGYKMNPIQFEKDDDTNYHMDLIAGLANMRARNYSIPEVDKLKAKFIAGRIIPAIATSTAMATGLVCLELYKVLDGGHKVEDYRNTFANLALPLFSMAEPVPPKVVKHQDMNWTVWDRWILKDNPTLRELLQWLQNKGLNAYSISYGSCLLYNSMFPKHKERMDRKLVDLAREVAKADLPPYRKHFDVVVACEDEEDNDVDIPQMSIYFR

SEQ ID NO: 15069 - protein, 112 aa, Salmonella typhimurium LT2
MKLVTVIIKPFKLEDVREALSSIGIQGLTVTEVKGFGRQKGHAELYRGAEYSVNFLPKVKIDVAIADDQLEEVIDIISKAAYTGKIGDGKIFVAELMRVIRIRTGEADEAAL

SEQ ID NO: 15070 - protein, 371 aa, Prochlorococcus marinus
MAMGNNSNSSIRSESIQPSQNARIEVIGVGGGGSNAVNRMILSDLQGVSYRVLNTDAQALLQSSAENRVQLGQTLTRGLGAGGNPSIGEKAAEESRAELQQALEGADLVFIAAGMGGGTGTGAAPVVAEVAKQSGALTVAIVTKPFSFEGRRRMRQADEGIAKLTESVDTLIVIPNDRLKDAIAGAPLQEAFKNADDVLRMGVKGITDIITLPGLVNVDFADVRSVMTEAGTSLLGIGIGSGRSRAAEAAQAAINSPLLEAGRIDGAKGCVVNITGGKDMTLEDMTSASEVIYDVVDPEANIIVGAVIDEALEGEVQVTVIATGFDGNQPYTKQKAGAKLSPQSLYRQTPNKEPGASIPEFLRLRQLRRDQ

SEQ ID NO: 15071 - protein, 379 aa, Colwellia psychrerythraea 34H
MKELLKGNPELLITVVGIGGCGCNTVNMLHENNLSSQVNLVAVNTDLAALNSINVENKILIGENLTNGYGAGSDPSIGYQAAQESEGMLRSAIMDSDIVIITAGFGGGTGTGASPLVAKIARELNISCLAIVTLPFESEGQIRMDYALQGIGDIKEPIHAYITLSNDLLLAGLGETVGLFSAFNQSNEVLKNLLIALVQMLNETGYVNVDKNDFSTILSFEGESILGVGKANSEEEAFDALDQALNNPLVSIANIDTAKGIIFQLFCKSEPKLSTYNGLIDHIRTRVTNRSVLIVPGVTLDPNLTSEIEILIIGSGISSSKPEPIKDTIIIDKETCELVQNFESTEPEYIDDELSFINQGESMTDIPAITRKLMAINRD

SEQ ID NO: 15072 - protein, 403 aa, Vibrio parahaemolyticus RIMD 2210633
MKRVVITGMGIVSSIGNNVEEVLASLKAGKSGITASEQFKEHGLRSQVWGDLKINPAEHIDRKQMRFMGDAAAYAYLSMQQAIEDAGLTEEQVSNDRTGIVAGSGGASALNQTVATDIMREKGVKRVGPYMVPRTMSSTVSACLATPFKIRGVNYSMSSACATSAHCIGHAMELIQLGKQDIVFAGGGEELDWSQTMMFDAMGALSTKYNDTPEKASRTYDADRDGFVISGGGGMLVIEELEHALARGAKIYGEIVGYGATSDGYDMVAPSGEGAVRCMKMAMQDVDSIDYVNTHGTSTPVGDVKELGAIQELFGDNSPAISATKAMTGHALGAAGVHEAIYSTLMLDNNFIAPSINIENLDEAAKGLDIVTEARDAELTTVMSNSFGFGGTNATLVIKKYQA

SEQ ID NO: 15073 - protein, 220 aa, Nicotiana attenuata
MSAFGKLLVIMAMAILAINLDKASAGDPDMLQDVCVADLTSSFTINGFLCKKNFSEVDFSSMAIAKPGATNNTYGSVVTGANVMKVPGLNTLGVSLSRIDYAPGGINPPHTHPRATEMIFVTEGELDVGFITTSNVLISKHIVKGEVFVFPKGLVHFQQNNGKVPAAVVAAFNSQLPGTQSIATTLFASTPTVPDHVLTKAFQIGTKQVEKIKSRLAPKK

SEQ ID NO: 15074 - protein, 256 aa, Streptomyces avermitilis MA-4680
MHSTTEVRTETIGSSLLITIDRPKARNAVNAAVATQLAFAIDQLEADPALRAAVLTGAQGTFSAGMDLKAALAGESPEIPGRGFGGLTRARTTKPLIAAVEGWAMGGGFELALGCDLIVAADDARFGLPEVGRGLIAAGGGVIRLPKRIPYHLAMELLLTGEPVSGERAGQLGIANRVVAAGETVATALHLAERIAQNAPLALAAVKNLVRAADGAPEEEAFAVQGRLMATLAASADVREGMTAFTERRSPVWQGR

SEQ ID NO: 15075 - protein, 353 aa, Saccharomyces cerevisiae
MPKRIVYNISSDFQLKSLLGEGAYGVVCSATHKPTGEIVAIKKIEPFDKPLFALRTLREIKILKHFKHENIITIFNIQRPDSFENFNEVYIIQELMQTDLHRVISTQMLSDDHIQYFIYQTLRAVKVLHGSNVIHRDLKPSNLLINSNCDLKVCDFGLARIIDESAADNSEPTGQQSGMTEYVATRWYRAPEVMLTSAKYSRAMDVWSCGCILAELFLRRPIFPGRDYRHQLLLIFGIIGTPHSDNDLRCIESPRAREYIKSLPMYPAAPLEKMFPRVNPKGIDLLQRMLVFDPAKRITAKEALEHPYLQTYHDPNDEPEGEPIPPSFFEFDHYKEALTTKDLKKLIWNEIFS

SEQ ID NO: 15076 - protein, 562 aa, Vibrio vulnificus CMCP6
MNNDKRPLYIPFAGPALLSTPLLNKGSAFSAEERISFNLEGLLPETTETIQEQVERAYMQYKAFESDMDKHIYLRNIQDTNETLFYRLVQNHITEMMPIIYTPTVGAACENFSNIYRRGRGLFVSYANRDRIDDILNNASNHNVKVIVVTDGERILGLGDQGIGGMGIPIGKLSLYTACGGISPAYTLPIVLDVGTNNPQRLADPMYMGWRHPRITGADYDAFVEEFIQAVQRRWPDALIQFEDFAQKNAMPLLERYKNRICCFNDDIQGTAAVTVGSLMAACQAAGSKLSEQRITFLGAGSAGCGIAEAIIAQMVSEGISDKKARSQVFMVDRWGLLQEGMPNLLDFQQRLVQKHSVTAKWETEANGFSLLDVVKNAKPTVLIGVSGAPGLFTQEVIQEMHKHCPRPIVFPLSNPTSRVEAVPADIIRWTNGDALVATGSPFDPVIHEGKTYPIVQCNNSYIFPGIGLGVLAVNAKRVTDEMLMESSRALATCSPLAINGKGALLPPLEEIHTVSKRIAYAVAKKAIEQGVALEIADDALQVAIEQHFWQPVYRRYKRTAF

SEQ ID NO: 15077 - protein, 183 aa, Mycobacterium tuberculosis
MSYYHHHHHHDYDIPTTGNLYFQGAMVAISFRPTADLVDDIGPDVRSCDLQFRQFGGRSQFAGPISTVRCFQDNALLKSVLSQPSAGGVLVIDGAGSLHTALVGDVIAELARSTGWTGLIVHGAVRDAAALRGIDIGIKALGTNPRKSTKTGAGERDVEITLGGVTFVPGDIAYSDDDGIIVV

SEQ ID NO: 15078 - protein, 406 aa, Bartonella henselae str. Houston-1
MRRVVVTGMGIVSAIGNNPGTVLTSLYEAKSGISYAPQYAKLGFRSRVYGKPDINIEELVDRRALRFHGRGTAWNHIAMDQAIADAGLEPHEVSNEHTGIIMGSGGASTQSIVEAADITRQKSPKRVGPFVVPKAMSSTASATLATFFKIKGVNYSISSACATSNHCIGNAYEMIQYGKQDRIFAGGCEDLDWTLSVLFDAMGAMSSKYNDVPEKASRAYDAHRDGFVIAGGAGVLVLEELECAKARGAKIYGEIVGYGATSDGHDMVAPSGEGAERCMRMALATVKNKIDYINPHATATPVGDPPEIEAIRRIFGAGDQCPPISATKSLTGHSLGAAGVQEAIYTLLMMNHNFICESAHIEELDPAFADMPIVRERRDHQQLNTVLSNTFGFGGTNATLVFQRYG

SEQ ID NO: 15079 - protein, 544 aa, Listeria monocytogenes str. 4b F2365
MAYSFKLPDIGEGIHEGEIVKWFVQPGDKIEEDESLFEVQNDKSVEEITSPVSGTIKEIKVAEGTVATVGQVLVTFDGVEGHEDDAEEESAAPKAESTESTPAPAQASGKGIFEFKLPDIGEGIHEGEIVKWFIQPGDKVEEDQSIFEVQNDKSVEEITSPVDGTVKDILVSEGTVATVGQVLVTFEGDFEGEASHESTPESPAEEAELTNNDATSAPVTGGNGTPSSKKDPNGLVIAMPSVRKYAREKGVNIAEVAGSGKNNRVVKADIDAFLNGEQPAASTTTAQTEEKAAAPKAEKAAAKQPVASSDAYPETREKLTPTRRAIAKAMVNSKHTAPHVTLMDEIEVTALMAHRKRFKEVAAEKGIKLTFLPYMVKALVATLRDFPVLNTTLDDATEELVYKHYFNVGIAADTDHGLYVPVIKNADKKSVFQISDEINELAGKARDGKLTADEMRHGSATISNIGSAGGQWFTPVINYPEVAILGVGRIAQKPIVKDGEIVAAPVLALSLSFDHRVIDGATAQKAMNNIKRLLNDPELLLMEV

SEQ ID NO: 15080 - protein, 228 aa, Trichodesmium erythraeum IMS101
MTKTDDKRIVRDYFNSTGFDRWQRIYGDGQVNKVQLDIRKGHQQTIDTVLNWLQADDNLQGLSICDAGCGVGSLSIPLAKSGAVIYGSDISEKMVLEAYQRAKSSLINIDNINFVAQDLETLSGKYHTVVCLDVLIHYSQDQVATMINHLISLAESRLIISFAPKTLALSILKKVGELFPGPSKTTRAYQHRETDIIKIIESNGFSIQRQSMTSTSFYYSRLLETVRK

SEQ ID NO: 15081 - protein, 83 aa, Rhodobacter capsulatus
VDGSISAHQGFRILFEGGSRAVLRLSGTGTEGATLRVYLERYVAGPEGLTEDPQHALAPIIAATEDLVGIKARTGRKGPDVIT

SEQ ID NO: 15082 - protein, 67 aa, Brassica napus
MEISTALMILSAITAYFLWLTFISRCLKGPRVWPLVGSLPGLIENCERMHDWISDNLLACSGTYQTC

SEQ ID NO: 15083 - protein, 559 aa, Bartonella henselae str. Houston-1
MRYKSMGDSLSIRNEKAFEAALQALRRHAIKDGVYDIRRHFIEDEQRFSNFSLNLDDFLFDFSKCGVTFKTLQLLDDLAVAADVLGRRDAMFSGKAINTTEKRSVLHIALRLPADEVFMLDGTDLVHDIQGVLADMERFSDMVRDGSYKGNSGEKIIDIVNIGIGGSDLGPAMVTYALKPYHDGPNCHFVSNADSAHISDTLSVLNPATTLFVIASKTFTTAETIANAQVARQWIMSHLGKEAVCKHFIAVSSALDKVAEFGIDSSRTFRFWDWVGGRYSIWSAIGLVVMLAIGGQNFRQFLEGAQHMDRHFKTAPLRKNIPIRFALLGFWHRVVCGYASRAVIPYAQRLARFPAYLQQLDMESNGKQVSLDGKTLTFSSGPVVWGDSGTNGQHAFFQLLHQGTDVIPVEFILFIKGHEQNLHPMYDMLVANCLAQSKALMKGRSVEDARRMLLKSGIDERESENLALHKSFAGNRPNMMLVQDLLTPFALGRLIALYEHRIFVEGILMNINSFDQWGVELGKELANELLPILRGENKTNNRDSSTLGLLAHIQARRGE

SEQ ID NO: 15084 - protein, 351 aa, Staphylococcus aureus subsp. aureus MSSA476
MTKISKIIDELNNQQADAAWITTPLNVYYFTGYRSEPHERLFALLIKKDGKQVLFCPKMEVEEVKASPFTGEIVGYLDTENPFSLYPQTINKLLIESEHLTVARQKQLISGFNVNSFGDVDLTIKQLRNIKSEDEISKIRKAAELADKCIEIGVSYLKEGVTEREVVNHIEQTIKQYGVNEMSFDTMVLFGDHAASPHGTPGDRRLKSNEYVLFDLGVIYEHYCSDMTRTIKFGEPSKEAQEIYNIVLEAETSAIQAIKPGIPLKDIDHIARNIISEKGYGEYFPHRLGHGLGLQEHEYQDVSSTNSNLLEAGMVITIEPGIYVPGVAGVRIEDDILVTNEGYEVLTHYEK

SEQ ID NO: 15085 - protein, 335 aa, Mesorhizobium loti MAFF303099
MSDNKPFGGSFGSNGGQYATTVQYGGTAAAPAKVSLGDTPAAAPAGDVIKDTTTAAFAADVIQESRRQPVLVDFWAPWCGPCKQLTPQLEKAVRAAGGKVKLVKMNIDDHPSIAGQLGIQSIPAVIAFKDGQPVDGFMGAIPESQIAEFITKVGGKGNGAPAVAEALAAATEAREAGDMQTAADIFDAILAQAPETIEAIAGLGELLFEAGDTEGAEALLATAPEAKKDAPVLAALRAKMALAAQAAELGNPAEFERRLAENPKDHQARFDLAMIQNARGERTAAADNLLAIIKADRGWNEDGARTQLLQFFEAWGMTDEATLAARRKLSALLFS

SEQ ID NO: 15086 - protein, 327 aa, Novosphingobium aromaticivorans DSM 12444
MTKTFGRQSTTDDVLAGLDLTGKTILVTGVSAGLGVETTRALVSRGAKVVGTARDLAKARKALVHAGVDRASIELVELDLADLASVRRASDKLRLEGQPFDLVIANAGVMAPPFGLTADGFETQFGTNHLGHFAFVNRIAGLMRPGSRLVLLASSGHRFANVDLADPNFESSAYDPFVAYGRSKTANILFAVEFDRRYRSLGLRATAVHPGGIRTELDRHMGDGQLQSLVDQINADMAKEGKPPLEWKSPPQGAATTLWAGLVADADDVGGRYCEDCQVSPVVRDESIGFASPGVRPYALDAEMAKALWAKSEEWVSETFDLRSAAD

SEQ ID NO: 15087 - protein, 762 aa, Porphyromonas gingivalis W83
MEQDASAKNPDIETENKGAISEEEALIQREYSLLIQDYLNSNHRRKVEKIDKAFHLAKDAHAGAKRRSGEPYILHPIAVARIVCQEIGLGSTSICCALLHDVVEDTEYTVEDMRDMFGDKVAQIVDGLTKISGEVFSNSSAQAENFRKLILTMNDDIRVILIKIADRLHNMRTLDSMLPAKQMKIAGETQYVYAPLAHRLGLFAIKSELEDLSFKYEHPQEYEAIKEKIRITEQHRLEMFEHFAAPLKQRFAGMDMSYEMKARVKSVYSIWKKMEKKGVPFEEIYDLFAVRIIFESSPTIPDKNRCWEIYSAITDIYRNRPDRIRDWVSNPKSNGYQALHLTVMGPDGEWVEVQIRSRRMDDIAEKGFAAHWKYKGDNVEEDSELEKWLSTIQEILENPNPNALDFLDTIKLNLFSNEVMVFTPKGEIKRLPQGATALDFAYSLHSDLGDHCIGAKVNHKLVPLSYVLNSGDQVEVLSSKSQQPTEEWLRYVTTARAKSKVDTFLRRKRRELINRGEERVVSVIRTSESMVSAELLDRIAAYFGFLNRETFFYAVGTGTVSLPESFKKLLQGEHSGNFLMRAIRSALKAGKSNKTSSPSGKPAEKEDKKAYNTKKTYILQEDEFSRNYQIAECCKPIPGDDAFGFINDDNTVVVHKRSCPIAMRLKSSFGNRILSTEWSLHSRTSFEAKLALKGIDSTGILTAVTQVISEDFNVGIKHIQLTAKDGIFEGQIHLLVHSSDDLLKICHQLRQNKYIQSVGRIS

SEQ ID NO: 15088 - protein, 473 aa, Brucella melitensis 16M
MRIGKMEMQTRYPDVKLFIDGTWRDGSRGETIEIFNPATDEVIGHIARATTADLDDALAAVDRGFEAWSKVSAFDRYKIMRRAADIFRSRGEEVARLLTMEQGKPLAEARIEAAAACDLIDWFAEEARRSYGRIVPPRQAYVMQAEVKEPVGPVAAFTPWNFPINQAVRKISAALAAGCSILLKAAEDTPAAPAELVRAFAEAGLPDGAINLVYGDPAEISAYLIPHPVIRKVSFTGSTQVGKQLAALAGLHMKRVTMELGGHAPVIIAADADVEQAIKVVSGSKFRNAGQVCISPTRFLIENSVYDQVVEGMAAYATSLKVGDGLEAGTTMGPLVNAKRVNAMERLVQDAREHKARVVTGGERIGNRGNFFEPTILADVPRDAAIMNEEPFGPVALLNRFDALDEALSEANRLNYGLAAYAFTGSSAKAARISSTVRSGMITINQLRSGPAGSALRRDQRFRLWNGRRCRRA

SEQ ID NO: 15089 - protein, 254 aa, Arabidopsis thaliana
MSTTTTTAALPQRHQSKVDPQNVNRAVKSLLKWWDSKSKTENSESLENDGFVYLIVTLKRIPQLDRTNPLMIPLPHPLIDLVAEDPPELCLIIDDKHKNKITKEAALKKIEAEKIPITTVIKVSKLKSDLRKLEEEKRFELYFAERRLMPMLPKLLGKEFVKKNKTPIAINLRHGSWKEQIEKACESALFFVGTGTCSVVKVAKLSMGRNEIAENVVAAMNGIGDLVPGRWKNVKLFHLKLLESLALPVYQSVA

SEQ ID NO: 15090 - protein, 400 aa, Oryza sativa
MAAASSLHAAPRVGSSSSFSSSSSAGRRSASAARSVRVAAAAGSCAARRAGGRMVARAAVASKAESPASAASSKSDGHEVLLFEALREALIEEMKEDPTVCVFGEDVGHYGGSYKVTKGLAEMFGDLRVLDTPIAENSFTGMGVGAAMKGLRPVVEGMNMGFLLLAYNQISNNCGMLHYTSGGQFKIPIVIRGPGGVGRQLGAEHSQRLESYFQSIPGLQMVACSTPYNAKGLMKAAIRSENPVVLFEHVLLYNLKEKIPDEEYVLCLEEAEMVRPGEHVTILTYSRMRYHVMQAAKTLVNKGYDPEVIDIRSLKPFDLHTIGNSIKKTHRVLIVEECMRTGGIGASLRSAIIDNFWDYLDAPIMCLSSQDVPTPYAAPLEDATVVQPAQIVAAVEQICQ

SEQ ID NO: 15091 - protein, 469 aa, Thermobifida fusca YX
MAAPQNYLAVIKVVGIGGGGVNAVNRMIEEGLKGVEFIAINTDAQALLMSDADVKLDVGRELTRGLGAGANPDVGRKAAEDHREEIEEVLKGADMVFVTAGEGGGTGTGGAPVVANIARSLGALTIGVVTRPFSFEGKRRATQAEAGIAMLREEVDTLIVIPNDRLLSISDRQVSVLDAFKAADQVLLSGVQGITDLITTPGLINLDFADVKSVMSGAGSALMGIGSARGDDRAVAAAEMAISSPLLEASIDGAHGVLLSIQGGSDLGLFEINEAAQLVANSAAAEANIIFGAVIDDALGDEVRVTVIAAGFDEPQVESPSPTPSRAVSAPTTPAAPERFTPPPPPPPPLRTVEPPRSEPPTPSLARDPRPTTEPDSGAETAAEPAATEEPQSDSAAASEAKETKDTPANRDEDRPYRPGGLYPMGGEGGYTRPRVSDSPFSRSGEIPTPRRRVVFDEGDDLDVPDFLK

SEQ ID NO: 15092 - protein, 289 aa, Methanosarcina acetivorans C2A
MTENKSFEIVDTTLRDGEQSAGVVFSIEERVNIISALDKANVKWIEAGIPAMGKQECEALSLMLELPIKSNLIAWNRANLKDLKASIECGFKFVHVSLPVSDLHIEYKLQKSRAWVLDQLKTCLEYLKNSGITIIVGAEDASRADPDFFLQYADVAASYGAIRIRYSDTVGCLDHFTTYNKIESIVNRSPLPVEIHAHNDFGLALANTLAAYRAGAKFASVTITGIGERAGNASMEETAVSLKHFYNYDCGIELKALPSLVEMVAKASERTLFPYKPVVGPFTQNVVDN

SEQ ID NO: 15093 - protein, 376 aa, Methanosarcina acetivorans C2A
MKADIKVSIVDQTINEVVRLGVNNPADVRFMLSVLKKYSFDAADVSLNNLEKNMVEFEADEFSESMRCRVKCSGQEIFRAKKLGFSKIVINTSLNPLTPIQDMLEPVLQMACSNDQEIYLSIDNALEFSIRDVETIYPLIPKYGIKRLILGDRSGKADPFTTYDKLGFLGNTIQCPVEYVGYNDYGTATANTLSALRAGIEYVATAVSGIGIPGVAAMEEVLMAARHLWKNELVPDGYSIAADCENILYRAGIMLPGEKAIIGKNVFAHESGIHVDGVLKNPNLYEAIKPEEVGLRRLLVIGKHSGTASLVQKLRHLGLSLSPEKAAALLEKVRNTAILQKKPLTDLQLKTLYDLQMESVKDPNIHLSGKGEMPCD

SEQ ID NO: 15094 - protein, 150 aa, Glycine max
MEFQGQHDNPANRVDEYGNPFPLAGGVGGGHAAPGTGGQLQARRGEHKTGGILHRSGSSSSTSSSEDDGMGGRRKKGMKEKIKEKLPGGHKDNQQHMATGTGTGGAYGPGTGTGGAYGQQGHAGMAGAGTGTGEKKGIMDKIKEKLPGQH

SEQ ID NO: 15095 - protein, 907 aa, Pseudomonas syringae pv. syringae
MLLLTILPASLMAAMLGGYFTWMQLSELQSQLLQRGEMIAQDLAPLAANALGRKDKVLLSRIATQTLEQTDVRAVSFLDTDRTVLAHAGPTMISPSPIGSGSQLLSSTGTDATRYLLPVFGSQRHLTSPIIPAEADTLLGWVELEISHNGTLLRGYRSLFASLLLILTGLAFTATLAVRMSRTINGPMSQIKQAVSQLKDGNLETRLPPLGSRELDELASGINRMAATLQNAQEELQLSIDQATEDVRQNLETIEIQNIELDLARKEALEASRIKSEFLANMSHEIRTPLNGILGFTHLLQKSELTPRQFDYLGTIEKSADNLLSIINEILDFSKIEAGKLVLDNIPFNLRDLLQDTLTILAPAAHAKQLELVSLVYRDTPLALSGDPLRLRQILTNLVSNAIKFTREGTIVARAMLEDETEEHAQLRISVQDTGIGLSSQDVRALFQAFSQADNSLSRQPGGTGLGLVISKRLIEQMGGEIGVDSTPGEGSEFWISLKLPKAREDKEESLNIPLGGLRAAVLEHHDLARQALEHQLEDCGLQTIVFNNLENLLNGVTAAHETPAAIDLAVLGVTALEISPERLRQHIWDLENLNCKVMVLCPTTEHALFQLAVHDVYTQLQAKPACTRKLQKALSELIAPRAVRADIGPPLSSRAPRVLCVDDNPANLLLVQTLLEDMGAEVVAVEGGYAAVNAVQQEAFDLVLMDVQMPGMDGRQATEAIRAWEAERNQSSLPIVALTAHAMANEKRSLLQSGMDDYLTKPISERQLAQVVLKWTGLALRNPAPERQNEALEVHVGPLVLDHEEGLRLAAGKADLAADMLAMLLASLDADREAIRVARANQDVHALIERIHRLHGATRYCGVPQLRSACQRAETLLKQNAPHTEEALNDLDKAIIRLEAEARVMA

SEQ ID NO: 15096 - protein, 576 aa, Vibrio parahaemolyticus RIMD 2210633
MKDKYLDTYQQEALQEALVELKQTKQREKLLADENKAILSAISAMSEAKNRNEIFSGLNSVLKKYISFEDFIVITRDDNRYPFKTLISTNSVFDKVEWLHGNTMDRALNGECILLFEPAKLLEFENLNSFVKTHVNSVILTGIRSEVTQSIILLIGAQKGHFSIENKETLRRFRPLIERAVIDIETKEKLQRIVEVRTTQLARAREEAELANQSKSEFLAMMSHEIRTPLNSVLGMLDILRQSTLSDEQFDALNQMECSAELLLAIISDILDLSKIESGSFQLNEQWIHLNDTVTFVISQQKQVAITKNLSFNFDCQISSDKQYWIDSTRLSQILFNLIGNAIKFTDSGSVSVSVAEENDEVVVSISDTGIGISRAKQAHLFTAFHQGDRSITRRFGGTGLGLAITKHLVEMMRGEISVKSRENEGSDFTIRIPVLTRYNQSRPVKIEHNRPSKALNLLIVEDTQSNQLVIKLILNKLGHNVHIASHGAEALTFLEENDTRIDMILMDVSMPVMDGITATRLIRKKGITIPIVALTAHALESDKDKCLDAGMDSFVSKPVRRQDIYEAIQSLIETA

SEQ ID NO: 15097 - protein, 498 aa, Mesorhizobium sp. BNC1
MEEIGHFIGGKRVAGKSGHSQNVMQPMDGTVRATVALASAAEVREAVENAKAAQIAWGATNPQRRVRVLMKFLELVHKEYDSLAELLAREHGKTILDAKGDIQRGLEVVEVCIGAPHMMKGEYTEGAGPGIDTYSMRQPLGVVAGITPFNFPAMIPLWKIAPAIACGNAFILKPSERDPGVPMRIAELFVEAGLPAGVLNVINGDKEAVDAILDDPDIQAVGFVGSTPIAQYIYGRATANGKRAQCFGGAKNHLIIMPDADLDQTVDALIGAGYGSAGERCMAVSVAVPVGKETADRLVEKLIPRVESLKVGPSTDASADFGPLVTKEALERVKGYVDIGVKEGAKLVVDGRNFKMQGYENGFYMGGCLFDEVTPEMRIYKEEIFGPVLSVVRANNYEEALRLPNDHEFGNGVAIFTRDGDAARDFAARVNVGMVGINVPIPVPIAYYTFGGWKASAFGDLNQHGPDAFRFYTKTKTVTSRWPSGIKDGAEFVIPTMR

SEQ ID NO: 15098 - protein, 250 aa, Magnaporthe grisea 70-15
MARRLAPPRSLQNLNRALSTFTPQASLSTSICQRTLRTATWTQDLSRSNRIPMAHPSAGQASRLLHTTAPRPARVPQQQQQQGGVPEERQGGSHGTDIGSLDVLADAPEPEFSVSACLADGFRLANGTTVRDSGLLLVDGEAFSWRPWGDQASPSLKLVNAKGQWELPNPEEALALLGLVWPRPDLLLLGLGAEMRPLCPATRKFITGLGIRVEVLDTRNAAAQFNLLATERGTRDVAAALIPAGFGRGV

SEQ ID NO: 15099 - protein, 80 aa, Arabidopsis thaliana
MASFKLWVCLILLLLEFSVHQCRPLVAEESPSDSGNIRKIMRELLKRSEELKVRSKDGQTVLGTLDSKRLSPGGPDPRHH

SEQ ID NO: 15100 - protein, 965 aa, Colwellia psychrerythraea 34H
MTSKTIVNSLAELEQTQDFIRRHIGPSESETQAMLNDLGVESVDALIDEIVPSDIRLADLPNVEESKTEVQALADLKAVASLNKVNDTYIGLGYFGTLTPNVILRNVLENPGWYTAYTPYQPEIAQGRLESLLNYQQMCIDLTGLELASASLLDEGTAAAEAMALAKRVSKNKKSNLFFISDDVYPQTIDVVKQRAEMFGFDIVVAPAADAAEHDIFGALIQYPGASGQVTDVSELIAKIHDNKGIVAVAADIMSLVLLKSPGELGADAVIGSSQRFGVPMGYGGPHAAFFTTLDKYKRSLPGRIIGVSKDTRGKNALRMAMQTREQHIRREKANSNVCTAQVLLANMAAFYAVYHGPQGLKTIANRIHRLADILCLGTATKGLTAVHANYFDTLTFNVDNKDEIVARALAANANFRTDVDGQISIALDETTTRENVAQLFDILLGEGHGLNVSDLDDQIVASGHSSIPASLVRESAILTHPVFNSYHSETEMLRYIKRLENKDLALNHSMISLGSCTMKLNATAQMIPVSWPEFANMHPFAPVNQAQGYKAMIDELAKWLVELTGYDKMSMQPNSGAQGEYAGLIAISKYHESRGDSHRNICLIPASAHGTNPASAMMVDMKIVIVACDKEGNVDMADLKAKAEELADNLACIMITYPSTHGVYETTIAEICNIIHDNGGQVYLDGANMNAQVGLTSPGFIGADVSHLNLHKTFAIPHGGGGPGMGPIGVKSHLAPFLPDHALINVDEATKGNGAVSSAPFGSASILPITYLYIALLGKKGVTDATKYAITNANYVSKKLSEHYPILYSGKNGRVAHECIVDLRPLKASSGVTEVDMAKRLMDYGFHSPTMSFPVAGTFMIEPTESESKVELDRFIEAMVCIRDEVRKVESGEWASDNNPLHNAPHTLADITEPWDRPYSIQEAVFPVVAVTANKFWPTVNRIDDVFGDRNLICSCPPIESYID

SEQ ID NO: 15101 - protein, 673 aa, Candida glabrata CBS 138
MPVDFAKLCLSDKPADAVAVKSLVFKPKTAKTATPVPIVVVALQSTNTPSPAIAHHSGLKDPRLARDELFQSFFKCETAKGFTLAYLTNAESEFKLLIDNNLESVAPETLLQLNDELSIKKSDLCSFLSQFDQYKQIVDFSVEIKKEAQPKQKKEKPAQTNAAIEDAKLIGITVDKSLDFSGWYQQVVTKGEMLDYYDISGCYILRPNSYAIWESIQDYFNAKIKAIGVKNAYFPMFVSSRVLEKEKDHVEGFAPEVAWVTRAGSSELEEPIAIRPTSETVIYPYYAKWIQSYRDLPLKLNQWNSVVRWEFKHPQPFLRTREFLWQEGHTAFLDQDDAEKEVLQVLDFYAGIYNELLAVPVVKGKKTEKEKFAGAAFTTTVEGYIPETGRGIQGATSHHLGQNFSKMFNLSVENPLGPEHPKVYAYQNSWGLSTRTLGVMVMTHSDNKGLVVPPRVAQHQAVVIPVGITKKTTDEQRKSIHDAAKNVEDRLLKASVRAFGDYNDNYTPGWKFSQYELKGIPLRVELGPKDIEQGQVVVVRRNDSRKYVVKLDELESRIPEIMDEMHNDMYNKAKELFDSHRIIVDEWKDFVPALNKKNVILSPWCGVMDCEEDIKDASARKDDGEEFEQDEKAPSMGAKSLCIPFEQPPLKEGQKCVKCDRAAIQYCMFGRSY

SEQ ID NO: 15102 - protein, 160 aa, Bacillus anthracis str. 'Ames Ancestor'
MTVYDFSAKTITGEEKSLKDYEGKVLLIVNVASKCGFTPQYKGLQEVYDKYKEQGLEILGFPCNQFGGQEPGTEADITSFCELNYGVNFPMFAKIDVKGDKAHPLYTYMTEQAPGLLGMKAVKWNFTKFLIGKDGKVVGRFAPQTKPVDLEVEIEKVLGE

SEQ ID NO: 15103 - protein, 319 aa, Vibrio vulnificus CMCP6
MSDMKHSKLLILGSGPAGYTAAVYAARANLNPVLITGMQQGGQLTTTTEVENWPGDPEGLTGPGLMDRMKEHAERFETEIIFDHINEVDFSTRPFVLKGDAASYSCDALIISTGASAKYLGLESEEAFKGRGVSACATCDGFFYRNQKVAVVGGGNTAVEEALYLSNIAAEVHLIHRRDSFRAEKILINRLMDKVQNGNIVLHTDRVLDEVLGDEMGVTGVRLKDVKTGGTEELDVMGAFIAIGHSPNTQIFQGQLDMKDGYILVKSGLEGNATQTSVEGIFAAGDVMDHNYRQAITSAGTGCMAALDAERYLDSLNDK

SEQ ID NO: 15104 - protein, 384 aa, Brassica napus
FWKTIPPTEPYRVILGDVRDKLYHTRERSRQLLSNGISDIPAEATFTNVEEFLEPLELCYRSLCACGDRPIADGSLLDFLRQVSTFGLSLVKLDIRQESERHTDVLDAITKHLDGSSYRDWSEERRQEWLLAELSGKRPLFGPDLPKTEEIADVLDTLKVISELPSDCFGAYIISMATSPSDVLAVELLQRECHVKKPLRVVPLFEKLADLEAAPAAVSRLFSLDWYKNRINGKQEVMIGYSDSGKDAGRLSAAWELYKAQEELVKVAKKYGVKLTMFHGRGGTVGRGGGPTHLAILSQPPDTVNGSLRVTVQGEVIEQSFGEEHLCFRTLQRFTAATLEHGMNPPVSPKPEWRALLDAMAVVATEEYRSVVFQEPRFVEYFRL

SEQ ID NO: 15105 - protein, 554 aa, Erwinia carotovora subsp. atroseptica SCRI1043
MCSIFGVLDLKSDPVELRKKALELSRLMRHRGPDWSGVYASDKAILAHERLSIVDVNTGAQPLYNAERTHILAVNGEIYNHQALRQQYGDRYAFQTGSDCEVILALYQEKGPEFLDELRGMFAFALYDSEKDAYLIGRDHLGIIPLYMGYDEHGNLYVASEMKALVPVCRTIKEFPAGSYLWSKDGEIREYYQRDWFDYDAVKDNETDKVALHDALEEAVKSHLMSDVPYGVLLSGGLDSSVISAITKKYAARRVEDDARSEAWWPQLHSFAVGLEGAPDLKAAQEVAKHLGTVHHEIHFTVQEGLDAIRDVIYHIETYDVTTIRASTPMYLMSRKIKAMGIKMVLSGEGSDEVFGGYLYFHKAPNAKELHEETVRKLLALHQYDCARANKAMSAWGVEARVPFLDKNFLDVAMRINPRDKMCGNGKMEKHILRECFESYLPHSVAWRQKEQFSDGVGYSWIDTLKEVAANQVTDQQLETARFRFPYNTPGSKEAYLYREIFEELFPVSSAAECVPGGPSVACSSAKAIEWDESFKTLDDPSGRAVGVHQSAYK

SEQ ID NO: 15106 - protein, 623 aa, Methanothermobacter thermautotrophicus str. Delta H
MRFPPCLSNLINRRNHNHSRTDFFIPVSMVIKLTRISILDHDRCQPKKCNYVCIEYCPGVRMDEDTITIDEKTKKPIISEELCSGCGICTKRCPFKAISVINLPEALENPVHRYGQNQFELFGIPAVTSGDVVGLIGPNGIGKSTIVRILSGELRPNLGDFQDPPGWDEIINHFRGSQLQNYFQRLSKGEISVVHKPQMVDRIPRYVKGKVEDLLTGIDSDRTDEVIETLEIREIMGREISNLSGGELQSVAIAAAALREADFYYFDEPTSWLDVRQRLNAVKVIRSLAEAGKSVMVIEHDMAALDAMSDYVHILYGKPGAYGVVSNRRGVRVGINTYIRGFLREENVRFRKHEIEFKVKPPRVGEAGDILAEYTALSRAYPEFKLDVDEGTIYLNEVITAFGPNGIGKTTFAKILAGVEKPDEGKVKKKIKISYKPQYLSSDYTGTVEEFLYANAPSYGSNLFKSEIMRPFNLEEILDKPVSGLSGGELQRLAVAVALSREADLYVLDEPTAFLDVEQRLMAAKAIRRIIEGSNSSAMIIDHDIIFIDYVSDRAMVFSGMPGVEGHASAPTELRDAMNAFLGEVGITFRRDKETRRPRVNKPGSFLDREQKELGEYYYLKTE

SEQ ID NO: 15107 - protein, 488 aa, Trichodesmium erythraeum IMS101
MTSKLKFRINKTKNRRLLSAKYSRFLEPTKLINYLSRTKWFSPTKLACIPLLCLIIALWAGAANAQDQELTPEYIKGVLDAIWILVASVFVIFMNAGFGMLESGFCRQKNTVNILAKNLIVFAIATLVYWSIGFSIMFAGDHPFIGAGGFFLTGESSTYGLNPFPAGLPVPVFFLFQAAFAATAATIVSGAVAERVEFLAFLLFSILITGISYPITGHWIWGSGGWLGAMGFKDFAGSTAVHSVGGWAALVGAYILRPRRGKYDEKNQPQAIPGHNMGFATLGCLILWIGWFGFNPGSQLAADENVVYIAVTTNLAAAAGGATAAITSWSKDKKPDLSMIINGVLAGLVGITAGCDGVSYLEAVIIGSIAGMIVVFSVSFFDKLTIDDPVGAISVHLICGIWGTLAVGIFVEDTSIITQFIGIISVGLFTVILSSIFWLALRATVGIRVHPEQEYKGLDISEHGMEAYHGFVKEPDSLATGVSHDHIQ

SEQ ID NO: 15108 - protein, 341 aa, Wolbachia endosymbiont of Folsomia candida
QALEKSLCDKKIQLGINLTKGLGAGALPDVGKGAAEESIDEIMEHIKDSHMLFITAGMGGGTGTGAAPVIAKAAREARAAVKDRAPKEKKILTVGVVTKPFGFEGVRRMRIAELGLEELQKYVDTLIVIPNQNLFRIANDKTTFSDAFKLADNVLHIGIRGVTDLMVMPGLINLDFADIETVMSEMGKAMIGTGEATGEDRAISAAEAAISNPLLDNVSMKGAQGILINITGGGDMTLFEVDAAANRVREEVDENANIIFGATFDQAMEGRVRVSVLATGIDSNVNRDDNSSSNQSESSEQEKLKWAYSQNVGVQDKLPETKEYSTTEQESEGMKWGSNIY

SEQ ID NO: 15109 - protein, 317 aa, Corynebacterium glutamicum ATCC 13032
MSEEQSAVAPKIHDVAIIGSGPAGYTAAVYAARADLNPIMFEGYEYGGSLMTTTDVENFPGFEKGILGPELMENMRAQAERFGTDMHMELVDRVDLTGDIKKLWVGDDEYHARAVILSMGSAPRYLGVKGEQELLGRGVSACATCDGFFFRDQDIAVIGGGDSAMEEATFLTKFARSVTIVHRREEFRASAIMLERAQKNEKIRFVTNKTVEEVIEADGKVSGLKLNDTVTGEDSVLDVTAMFVAIGHDPRSEILAGQVEVDPSNYVLVQEPSTRTNLDGVFAAGDLVDSHYQQAITAAGSGCRAAIDAEHYLASLA

SEQ ID NO: 15110 - protein, 392 aa, Solanum tuberosum
MSCTVAIPNSPAFSPATRIPVTNSLLCKSASFSSSSPSRKSSESLTLTKFPSFTFSSLSSSSQLKILLIEKSSPETISLNRNSSECSTSAPISTSPTVSKRKRPARLDIPVVSTNFGNFPGTPTAAADFVEVEGDEYSVCCKRGRRGAMEDRYSALVNLQGNSKQGIFGVFDGHGGPKAAEFAAEHLNKNIMDELVRRNDEDVVEALKNGYLKTDTEFLSEEFGGGSCCVTALIRNGNLVVSNAGDCRAVVSRGGIAEALTSDHKPSRKDEKDRIETSGGYVDCSNGVWRIQGSLAVSRGIGDRYLKQWVIAEPETTVVELNPELEFLVLASDGLWDKVSNQEVVDAARPLCCTGMSKPQPLLASKKLIDLAVSRGSVDDICVMIIQLQQFW

SEQ ID NO: 15111 - protein, 107 aa, Corynebacterium glutamicum ATCC 13032
MSNVVAVTEQTFKSTVIDSDKPVIVDFWAEWCGPCKKLSPIIEEIAGEYGDKAVVASVDVDAERTLGAMFQIMSIPSVLIFKNGAKVEEFVGLRPKNEIVEKLEKHL

SEQ ID NO: 15112 - protein, 341 aa, Wolbachia endosymbiont of Folsomia candida
QALEKSLCDKKIQLGINLTKGLGAGALPDVGKGAAEESIDEIMEHIKDSHMLFITAGMGGGTGTGAAPVIAKAAREARAAVKDRAPKEKKILTVGVVTKPFGFEGVRRMRIAELGLEELQKYVDTLIVIPNQNLFRIANDKTTFSDAFKLADNVLHIGIRGVTDLMVMPGLINLDFADIETVMSEMGKAMIGTGEATGEDRAISAAEAAISNPLLDNVSMKGAQGILINITGGGDMTLFEVDAAANRVREEVDENANIIFGATFDQAMEGRVRVSVLATGIDSNVNRDDNSSSNQSESSEQEKLKWAYSQNVGVQDKLPETKEYSTTEQGSEGMKWGSNIY

SEQ ID NO: 15113 - protein, 249 aa, Burkholderia mallei ATCC 23344
MYKLVLIRHGESTWNKENRFTGWVDVDLTEQGNREARQAGQLLKEAGYTFDIAYTSVLKRAIRTLWHVQDQMDLMYVPVVHSWRLNERHYGALSGLNKAETAAKYGDEQVLVWRRSYDTPPPALEPGDERAPYADPRYAKVPREQLPLTECLKDTVARVLPLWNESIAPAVKAGKQVLIAAHGNSLRALIKYLDGISDADIVGLNIPNGVPLVYELDESLTPIRHYYLGDQEAIAKAQAAVAQQGKSAA

SEQ ID NO: 15114 - protein, 398 aa, Pseudomonas fluorescens PfO-1
MFELVDNIPASPVIKVIGVGGGGGNAVNHMVKSNIEGVEFICANTDAQALKNIGARTILQLGTGVTKGLGAGANPEVGRQAALEDRERIAEVLAGTNMVFITTGMGGGTGTGAAPIIAEVAKEMGILTVAVVTRPFPFEGRKRMQIADEGIRMLSESVDSLITIPNEKLLTILGKDASLLSAFAKADDVLAGAVRGISDIIKRPGMINVDFADVRTVMSEMGMAMMGTGCASGPNRAREATEAAIRNPLLEDVNLQGARGILVNITAGPDLSLGEYSDVGSIIEAFASEHAMVKVGTVIDPDMRDELHVTVVATGLGAKIEKPVKVIDNTVHTSMAAAQVQQPAPARQEQPAVNYRDLDRPTVMRNQAQAGAATAAKMNPQDDLDYLDIPAFLRRQAD

SEQ ID NO: 15115 - protein, 669 aa, Triticum aestivum
  misc_feature (458)..(458): Xaa can be any naturally occurring amino acid
  misc_feature (473)..(473): Xaa can be any naturally occurring amino acid
  misc_feature (480)..(480): Xaa can be any naturally occurring amino acid
  misc_feature (502)..(502): Xaa can be any naturally occurring amino acid
  misc_feature (549)..(549): Xaa can be any naturally occurring amino acid
  misc_feature (586)..(586): Xaa can be any naturally occurring amino acid
  misc_feature (612)..(612): Xaa can be any naturally occurring amino acid
  misc_feature (618)..(618): Xaa can be any naturally occurring amino acid
MNADYGAPTELAGPLQQRRALYQPRLPPCLQGATVRVEYGDATTTIDPTGAHAVAQAFPRTYGQRLVTFLAPDDTAGAGKAVNERPPIRVGVVFSGRQSPGGHNVVWGLHDALKVYNPQSILYGFIGGTEGLFANKTLEITNDVLASYKNQGGFDLLGRSIDQIRSSKQVSAAMTTCQDLNLDGLVIVGGVTSNSDAAQLAETLVQKNCKTKVVGVPVSLNGDLKNQFVETTVGFDTVCKVNSQLISNVCLDAISAGKYYYFVRLMGRKASHVALECALQSHPNMLIMGEEVALSKLTLMEVINKICDGVQARAELGKHHGVLLIPEGLIESIPEMYALIQEISILHNNNVPVTEIPTQVSPWAAALFQFLPPFIRRELLLHQESDNSAQLSQIDTEQLLAHLVEAEMIKRTKEGRYKGKKFSSVCHFFGYQARGSLPSNFDCDYAYVLGHISLHMIXAGLTGYMATVANLKXPIHKWRXSCCPITAMMSVRRLLRGPGPFXYGKPAIHPSPIDLKGKAYELLREKASSFLLDDFYRTPGGIQFEGPGXDAKPITLTIEDQDYMGDIEMLKLYLDKVKTIVNPVAXRDTLKSGDNSMISMTHVLTVMSQPSXMLTALXHFLSLEHQRIIYNWFLDTRFRFPFPKLNTHPICQQTWEYILIPGFLYFVQR

SEQ ID NO: 15116 - protein, 261 aa, Psidium guajava
NWGFFELVNHGIPPEMMDTIERMTKGHYKKCMEQRFRELVVSKGLEYVQKEVHDLDWESTFHLKHLPESNISQISDLDDDYRKVMKEFAVKLEKLAEQLLDLLCENLGLEKGYLKKAFYGSNGPTFGTKVSNYPPCPKPDLIKGLRAHTDAGGIILLFQDDKVSGLQLLKDGQWVDVPPMHHSIVVNLGDQLEVITNGKYKSVLHRVVAQTDGNRMSIASFYNPSTDAVIYPAPALVEREEEEAGKGTYPKFVFEDYMKLR

SEQ ID NO: 15117 - protein, 456 aa, Oceanospirillum sp. MED92
MSNTYSLVNPFDNSPLGEYEYTPWATLENQLAMLKEGQLSQRKTAAFQRAGVLNKLAALLKEHSEEMATLITQETGKTILDSRVEMMRAYNAAIASAEEARQIQGESLDSDAYAPAGGKIGVVCWKPLGTILCITPFNFPINIAIHKIGPAYAAGNTILFKPGPQNTASAQLLVKLCYEAGMPENTLQLCMPEFSDLDRLNAHPDVNAINFTGGTAAANAISAAAGYKKLLLELGGNDPLIVMDDGDLEAATTAAINHRFATAGQRCTAAKRLFIHANVYEAFRDLLVEKSSKLVVGDPMKDDTFVGPVINQGAADQIRTLIEQAIEDGASVALGNQYEGAFVYPTILENVSPTSEIMVEEAFGPVMPLYKFESVEEIIPIINNTAYGLQAGVFSQNLATIKELYEQLDVGTLAANDGPGFRTEHFPFGGVKESGIGREGIKYAIREMSYTKTLVI

SEQ ID NO: 15118 - protein, 286 aa, Dechloromonas aromatica RCB
MSEFSFDVTLEEFETKVLLPAQEVPVVVDFWAPWCEPCKVLKPMLEKLAEEYKGRFLLAKVNSDEFPELAQHFGVRSIPSVKVLFQGQLVDEFNGAIPESQIREFLDRIALPEGPEQINLREQAAALVVEGKLDEALAVLVQASQANPQDQAIQLDAVDVLLQLGRIDEAKQLLAGEYVNEADRANALRARLALAGGAADTAEIEARLAANPADNGARLELSRAYAAQSRFREAMEAALEVVIRDRAFDEGAGRKALLQLFEALGGSEQYDDLIREFRRKMSAALN

SEQ ID NO: 15119 - protein, 416 aa, Methanococcoides burtonii DSM 6242
MAEQNPFENARKQLQKCADILELDEGIHDILKNPMREMHVSLPIRMDDGSIKVFQGFRVQYNDAKGPTKGGIRFHPDETVDTVKALAAWMTWKCAVMDIPLGGGKGGVICNPKEMSQSELERLSRKYISSISMIVGPDKDVPAPDVYTNPQMMAWMMDEFSKFAGKNQFGVITGKPLSVGGSLGRGDATARGGLYAVREAAAEIGLELKDATVAIQGYGNAGYFAGTLCEELFGCKVVAVSDSRGGAVNMNGISAEAAQEHKKATGSVVGLAGTEPISNEDILELDVDILIPAALEHVITHENADNIKAKIVAELANGPTTPEADEMLFQKGVHLIPDFLCNGGGVTVSYFEMVQNFYMYRWSIERVHNRLDAKMTNAYHAVLEASKQYNVNMRTAAYVVAVNRVVEAMADRGWLY

SEQ ID NO: 15120 - protein, 901 aa, Dechloromonas aromatica RCB
MFGLFNWRSLQTRIAVGTLIVVLGILWTTVIALGQLLHRDMEESISAQQFSTVSLIANEIDRSILERQSIAESVASSLTATILASPAATQRLVEERKIPQRIFNWGIIVTDSQGTAIASTPLELDRKGTNYANYDFISKALSTGIPQIADPVFSPNSGLPVFTIVVPIQNPAGKTIGLVIGVTNLALPNFLDEIGSAKYGNTGDFLITAPAKRLFVASSDKRRVMKAGPPPGLNPVYDRYIGGYEGSGVAMSSRGVVELSSNKRIASTGWLMQAVLPTDEAFAPIHAMERHLIVISLILTLIATFASWWWLRLQFRPLSEISSLLRQMRDGEIPRQALPVIRQDEIGLLTEALNGLQEVIVTEEAMAAEHAANNRLRHIVSYIPGIVFQYRLFPDGHSAFPFASDGIREIYGLAPDQVENDVRPLSDMMHPDDAEHFLATMHESAKTLSPWHVDYRICLPDGKTKWLMINAQPESSKDGSTLWHGFIADISEMKAMSAELEHYRDHLEQLVKVRTADLEASRAEAERLALAKSEFLAKMSHEIRTPLHGVLGMAHIGGRNTSEGSKAHEAFAKITHSGNLLLGIINDILDFSKMEAGMLKIESTDIDLPAILAESMELMQERANAKKLSLQLRVAENLPAHCQSDSLRLRQILLNLLSNAVKFTVSGSVTLDASFDGHQLIFKVSDTGIGITHEQSSKIFNPFEQGDNSTTRRFGGTGLGLAITSHLVKLMEGTIHLESTPDNGSRFEIRLPYHPIVAESAAIPLAAPALAAKPLSGLRILVAEDIDINQEIMEAILHDFGAEVSMVSNGLEAVQKIQQHGDSGFDVVLMDIQMPVMNGHDATRQILRIAPGLPIIGQTAHALTEEREACFASGMVDHIAKPIEPDKLLGVILKHVRNNKP

SEQ ID NO: 15121 - protein, 246 aa, Zea mays
  misc_feature (39)..(39): Xaa can be any naturally occurring amino acid
  misc_feature (67)..(67): Xaa can be any naturally occurring amino acid
  misc_feature (102)..(102): Xaa can be any naturally occurring amino acid
  misc_feature (150)..(150): Xaa can be any naturally occurring amino acid
  misc_feature (200)..(200): Xaa can be any naturally occurring amino acid
ALTKQVQKERTVEQALSSLSWVQYIQGNLSLAGIEQYLXLWDVIENFHVEDTNDKHIWRHNINGVFXSKSAYRAFFRGALPFEPWKRIWRTWAAPICKTFVXLAIKNKCWTAEWLKKRGLDHPHSCVLCDQEEETVQHILTNRVFARQFXHAILSSIGLNNVVPKTGDDCFMDWWRKASYMVPKCKRKGFNGIIIIGGWXLWKHKKKCVFHGKRPCLSSLEEGFRDELQLWLLVGAKNIRNLFDPG

SEQ ID NO: 15122 - protein, 211 aa, Ehrlichia ruminantium str. Welgevonden
MGIIVSENPSFISSIEDIIEDAKAGKVFVLIDDEQRENEGDLVVLAEKVTTDAINLMVTHGSGIVCLSITEDLMYKLGLELIPRRNINNNSASFATSIDARYGITTGVSVHDRVRTILTAVSKNVTMDDLVTPGHIFPIVSKKGGVLERLGHTEASVDIAKIAGLTPAAVVCELMNPDGTMSRLSDIIEFSQRYDIKVTTIAKLVEYINTH

SEQ ID NO: 15123 - protein, 304 aa, Streptococcus mutans UA159
MYDTIIIGSGPAGMTAALYAARSNLKVALIEQGAPGGQMNNTSDIENYPGYDLISGPELSMKMHEPLEKFGVENLYGIVTAVEDHGNFKKVLTDDNSYETKTVIIATGAKHRPLAVAGEETYNSRGVSYCAVCDGAFFRGQDLLVVGGGDSAVEEALFLTRFANKVTIVHRRDELRAQKVLQERAFANDKVDFIWDSVVKEIKGNDLKVTNVDIENVKTGQVNNYAFGGVFIYVGLDPVSSMVKELDITDEAGWIPTDDHMKTKVAGVFAIGDVRQKDLRQITTAVGDGAVAAQEAYQYIVNNY

SEQ ID NO: 15124 - protein, 697 aa, Cytophaga hutchinsonii
MGIFNKINQRSGLVVGTIVAGLLLFLLGDAFTSKNSFFSSFNNKVGEIDGSNITVEEFQKEITKAEALYGGNGNNANMDDLAWTQLVFERVNKVVYEKAGIEISEGEKVDLLEGEHMSDVVKQQFGSAEQLKQFLKYLDSDQIQSEEERASIKGRWRALKEYVYNERMRSKYETIIKKSEYVTKAEAKRYYHALNDKAEAEYVYVPYFSINDTTITVTDAMLEDYLKAHKNEFEVEAGRSIEFAVFNNVPTGVDSSYVKKDLAELKDEFVLAKNDSAFIRSNSDAPADPSYVQLNQLPPALAARVNSLQIDSVYGPFSYGTGYSLTKILKIESDTNVMAKASHILFRTNETDPAEKKAEAKKQAQQILAEIQNGASFEKMAAQYGGDGTAANGGDLGWFGKGQMVKPFENAIFGASKPGLLPNIVETQFGYHIIRVDVAKTGRKFLIASVQKNVEAFDNTVDSIYRNADAFAASVKDTGTFRTEIKKYTAGVAKYEQANVDGAAKGITSINEAREIVKWLYSDDRSVNDVSSVFTVENKNVVVLLTRIREKGTASVEDVKDQIKPRVIIEAKAKLIKEKLKVEGNDFAAAAKAYGKDAVTGTASDISLSSGMITNVGYEPEAVGALFGLAKEKKTEAFTGENGVLVLKNKNITVSEVADYNQFVTQLQQQRNNRLAYGTVEAAVKKTVEIEDMRYRY

SEQ ID NO: 15125 - protein, 502 aa, Acinetobacter sp. ADP1
MSNMHLKTAKLFIDGKFIDSKTTEWQDILNPATQEVLGRVPMATLEEVDVAIAAAKQAFKTWHLTPIQARMRIMLKLQDLIRTNMKEIAGVLTAEQGKTLADAEGDIQRGLEVVEHACSVGTLQMGEYIEGVARGVDTYTLQQPLGVCAGITPFNFPAMIPLWMFPMAIVCGNTFVLKPSEQDPLSTMMLVELAAEAGVPAGVLNVVHGGKEVVDRLCTHQDIKAISFVGSTAVGTHVYNLAGQHGKRVQSMMGAKNHVVVMPDAHQEQTLNALVGAAFGAAGQRCMALSVAVMVGETKNWVNQLVEKAKTLKVNAGHEPQTDIGPVISPRAKARVIDLINSGVQEGAELLLDGRDVKVNGYENGNFVGATIFNQVSTSMRIYKEEIFGPVLAIIHVDTLEDAIALINANPFGNGVGLFTQSGAVARTFQNAIDIGQVGINIPIPVPVPFFSFTGSRGSKLGDLGPYGKQAVQFYTQTKTITSRWFEDTQEKGEVNTTISLR

SEQ ID NO: 15126 - protein, 178 aa, Cryptococcus neoformans var. neoformans JEC21
MSSTGWEIRFSNSRQIPYFYNSERSISTWEPPSELSAEQIQQLPGAAKYMNVQLAQPAGGKEGQVRASHILAKHAGSRRPASWRNDKITITSDEAQAIIEQHIAYLQSLPPADLPKEFAKIASTESDCSSARKGGDLGWFGRGQMQKPFEDATFNTPVGQLSGIVKTDSGIHVILRTG

SEQ ID NO: 15127 - protein, 461 aa, Vibrio angustum S14
MKHPNVLQITLVVALGGLLFGYDTAVISGATESLQIFFNLNPAELGFAAASALIGCVIGSIAAGYTSTKYGRRGALLIAALLFFISALGSAVPDQYWTFIFYRIIGGIGVGIASMVSPMYIAEIAPRQKRGALVSCNQFAIIFGMLVVYFVNYGIALMGSESWLNEMGWRYMFGSEMIPAGLFFFLLFSVPETPRWLAMRGRDEQAKELLSKISKGKDFDSQWKEIKDSLVEVSTASITSRKILPILVIGIMLSVLQQVTGINVFLYYAPVILKSFSSSSTDIALLQTILVGAVNLTFTVIAIITVDKYGRKPLMMLGAGLMAISMIAIGTAAYLNAIGGYLLVFVLTYIAAFALSLGPVTWVLLSEIFPNNVRSKALSIAVFAQWVANYAVSQTFPMMNDQNSWLFKEFNGGFPFWFYGVMGLVTIYFVHRFVPETKGKSLEELEELWEKPDELETVTHN

SEQ ID NO: 15128 - protein, 469 aa, Methanococcoides burtonii DSM 6242
MRYVMKFGGTSIADGKKIRHVAQLLIGYKEGGDQVVAITSALGGVTDGILTNAAEASQKGKVSQVKEFMAELAKKHYDAISDAIDNERIADEVIETIDIRIDELEKALIGICYLGELTPRSIDYISSYGERLAVPIISGSIRSMGIDSKPFTGGEAGINTTENYGNARPLKKSYAQIKEVVGPLVENSIPVVTGFIAEDKNGIITTLGRGGSDFTASLIGAAIQADEIWLWKEVHGIMTTDPKIVPEASTISQISYIEAMELSYFGAKVLHPRAIEPAIIHGIPVRVKNTFDTQFPGTLIVADQNCSEEVAKAVTLIRNVAAINICGAGMVGAIGTAAKIFTTLANAGVNIIMISQSSSEANMSLVIEQSHLKRAIKSLEHAFNEGVVGEVAYDEDVCVVAVVGAGMDGSPGVAGKIFGALGKEKINVIMISQGSSQHNISFVVKEEDAEEAVKVLHREFGLGKKNGCN

SEQ ID NO: 15129 - protein, 312 aa, Novosphingobium aromaticivorans DSM 12444
MNNQAPQRPLKLGTRRSPLAMAQAEEARARLCAAHGWAESQVELVPVTASGDKIQDRPLADIGGKALWTKELDAWLVSGEIDFAVHSMKDVETIRPENFAIAAVLPRADVRDVLIGAASIHAIPPGARVGTSAPRRAAQMLHARPDLTVVSFRGNVATRLAKLQAGEADVTLLAAAGLGRLGETGVGHPLSEYEWLPAPAQGAIGIECLASRADLCAWLGAIDDKPTHHAIRAERALLLALGGNCHSPIAVLTTHHESSLTLRAALFSPDGAERVEAHETFAAGDDAGPAHLAHRLLGEAPDAIRVHFHGAG

SEQ ID NO: 15130 - protein, 257 aa, Acinetobacter sp. ADP1
MTFATILLEKRKGVGLITLNRPKALNALNSELIYEINLALDDLENDQTIGCIVLTGSEKAFAAGADIKEMAELTFPNIYFDDFFSLADRIAQRRKPLIAAVSGYALGGGCELALMCDFIYCADNAKFALPEVTLGVIPGIGGTQRLTLAIGKAKAMEMCLTARQMQAAEAEQSGLVARVFSKEELLEQTLQAAEKIAEKSRVSTIMIKESINRAFEVSLAEGLRFERRMFHSVFATLDQKEGMQAFIDKRPAQFKHQ

SEQ ID NO: 15131 - protein, 409 aa, Triticum aestivum
  misc_feature (408)..(408): Xaa can be any naturally occurring amino acid
MNALAATSRNFKQAAKLLGLDSKLEKSLLIPFREIKVECTIPKDDGTLASYVGFRVQHDNARGPMKGGIRYHHEVDPDEVNALAQLMTWKTAVANIPYGGAKGGIGCSPGDLSISELERLTRVFTQKIHDLIGIHTDVPAPDMGTNAQTMAWILDEYSKFHGYSPAVVTGKPVDLGGSLGRDAATGRGVLFATEALLAEHGKGIAGQRFVIQGFGNVGSWAAQLITEAGGKVIAISDVTGAVKNSNGIDIAKLMKHSAENRGIKGFDGGDAVDPTSLLTEECDVLIPAALGGVINKDNADGIKAKYIIEAANHPTDPEADEILANKGVLILPDILANSGGVTVSYFKWVQNIQGFMWDEEKVNRELKTFMTRAFRDTKEMCPPHLSPLRMGAFTLGVNRVARATVLRXL

SEQ ID NO: 15132 - protein, 165 aa, Zea mays
MALAEADDGAVVFGEEQEALVLKSWAVMKKDAANLGLRFFLKVFEIAPSAKQMFSFLRDSDVPLEKNPKLKTHAMSVFVMTCEAAAQLRKAGKVTVRETTLKRLGATHLRYGVADGHFEVTGFALLETIKEALPADMWSLEMKKAWAEAYSQLVAAIKREMKPDA

SEQ ID NO: 15133 - protein, 617 aa, Candidatus Blochmannia floridanus
MDHNPQSQLKLLVTRGKEQGYLTFSEVNDHLPEDIIDSDQLNNIIQMMNDMGIQVMEEAPDSDDFLLTENCGTSNNDEEDATEAAVQALSHVDTDLGRTTDPVRMYMKEMGAVELLTREGEIDIAKRIEDGIHQVQCSVAEYPEAITYLLEQYKRVKTGEVRLSDLVTGFVELNLEHDTLSTKTIHDGYITPEIINSPIIIDDEENTENDDDNNVDPELARKKFTDLQKQYEKTRITIKYNGRDHHQSLLEILKLSEVFKQFRLVPKQFDYLVNNMRSMMDRIRLQERLIMKLCVDVSQMPKKKFINLFSGNETSKDWLNKALSLNTSWSQKLHNVDSKIQQSLYQLHQIEKETGLTIEQIKNINKRMAIGEAKAKRAKKEMVEANLRLVISIAKKYTNRGLQFLDLIQEGNIGLMKAVDKFEYRRGYKFSTYATWWIRQAITRSIADQARTIRIPVHMIETINKLNRVSRQILQETGCEPTPEELAERMFMSEDKIRKVLKIAKEPVSMETPIGDDEDSHLGDFIEDTNLDLPLDSATSDNLRAATNDVLSGLTPREAKVLRMRFGIDMNTDHTLEEVGKQFDVTRERIRQIEAKALRKLRHPSRSEILKSFLDDD

SEQ ID NO: 15134 - protein, 415 aa, Brachyspira hyodysenteriae
AGTWAAKTLKATDPNCQVVTYDRNDNISFLACGIALWVGGVVKDPKGLFYASPESLRGEGIDVYMGHDVTKIDWANKKLCVKELKTGKEFEDTYDKLILATGSWPVTPPIEGLKQEGTTYGLKKGIFFSKLYQQGQEIIDEIAKPDVKKVMVVGAGYIGVELIEAFKNHGKEVILMEAMPRVMANYFDKEITDEAEKRIKEAGIEMHLGETVKKFEGDDRVKKVVTDKGSYDVDMVVMSVGFRPNNELYKDYLETLPNGAIVVDTTMKTTKDPDVFAIGDCATVYSRASEKQEYIALATNAVRMGIVAANNALGKHVEYCGTQGSNAICVFGYNMASTGWSEETAKKKGLKVKSNFFKDSERPEFMPTNEDVLVKIIYEEGSRRLLGAQIASKHNHAEAIHAFSLAIQNGMTVDQ

SEQ ID NO: 15135 - protein, 417 aa, Chlamydomonas reinhardtii
MALNMRVSSSKVAAKQQGRISAVPVVSSKVASSARVAPFQGAPVAAQRAALLVRAAAATEVKAAEGRTGKELGQARPIFPFTAIVGQDEMKLALILNVIDPKIGGVMIMGDRGTGKSTTIRALADLLPEMQVVANDPFNSDPTDPELMSEEVRNRVKAGEQLPVSSKKIPMVDLPLGATEDRVCGTIDIEKALTEGVKAFEPGLLAKANRGILYVDEVNLLDDHLVDVLLDSAASGWNTVEREGISISHPARFILVGSGNPEEGELRPQLLDRFGMHAQIGTVKDPRLRVQIVSQRSTFDENPAAFRKDYEAGQMALTQRIVDARKLLKQGEVNYDFRVKISQICSDLNVDGIRGDIVTNRAAKALAAFEGRTEVTPEDIYRVIPLCLRHRLRKDPLAEIDDGDRVREIFKQVFGME

SEQ ID NO: 15136 - protein, 654 aa, Aspergillus oryzae
MLFSRPPIRSPWISAFRSASQLPLSRPRFFSISLSRYSVDMETVNTSERLSRLRELMQEHKVDVYIVPSEDSHQSEYIAPCDGRREFISGFSGSAGTAIVSLSKAALSTDGRYFNQASKQLDNNWQLLKRGVEGFPTWQEWTTEQAEGGKVVGVDPALITASGARSLSETLKKNGSTLVGVQQNLVDLVWGKDRPAPPREKVRVHPEKYAGKSFQEKISELRKELESRKSAGFIVSMLDEIAWLFNLRGSDIPYNPVFFSFATITPTTTELYVDADKLTPEVTAHLGQDVVIKPYDAIYADAKALSETRKQEAGETASKFLLSNKASWALSLSLGGEGQVEEVRSPIGDAKAVKNDVELAGMRACHIRDGAALTEYFAWLENELVNKKSTLDEVDAADKLEQIRSKHDLFVGLSFDTISSTGPNGAVIHYKPEKGSCSIIDPNAIYLCDSGAQYLDGTTDVTRTFHFGQPTELEKKAFTLVLKGVIGLDTAVFPKGTSGFALDVLARQYLWKEGLDYLHGTGHGIGSYLNVHEGPIGVGTRVQYTEVPIAPGNVISDEPGFYEDGKFGIRIENVIMAREVQTTHKFGDKPWLGFEHVTMAPIGRNLIEPSLLSDAELKWVNDYHREIWEKTHHFFENDECTRSWLQRETQPISK

SEQ ID NO: 15137 - protein, 132 aa, Saccharomyces cerevisiae
MSGGKGGKAGSAAKASQSRSAKAGLTFPVGRVHRLLRRGNYAQRIGSGAPVYLTAVLEYLAAEILELAGNAARDNKKTRIIPRHLQLAIRNDDELNKLLGNVTIAQGGVLPNIHQNLLPKKSAKTAKASQEL

SEQ ID NO: 15138 - protein, 420 aa, Brachyspira hyodysenteriae
AGTWAAKTLKATDPNCQVVTYDRNDNISFLACGIALWVGGVVKDPKGLFYASPESLRGEGIDVYMGHDVTKIDWANKKLCVKELKTGKEFEDTYDKLILATGSWPVTPPIEGLKQEGTTYGLKKGIFFSKLYQQGQEIIDEIAKPDVKKVMVVGAGYIGVELIEAFKNHGKEVILMEAMPRVMANYFDKEITDEAEKRIKEAGIEMHLGETVKKFEGDDRVKKVVTDKGSYDVDMVVMSVGFRPNNELYKDYLETLPNGAIVVDTTMKTTKDPDVFAIGDCATVYSRASEKQEYIALATNAVRMGIVAANNALGKHVEYCGTQGSNAICVFGYNMASTGWSEETAKKKGLKVKSNFFKDSERPEFMPTNEDVLVKIIYEEGSRRLLGAQIASKHNHAEAIHAFSLAIQNGMTVDQFALSD

SEQ ID NO: 15139 - protein, 235 aa, Glycine max
METDRPDGRTPNQLRPLVCSCSILHRSHGSASWAQGETKVLAAVYGPKAGTKKSENPEKASIEVIWKPKTGQIGKVEKEYEMILKRTLESICIRTIYPNTTTSVIVQVVHDDGALLPCAINAACAALVDAGIPLKHLADSGCIILDPTKEEEEKMKAYINLVFPNTIVSVLPERSSQVGSEPMAHGIMTSVTQGAMSVDDYLHCLDRGRAASARLSEFVRKNIGPKSTCEASKAG

SEQ ID NO: 15140 - protein, 482 aa, Mesorhizobium sp. BNC1
MEIALLIKGEDRPALGGGTFDRKNPVTNEVVTTAPAAKKVDVDAAVAAADAAFADWSKTGPNARRTLLNKAADMLESMADEFVRTSIDEIGCTAAWAGFNVMFGAKILREAASMTTQIRGEVIPSDKPGCLAMAIKRPVGVLVGMAPWNAAVILGVRAVAMPIACGNTVVLKASEKCPRVHMLIGEAFRRAGFPDGVLNVVTHSPQDAPEVVEALITHPKTRRINFTGSTRVGRIVAEIAARELKPCLLELGGKAPLVVLDDADIDAAVNAAIFGAFMNQGQICMSTERIIVDERVADDFVAKFTERASQLPVGDPNGNVVIGSVVDYETIERVDKLVDASVALGARVTTGGKSNGSTIMPATVVDHVNETMPLFSDESFGPVVCVVRARDTEHAVEIANASSYGLSSAVFGSDINRAISVAERIEAGICHINGPTVSDEAQMPFGGMRDSGYGRFGGTAGIDAFTETRWITVEDPHQHYPF

SEQ ID NO: 15141 - protein, 320 aa, Salmonella typhimurium LT2
MRQTKTGILLANLGTPDAPTPEAVKRYLKQFLSDRRVVDTPRLLWWPLLRGVILPLRSPRVAKLYQSIWMDGGSPLMVYSREQQQALAARLPDTPVALGMSYGSPSLESAVDELLASDVDHIVVLPLYPQYSCSTVGAVWDELGRILARKRRIPGISFIRDYADDGAYIDALAKSARESFARHGEPDVLLLSYHGIPQRYADEGDDYPQRCRDTTRELVSALGLPPEKVMMTFQSRFGREPWLTPYTDETLKMLGEKGTGHIQVMCPGFAADCLETLEEIAEQNREIFLEAGGKKYAYIPALNATPEHIDMMLKLTAPYR

SEQ ID NO: 15142 - protein, 452 aa, Brachyspira hyodysenteriae
MKVIVIGCNHAGTWAAKTLKATDPNCQVVTYDRNDNISFLACGIALWVGGVVKDPKGLFYASPESLRGEGIDVYMGHDVTKIDWANKKLCVKELKTGKEFEDTYDKLILATGSWPVTPPIEGLKQEGTTYGLKKGIFFSKLYQQGQEIIDEIAKPDVKKVMVVGAGYIGVELIEAFKNHGKEVILMEAMPRVMANYFDKEITDEAEKRIKEAGIEMHLGETVKKFEGDDRVKKVVTDKGSYDVDMVVMSVGFRPNNELYKDYLETLPNGAIVVDTTMKTTKDPDVFAIGDCATVYSRASEKQEYIALATNAVRMGIVAANNALGKHVEYCGTQGSNAICVFGYNMASTGWSEETAKKKGLKVKSNFFKDSERPEFMPTNEDVLVKIIYEEGSRRLLGAQIASKHNHAEAIHAFSLAIQNGMTVDQFALSDFFFLPHYNKPLSWMTMVAYTAK

SEQ ID NO: 15143 - protein, 214 aa, Brassica napus
MTSFSAFSEMLGSEYESPTLSGEYCPTLAASCPKKPAGRKKFRETRHPIYRGVRLRNSGKWVCEVREPNKKSRIWLGTFLTAEIAARAHDVAAIALRGKSACLNFADSAWRLRIPETTCPKDIQKAAAEAAVAFQAEINDTTKDHGLDVEETIVEAIFTEENSDGFYMDEEESMFGMPTLLASMAEGMLLPPPSVQFEYNYDFDGDTDVSLWSY

SEQ ID NO: 15144 - protein, 108 aa, Escherichia coli
  misc_feature (1)..(1): Xaa can be any naturally occurring amino acid
XDKIIHLTDDSFDTDVLKADGAILVDFWAEWCGPCKMIAPILDEIADEYQGKLTVAKLNIDQNPGTAPKYGIRGIPTLLLFKNGEVAATKVGALSKGQLKEFLDANLA

SEQ ID NO: 15145 - protein, 513 aa, Zea mays
  misc_feature (80)..(80): Xaa can be any naturally occurring amino acid
  misc_feature (105)..(105): Xaa can be any naturally occurring amino acid
  misc_feature (115)..(115): Xaa can be any naturally occurring amino acid
GGAEEAAGGHAAGASPQAGRAGVGLERGVPQRVAVAADADLRPPPLGSRRHRRRRRHRARAPPHLRLPLPPPPPPRRPAXPPISTPPATPSFSSSTSSTRPRPPXHPGDCPPPAXETPPPPAVQLAKAVAEPKTPPPPPPPQHRQPARKTPGSGGSERDGATPRSTGSAGMPEVSHLGWGHWFTLRELEEATDGLTEENVIGEGGYGIVYKGTLHDSTLIAVKNLLNNRGQAEKEFKVEVEAIGRVRHKNLVRLLGYCVEGAYRMLVYEYVDNGNLDQWLHGDVGEVSPLTWDVRMNIMLGTAKGLAYLHEGLEPKVVHRDIKASNILLDQQWNARVSDFGLAKLLWSEKSYVTTRVMGTFGYVAPEYASTGMLNERSDVYSFGVLIMEIITGRSPVDYTRAAGEVNLVEWLKTMVAERKAEEVLDPKMAEKPSPKTLKRALLVALRCVDPDANKRPKMGHVIHMLEMDDLLFRDDKKPGRDVHPHGSDRYSSKEEGSISKREHHHHHHHRHR

SEQ ID NO: 15146 - protein, 706 aa, Pseudomonas tolaasii
MAQLKDGNLETCLAPLGSQELDQLASGINRMAETLQNAQEELQHSIDQATEDVRQNLETIEIQNIELDLARKEALEASRIKSEFLANMSHEIRTPLNGILGFTHLLQKSELSPRHVDYLGTIEKSADNLLGIINEILDFSKIEAGKLVLDSVPFNLRDLLQDTLTILAPAAHAKQLELVSLVYRDTPLAVVGDPLRLKQILTNLISNAIKFTREGTIVARAMVEDEEEDSVQLRISVQDTGIGLSNQDVRALFQAFSQADNSLSRQPGGTGLGLVISKRLIEQMGGEIGVDSTPGEGSEFWISLNLPKTRDDVDDLPSAPLLGRRVAVLENHDVARQALQHQLEDCGLEVTPFNTLESLTNGITSTHQTEQAIDLAVLGVTANDIPPERLNQHLWDLEHLGCKVLVLCPTTEQMLFNQSVPNPNSQLQAKTPCTRKLRRALADLISPPVAQRTREPLSSRAPRVLCVDDNPANLLLVQTLLEDMGAKVLAVESGYAAIDAVKQETFDLVLMDVQMPGMDRRQSTEAIRQWESERHGTPLPVVALTAHAMANEKRALLQSGMDDYLTKPISERQLAQVVLKWTGLALRNQGPERGNDNLGHGVQLLVLDHEEGLRAAANKADLAADMLAMLLASLEADRLAITVAREAKDNNALIERIHRLHGATRYCGVAELRAACQRAETLLKQDDAQGHGALDELDMAIGAAGQ

SEQ ID NO: 15147 - protein, 497 aa, Saccharomyces cerevisiae
MTLSKYSKPTLNDPNLFRESGYIDGKWVKGTDEVFEVVDPASGEIIARVPEQPVSVVEEAIDVAYETFKTYKNTTPRERAKWLRNMYNLMLENLDDLATIITLENGKALGEAKGEIKYAASYFEWYAEEAPRLYGATIQPLNPHNRVFTIRQPVGVCGIICPWNFPSAMITRKAAAALAVGCTVVIKPDSQTPLSALAMAYLAEKAGFPKGSFNVILSHANTPKLGKTLCESPKVKKVTFTGSTNVGKILMKQSSSTLKKLSFELGGNAPFIVFEDADLDQALEQAMACKFRGLGQTCVCANRLYVHSSIIDKFAKLLAERVKKFVIGHGLDPKTTHGCVINSSAIEKVERHKQDAIDKGAKVVLEGGRLTELGPNFYAPVILSHVPSTAIVSKEETFGPLCPIFSFDTMEEVVGYANDTEFGLAAYVFSKNVNTLYTVSEALETGMVSCNTGVFSDCSIPFGGVKESGFGREGSLYGIEDYTVLKTITIGNLPNSI

SEQ ID NO: 15148 - protein, 359 aa, Salmonella typhimurium
MSKNYHIAVLPGDGIGPEVMAQALKVMDAVRVLICVYHSHYDVGGIAIDSSGIPLPKATVEGCEQADAILFGSVGGPKMGKFAPGKPAGARRLLPLRKHFKLFSNLRPAKLYQGLEAFCPLRADIAANGFDILCVRELTGGIYFGQPKGREGSGQYEKAFDTEVYHRFEIERIARIAFESARKRRCKVTSIDKANVLQSSILWREIVNDVAKTYPDVELAHMYIDNATMQLIKDPSQFDVLLCSNLFGDILSDECAMITGSMGMLPSASLNEQGFGLYEPAGGSAPDIAGKNIANPIAQILSLALLLRTADANDAATAIEQAINRALEEGVRTGDLARGAAVSTDEMGDIIARYVAEGV

SEQ ID NO: 15149 - protein, 214 aa, Staphylococcus epidermidis RP62A
MVKILPSLLSIDFLNLKEELQLLEAAKVDGLHFDVMDGKFVPNISIGIPILDAVRQQSHLPIDVHLMIEQPENYINLFAEHGADMISVHVEATTHIHRAIEQIKQLGKKAGVVINPGTSVETILPILSIVDYVLVMTVNPGFGGQTFIEQCVTKIEQLNQLKHENHLTFDIEVDGGINDQTSKRCVEQGATMLVTGSYFFKQEDYAKVTSLLKE

SEQ ID NO: 15150 - protein, 738 aa, Nicotiana tabacum
MDCNCFDPQWPADELLMKYQYISDFFIAVAYFSIPIELVYFVQKSAVFPYRWVLVQFGAFIVLCGATHLINLWTSTAHTRTLAIVMTTAKVLTAVVSCATALMLVHIIPDLLSVKTRELFLKNKAAELDREMGLIRTQEETGRYVRMLTHEIRSTLDRHTILKTTLVELGRTLALEECALWMPTPPGLELQLSYTLRHQNPIGFTVPIQLPVINQVFGTNRAVKISPNSPVARLRPAGKYMPGEVVAVRVPLLHLSNFQINDWPELSTKRYALMVLMLPSGSARQWHVHELELVEVVADQVAVALSHAAILEESMRARDLLMEQNVALDLARREAEMAVRARNDFLAVMNHEMRTPMHAIIALSSLLQETELTPEQRLMVETILKSSNLLATLINDVLDLSRLEDGSLQLDVGTFNLHVLFRKVLNLIKPIASVKNCLSRLTCLQICPEFAIGDEKRLMQILLNVVGNAVKFSKEGSVSISAVAAKSESLSDPRAPEFFPVQSENHFYLRVQVKDTGSGINPQDIPKLFCKFAQNQALATKSSGGTGLGLAISKRFVNLMEGHIWIESEGLGKGSTAIFIVKLGIPGRSNEPKLPFMPRLPANHMQMTFQGLKVLIMDDNGFSRMVTKGLLVHLGCDVTTVSSGDECLRVLTQEHKVVFMDVSIPGIDCYEVAVQIHEKFGKHHNRPLIVALTGNTDRVTKENCMRVGMDGVILKPVSVDKMRSVLSELLEHGVILQS

SEQ ID NO: 15151 - protein, 633 aa, Oryza sativa
MPLLLCRRRRRLLPLLLVLVAASHGASNDTYDTSMCLQETTTCGDVSIRYPFYFSDKTGYINGSSNSYCGYPGLAIDCDDGKPILQLNGAEKYKVNYINVGSITNVSLVDKEVVDDSSGCPRVDHNVTFAQGSWLLFPAGMPLDYLVFFLGCSFPNLFLPPENIDPITCSFIGLNGQSYVLPKDQVPPGSWSQFCQKIYEVPVVKYQSMDPKGDAWRKGGYGQVLRQGFPLSVNDSRRPPNCTQCEEVKGRVFKLKGENETFLKKYRHRRISKGTPRIESFLQRNGTLHPKRYTYTEVKRMTKSFAEKLGHGGFGAVYRGNLSDGRQVAVKMLKDSKGDGEEFINEVASISRTSHVNVVTLLGFCLHRSKRALIYEYMPNGSLERYAFRNNSKGELSLTWEKLFDVAVGIARGLEYLHRGCSTRIVHFDIKPHNILLDQEFCPKISDFGMAKLCANKESIVSIAGARGTIGYIAPEVYSKQFGAISSKSDVYSYGMMILEMVGARERNIEANSESSSHYFPQWIYEHLDEYCISSSEIDGETTELVRKMVVVALWCIQVVPTNRPTMTRVVEMLEGSTSGLELPPKVLLSCSNFYKMLYKLETATKIPICAAMQNYGYLNFKLDIAVSESELT

SEQ ID NO: 15152 - protein, 108 aa, Vibrio sp. Ex25
MTMNITGKNIEITSAIRAHIESKFKKLEKWQVDLIGCQATFSEEPNKQKKFEAVIKVPKGQLIASATHEDLYAAINEVEQKLERQLNKLTHKPEARRANKPELVEEEE

SEQ ID NO: 15153 - protein, 815 aa, Gibberella zeae PH-1
MDESQLQQPRRTYLFGYPLQHSLAPLLHSTIFESLNVPWTYDLIESIDKNDFIPKLKASDCVGAAVTMPHKVAWINECDEVTDEGRAIGAINTVFIRKDEVTGERKYIGTNTDCVGVRESFLQNSPGITEKSKGKPALVIGGGGACRSAVYALYKWLGASEIYLVNRLKEEADAVIESFSGLEDGPKMTYISSLEQAKQLETPVLIVGTIPDFEPSTEGEILARDIVTELVQKEEKGVLLEMCYHPRIVTRLYSLAEDNRWKVIPGTEAMIYQDIANMVKNIFARPKDDSANPAPPEVYNWRIYALAASAALGSSMFGYDSAFIGGTLSLPSFQERFNLASETGTALASLKANIVSTFQGGCFFGVLLCYYMTEKLGRRWVLILCGIIFNLGAIIQLVADGKLSFIYAGRVLTGLAVGASSMIIPVYISESGPPAIRGRLIGIFEIFLQFSQIIGFWVNYGVNIHISPTSDVQWHIPFGLQLAPGTLLVICMLFQPESPRWLLNAGRTDQARKVLQRLRQLPADHAYLNWEIDTVLKQIEEEKSMGADRSFFAKLREVVGPTNRPRLLLGIALMFIQNMSGINALNYYSPSIFKSIGFTGTSVGLLATGIFGIVKASATGLYMIWGVDALGRRQSLMIGSTGAAIALFYLGIYSKLSGSFDVGMVPAEKTPGAYVAIVMVYIFAVFYAISWNGIPWIFCAEIFPMAIRSICLVFTTCAQWLGQFIIVYSTPYMMTDITYGTFLLFACSVVFGLFFAFFLVPETKGISLEDMDVLFSRKGMPRTWRRQTNDVIAQRRAGEEVYSKQGESVVHEEKV

SEQ ID NO: 15154 - protein, 112 aa, Burkholderia mallei ATCC 23344
MKLITAIIKPFKLDETREALSALGVSGITVTEVKGFGRQKGHTELYRGAEYVVDFLPKMKIEAAVSDDLVDQAVEAIERAARTGKIGDGKIFVTSIEQVIRIRTGETGADAL

SEQ ID NO: 15155 - protein, 126 aa, Zea mays
  misc_feature (75)..(75): Xaa can be any naturally occurring amino acid
MAARSSSLSLSASLVLAAALLLLAAGAATPSAMASCGEVTSSATPSLVYAMVSATTPSAWCCSAVRSLNSRASSXADRQVTCNCLKSMTARLVDAVSMTNAANIPGKCGVSVGEPINPTDDCTNID

SEQ ID NO: 15156 - protein, 575 aa, Xanthomonas campestris pv. vesicatoria str. 85-10
MAKKKTLARFLAETLQSAGVERIWGVTGDSLNGLTDALREMQTIAWMHVRHEEVAAFAAGAEAAVTGQLAVCAGSCGPGNLHLINGLFDCHRSRQPVLAIAAHIPSSEIGLSYFQETHPQELFRECSHFVELVTNPAQLPEVLHRAMRTAILQQGVAVVVIPGDIALLEVDKHVSSAWPALRQPRMLPAAEDVRQLAELLQQSKAVTLLCGSGCAGAHDAVVALADTLGAPVVHALRGKEYVEWDNPFDVGMTGLIGFSSGYHAMLNCDTLLMLGTDFPYRQFYPKDATIVQVDRDPSALGRRTPLQLGIAADVGETIAALLPQLQRREERGFLEKSLAHYRKAREGLDDLAVPADPGQPLHPQFVTRLISQIADQDAVFTCDVGTPTVWAARYLRMNGKRRLLGSFNHGSMANAMPQALGAQAAFPGRQVISLSGDGGFAMLMGDFISLAQLNLPVKVVVFNNASLGFVAMEMKAAGYLDTGTELRNPDFAAMSNAMGILGIRVDESSQLERALRQAFAHSGPALVDVRIATQELAVPPAIKLEQAKGMGLYLLKAVMSGRGDEVIELVKTNLR

SEQ ID NO: 15157 - protein, 428 aa, Saccharomyces cerevisiae
MTAAKPNPYAAKPGDYLSNVNNFQLIDSTLREGEQFANAFFDTEKKIEIARALDDFGVDYIELTSPVASEQSRKDCEAICKLGLKAKILTHIRCHMDDAKVAVETGVDGVDVVIGTSKFLRQYSHGKDMNYIAKSAVEVIEFVKSKGIEIRFSSEDSFRSDLVDLLNIYKTVDKIGVNRVGIADTVGCANPRQVYELIRTLKSVVSCDIECHFHNDTGCAIANAYTALEGGARLIDVSVLGIGERNGITPLGGLMARMIVAAPDYVKSKYKLHKIRDIENLVADAVEVNIPFNNPITGFCAFTHKAGIHAKAILANPSTYEILDPHDFGMKRYIHFANRLTGWNAIKARVDQLNLNLTDDQIKEVTAKIKKLGDVRSLNIDDVDSIIKNFHAEVSTPQVLSAKKNKKNDSDVPELATIPAAKRTKPSA

SEQ ID NO: 15158 - protein, 766 aa, Bdellovibrio bacteriovorus HD100
MKKKLTFVHLFLLNQLVTTLVLLTVLGVYGTHLFIQEQRAIRERMEPASAREVDRINNDFATLEANVQRLKSMVELFDVMPKGTRVEKFRQFASATIAGHSTQFNAWVALGPRLAKEYLGRESYVYVVHRDYSLFASPKYNDPTTFVAEVFTEPGYDKDPDVQWWWMNEKSSGVNYSDFYFDKGYMEKVMFSTTTGIFSNAGKLEAVVGIDTLAGDIAHRLGIFKLGDTGGALVVDEHGRPVLPLIAKDTPVLGFKYLRALNQDEFRAMPKLSQKVFNIQNQRQLQEFPGADGKTYLTYSRPIKGKPWHLVIYQEKGEAYSGLYFRLFFFGFVALVAYVVFTLMVWMTGKYVIAQDKEALARLQDSRDRAEAATRAKSLFLSTMSHEIRTPLNAMLGSAELLNETHLNFEQKELLISLQSAGDTLLSMLNNILDFSKFESGRMQLESREFLLSDLVREVQALISTSVLRKNLQFTFHPPEHDRWIVGDSLRLKQVLMNLLGNAVKFTDRGAIELTVQPYPGSEPGKETIFFEVKDTGIGIAKENLKKVFDEFGQEDSSVTRRFGGTGLGLSISQKIVQLMGGELYCESRQFVGSRFHFSVQMTSRRAELWSARFNLELTPPPQLVRPSSEAGRKSILIVDDMEENHTLLKAYIKRLEYVTTDSAYNGYECLEMWERGHYDMIFMDVQMPKMSGLDTIRKLREIERARGLHRTPVVVISANSFTEDIEKSLMAGADQHCGKPVRKQTVLEIVQKYCSEDIETAPANS

SEQ ID NO: 15159 - protein, 404 aa, Vibrio vulnificus YJ016
MFEPMMEMSDDAVIKVVGVGGGGGNAVEHMVRESIEGVEFISVNTDAQALRKTSVGNVIQIGGNITKGLGAGANPQVGRDAALEDKERIKELLIGADMVFIAAGMGGGTGTGAAPVIAEVAKELGILTVAVVTKPFSFEGKKRLAFAEQGIDELSKHVDSLITIPNEKLLKVLGRGITLLEAFASANDVLKNAVQGIAELITRPGMINVDFADVRTVMSEMGHAMMGSGVAKGEDRAEEAAEMAISSPLLEDIDLAGARGVLVNITAGLDMRLDEFETVGNTVKAFASDNATVVIGTSLDPDMADEIRVTVVATGIGNDKKPDITLVSGGKAKVAQPTAAPQPVVAAKVEEKPAQTLQERPQVTPQPSTPVSSSPASGSQNTAPKQEKESGYLDIPAFLRRQAD

SEQ ID NO: 15160 - protein, 294 aa, Triticum aestivum
  misc_feature (107)..(107): Xaa can be any naturally occurring amino acid
ARGFPWQEPFAPYLLEVLYEDDDMVALNKPSGLQVLPKGLFQQRTVLAQLQLKDWKMASSCRFKRKDVQSHPVPVHRLGRGTSGLLLCAKTKVAKVRLASYFAEGAXMLQRKEFSEERKISKFYRALVTGILDDDEVVVTQPIGLVHYPGVAEGLYAACSSGKPAMSKVCVLERLAHQNHTLVQVEIHSGRPHQIRIHLAYIGHPLVDDPLYGIGGHPNFVEPESTGTDSSFASDGGYERPLQPVPGDCGYHLHAHWLVLCHPTTNKMVKITAPLPQILQTREERRAAAEQTGG

SEQ ID NO: 15161 - protein, 413 aa, Vibrio vulnificus YJ016
MSKRRVVVTGMGMLSPVGNTVAESWKSLLEGKSGIVNIEHFDATNFSTRFAGLVKDFNCEEYMSKKDARKMDLFIQYGIAAGIQALDDSGLEITDENAHRVGVAIGSGIGGLDLIEAGHTALVEKGPRKVSPFFVPSTIVNMVAGNLSIMRGMRGPNIAISTACTTGLHNIGHAARMIAYGDADAMVAGGAEKASTPLGMAGFGAAKALSTRNDEPQKASRPWDKDRDGFVLGDGAGIMVLEEYEHAKARGAKIYAELVGFGMSGDAYHMTSPSEDGSGGALAMEAAMRDAGIVGTQVGYVNAHGTSTPAGDVAEIKGVKRALGEEGAKQVKVSSTKSMTGHLLGAAGSVEAIITVLSLVDQIVPPTINLDNPEEGLDIDLVPHTAKKVDMEYAICNSFGFGGTNGSLVFKKI

SEQ ID NO: 15162 - protein, 421 aa, Brachyspira murdochii
  misc_feature (381)..(381): Xaa can be any naturally occurring amino acid
TWAAKTLKATDPNCQVVTYDRNDNISFLACGIALWVGGVVKDPKGLFYASPESLKAEGIDVYMGHDVTKIDWANKKLHVKELKTGKEFDDNYDKLILATGSWPVTPPIEGLMQEGTEYGLKKGIFFSKLFQQGQEIIDEIAKPEVKKVMVVGAGYIGVELIEAFKNHGKEVILMEAMPRVMANYFDKEITDEAEKRIKEAGIEMHLGETVKKFEGDDRVKRVVTDKGSYDVDMVVMSVGFRPNSELYKDYLETLPNGAIKVDTTMKTTKDPNVFAIGDCATVYSRASGKEEYIALATNAVRMGIVAANNALGKHVEYCGTQGSNAICVFGYNMASTGWSEETAKKKGLKVKSNFFKDAERPEFMPSYEDVLVKIIYEEDTXRMVGAQIASKHNHAEAIHAFSLAIQNGMTVDQFALSDFFF

SEQ ID NO: 15163 - protein, 1390 aa, Cryptococcus neoformans var. neoformans JEC21
MSLPDAYPPVIATEGSTAFQSHILSLLSVISQHPSPDYPFPSSGDSTLQDNASVTAKKNATLSTFPGKKTPAEDAIERAIIALGDRVWTSERTQAHLVKDVKRDVPAQPGSDLLTPDWTPPVPTLNDSSPDPVCPTCTRPVSSSETSSFTPQQIASFYHPFTAALSTPPPPLPEQMFFPQSVLAAYVSATSDSESAGDSGMSAEKELELLKAQVQDIARVCKAVATGDLTQKIIVPVKGQTMTELKNIINAMVDRLQTFAVEVERVSLEVGTEGKLGGQAVVPNVEGTWKVLTAVVNKLAANLTNQVRSIAKVTKAVAKGDLSETIDVEASGEIAELKTTVNGMVMSLRTLADEVSRVSLEVGSQGKLGGQANVPDVEGVWKDLTVNVNRMCESLTTQVRSIGSVTTAVARGDLSKMIEIEAEGEMAVLKNTVNSMVRQLTVFAKEVTRVALEVGTHGQLGGQAVVPGVEGVWDDLTTNVNKMARNLTDQVREIAMVTKAVARGDLSKTVNADVQGEILDLKCTVNEMLTNMPCKVAQLTVFAAEVTRVSLEVGTEGKLGGQAVVPNVEGTWMVLTDNVNLMALNLTTQVRSVAEVTTAVAAGDLSKKINVAAFGEILELKNTVNNMVDSLRSFSSEVTRVAREVGTDGRLGGQAKVPGVAGTWKDLTDCVNIMAANLTEQVRTIAHATTAVARGDLTQKVVGVKVSGEILDLVNTINNMIDQLAIFAAEVTRVAREVGTEGKLGVQAEVENIEGTWQEITSNVNTMASNLTSQVRAFAQISAAATDGDFTRFITVEASGEMDSLKTKINQMVYNLRESIEKNTKARQEAEMANRSKSEFLANMSHEIRTPMNGIIGMTVLTLESELTRQQRENLMIVSSLAGSLLTIIDDILDISKIEAGRMTMEQIPFSLRVAVFSVLKTLCVKAAQNKLDLIFDVDPTMPDQLIGDPLRLRQVITNLIGNAVKFTTKGQVALSCRVKRYVTVADAVELEFCVADTGIGIKQDKLDVIFDTFAQADGSTTRKYGGTGLGLTISKRLVNLMSGDLWVESEYGQGSRFYFTTVAEMTSVPRDQIIERLSPWSGRSVLFIDTLGDQTGIVEMLQELGLKPIVIHSVNDVYLLQDQGLTVFDTMIVDSLKAAGELRGIEYLRYIPIVLLAPSNKPSGPSNPSFISLPESRRRLLALPSASEQLLSPIPVKDCLEMGINTYYTTPLSLQELSNAIVPALESHQIQPGDTVKDTILSVLLAEDNLVNQKLAVKLMEVAGHKIEVADNGEIALEKYKRRQLARTPFDVILMDVSMPVMGGMEATGLIREFEANEGVPRTPIIALTAHAMIGDKERCLAAGMDEYVTKPLRRGDLLASIAKVLAPKQSASGLEMPAVPIPANIYGR

SEQ ID NO: 15164 - protein, 215 aa, Brassica napus
MTSFSTFSELLGSGHESPVTLGEEYCPKLAASCPKKPAGRKKFRETRHPVYRGVRLRNSGKWVCEVREPNKKSRIWLGTLLTAEIAARAHDVAAIALRGKTACLNFADSAWRLRIPETTCPKEIQKAAAEAAVAFKAEINNTTADHGIDVEETIVEAIFTEENNDGFYMDEEESMFGMPALLASMAEGMLLPPPSVQFGHTYDFDGDADVSLWSY

SEQ ID NO: 15165 - protein, 413 aa, Brachyspira innocens
WAAKTLKATDPNCQVVTYDRNDNISFLACGIALWVGGVVKDPKGLFYASPESLKAEGIDVYMGHDVTKIDWANKKLHVKELKTGKEFDDNYDKLILATGSWPVTPPIEGLMQEGTEYGLKKGIFFSKLFQQGQEIIDEIAKPEVKKVMVVGAGYIGVELIEAFKNHGKEVILMEAMPRVMANYFDKEITDEAEKRIKEAGIEMHLGETVKKFEGDDRVKKVITDKGSYDVDMVVMSVGFRPNSELYKDYLETLPNGAIKVDTTMKTTKDPNVFAIGDCATVYSRASGKEEYIALATNAVRMGIVAANNALGKHVEYCGTQGSNAICVFGYNMASTGWSEETAKKKGLKVKSNFFKDAERPEFMPSYEDVLVKVIYEEDTRRMVGAQIASNHNHAEAIHAFSLAIQNGMTVDQF

SEQ ID NO: 15166 - protein, 213 aa, Candidatus Blochmannia floridanus
MRQNVLFEFGTPIVRVLNALDALSNGRGILVVDDENRENEGDMIFAAENMTVKQMALAIRYGSGIVCLCLTEEKCRQLKLPMMVKNNSNHYKTAFTVTIEASKGITTGVSAKDRLTTIKTSIEDYAKPSDLNRPGHVFPLRAHNGGVLSRSGHTEAAVDLTTLAGLKPFGVICEVTNEDGSMARTTEIIKFSKQYDMPVLTISDVIAYRMSNL

SEQ ID NO: 15167 - protein, 214 aa, Brassica napus
MTSFSAFSEMMGSENESPALSGEYCPTLAASCPKKPAGRKKFRETRHPIYRGVRQRHSGKWVCEVREPNKKSRIWLGTFLTAEIAARAHDVAAIALRGKSACLNFADSAWRLRIPETTCPKDIQKAAAEAAVAFQAEINDTTADHGIDVEETIVEAIFTEENNDGFYMDEEESMFGMPALLASMAEGMLLPPPSVQFGHTYDFDGDADVSLWSY

SEQ ID NO: 15168 - protein, 416 aa, Brachyspira innocens
HAGTWAAKTLKATDPNCQVVTYDRNDNISFLACGIALWVGGVVKDPKGLFYASPESLKAEGIDVYMGHDVTKIDWANKKLHVKELKTGKEFDDNYDKLILATGSWPVTPPIEGLMQEGTEYGLKKGIFFSKLFQQGQEIIDEIAKPEVKKVMVVGAGYIGVELIEAFKNHGKEVILMEAMPRVMANYFDKEITDETEKRIKEAGIEMHLGETVKKFEGDDRVKKVITDKGSYDVDMVVMSVGFRPNSELYKDYLETLPNGAIKVDTTMKTTKDPNVFAIGDCATVYSRASGKEEYIALATNAVRMGIVAANNALGKHVEYCGTQGSNAICVFGYNMASTGWSEETAKKKGLKVKSNFFKDAERPEFMPSYEDVLVKIIYEEDTRRMVGAQIASNHNHAEAIHAFSLAIQNGMTVDQ

SEQ ID NO: 15169 - protein, 214 aa, Brassica napus
MTSFSAFSEMLGSEYESPVTLGGEYCPKLAASCPKKPAGRKKFRETRHPVYRGVRLRNSGKWVCEVREPNKKSRIWLGTFLTAEIAARAHDVAAIALRGKSACLNFADSAWRLRIPETTCPKEIQKAAAEAALAFLAEINNTTTDHGLDMEETIVEAIFTEENNDVFYMDEESMLEMPALLASMAEGMLLPPPSVHFGHNYDFDGDADVSLWSY

SEQ ID NO: 15170 - protein, 423 aa, Brachyspira pilosicoli
AGTWAAKTLKATDPNCQVVTYDRNDNISFLACGIALWVGGVVKDPKGLFYASPEGLKSEGIEVYMGHEVTKIDWANKKMTVKELKTGKEFEDNYDKLILATGSWPVTPPIEGLKQEGTTYGLKKGIFFSKLYQQGQDIIDEIAKPEVKRVMVVGAGYIGVELIEAFKNHGKEVILMEAMPRVMANYFDKEITDEAEKRIKDAGIELHLGETVKKFEGDDRVKKVVTDKGSYDVDMVVMSVGFRPNSELYKDYLETLPNGAIVVDTTMKSSKDENVYAIGDCSSVYSCSSKSHEYIALATNAVRMGIVAANNILGKKVNYCGTQGSNAICVFGYNMASTGWSEETAKKKGLKVKSNFFRDAERPEFMPTYEDVLVKIVYEEGTGRLLGAQIASKHNHAEAIHAFSLAIANEMTVQDFALSDFFF

SEQ ID NO: 15171 - protein, 407 aa, Brachyspira pilosicoli
TWAAKTLKATDPNCQVVTYDRNDNISFLACGIALWVGGVVKDPKGLFYASPEGLKSEGIEVYMGHEVTKIDWANKKMTVKELKTGKEFEDNYDKLILATGSWPVTPPIEGLKQEGTTYGLKKGIFFSKLYQQGQDIINEIAKPEVKKVMVVGAGYIGVELIEAFKNHGKEVILMEAMPRVMANYFDKEITDEAEKRIKDAGIELHLGETVKKFEGDDRVKKVVTDKGSYDVDMVVMSVGFRPNSELYKDYLETLPNGAIVVDTTMKSSKDENVYAIGDCSSVYSCSSKSHEYIALATNAVRMGIVAANNILGKKVNYCGTQGSNAICVFGYNMASTGWSEETAKKKGLKVKSNFFRDAERPEFMPTYEDVLVKIVYEEGTGRLLGAQIASKHNHAEAIHPFSLAIAN

SEQ ID NO: 15172 - protein, 555 aa, Candida albicans SC5314
MDISDKNFKPCPCGYQICQFCYNNIRQNPELNGRCPGCRRLYDDESVEYKTVSAEEYKLMQLKKEKRDREKKQKEKEKKEMEMVNKKHLAGLRVVQKNLVYVTGLNPPCNPDDLHSVLRSDKYFGQYGKISKIVINKKTPTTQTSTHHHQNPGLVVYVTFTRKEDALRCITELDGSLCDGRVLRAAHGTTKYCSSYLRGQPCPNPNCMFLHEPGEEADSYTRKDLSTQQGIKMGMTARSHTTSFGEESSNNSQSNQAGSDDDHHEAHKEHLPSTAHWAAAGTTSGSNSPSVNNNIPLANSAAFPTLGEIVRDQKQQQKKETKPRSKTTKSNNTLVPDELDAGDNSVFKFVETTTEQLRGLEDIRNVRFKGFDNGKILPLFSFKGNFSNDTQLEEEKVIARQVIEKFLLRPLKNYHLAYQNHPITQQQAILQRQQQQQQQQQQQQQQTPALQVAQLQQNKNDEQQKQAQQQLLLLQLQHQQQLQQQQQQRQLQQQQNQPHQLNILKTSDRVNTSTPPPPGLFAGKDVAASSDMSNTGAPLPSSSSQLLTQLMSGKR

SEQ ID NO: 15173 - protein, 246 aa, Glycine max
TPEACAQLTQEFFADNTLRLLIQYLPKLNLEARKDATQIVANLQRQQVQSKLIASDYLDTNLDLMDVLVSGYENTDMALHYGAMLRECIRHQIVAKYVLDSPHMKKFFDYIQLPNFDIAADAASTFKELMTRHKSTVADFLNNYYEWFFDEYNSKLLESSNYITRRQAVKLLGDMLLDRTNSAVMTRYVSSRDNLRILMNLLRESSKSIQIEAFHVFKLFAANQKKPADIISIFVANRSKLLRPFG

SEQ ID NO: 15174 - protein, 488 aa, Zea mays
VFPRGKLGNCKKFREIPEYSGLVLLEAREDVRATYTFGRELGRGQFGVTYLVTHSETGQRFACKSIATRKLVHRDDIEDVRREVQIMHHLTGHRNIVELRGAYEDRHSVNLVMELCEGGELFDRIIAKGHYTERAAASLCREIVAVVHSCHSMGVFHRDLKPENFLFLNNKEDSPLKATDFGLSVFFKHDVDTFKDLVGSAYYVAPEVLKRKYGAEADIWSAGVILYILLSGVPPFWAENEDGIFDAVLRGHIDFSSDPWPSISNGAKDLVKKMLRQDPKERLTAAEILNHPWIREDGEAPDKPLDITVIGRMKQFRAMNKLKKVALKVVAENLSDEEIMGLKEMFRSLDTDNSGTITLEELRSGLPKLGTKISESEIKQLMEAADVDGNGTIDYAEFISATMHLNRLEKEDHILKAFEYFDKDHSGYITVDELEEALKKYDMGDDKTIKEIIAEVDTDHDGRINYQEFVAMMRNNTPEIVPNRRRMF

SEQ ID NO: 15175 - protein, 801 aa, Bacillus anthracis str. 'Ames Ancestor'
MKKRLVMIGNGMAGIRCMEEILKHDCDSYEITIFGDEPHPNYNRIMLSHVLQGKTNIQDIIMNEYSWYEENEITLYTNERVQSIDREEKVIMTEKNRTLTYDKLIIATGSSAFILPVEGSTLPGVTGFRTIEDTQFMMDTAKEKKKAVVIGGGLLGLEAARGLIDLGMDVHVVHLMPSLMEQQLDTKAASLLREDLEAQGMKFLMEKKTVKILGTNHVEGIQFEDGEVVDCDLIVMAVGIRPNTQIARDAGLIVNRGIVVNDYMLTNDESIYAVGECAEHDGIAYGLVAPLYEQGAILAKHISNLQTDGYSGSIVGTQLKVAGCDLFSAGQIYEDDQTKAISIFNECKRSYKKVLIRDNKVVGIVLYGDTADGTRLFSMLKKEEDIQEYTPASILHKAGEESELDVATMSADDTICGCNGVTKGTIVHAILEQELTTFEEVKGCTKAAGSCGKCRPLVEQVLSHTLGDAFDASAQSAGMCGCTPLSRDEVVAAIHEKGLKSPKEVRNVLGFVHEDGCSKCRPALNYYLRMAIPEEYEDDKASRFVNERMNGNIQHDGTFSVIPRMYGGVTTADDLMKIAEVAKKYDVPLVKITGASRIGLYGVKKQDLPNVWADLNMTSGYAYSKSLRNVKSCVGSRFCRFGTKDSLGLGMLLEQSLEMVDTPHKMKMGVTGCPRNCAEVLTKDFGVVCVENGYQLYIGGNGGTEVREADFVMIVPTEDDVLHIATAYMQYYRETGIYGERTAYWTERLDFDHIKEILQDANMVTKLNERFQTARGTYKEAWGQALETKSLKAMYEVETVK

SEQ ID NO: 15176 - protein, 493 aa, Vibrio sp. Ex25
MQTINVVWLKRDLRLTDHQPLTQALSSKHPTVLLYIVEPLLLNNPHYSERHWRFVWQSLQDMNETLKAYGHRITVLFGDALACFQSIQMQYQINAVFSHQEIGLNCTFERDKQIADWLHEQNITWFEFEHGAVIRGAKDRQGWDKHWDLVMRSSISPLDLQTNLLHSLDAESLGCAFSPPSSWLSKCKGMQTGGSQLAWKTLEDFFNRRGRDYYRSISSPTASRTACTRLSPYLAWGNISLREVYQYLLKHWQVVGFRRSLIALSSRLHWHCHFIQKFESEYDMEFYCVNRAYESLIKQSSTFDEEKLAAWKSGYTGIPLIDACMRCLHQTGYINFRMRAMLVSFLTHHMNMDWRTGVTHLAQLFLDFEPGIHYPQFQMQAGVTGTNTIRIYNPVKQAQEHDPDGAFIYKWVPELQMVPTPLLFEPWTMTQMETVMYHLKPDSRYLAPIVDLNSAAKDARERLWAWRKRADVKQEGKRILTRHVRPSKESRAR

SEQ ID NO: 15177 - protein, 98 aa, Helianthus annuus x Helianthus argophyllus
QPRILMAMARDGLLPSFFSDINKTTHVPVKSTIATGVFIASLAFSMNVDQLAGMVSVGTLLAFTAVAVSILIHRYIPPDITIVQSPNTESTDLVSSEF

SEQ ID NO: 15178 - protein, 217 aa, Brucella melitensis 16M
MTDSSHQRSTAMSRTLVLVRHGQSEWNLKNLFTGWRDPGLTEQGHAEAKAAGQRLKAAGLKFDIAYTSALSRAQVTCQHILDELGQPGLETIRDQALNERDYGDLSGLNKDDARAKWGEEQVHIWRRSYDVPPPGGESLKDTGARVWPYYLHTIQPHVLREETVLVAAHGNSLRALIMALEGLTPEQILKQELNTGVPIIYRLNADSTVASKEILSA

SEQ ID NO: 15179 - protein, 422 aa, Oceanobacillus iheyensis HTE831
MQEIKIPELAESITEGTIAEWLVKKGDKVEKGDPVVELETDKVNVEVNAEFSGVITEIISEEGDDVTVGDTIAKLDENGEAGSNSDESEPKEEPKQEEKQEDDKKKASETETSKGAETKSESNGEVIASPAARKRARELNIDLSSVQSRDPLGRVRTEDVEAQAQANKQPAEKKQEKKDAPKSEKTEFDKPVERVKMTRRRQTIAKNLVEVQHNTAMLTTFNEVDMTAVMELRKQRKDKFLDKNGVKLGFMSFFTKAVVGALKEFPLLNAEIQGNELVIKKFYDIGIAVSTDDGLVVPVVRDADRKDFAGIEQDINDLGIKARDNKLTLKDLQGGSFTITNGGTFGSMMSTPILNAPQVGILGMHNIVKRAMVMPDDSIEVRPMMYLALSYDHRIVDGKEAVQFLVRIKQMLEDPYDLLLEG

SEQ ID NO: 15180 - protein, 775 aa, Magnetospirillum magnetotacticum MS-1
  misc_feature (618)..(618): Xaa can be any naturally occurring amino acid
MTKTLHARPSAATDTTFAPPVITGTATEDALDILFHALLDVARRHDPELEDVLHGRADISSYSPEMLARALQVQGIWFQLVSIAEQNAAMRRRRHLERAKGRAALNGSFAKVLAEASAKGIGAAQIHALLKDLRIRPTITAHPTEGKRVTVLEKLRRIYLVLRELELPRWTERERNGLMNELRDQIELIWMTGELHLEKATVEREVAWGLHFFDETLFEMLPEVMVSLEESLAQYYPDETFEVPPFFQFGSWIGGDRDGNPYVTASVTRETLQRNALASLRRYRDGITHLGRVLSITERSLPVPESFRAELAHMLAESGDARAIAARNPGEAYRQFLTCVLRKLEATIARNKGARSVGPDYPSADGLINDLRTLEKGLADAKCGALATDIVRPVRRMVEIFRFSTVRLDLRENSTRTTKTLHALWKLRNGDREPPELDAPAWKEWLLTELARPRSPETSFEDFADRLPDEARETLATFALVGEMRDTLDREAFGAFILSMTRSTVDVLGAYLLAKEAGIFLDATGTEICPLPIVPLFETIDDLRAAPAIMKELLAIPVVRRSTRWQGGVQEVMIGYSDSNKDGGFIASNWELYKAQVLAHRARQASRRAGSPSSTVAXVPSAGAACRPIAASRPSRRARSTGASASPSRARSSRSNMPTAVPPPIRWSCWRPRSSSTPCSRRAAATALGPNSTTRWRRSRAPLGPPMSTCSRPTASSTTSRPRAPSTRSRCSTSARARPAVSARSRSRICGRSRGCSRGRRTATSSPAGTASVRG

SEQ ID NO: 15181 - protein, 315 aa, Mycoplasma pneumoniae M129
MLKVKSDFLTKDQVIYDVAIVGAGPAGIAAGIYGKRANLNLAIIEGSTPGGKVVKTNIVENYPGYKSITGPDLGLEMYNHLIDLEPTFFYANLIKLDKAADTFILYLDDKTVVFAKTVIYATGMLERKLGVAKEDHFYGKGISYCAICDGSLYKDQVVGVVGGGNSAIQEALYLASMAKTVHLIHRREGFRADETALNKLRNLPNVVFHLNYTVKELLGNNTLNGIVLQNTLDHSTKQIDLNCVFPYIGFESITKPVEHLNLKLDPQGFLITNEQMETSLKGLFAAGDCRSKHFRQIGTAINDGIIAVLTIRDVL

SEQ ID NO: 15182 - protein, 261 aa, Magnetospirillum magnetotacticum MS-1
MPTHRGIAAQPPGSINGRFRITEQGEVVSFKYANRGTASYQMELLAASVFEHALLSEGSGNGSRAELDDALEALSGASRAAYVNLLQADGLVDYFQAASPLDEIALLNIGSRPARRFGAKSLSDLRAIPWVFAWSQNRHVITGWYGVGSGLKSFIDIRGEQGEALLRRLFKDCPVFRLVLDEVEKTLMMVDLEIARDYAGLVPDAGIRSRIFGMIEQEYALTREMVLRVSGDGELAQRFPQFRERLQGRLPTINQVSREQV

SEQ ID NO: 15183 - protein, 332 aa, Ehrlichia ruminantium str. Welgevonden
MKNLTVREALCAAIREEMERDHTVLIMGEEVGEYQGAYKVTQGLLEQFGPDRVIDTPITEHGFAGIGIGAAFSGLRPIVEFMTFNFAMQAIDQIINSAAKTSYMSGGQLSCPIVFRGPNGAAARVGAQHSQCYASWYAHIPGLKVIAPYFAADCKGLLKAAIRDPNPIIFLENEITYGHTHEVPDAVLTKDYISEIGKAAIVKEGTDITITAFSLQVKSALEAAELLEKEGINAEVIDLRTLRPLDVEQILNSIKKTNRIISIEEGWPYSGIGSEIAALTMEHAFDYLDAPMIRITAKDIPLPYAANLEKLALPQIQDILEAARTLCIRNYK

SEQ ID NO: 15184 - protein, 117 aa, Beta vulgaris subsp. vulgaris
MASSAFVKFTCALVMCMMVAAPLAEAITCGLVASKLAPCIGYLQGAPGPSAACCGGIKSLNSAAASPADRKTACTCLKSAATSIKGINYGKAASLPRQCGVSVPYAISPNTNCNAIH

SEQ ID NO: 15185 - protein, 634 aa, Zea mays
MDGCDCIEPLWPTDDLLVKYQYISDFFIALAYFSIPLELIYFVKKSSFFPYRWVLIQFGAFIVLCGATHLINLWTFTTHTKTVAMVMTIAKVSTAVVSCATALMLVHIIPDLLSVKTRELFLKNKAEELDREMGLIRTQEETGRHVRMLTHEIRSTLDRHMILKTTLVELGRTLGLEECALWMPSRSGSSLQLSHTLHHQITVGSSVPINLPVINQVFSSNRAIIIPHTSPLARIRPLTGRYVPPEVAAVRVPLLHLSNFQINDWPELSAKSFAIMVLMLPSDSARKWHVHELELVEVVADQVAVALSHAAILEESMRARDLLMEQNVALDLARREAEMAIRARNDFLAVMNHEMRTPMNAIIALSSLLLETELTPEQRLMVETVLKSSNLLATLINDVLDLSKLEDGSLELEIKAFNLHAVFKEVMGFIKPIASIKRLSVSVMLAPDLPLCAIGDEKRLMQTILNISGNAVKFTKEGHITLVASIVKADSLREFRTPEFHPTASDDHFYLKVQVKDTGCGIGPQDLPHVFTKFAHPQSGGNRGFNGSGLGLAICKRFVSLMGGHIWIDSEGTGRGCTATFVVKLGVCDNTNTYQQQLIPLVWPSSADSDLRAPKPLPDGRGSTPLKSRYQRSV

SEQ ID NO: 15186 - protein, 237 aa, Lycopodiella cernua
ATKEYRSIVFKEPRFVEYFRLATPEMEYGRMNIGSRPSKRKPTGGIESLRAIPWIFAWTQIRFHLPVWLGFGAAFKHVVTEDSKNLNTLREMYNHWPFFRVTLDLIEMVFTKGDPRIAELYGRLLVSDELHAFGENLRAKYSETQELLLKVAGHSEILSGNPTLKQRLRLREPYITVLNVQQAHTLKKGRDVSLHGTYPGSANLSKPAAELVTLNPTSEYPPGLEDTLVLTMKGIAA

SEQ ID NO: 15187 - protein, 421 aa, Brachyspira pilosicoli
AGTWAAKTLKATDPNCQVVTYDRNDNISFLACGIALWVGGVVKDPKGLFYASPEGLKSEGIEVYMGHEVTKIDWANKKMTVKELKTGKEFEDNYDKLILATGSWPVTPPIEGLKQEGTTYGLKKGIFFSKLYQQGQDIIDEIAKPEVKRVMVVGAGYIGVELIEAFKNHGKEVILMEAMPRVMANYFDKEITDEAEKRIKDAGIELHLGETVKKFEGDDRVKKVVTDKGSYDVDMVVMSVGFRPNSELYKDYLETLPNGAIVVDTTMKSSKDENVYAIGDCSSVYSCSSKSHEYIALATNAVRMGIVAANNILGKKVNYCGTQGSNAICVFGYNMASTGWSEETAKKKGLKVKSNFFRDAERPEFMPTYEDVLVKIVYEEGTGRLLGAQIASKHNHAEAIHAFSLAIANEMTVQDFALSDF

SEQ ID NO: 15188 - protein, 248 aa, Corynebacterium diphtheriae
MTTGKLILLRHGQSEWNASNQFTGWVDVNLTEKGEAEAKRGGELLKAQGVLPSVVYTSLLRRAIRTANIALNAADRHWIPVVRDWRLNERHYGALQGLNKAETKEKYGDEQFMAWRRSYGTPPPELEDSSEFSQANDPRYANLDVVPRTECLKDVVERFVPYFKEEILPRVKNGETVLIAAHGNSLRALVKHLDNISDADIAELNIPTGIPLVYELDEAGTVLNPGGTYLDPEAAAAGAAAVAAQGAK

SEQ ID NO: 15189 - protein, 504 aa, Agrobacterium tumefaciens str. C58
MDSSSSGVSYKKADASYFEKRGLSRYAGVWSLWALGVGAVISGHFSGWNFGFSTGGWGGMLVAGIIIAIMYLGLTFSIAEMSPALPHTGAAYSFARTAMGPWGGFVTGLCENVEYVLTPAVVVTFITAYVNSILGLDPAYSPFVWIVFYAIFLALNVFGLELSFKVTLVITLISLAVLVFFWISAIPNIDFSRFALNIGVGPDGKAVELPEGGGSFFPFGFSGVLATLPFAVWLFLAIEQLPLAAEESVDPKRDMPKGIILGMVTLMVSAFMIVLLNPSLPGVGAFHLSSSLEPLLDGFKAIYGDGGVVLLGLVALTGLIASFHTILYAQGRQIYSLSRAGYFPTVLSITHSKYRTPYVANITGAIVGLAVMLVIWFSLGAEQGGSIIGSVLLNMAVFGAMFSYIMQAISFILLRKNLPNIERPFRSPFGIPGALLTIIIAIVTLLYQIQDPNFTKGVLWVAVWFAVAIAYFAFVGRHRLILSPEEEFALEHKQAAVAAAAAKA

SEQ ID NO: 15190 - protein, 262 aa, Acinetobacter sp. ADP1
MMLLTPLAFAPAQIRHRRFLPKAHHFEAKLTYLWFDPDQIEKKSKSCLFWSTSRWNLLKITASDFLRMYSGSIREKVKKAVLQHANTFIASHWQIRVMALPRCLGFRFNSVVFYFVLDEHGKLQFILSEITNTPWNERTVYVHDCREALQIIGDYQSFEFDFDKAFHVSPFMPMQLGYCWKFSFSESQNIIHMQLYQQHALMFDATMRFHLEPITFPSQQYRYAFQYSMEPIKMLFSIYVQAFRLWQKKIPFYRHPKKNKDA

SEQ ID NO: 15191 - protein, 362 aa, Cupressus sp. HHG-2001
  misc_feature (202)..(203): Xaa can be any naturally occurring amino acid
  misc_feature (205)..(207): Xaa can be any naturally occurring amino acid
SDSGKDAGRLSAAWQLYKAQEDLIKVAKDFGVKLTMFHGRGGTVGRGGGLTHLAILSQPPDTIHGSLRVTVQGEVIEQSFGEEHLCFRTLQRFTAATLEHGMRPPISPKLEWRKLMDEMAVIATEEYRSIVFKESRFVEYFRSATPELEYGRMNIGSRPSQRKPSGGIESLRAIPWLFAWTQTRFHLPVWLGFGAAFKHVIXXDXXXLHTLRQMYNELPFFRVTIDLVEMVFAKGDPGITSVYDKLLVSEDLWSFGEKLRAIYLETKDLLLKVAGHKDLLEGDPYLKQRLRLRDSYITTLNVCQAYTLKRIRDPNFHCQQRPHLSKESSTKPADELVKLNPTSEYAPGLEDTLILTMKGIAA

SEQ ID NO: 15192 - protein, 422 aa, Brachyspira pilosicoli
AGTWAAKTLKATDPNCQVVTYDRNDNISFLACGIALWVGGVVEDPKGLFYASPEGLKSEGIEVYMGHEVTKIDWANKKMTVKELKTGKEFEDNYDKLILATGSWPVTPPIEGLKQEGTTYGLKKGIFFSKLYQQGQDIINEIAKPEVKRVMVVGAGYIGVELIEAFKNHGKEVILMEAMPRVMANYFDKEITDEAEKRIKDAGIELHLGETVKKFEGDDRVKKVVTDKGSYDVDMVVMSVGFRPNSELYKDYLETLPNGAIVVDTTMKSSKDENVYAIGDCSSVYSCSSKSHEYIALATNAVRMGIVAANNILGKKVNYCGTQGSNAICVFGYNMASTGWSEETAKKKGLKVKSNFFRDAERPEFMPTYEDVLVKIVYEESTGRLLGAQIASKHNHAEAIHAFSLAIANEMTVQDFALSDFF

SEQ ID NO: 15193 - protein, 254 aa, Saccharomyces cerevisiae
IGVNRVGIADTVGCANPRQVYELIRTLKSVVSCDIECHFHNDTGCAIANAYTALEGGARLIDVSVLGIGERNGITPLGGLMARMIVAAPDYVKSKYKLHKIRDIENLVADAVEVNIPFNNPITGFCAFTHKAGIHAKAILANPSTYEILDPHDFGMKRYIHFANRLTGWNAIKARVDQLNLNLTDDQIKEVTAKIKKLGDVRSLNIDDVDSIIKNFHAEVSTPQVLSAKKNKKNDSDVPELATIPAAKRTKPSA

SEQ ID NO: 15194 - protein, 415 aa, Brachyspira intermedia
  misc_feature (38)..(38): Xaa can be any naturally occurring amino acid
AGTWAVKTLKATDPNCQVVTYDRNDNISFLACGIALWXGGVVKDPKGLFYANPEGLTSEGIEVHMGHDVTKIDWANKKLHVKELKTGKEFEDNYDKLILATGSWPVTPPIEGLKQEGTTYGLKKGIFFSKLYQQGQEIIEELKKPEVKKVMVVGAGYIGVELIEAFKNHGKEVILMEALPRVMGNYFDKEITDEAEKRIKEAGIEMHLGETVKKFEGDDRVKKVITDKGSYDVDMVVMSVGFKPNSDLYKDYLETLPNGAIIVDTTMKTSKDPDVYAIGDCASVYSCSSKNNEYIALATNAVRMGIVAANNILGKKVNYCGTQGSNAICVFGYNMASTGWSEETAKKKGLKVKSNFVKDAERPEFMPTYEDVLVKIIYMEDTGRIVGAQIASKHNHAEAIHAFSIAIANEMTVQD

SEQ ID NO: 15195 - protein, 507 aa, Symbiobacterium thermophilum IAM 14863
MLSAFSPPLPCDPARSHPTPEFPSSLQDYCEIRGIQSQPPARRDPTMDWLASLRSQIKPYRDRFPSHARLPRAGLPRAEILAEIAAMGAAESPAWRDGYASGAVYHGDEHHIAFLNEVYALQSQSNPLHPDLWPSTAKFEAEVVAMTAHMLGGDAAGGTVCGTVTSGGTESLLLAMKTYRDWARATKGITAPEAVVPVSAHAAFDKAAQYFGIKLVRTPLDADYRADVAAMREAITPNTVVVAGSAPGYPHGVVDPIPEIAALAAEHGIGCHVDACLGGFILPWAERLGYPVPPFDFRLEGVTSVSADTHKYGYGAKGTSVILYRRPDLLHYQYFIAADWPGGLYFSPTFAGSRPGALSATAWAAMLSLGEEGYLDATRRILQAADRLKAGVRAIPSLKILGDPLWVIAVASDELNIYQVMEEMAGRGWRLNGLHRPPAFHVALTLRHTEPGVVDRFLADLQDAVAQVRAHPEKATGMAPVYGMAAAAPPELVRQVLTGFIDLLYEV

SEQ ID NO: 15196 - protein, 554 aa, Arabidopsis thaliana
MEISNAMLLVAIVTGYWLWFKRISRWLKGPRVWPLLGSLPGLIEQRDRMHEWITENLRACGGTYQTCIFAVPFLAKKQGLVTVTCDPKNLEHMLKTRFDNYPKGPTWQSVFHDLLGQGIFNSDGDTWLFQRKTAALEFTTRTLRQAMGRWVNRGIKLRFCPILATAQDNAEPVDLQDLILRLTFDNICGLAFGKDTRTCAPGLPENGFASAFDRATEASLQRFIIPKFMWKLKKWLGLGLEVSLSRSLGEIDEYLAAVINTRKQELMSQQESGTHQRHDDLLSRFMMKKTESYSDTFLQHVALNFILAGRDTSSVALSWFFWLITMHPTVEDKIVREICSVLIETRGTDDVASWTEEPLGFDEIDRLVYLKAAISETLRLYPSVPEDSKHVENDDVLPDGTFVPAGSSVTYSIYAAGRMKSTWGEDCLEFNPERWISPIDGKFINHDQYRFVAFNAGPRICLGKDLAYLQMKTIAAAVLLRHRLTVVPGHKVEQKMSLTLFMKNGLLVNLYKRDPQGIIKSLVVKKSDGVSNGQCNGVIGEGVAVYLNTGVAVV

SEQ ID NO: 15197 - protein, 264 aa, Mesorhizobium sp. BNC1
MSELLFDVQDSVALLTLNRPEHKNAFTTSMLDAWSEALLRCRDDERIRALVLTGAGDAFCAGGDVGRMKDNADAGVETPLDQKDYIWKNIARIPRLLQEIDKPFIAAVNGVAAGAGMDMALMADIIFAARSARMGETYIRVGLIPGDGGAWLLPRIVGMSKALELLWTGDMIDAEEALRIGLVNRLFEDERLLDETLAFASRLARGPSVAIRMTKRLCRQGLQTGLIEHLDLATSHQPVLKGTADHKEAVAAFKEKRKPEFRGR

SEQ ID NO: 15198 - protein, 343 aa, Burkholderia thailandensis E264
MAFNVTLKQSGRQFQVEADETVLAAALRQNVHLPYGCKNGACGSCKGTIVQGQFEQGPHSASALSNDERTRGLALLCCSKPQSDLEVDVREIAGVDGVQVKKLPCRVAALERRADDVIVLRLQLPANERLQYLAGQYIEFILKDGTRRSYSMATAPHEEGPIELHIRHMPGGKFTDHVFGAMKERDILRFEGPLGTFFLREDSDKPIVLLASGTGFAPIKAIIEHAHHVKLARPMTLYWGARRKKDLYLLDAAEQWAKEIPNFKFVPVLSEPDASDAWTGRTGFVHRAVIEDLPDLSGHQVYACGAPVMVESAQRDFTQHHGLPADEFYADSFTSAADLAHPV

SEQ ID NO: 15199 - protein, 415 aa, Brachyspira intermedia
HAGTWAVKTLKATDPNCQVVTYDRNDNISFLACGIALWVGGVVKDPKGLFYASPESLKSEGVEVHMGHDVTKIDWANKKLYVKELKTGKEFEDTYDKLILATGSWPVTPPIEGLKQEGTTYGLKKGIFFSKLYQQGQEIIEELKKPEVKKVMVVGAGYIGVELIEAFKNHGKEVILMEALPRVMGNYFDKEITDEAEKRIKEAGIEMHLGETVKKFEGDDRVKKVVTDKGSYEVDMVVMSVGFKPNSDLYKDYLETLPNGAIVVDTTMKTSKDPDVYAIGDCASVYSRASEKQEYIALATNAVRMGIVAANNALGKHVEYCGTQGSNAICVFGYNMASTGWSEETAKKKGLKAKSNFFKDSERPEFMPTHEEVLVKIVYEEDTGRLLGAQIASKNNHAEAIHAFSIAIQRGMTVQ

SEQ ID NO: 15200 - protein, 486 aa, Oryza sativa
MGRRSGGRKLPFFASNASTSSSTKRTRSARRLPSLTRPRASSSPSPASPSPPPPSASHPAPPSPPLAVSPAGAGKVGKKKAGARLWMRLDRWGVSETLHLDKGSIIRRAGLPPRDLRILGPVFSDSSSILAREKAMVINLEFIRAIVTADEILLLDPLTIDVIPFVEQLTHHLPLKNLVCGNGQPGGDDHGEKHDDSHGDQVPRLNEATGAEHELPFEFQVLELALETVCSSFDVNVSGLERRATPVLEELTKNVSTRNLDRVRTLKSDLTRLLAHVQKVRDEIEHLLDDNEDMAHLYLTRKQLQNQQVEALISSAASNSIVPGGTSLSRLNNSFRRSVSIATSMHLDNDVEDLEMLLEAYFMQLDGIRNRILSVREYIDDTEDYVNIQLDNQRNELIQLQLTLTIASFGIAVNTFIAGAFAMNIQSKLYSIDDGSFFWPFVGGTSSGCFMICIVLLWGSNHPEAAVCLLCREIADESLNFMDNTE

SEQ ID NO: 15201 - protein, 381 aa, Methanothermobacter thermautotrophicus str. Delta H
MVVIGGRVAGSTAAYHAARLGLSVLLLERNPEIGTPVQCAGGVSDSFFKSTGLKPLPEFTCTRIRAAAVNGPLGARIVTENPVVRGYILERKSLDKYLALRAAEAGADVLTMSIAGDLIFREGSVSGVVFRGPDGVQEVECGMVIAADGVQSSIARKAGLETGFRPADLCSCVQYEVAGVDVDPETMEFYFGSRFAPSGYLWVFPKGEGRANVGLGIRRKSCSERGPLSYLNRFMEERGFKRIEFNAGAVPVCGPIERTFTDGLLVVGDAAGQVDPLTGGGIHLAAECAKIAGEVAAEAIESGRVDGRFLSRYEMRWRKKIGKNLERSLKFRKILDGLGDEELDALLRSLEGKDLSSISKISLLRILKDYPSMLRILRDIL

SEQ ID NO: 15202 - protein, 747 aa, Bacteroides fragilis YCH46
MDTENQKEIAEEQMIEQAFQELLNDYLATKHRKRIEIITKAFNFANQAHKGIKRRSGEPYIMHPIAVAKIVCNEIGLGSTSICAALLHDVVEDTDYTVEDIENIFGAKIAQIVDGLTKISGGIFGDRASAQAENFKKLLLTMSDDIRVILIKIADRLHNMRTLGSMLPNKQYKIAGETLYIYAPLANRLGLYKIKTELENLSFKYEHPEEYQEIEEKLNATAAERDKVFNEFTAPIREQLDKMGLKYRILARVKSIYSIWNKMQTKHVPFEEIYDLLAVRIIFEPRNMDEELNDCFDIYVSISKIYKPHPDRLRDWVSHPKANGYQALHVTLMGNNGQWIEVQIRSERMNDVAEQGFAAHWKYKEGGGSEDEGELEKWLRTIKEILDDPQPDAIDFLDTIKLNLFASEIFVFTPKGELKTMPQNSTALDFAFSLHTDIGSHCIGAKVNHKLVPLSHKLQSGDQVEILTSKSQRVQPQWEVFATTARARAKIAAILRKERKTFQKEGEELLNEFFKKEEIRPEAAVIEKLCKLHNMKNEEEFLVAIGNKTIVLGDADKNELKEKQSSNWMKYLTFSFGNNKDKQQEEKEPQEKEKINTKQILKLTEDALQKKYIMAECCHPIPGDDVLGYMDENDRIIIHKRQCPVAAKLKSSYGNRIIATEWDTHKKLSFLVYIYIKGIDNVGLLNEITQVISRQLNVNIRKLDMETDDGIFEGKVQLYVHDVEDVKAICNNLRKIPNIKSVTRVEN

SEQ ID NO: 15203 - protein, 423 aa, Brachyspira intermedia
  misc_feature (387)..(387): Xaa can be any naturally occurring amino acid
AGTWAVKTLKATDPNCQVVTYDRNDNISFLACGIALWVGGVVKDPKGLFYASPESLKSEGVEVHMGHDVTKIDWANKKLYVKELKTGKEFEDTYDKLILATGSWPVTPPIEGLKQEGTTYGLKKGIFFSKLYQQGQEIIEELKKPEVKKVMVVGAGYIGVELIEAFKNHGKEVILMEALPRVMGNYFDKEITDEAEKRIKEAGIEMHLGETVKKFEGDDRVKKVVTDKGSYEVDMVVMSVGFKPNSDLYKDYLETLPNGAIVVDTTMKTSKDPDVYAIGDCASVYSRASEKQEYIALATNAVRMGIVAANNALGKHVEYCGTQGSNAICVFGYNMASTGWSEETAKKKGLKAKSNFFKDSERPEFMPTHEEVLVKIVYEEDTGRLLXAQIASKNNHAEAIHAFSIAIQRSMTVQEFALSDFFS

SEQ ID NO: 15204 - protein, 822 aa, Pseudomonas aeruginosa UCBPP-PA14
MQELLRMKKIKLVMVGNGMAGVRTLEELLKLNSDFYDITVFGAEPHPNYNRILLSPVLAGEQTFEEIVLNDLNWYAENGIKLLLDRKVVQIDRVRRRVVAADGSEAEYDRLLLATGSVPFILPIPGNRLQGVIGYRDIADTQAMIDCARTHSHAVVIGGGLLGLEAANGLKQRGMDVTVVHLSDWLLERQLDRTAGKLLQGALEARGIRFRLNTQTQELMDNGSGRVCAVQFNDGDVIPADLVVMAAGIRPNTELAESAGIPCNRGILVNDTLQTYDPRIYAVGECANHRGIAYGLVAPLFEQAKVCANHLAHLGYARYQGSVTSTKLKVTGIDLFSAGDFIGGEGSETITLSDPIGGVYKKLVIKDDVLVGACLYGDTADGGWYFRQIRENHNVAQIRDHLMFGENALGDVGHQGQNSAASMPDTAEVCGCNGVCKGTIVKAIQEHGLFSVDEVKKHTKAASSCGSCAGLVEQILISTVGGAADVKPKSEKAICGCSDLNHGQIRKAIREHRLTSLDAVMRFMDWKTPNGCATCRPALNYYLISTWPGEAKDDPQSRLINERAHANIQKDGTYSVVPRMWGGVTNAAELRRIADVADKYQVPMVKVTGGQRIDLLGVKKDDLPAIWKDLDMPSGHAYGKSIRTVKTCVGSEFCRFGTQNSTQLGIDLEHDLFNMWSPHKVKLAVSGCPRNCAEAGIKDVGIIGVDSGWEMYIGGNGGIKTEVAEFFVKLKTAEEVREYNGAFLQLYREEAFYLERTVHYLQRVGMEHIRKAVVEDAENRKALNDRLQFALSFEQDPWKQRIEQPQLKKEFERIPLKQLENV

SEQ ID NO: 15205 - protein, 345 aa, Glycine max
  misc_feature (267)..(267): Xaa can be any naturally occurring amino acid
MAAEVYYQAIGTLQSHSYLNNLNHHQKHQNNLVTLVSRDFISSNGLSTRRSNCTGQRNCSVIRSLASQTSVVDPVLSPSRSNASDTYKKSNEAALILIRHGESLWNEKNLFTGCVDVPLSKKGIDEAIEAGKRISSIPVDVIFTSALIRAQMTAMLAMTQHRRGKVPIMMHNESEQARSWSQVFSEDTKKQSIPVIAAWQLNERMYGELQGLNKQETADRYGKEQVHEWRRSYDVPPPNGEGLEMCAERAVAYFRDQIGPRLLSGKXVMISAHGNSLTSIIMYLDKLTSQEVISLELSTGIPMLYIFKEGRFIRRGSPIGPSEAGVYAYTRRLALYKQKLDNMFQ

SEQ ID NO: 15206 - protein, 588 aa, Methanosarcina mazei Go1
MRIAILNKDRCQPRRCSKECEKYCPRVRTGDETIVFEADGKPVISEELCVGCGICVNKCPFEAIMIIGLPEALQEPTHRYGPNGFALFGLPVPRTGKVTGILGPNGIGKSTSVQILSGALVPNFGKGKGDWDTVLEHYAGTALHDYFKDVVDGRVKVSQKPQYVDLIPRAFKGKTSELLEKTDERGVLDELIDHLGLRSVIGRNITELSGGELQRVAIAACAARDAQFYFFDEISPYLDIYQRINAARLIQEISKDRAVLVVEHDLALLDMLTDVIHIAYGEPAGFGVVTLPKSVRVGINQYLKGYLPEENIRIRPESIKFEIHPPREDAQFRSMISFNGFSKKFGDGFSLKATGGNLREGEVLGIVGPNGIGKSTFVKVLAGEIKPDEGDPGIEVKISYKPQYIKADIPLSVQDFLRGISKQFGSSYYEVEISNPLQLEKIYDSLLTDLSGGELQRVAVAACLSQEADLYILDEPSAHLDVEQRSMVTKVINRFAENNQKTALVVDHDIYMIDMLSQRLLVFEGEPSVYGEAHGPFSMEGGMNRFLKNLGITFRRDEETRRPRVNNLGSRLDREQKESGNYYYSAKE

SEQ ID NO: 15207 - protein, 623 aa, Streptomyces collinus
MSGIAGWVDFERDLTPEAPTVRAMAAALAHRGPDGFGEWIEGHAALAHRRLSLIGSEHAGQPAIVESEAGSPVAVLTLDGSVTNAVELRRELAAKGHRFTGDGDAEVALHAYLEWGAAFPERLEGLFALAVWDVRRQELLLVRDRLGVKPLCYFLTPSGVVFGSEPKALLAHPAVRPVVDADGLRELFAHSRKPGTGVFRGTREVLPGHTMTVRAPGTGHRRYWSLPARPHTDSLETTVATVRRLLSEAVATHLRADVPVGAMLSGGIDSSALTALAAHRRRAEGAGLRSFSVNFSGYAENFEPHPTMRATPDAPYAALAAEHIGTEHTEILLDTAALADPGTHAAALRSQDAPSPLGDMDVSLLLFFEALRGAGITAVLSGETADEVFNGYFWAYDPGHSNSTTFPWVSFERGHDAAAGGLGCSLVDRTLRKELDFMDYADQHYRDALTEVPQVAGESPAERRAREVTYLALTRWAPTHLDRADRMSMAHGVQLRPPFCDRALVEYVYNVPAELKRVNGQEKSLLRAAVADLLPERVLNRPKSAYPTVQEAAYGEFVRHRFEDVAADRTAPVAPLLDAEATRVALGAAAAPSGAFAWVERASMEMVLQLNTWLSEYGVELRV

SEQ ID NO: 15208 - protein, 193 aa, Zea mays
MATILENIQKARFLPTRPLKDELPTFQGGGGGKGKEESHLMGLRKRLSSFSGKIQPISSASAAEWAFRRSKSAPSLGAAFAAGGGSLRQWWQWGVGWLLSKKPGFAGDLEMNEEEVAALGRQSRGTWAHVLFKMRSGVRRLVASAHSLPTTHKQQSLPSSSASAAHSVQCKPAASFAYAQRQSFHHTGHAMAH

SEQ ID NO: 15209 - protein, 147 aa, Triticum aestivum
NRAREELSFELGRAPTDEETMKKVGLSPARYRDVVRMTRPTYSLHSRNRVTQEELIKEVTDVDAIGVDTHKHNRLLRLAIDDLLDSLKPKESVVIRQRFGLDGRGRRTLSEIAGNLRISREMVRKYELKALMKLKHPTRVDYLRRYM

SEQ ID NO: 15210 - protein, 498 aa, Yarrowia lipolytica CLIB122
MEMLEKRGGDVWQYTYDTGDVAYITVSMCMILVMIPGLGFLYSGLARRKSALSMIWVCFMGAIVAQIQWYFWGYSLAFSPSSNRFIGNLDNFGLKNILKHEDGSRKYPELLFAGFQGMFCSVTVAIVVGGVAERGRLLPAMIFAFCWATIVYCPIAFWIWGPNGWAGAHWDVLDFAGGGPVEIASGIGGLAYSFALGRRKEQLLLNFRPHNVSLVTMGTALLWFGWLGFNGGSALGSNLKAVYAVWNSNIAACFGALTWCLLDFRLEKKWSTVAICSGIISGLVAATPCSGIIPLWASVPLGIVAAAICNFSTQIKYILKIDDSMDTFAEHGVAGIVGLIFNAFFGADYVIGLDGSTPHGGGWVSNNWKQIYKQICFVLAASGYTFVMTVVLCYAINFIPGCKLRASEEAELRGMDEDQIGEFAYDYVEVRRDWLAWTPPTKSHMHDEPEHSTDADAIEANADVLAGSSPNDQNSSMEQPPTSSQATSADDEKNGIHP

SEQ ID NO: 15211 - protein, 269 aa, Plantago major
SLFVYPYKIIIKTCGTTKLLRSIPPILKLADGLSLSVQTVTYTRGSFIFPGAQSYPHRNFSEELSVLDSYFANLGSTNAYVMGSSDKKQKWHVYSACAKSVEVVNPVYTVEMCMTDLDREKASVFYKNESSSAARMTNESGICKILPDSHICDFEFDPCGYSMNAIEEAAISTIHITPEDGFSYASFEASGYNFNSVNLGLLMERVLACFEPKEFSVSVHSEFGAKFLNDAHCFNLKGYSMDEKSYEDLGMGGLNYIPEVLTCNIMWLS

SEQ ID NO: 15212 - protein, 314 aa, Arabidopsis thaliana
MASSIVTSSLKPLAMADSSSSTIFSHPSISSTISSSRIRSSSVSLLTGRINLPLSFSRVSLSLKTKTHLKKSPFVSFVAQTSDWAEEGGEGSVAVEETENSLESQDVSEGDESEGDVSEGAVSERAEFPEPSEEAKLFVGNLAYDVNSQALAMLFEQAGTVEIAEVIYNRETDQSRGFGFVTMSSVDEAETAVEKFNRYDLNGRLLTVNKAAPRGSRPERAPRVYEPAFRVYVGNLPWDVDNGRLEQLFSEHGKVVEARVVYDRETGRSRGFGFVTMSDVDELNEAISALDGQNLEGRAIRVNVAEERPPRRGY

SEQ ID NO: 15213 - protein, 550 aa, Vibrio cholerae O1 biovar eltor str. N16961
MLKNINPTQTQAWKALTAHFESAQDMDLKALFAQDSERFAKYSARFGQDILVDYSKNLVNAETMQHLFALAKETDLQSAITAMFKGEAINQTEDRAVLHTALRNRSNSPVLVNGEDVMPAVNAVLAKMKAFSERVIGGEWKGFTGKAITDVVNIGIGGSDLGPYMVTEALVPYKNHLTMHFVSNVDGTHMAETLKNVDPETTLFLVASKTFTTQETMTNAHTARDWFLKAAGDEAHVAKHFAALSTNGKAVAEFGIDTDNMFEFWDWVGGRYSLWSAIGLSIILSIGYDNFVELLAGAHEMDQHFVNTPFESNIPVILALIGIWYNNFHGAESEAILPYDQYLHRFAAYFQQGNMESNGKYVDRNGNPVTYQTGPIIWGEPGTNGQHAFYQLIHQGTKLIPCDFIAPAVSHNLVGDHHQKLMSNFFAQTEALAFGKSAQAVQAELEKAGKSAAEIAALVPFKVFEGNRPTNSILVKQITPRTLGNLIAMYEHKIFVQGVIWNIFSFDQWGVELGKQLANQILPELADSAAVTSHDSSTNGLINAFKAFRA

SEQ ID NO: 15214 - protein, 355 aa, Metarhizium anisopliae
MSRSNPPNAGGSRKISFNVSEQYDIQDVVGEGAYGVVCSAIHKPSGQKVAIKKITPFDHSMFCLRTLREMKLLRYFNHENIISILDIQKPRGYDTFNEVYLIQELMETDMHRVIRTQDLSDDHCQYFIYQTLRALKAMHSANVLHRDLKPSNLLLNANCDLKVCDFGLARSAASQEDNSGFMTEYVATRWYRAPEIMLTFKEYTKAIDVWSVGCILAEMLSGKPLFPGKDYHHQLTLILDVLGTPTMEDYYGIKSRRAREYIRSLPFKKKVPFRTLFPKTSDLALDLLEKLLAFNPVKRITVEEALKHPYLEPYHDPEDEPTAPPTPEEFFDFDKHKDTLSKEQLKQLIYQEIMR

SEQ ID NO: 15215 - protein, 186 aa, Bdellovibrio bacteriovorus HD100
MIRCPLLSQNEISSHTHAAPLRRFPMKKHLYDFTVKAANGQPVSLDQYRDKVVLVVNVASKCGYTPQYKGLEELYQQNKDNGLVILGFPCNQFGAQEPGSNEEIQQFCELNYGVSFPVMGKVDVNGGNADPLYQWLKEEAPGLLGTEMIKWNFTKFLVGKDGAVLKRFAPKDEPKDIADDIKKALA

SEQ ID NO: 15216 - protein, 453 aa, Corynebacterium glutamicum ATCC 13032
MSLTFPVINPSDGSTITELENHDSTQWMSALSDAVAAGPSWAAKTPRERSVVLTAIFEALTERAQELAEIIHLEAGKSVAEALGEVAYGAEYFRWFAEEAVRLPGRYGQSPSGIGHIAVTRAPVGPVLAITPWNFPIAMATRKIAPALAAGCPVLVKPASETPLTMVKVGEIIASVFDTFNIPQGLVSIITTTRDAELSAELMADPRLAKVTFTGSTNVGRILVRQSADRLLRTSMELGGNAAFVIDEAADLDEAVSGAIAAKLRNAGQVCIAANRFLVHESRAAEFTSKLATAMQNTPIGPVISARQRDRIAALVDEAITDGARLIIGGEVPDGSGFFYPATILADVPAQSRIVHEEIFGPVATIATFTDLAEGVAQANSTEFGLAAYGFSNNVKATQYMAEHLEAGMVGINRGAISDPAAPFGGIGQSGFGREGGTEGIEEYLSVRYLALP

SEQ ID NO: 15217 - protein, 362 aa, Gnetum leyboldii
SDSGKDAGRLSAAWQLYKAQEELIKVAKQFGVKLTMFHGRGGTVGRGGGPTHLAILSQPPDTIHGSLRVTVQGEVIEQCFGEEHLCFRTLQRFTAATLEHGMHPPIAPKPEWRQLMDEMAVIATQEYRSYVFHEKRFVEYFRSATPELEYGRMNIGSRPSKRKPSGGIESLRAIPWIFAWTQTRFHLPVWLGFGAAFKHVIEKDIRNLHTLQQMYNEWPFFRVTLDLVEMVFAKHDPGIAALYDKLLVSEDLWSFGEQLRKNYVETKDLLLQVAGHKEVLEGDPYLKQRLRLRDSYITTLNVLQAYTLKRIRDPSYHVTLRPHLSKESSTKPAAELVKLNPTSEYAPGLEDTLILTMKGIAA

SEQ ID NO: 15218 - protein, 570 aa, Anaplasma marginale str. St. Maries
MDAKLRKLLPLMDEQGLDALLLHHADEYQSGWVHESRQRVKWLCGFSGSNAFLIICKKGKSQFFTDSRYIVQSALEVDKDSYDVHDFRDLTPFAWLEAHIDEYPVVGYEGELFTLSQVGRYAKFLPKMVQHIMLDKIWQRPMQIHQRIQEHPIKFAGLSSREKRAAVAHTLPTSGVMLMTDVDAISWLLNIRNMAFTHTPSVLSRAILHSNGGVELFVDAAADQVHISDEDVRVFSIDKLHGALMSAHSIVVDASTIPMSIFDAVRSKVVTIRDDDPCTFPRATKNETEIRGMIQAHVRDGVAMTNFLYWLHTELANCREVTELGAALKVREFREAQELFAGESFDAISGFGGNGAIVHYRVNEKTSQVLREGGLYLLDSGGQYLDGTTDITRTVAVGTPSREHIERFTDVLKGHIALARAVFPTGTSGGDLDVLARQYLWQKGLDYGHGTGHGVGSFLSVHEGPQAISRGNRVALLPGMVLSNEPGYYKVGEYGIRIENLMYVEACGEGFCRFQQLTRVPLDKNLIDTKMLSSEEIKYVNDYHSFVYNEVAPHVAAAVKAWLQTACSPL

SEQ ID NO: 15219 - protein, 358 aa, Sticherus bifidus
SDSGKDAGRLSAAWQLFKSQEDLISVAKQFGVKLNMFHGRGGTVGRGGGPTHLAILSQPPDTIHGSLRVTIQGEVIEQSFGEEHLCFRTLQRFTAATLEHGMRPPVKPKPEWRALMDEMALVSTEEYRSIVFKEPRFMEYFHSATPVLEYGRMNIGSRPSKRKPSGGIESLRAIPWIFAWTQTRFHLPVWLGFGAAFQAVLKKDPNNLIVLQEMYNEWPFFRVTIDLVEMVFAKGDPRIAALYDELLVNDELKFFGTVLRAKYEETKELLLKVAGHEELLEGNPYLKQRLALRDPYITTLNLQQAYTLKKMREGHVGKSSSLLKARSSAAELVSLNTTSEYAPGLEDTMILTMKGIAA

SEQ ID NO: 15220 - protein, 116 aa, Agrobacterium tumefaciens str. C58
MGNQMKIVMAIIKPFKLDEVREALTGVGIQGLTVTEVKGYGRQKGHTEIYRGTEYAVSFLPKLKIEIAVPSDVVDKAVEAIASAAKTGQIGDGKIFVYSIEQAVRIRTGETNTEAL

SEQ ID NO: 15221 - protein, 360 aa, Sticherus bifidus
SDSGKDAGRLSAAWQVFKTQEDCVKVGHQFGIKLTLFHGRGGSVGRGGGPTHLAILSQPPDTIHGSLRVTIQGEVIEQSFGEEHLCFRTLQRFTAATLEHGMQPPRAPKPEWRALMDDITPIATDAYRGVVFQEPQFVQYFRAVTPELEYGRMNIGSRPSKRKPDGGIESLRAIPWIFAWTQTRFHLPVWLGIGSALKYALYKGQKNLHVLQGMYNGWPFFRATIDLIEMVFAKGDPRIAALYDKLLVSEDLQQFGDSLRARYEETRDLLLLVAGHSDLLQGNPTLKQRLKLREPYITVLNVQQVHTLRKIRDEEYQYNSSKSPVSQNKPAAELVSLNPTSEYAPGLEDTLILTMKGIAA

SEQ ID NO: 15222 - protein, 360 aa, Sticherus bifidus
SDSGKDAGRLSAAWQVFKTQEDCVKVGHQFGIKLTLFHGRGGSVGRGGGPTHLAILSQPPDTIHGSLRVTIQGEVIEQSFGEEHLCFRTLQRFTAATLEHGMQPPRAPKPEWRALMDDITPIATDAYRGVVFQEPQFVQYFRAVTPELEYGRMDIGSRPSKRKPDGGIESLRAIPWIFAWTQTRFHLPVWLGIGSALKYALNKDKKNLHVLQEMYNGWPFFRATIDLIEMVFAKGDPRIAALYDKLLVSEDLQQFGDSLRARYEETRDLLLLVAGHSDLLQGNPTLKQRLKLREPYITVLNVQQVHTLRKIREGGVPVNSSKSPVSQNKPAAELVSLNPTSEYAPGLEDTLILTMKGIAA

SEQ ID NO: 15223 - protein, 468 aa, Corynebacterium glutamicum ATCC 13032
MNASPAPTRSFKGLRARHIHFIALGSAIGTGLFYGSAGAIQAAGPSVLLVYLLGGAVVYFMLRALGEMAVHHPVRGSFAVYTRAHLGGWAGYITGWMFAFEMLIVCLADLTAIGIYMNFWFPGTPQWTWVVATLLIVGGANLASVRWFGELEFIFTIIKVTAVVAMIVGGAAILAFGLGANAEVAGVSNLWEHGGFFPNGVEGMIAAFILVLFAFGGTEIIGVAGSEAEDPEKSIPKAVNTVPVRILLFYVGAILVILALNPWPSITGEESPFVQIFDTLGVNWAAGLLNAVVITAALSAINADLFGAGRVLTGLAKENLAPKAMGKIAKNGVPVMTTTIMIIVLIVGVILNAVLPERVFEIVASLATFATVYVWLMILLAQVGSRRNMPADEVKSLKFPVPFYPFGQYFAILFIAFTFGIMVWYDNYHLPLAVGVGFLVLMTILYYATGRPKAIAPIDYEELDPRRD

SEQ ID NO: 15224 - protein, 319 aa, Candida glabrata CBS 138
MPHNRVTIIGSGPAAHTAAIYLARAEMKPTLYEGMLANGIAAGGQLTTTTEIENFPGFPEGLTGTELMDRMRAQSTKFGTNIITETISKVDLSAKPFKLWTEFNEDGEPITTDAIVMATGASAKRLDLPGEDKYWQQGISACAVCDGAVPIFRNKPLAVVGGGDSACEEAEFLTKYGSKVFMIVRKDHLRASTIMQRRVEKNEKIEVLFNSVSLEAKGDGKFLNALRIKNVKTNEESDLPVNGLFYAIGHNPATDIVKGQVETDESGYIKTVPGSSLTSIPGFFAAGDVQDSRYRQAITSAGSGCMAALDAERYLTELE

SEQ ID NO: 15225 - protein, 377 aa, Volvox carteri
MAEEGEVSALVCDNGSGMVKAGFAGDDAPRAVFPSIVGRPRHTGVMVGMGQKDSYVGDEAQSKRGILTLRYPIEHGIVTNWDDMEKIWHHTFFNELRVAPEEHPVLLTEAPLNPKANREKMTQIMFETFNVPAMYVAIQAVLSLYASGRTTGIVLDSGDGVTHTVPIYEGYALPHAILRLDLAGRDLTDYLMKILMERGYSFTTTAEREIVRDIKEKLCYVALDFEQEMATAASSSALEKTYELPDGQPITIGNERFRCPEVLYNPSLIGMEAVGIHDTTFNSIMKCDVDIRKDLYNNIVLSGGTTMFPGIADRMTKEITALAPSAMKIKVVAPPERKYSVWIGGSILASLSTFQQMWIAKSEYDESGPSIVHRKCF

SEQ ID NO: 15226 - protein, 608 aa, Chlorobium limicola
MSILANKDTRAVIIGGVAGVNAAKRMAQFDFLVNRPLTVQAFVYPPEAGQQKEIFRGGELKNVTVYDSLAPALEEHPDINTALIYLGASRAAQAAKEALESPNIQLVSMITEGVPEKDAKRLKKLAQKLGKMLNGPSSIGIMSAGECRLGVIGGEFKNLKLCNLYRQGSFGVLTKSGGLSNEAMWLCAQNGDGITSAVAIGGDAYPGTDFVTYLEMFEKDPATKAVVMIGEVGGNLEEEAAEWLAAEPRRIKLIAAIGGTCQEVLPQGMKFGHAGAKEGKKGAGSARSKMNALRDAGAYVPDTFGGLSKEIKKVYEELIAAGEISTEIDEAVLPELPPRVQEVMKQGEVIVEPLIRTTISDDRGEEPRYAGYAASELCSKGYGIEDVIGLLWNKKLPTREESEIIKRIVMISADHGPAVSGAFGSILAACAGIDMPQAVSAGMTMIGPRFGGAVTNAGKYFKMAVEDYPNDIPGFLSWMKKNVGPVPGIGHRVKSVKNPDQRVKYLVSYIKNETSLHTPCLDYALEVEKVTTAKKGNLILNVDGTIGCILMDLDFPVHSLNGFFVLARTIGMIGHWIDQNNQNSRLIRLYDYLINYAVKPEQEVPEKK

SEQ ID NO: 15227 - protein, 407 aa, Methanosarcina mazei Go1
MQTEQVSLKKRAESAAEKKAAFGEDFELEKYEEGSKVSKPIEDLQSLDEESKKTLLQVGVIPSEEGRSGSFLVLDNAVSHSTLKDKNVELMSTHKAMEKYEWLKDYSWKLVQVDADKYTAKTYLEDADGYFIRVPAGKKTSMPVQTCLMLGSKKAAQTVHNIIIVEEGATLDIITGCTTKKGVEEGLHLGISEMYIKKGGTLNFTMIHNWAEQIGVRPRTVVSVEEGGTYVSNYICLKPVRSVQTYPTVRLEGEGAVTRLNTIAIAHPGSELDLGSKAIFNAPGTRAELISRTITIGGRLIARGEMIGNAKGAKGHLECKGLVLTDKGSQLAIPILEANVDDIELTHEAAVGKIAKDQVEYLMARGLTEDEAVGMIIRGFLDVGIRGIPEELKEEIENTIAQTALGM

SEQ ID NO: 15228 - protein, 379 aa, Alkaliphilus metalliredigenes QYMF
MRDFYIVDTTLRDGEQTPGVVFLKKEKIKIARMLDELGVDYIEAGIPIMGEEEKDVIREIIAMNGKAKILTWNRMKKMDVDASLACGAKYIHIAVPASDIHIFQKLRKDRKWVIQQVQEVVSYGAEKGCIVSVGAEDASRAEEKFLIEIYQAAIKEGAVRLRYADTLGILTPITTYQAIKRICDYIDADLEFHGHNDFGMATANSLSAFQAGAKYIDCSVNGLGERAGNTALEEIVMTLKYLLKSNHPFEIKRILELSNIVQEASRKIVGESKPIVGKSVFSHESGIHVDGLLKNPTVYESFSPGEIGRKRKIVLGKHSGRTTVIYRLQEMGIKVTPKEANEIIEMIHKKYTYDKNPNIDHMLQQWVELKRDTYDAFSS

SEQ ID NO: 15229 - protein, 107 aa, Brassica rapa
MGGCDKQGFPMKQGVLTPGRVRLLLHRGTPCFRGHGRRTGERRRKSVRGCIVSQDLSVLNLVIVKKGEKDLPGLTDTEKPRMRGPKRASKIRKLFNLTKEDDVRKYV

SEQ ID NO: 15230 - protein, 421 aa, Brucella melitensis 16M
MTTENLLESALVRLDEAASHINIDADVIEKLKFARETMKVRLMIRMDDGSRKSFIAWRCRYDDTRGPTKGGIRYHPDSTVEEVETPAFWMTFKCAVMNLPYGGGKGAIQVDPRQLSKAELERLSRAYIQAFSGIIGPDRDIPAPDVYTNSMIMGWMADEYSQIVGQSSPAVITGKPIALGGSLGRNDATARGGFYLVRHLSHDLGLASVLRVAIQGFGNAGQFMAKLMAGDGHKIVAVSDSAGAVYCADGLDVDLLLAAKADGKSVISTAGHKGHEAISADELVAADCDVLVPSAMENMIHAGNAASIRAKLIVELANGPVTGDADKILAEKGVMVLPDILANAGGVTVSYFEWVQNRQGYYWTLEEIHERLKTIMEREGRAIWNHARERGVTLRTAAYVHALERLAQAIEAHGTQNDFAA

SEQ ID NO: 15231 - protein, 88 aa, Methanosarcina mazei Go1
MKPMLLDFSATWCGPCRMQKPILEELEKKYGDKVEFKVVDVDENQELASKYGIHAVPTLIIQKDGTEVKRFMGVTQGSVLAAELDKLL

SEQ ID NO: 15232 - protein, 120 aa, Halobacterium salinarum
MAKQVLLVDDSEFMRNLLREILEEEFEIADEAENGVEAVEMYKEYDPDLVMMDIVMPIRDGIEATSEIKEFDAGAHIIMCTSIGQEEKMKKAVKAGADGYITKPFQKPSVMDAISDVLTA

SEQ ID NO: 15233 - protein, 149 aa, Brassica rapa
GTLLKPNMVTPGSDSAKVAPEVIAEHTVRALQRTVPAAVPAIVFLSGGQSEEEATKNLNAMNQLKTKKPWSLSFSFGRALQQSTLKTWAGKEENVKAAQEALYVRCKANSEATLGPYKGDAKLGDGAAESLSRQGLQVLENSLYMVSGL

SEQ ID NO: 15234 - protein, 256 aa, Porphyromonas gingivalis W83
MEFHNLIIQSKDGITTLTINKPETLNALSSEVLSELKSAIAVIATEKPRVLIITGSGKAFVAGADIAEMQHLSAAEGKAFGGLGAEVFRRIEELPFPVIAAINGFALGGGCELAMACDIRIASAKAKFGQPEVGLGITPGFSGTQRLPRLVAPGIAKELIYTGRIIDAEEALRIGLVNRVTTPEELLPATMETAQLIASRSASAVSASKEAINRGTEMHIAEGIALEQNLFGLCFATADQKEGMAAFLEKRKPAFC

SEQ ID NO: 15235 - protein, 183 aa, Triticum aestivum
  misc_feature (141)..(141): Xaa can be any naturally occurring amino acid
MAPTVMASSATSVAPFQGLKSTAGLPVSRRSNGASLGSVSNGGRIRCMQVWPIEGIKKFETLSYLPPLSTEALLKQVDYLIRSKWVPCLEFSKVGFIFREHNASPGYYDGRYWTMWKLPMFGCTDATQVINEVEDVKKEYXPYVRIIGFDNMRQVQCVSFIGFKPPGCKIRQGLNSSLTTGHI

SEQ ID NO: 15236 - protein, 315 aa, Zea mays
MTCLFMGGAFVSTPHRRKEARRPEGMATGSEASKAAEAVVDWHKHDSKRMLHAVYRVGDLDRTIKYYTECFGMKLLRKRDVPDEKYTNAFLGFGPENTNFAVELTYNYGVDKYDIGTGFGHFAIANDDVYKLAENIKSKGGKITREPGPVKGGSTVIAFAQDPDGYMFELIQRADTPEPLCQVMLRVGDLERSIKFYEKALGMKLLRKKDVPDYKYTIAMLGYADEDKTTVLELTYNYGVTEYSKGNAYAQVAIGTNDVYKSAEAVDLATKELGGKILRQPGPLPGINTKIASFVDPDGWKVVLVDNTDFLKELH

SEQ ID NO: 15237 - protein, 369 aa, Campylobacter upsaliensis RM3195
MSEFSVEEAQHNKGAKIKVIGCGGGGGNMINHMVKMGLNDLDLIVANTDAQAISNSLAKTKIQLGEKKTKGLGAGMLPEVGAESARESFEEVKASLSQSDIVFIASGFGGGTGTGATPVIAQAAKEIGALTVSVVTMPFTFEGKQRKKLAEAGLLELKKESDSILVIQNEKLLSIIDKKAGIKDAFKLVDDILARAVKGMTSILLDNGDINVDFADVRTIMGHRGLALMGVGSASGENAIEEALTNAMESPLLDGMDIKGAKGVILHFKTSSNCSLFEISAAANSIQEVVDENAKIIFGTTTDDTMEDRVEVTIIATGFEDKTQENEKTHNENAPKKNPYLNLKKVSGGYDEEIMNQLETPTWYRRQMD

SEQ ID NO: 15238 - protein, 621 aa, Coccidioides immitis RS
MKPATSTANWSKGETQRSLIGTLFGRPHRDATLDDVELLPSQPEEQELQSLPAFFFSFGEGSDPLQEGGLSWLRPCRESSTCDTDGQVHSMLRAYMIMEEEPGCLIRTFTAGKMLSALKDIPPGHLALGAAACFLLYQVYLYLTLGLARRKFIQQNGCRPPPAYPHKDPILGLDWALKGMKYSRSRTFLQGTQKRFREHGNTHSLNVIGKPAIATCDPENIKATLATKFQDFDLSTVRKRLFQPLFGKGIFTTDGAEWEHSRAMLRPNFVRSQVADLDMIERHLKNLFKEIPTDGSTVDLQDLFFDLTLDTATEFLFGESAYTLTKKDMGSGERFSDIFTYCTAVIGQWARLGIFLGIPDRRYHRYAAGVHEFADRYVQKALENYRAQQSGMITSDKTSNRYIFLDELVKSTQDPVELRSEALNILLAGRDTTASLLACLWNVLSKRPDVWSKLLNEVDALNKKRPSFEELKNMKFLRYCVNEALRLYPVVPGNTRVAVRDTFVPVGGGPDGKSPVFVPKGTLLNYSVYTMHRREDIYGPDAAEFKPERWEKLRPGWEYLPFNGGPRICLGQQLALTEASYTTVRLMQEFRHVESRDPNPWEELLTVTCASAHGAKVALRP

SEQ ID NO: 15239 - protein, 509 aa, Amphibacillus xylanus
MLDKDIKQQLEQYLALLENDIVIKVSVGDDKVSKDTLELVNEIADMSSMISVEETTLERTPSFSINRKGEPDSGVVFAGIPLGHEFTSLVLALLQVSGRAPKVEASVIDAIKKVEGKHDFVTYVSLTCQNCPDVVQALNLMSVVNPNITHTMVEGSAFKDEVDRLNILAVPSVYLNGEFMASGRMTIEDILGHLGSGIDASELNEKDPFDVLVIGGGPAGASSAIYAARKGIRVGIIADRFGGQVMDTLGIENFIGTKYTEGPKLISEIEQHVNEYNIDVMKGLRAHNIEKKDLFEVQLDNGAVLKSKTIILATGARWRDIGVPGEKEYKNKGVAYCTHCDAPLFEGKHVAVVGGGNSGIESALDLAGIVKHVTVFEFMSELKADAVLQERLRSLPNVDVILNAQTTEITGDETVKGISYIDRTTNEEKHVELQGAFIQIGLAPNTEWLGDTVERNQIGEIVIDKKGQTSVPGIFAAGDCTDTPYKQIIVSMGAGATAALGAFDYLLRN

SEQ ID NO: 15240 - protein, 738 aa, Passiflora edulis
MESCNCIEPQWPAEELLMKYQYISDFFIALAYFSIPLELIYFVKKSAVFPYRWVLVQFGAFIVLCGATHLINLWTFTMHSRTVATVMTIAKVLTAVVSCATALMLVHIIPDLLSVKTRELFLKNKAAELDREMGLIRTQEETGRHVRMLTHEIRSTLDRHTILRTTLVELGRTLALEECALWMPTRTGLELQLSYTLRQQNPVGYTVPIQLPVINQVFSTNRAVKISPNCPVARLRPLAGKYVPGEVVAVRVPLLHLNNFQINDWPELSTRRYALMVLMLPSDSARQWRVHELELVEVVADQVAVALSHAAILEESMRARDLLMEQNVALDLARREAETAIRARNDFLAVMNHEMRTPMHAVIALSSLLQETELTPEQRLMVETILKSSNLLATLINDVLDLSKLEDGSLQLDSGTFNLHAVFREVLNLIKPIASVKKLLLLLNLAPDLPEYAVGDEKRLIQIILNIVGNAMKFSKEGSISITAIVAKLESLRDARVPDFFPTPSENHFYLRVQVKDSGVGINPQDIPKLFIKFAQTQTTGARNSSGSGLGLAICRRFVNLMDGHIWLESEGLGKGCTAIFIVKLGIPERLNESKPPFMSKVAVDHGQTTFPGLKVLLMDDNGVSRMVTKGLLLHLGCDVTTVGSSEECIRVASQDHRVVFMDVGMPEGFEAAVRLHEKFTKRHERPLVVALTASTDRMTKENCMRVGMDGAILKPVSVDKMRSVLSDLLEHKVLFEC

SEQ ID NO: 15241 - protein, 332 aa, Mesorhizobium loti MAFF303099
MDATVRELSYAQAIQEAMAIAMDMDERVFLMGEDIGVYGGAFQVTGDLVERYGTERVIDTPISELGGAGVAVGAALTGMRPIFEFQFSDFATLAMEQIVNQAAKMRFMLGGEVSVPVVMRFPAGSGTGAAAQHSQSLEAWLGHVPGLKVIQPATPYDAKGMLLAAVADPDPVMIFEHKLLYKMKGPVPEGYYTVPIGKADIRREGRDLTIVATSIMVQKALDAAATLEAEGIDVEVVDLRTIRPMDKQTVIDSVKKTSRLMCVYEAVKTLGIGAEVSAMIAESEAFDYLDAPIVRLGGAETPIPYNPELEKATVPQVPDIISAARDLVKGVR

SEQ ID NO: 15242 - protein, 395 aa, Bdellovibrio bacteriovorus HD100
MKPLIVQKYGGATLADPEKIKSVSSRIAAQSKENSLIVVVSAMGKTTNSLIDLANQVSSHPQRREMDMLLTVGERISMSLVSMALNDLGCPAISFTGSQAGIFTDDSHVNAFIKDVKPMRLDEALKNNRVVILAGFQGVSPVTKEITTLGRGGSDTSAVAMAAAFNAERCEILKDVPAVFTADPNIVKSARPLSELNYDQLMEMTFWGAKVLHYRSVELAKMRDVTLYIGPASSKTSDGTIVKKGLNMFESCKALSLNSHELVLGIHCREKNPAKALQGLQNLLDKNQIAFPQLLSCETSLDKTEIFLTGPQEIMFAVKKELEKHPDFTLLPTDYSTVTLTCTGATSPEMTQKVLNTLTGKNLETQKILISAMSLTVLVEAPLRKQVIECLHPLI

SEQ ID NO: 15243 - protein, 263 aa, Thermobifida fusca YX
MSDKESVRYEAADGVATITLNRPEMRNTLTVETQQLLLEALERARGDAAVRAVLLTGAGEAFCAGWDMVEHGRRLSEGKGFGDTVRAYTNPIVLTMARMPKPVVAAVNGVAAGAGAGLAFAADLRIAAAGASFVLAFASLGLGADSGVSWTLPRLVGQARAMEMLLLAEPVTAERALDIGLVARVVAPEELAHAARSLALRLASGPTVAYSAIKAEVGCGAALDLAGALEIEASLQDQCVETADHLQAALAFLEQRQPAFRGC

SEQ ID NO: 15244 - protein, 416 aa, Mycobacterium leprae
MTMPSTANGGFPSVVVTAVTATTSISPDIESTWKGLLAGESGIHVLEDEYITKWDLPVKIGGHLKEPVDSHMSRLDLRRMSYVQRMSKLLSGRLWESTGSPEVDPDRFTVVVGTGLGGAERIVESYDLMNAGGPRKVSPLAVQMIMPNGAAATVGLQLGACAGVMTPVSACSSGSEAIAHAWRQIIMGDADVAVCGGVEGPIEALPIAAFSMMRAMSTRNDDPEGASRPFDKNRDGFVFGEAGALMLIETEEHAKARGAKPLARLLGAGITSDAFHMVAPAADGVRAGRAMTRSLELAGLSAKDVDHVNAHGTATPIGDSAEANAIRVAGCEQAAVYAPKSALGHSIGAVGALESVLTVLALRDGVIPPTLNYQTPDPEIDLDIVAGEPRYGDYRYAINNSFGFGGHNVALAFGRY

SEQ ID NO: 15245 - protein, 425 aa, Mycobacterium leprae
MIARLMTTSPELVTGKAFPNVVVTGIAMTTALATDAETTWKLLLDNQSGIRMLDDPFIEEFNLPVRIGGHLLEEFDHQLTRVELRRMGYLQRMSTVLSRRLWENAGSPEVDTNRLMVSIGTGLGSAEELVFSYDDMRARGMKAVSPLAVQKYMPNGAAAAVGLEHHAKAGVMTPVSACASGSEAIAHAWQQIVLGEADSAICGGVETKIEAVPIAGFSQMRIVMSTKNDNPAGACRPFDRDRDGFVFGEAGALMLIETEDSAKARSANILARIMGASITSDGFHMVAPDPNGERAGHAIARAVHLAGLSPSDIDHVNAHATGTQVGDLAEAKAINKALCNNRPAVYAPKSALGHSVGAVGAVESILTVLALRDQVIPPTLNLVNLDPDIDLDVVAGKPRPGDYRYAVNNSFGFGGHNVAIAFGCY

SEQ ID NO: 15246 - protein, 344 aa, Lolium perenne
MTVVNTVAQQLPGHGQTVCVTGAAGYIASWLVKLLLERGYTVKGTVRNPDDPKNAHLKALDGAVERLILCKADLLDYDAICAAAEGCHGVFHTASPVTDDPEQMVEPAVRGTEYVINAAADAGTVRRVVFTSSIGAVTMDPNRGPDVVVDESCWSDLEFCKKTKNWYCYGKAVAEQAAWEAARKRGIDLVVVNPVLVVGPLLQPTVNASAAHILKYLDGSAKKYANAVQSYVDVRDVADAHIRVFEAPEASGRYLCAERVLHRGDVVQILSKLFPEYPVPTRCSDEVNPRKQPYKMSNQKLQDLGLQFTPVNDSLYETVKSLQEKGHLLVPSKNIPEGLNGVTA

SEQ ID NO: 15247 - protein, 302 aa, Escherichia coli
MIKKIGVLTSGGDAPGMNAAIRGVVRSALTEGLEVMGIYDGYLGLYEDRMVQLDRYSVSDMINRGGTFLGSARFPEFRDENIRAVAIENLKKRGIDALVVIGGDGSYMGAMRLTEMGFPCIGLPGTIDNDIKGTDYTIGFFTALSTVVEAIDRLRDTSSSHQRISVVEVMGRYCGDLTLAAAIAGGCEFVVVPEVEFSREDLVNEIKAGIAKGKKHAIVAITEHMCDVDELAHFIEKETGRETRATVLGHIQRGGSPVPYDRILASRMGAYAIDLLLAGYGGRCVGIQNEQLVHHDIIDAIE

SEQ ID NO: 15248 - protein, 358 aa, Sticherus bifidus
SDSGKDAGRLSAAWQLFKSQEDLISVAKQFGVKLNMFHGRGGTVGRGGGPTHLAILSQPPDTIHGSLRVTIQGEVIEQSFGEEHLCFRTLQRFTAATLEHGMRPPVKPKPEWRALMDDITPIATDAYRGVVFQEPRFMEYFHSATPVLEYGRMNIGSRPSKRKPSGGIESLRAIPWIFAWTQTRFHLPVWLGFGAAFQAVLKKDPNNLIVLQEMYNEWPFFRVTIDLVEMVFAKGDPRIAALYDELLVNDELKFFGTVLRAKYEETKELLLKVAGHEELLEGNPYLKQRLALRDPYITTLNLQQAYTLRQGREGHVGKSSSLLKARSSVEKLVSLNTTSEYAPGLEDTMILTMKGIAA

SEQ ID NO: 15249 - protein, 305 aa, Escherichia coli
MIKKIGVLTSGGDAPGMNAAIRGVVRSALTEGLEVMGIYDGYLGLYEDRMVQLDRYSVSDMINRGGTFLGSARFPEFRDENIRAVAIENLKKRGIDALVVIGGDGSYMGAMRLTEMGFPCIGLPGTIDNDIKGTDYTIGFFTALSTVVEAIDRLRDTSSSHQRISVVEVMGRYCGDLTLAAAIAGGCEFVVVPEVEFSREDLVNEIKAGIAKGKKHAIVAITEHMCDVDELAHFIEKETGRETRATVLGHIQRGGSPVPYDRILASRMGAYAIDLLLAGYGGRCVGIQNEQLVHHDIIDAIENMK

SEQ ID NO: 15250 - protein, 220 aa, Helicobacter pylori
SLSLDYSKNRLNDTTLKLLFELANDCSLKEKIEAMFKGEKINTTEKRAVLHTALRSLNDTEILLDNMEVLKSVRSVLKRMRAFSDSVRSGKRLGYTNQVITDIVNIGIGGSDLGALMVCTALKRYAHPRLKMHFVSNVDGTQILDVLEKLSPASTLFIVASKTFSTQETLTNALTARKWFVERSGDEKHIAKHFVAVSTNKEAVQQFGIDEHNMFEFWDF

SEQ ID NO: 15251 - protein, 170 aa, Vibrio vulnificus YJ016
MWQKFSQGGYMKDITPDICDQHEDKVTLLNLPLQNFGQKAAFFGEIVTVRCYHDNSKVRDVLSENGKGKVLVVDGHGSCQKALLGDQLAILAIENDWEGVIVFGAVRDVAQMSQMELGIKALGTSPFKTEKRGAGEVNVTLTMHNQMVQPKDYIYADWNGILISKELLQF

SEQ ID NO: 15252 - protein, 642 aa, Monochoria vaginalis
MAASKPSPFPSSASSSRLLLHPFSKPLHPSPKLQRQQRIFVPLVTSSTTVAAPDAVFPPRRNFAPDEPRKGADILVEALEREGVTDLFAYPGGASMEIHQALTRSPSITNHLLRHEQGEAFAASGYARSTGRPGVCIATSGPGATNLVSALADALLDSIPMVAITGQVLRRMIGTDAFQETPIVEVTRSITKHNYLVLDVDDIPRIIKEAFFIATSGRPGPVLVDIPKDIQQQLAVPVWNPPVRLPGYVSRLPKPPALHLLQQIVRIVSESSRPVLYVGGGSLHASEELRRFADLTGIPIASTLMGIGVYPLDGPLSLKMLGMHGTVYANYAIDKADLLLAFGVRFDDRVTGKLEAFASRAKIVHIDIDPAEIGKNKQPHVSICGDIKLALQEMNEMIEESGIHNKLDFSAWREELDQQKKNYPLEYKTFGDLIPPQHAIELLEELTNGEAIITTGVGQHQMWAAQYYSYKRPRQWLTSAGLGAMGFGLPAAVGAAVGNPGVMVVDIDGDGSFQMNAQELAIIRIENLDVKMLILNNQHLGMVVQWEDRFYKSNRAHTYLGNPANESKVFPDFVKLAESYDIPAARVSKKSEVRDAIRKMIQTPGPYLLDVIVPHEEHVLPMIPSGGAFKDMILDGDGRTVH

SEQ ID NO: 15253 - protein, 326 aa, Mesorhizobium sp. BNC1
MNDRENPYAGGGMTGNVTFGGASRADAGGAAAHALAPSSGDLIKDTSTASFAADVIQESRNQPVLVDFWAPWCGPCKQLTPLLEKAVREAGGRVKLVKLNIDDHPAIPGQLGIQSIPAIIAFKEGQPVDGFMGAVPESQIRDFIKRISAGGSKVEEALAAAAEAREAGDSQMAAQIYSAVLQQEPEQVDALAGLADLLFEAGQTDEARSLLDQVPDAKKNAAAVATVRAKMALAEQVAGLGNPAELQQRLASNPDDHQARFDLALILNAQGKRAEAADNLLAIIKADRSWNDDAARGKLLELFDAWGMTDPATLSARRRLSSLLFS

SEQ ID NO: 15254 - protein, 181 aa, Lactuca sativa
MASISSSAVATVNRSTPAQASLAAPFTGLKSNVAFPVTKKANNDFSSLPSNGGRVQCMKVWPPIGLKKYETLSYLPPLSDEALSKEIDYLIRNKWVPCLEFELEHGFVYREHHHSPGYYDGRYWTMWKLPMFGCTDSAQVMKEVGECKKEYPNAFIRVIGFDSVRQVQCISFIVSKPPGVL

SEQ ID NO: 15255 - protein, 374 aa, Arabidopsis thaliana
MVVILFYLMPCWFVLFLGRVCRRRGVRRGTRPPPPPPPTNSSFFQSHFLYQIRRQFQLFSEEISFTEFSTPIDQLKIEMEANSGGGGGAEGGRAVTGGGGGGGGSDVELVSKTLQVEHKLFYFDLKENPRGRYLKISEKTSATRSTIIVPSSGISWFLDLFNYYVNSEEHELFSKELQLDSKVFYFDIGENRRGRFLKVSEASVSRNRSTIIVPAGSSPDEGWAAFRNILAEIHEASGLFVMPNQVKPSDGQEHLVDDVGAGFIPGHGSQQPSSSEHNVDRTIDSPGQEETGMTGVSKVIRADQKRFFFDLGNNNRGHFLRISEVAGSDRSSIILPLSGLKQFHEVIGHFVEITKDKIEGMTGANVRTVDPPQR

SEQ ID NO: 15256 - protein, 765 aa, Sclerotinia sclerotiorum
MNRYDDGELEISLAPSANHRAQHRSSEASSNPRRDSQNGGNRRMESAPQKKTEQRVGAYSVVRTLGEGSFGKVKLAVHRVTQQQVALKIIARRKLISRDMAGRVEREIEYLQLLRHPHIIKLYTVIKTPHEIIMVSEYAGNELFDYIVQHGKMREDEARRFFQQIICAVEYCHRHKIVHRDLKPENLLLDENLNVKIADFGLSNIMTDGNFLKTSCGSPNYAAPEVINGKLYAGPEVDVWSCGVILYVLLVGRLPFDDEHIPSLFAKIARGQYNVPSYMGREAAALIKKMLAVNPVYRATIAEIRDDPWFTTNLPAYLQPPVEEFIDTGVDPAKAINPRAIAPHASPAIQEKLHVQVTEKISKTMGYGIKDVQEALAAEEPSAIKDAYLIVRENKLMQANPNLTDDKNQLLFQIPSPPTYDSTIPPSMPDSPSPLVKERPGNIPPTAPPFQPRPSPLLDAVSPRSSSSIGTDRSFVRPYVSKIGILPSSIPQYHKEFMETHKSGHQESTLSNSHSETIEPSPQTEAEKAETVRRLNPHSRSLAKLDEGKKPAGMTPVPVKKAKPTKWQFGIRSRNQPLEAIGCIYRALQKLGAEWLVGDEWTPGQSENNGNKRNDDNDDNDDPNGSGASLHRETSMNDNSKKNRFSGIDKKGNYKLPEDPWVLHVRWKKTDIRRHSIASLNSSTSSPAHPSSMPKDEGLDSIDGGVIMHLDIQLYEMEPGVYLVDFKCAGYETADGMMCEEKDVTSPFPFLDLASKLIIQLAEAD

SEQ ID NO: 15257 - protein, 314 aa, Triticum aestivum
  misc_feature (24)..(24): Xaa can be any naturally occurring amino acid
  misc_feature (147)..(147): Xaa can be any naturally occurring amino acid
SHLRWGHWYTLRELDEATAGFAPXRVVGEGGYGIVYLGVFADGRQVAVKNLLNNRGQAEREFTVEVEAIGRVRHKNLVRLLGYCVEGAHLILVYEYVDNGNLEQWLHGDVGPVSPLSWDARMDIVLGTAKGITYLHEGLEPKVVHRXIKSSNILLDKRWNSKVSDFGLAKLLGSDSNYVTTRVMGTFGYVAPEYASTGMLNERSDVYSFGVLIMEIISGRCPVDYARPPTEVNLVEWLKKMVSNRDYEAVLDPKLPEKPTSKALKKALLVALRCVDPDSQKRPKMGHAIHMLEVDDFPYREDRRTLRPCQGSPL

SEQ ID NO: 15258 - protein, 483 aa, Cupriavidus necator
MELQHTALLRTHCLIDGEWTGAQSGAELAVCNPATGERIGSVPLAGAAEAEQAVRAAERALPAWRAQTGKAVPPVLRRWADLMLAHQEDLARLMTAEQGKPLPDARGEVAYAASFLEWFGEEAKRVDGEVLASPRSSQKMLVLREPVGVCAAITPWNFPAAMITRKVGPALAAGCTIIVKPAEQTPLTALALAVLGEQAGVPRGVLQVVTGDAVQIGGVLCASPVVRKLSFTGSTAIGKLLMAQCAGTVKKLSLELGGNAPLIIFDDADMDSAVEGIIASKFRNTRQTCVCANRIYVHDRVYDEVARRLVSAVEQLLPGHGVDSGVTQGPLIDADAVAKVEAHIADALAQGATVLTGGQRHALGGTFFAPTVLANATASMRVAREETFGPLAPLFRFTSEAEVVAMANDTESGLAAYFFSRDMAKIWRVAQGLEYGMVGINTGLISNEVAPFGGVKQSGLGREGSRHGIDEYLETKYLCMEVE

SEQ ID NO: 15259 - protein, 287 aa, Methanosarcina mazei Go1
MLDESYESRIIDGKVLAQQVEEEVRSGVEDLESNRGITPGLATILVGDDPASKMYVRLKHRACERVGIRAEDFLLPADSTQEELLALIDSLNNNKDVHGILLQLPLPEHFSPQEAMEAISPAKDADGFHPYNMGKLMIGDEGLVPCTPHGVIRALEEYNVPVKGKNAVIVGHSNVVGKPMAAMLLNRNASVSVCHIFTDDLKKYTLGADILVVAAGVKHLIKADMVKEGAVIFDVGITKEEDGVYGDVDFENVIKKASLITPVPGGVGPLTVAMLMKHVLMCAEKSL

SEQ ID NO: 15260 - protein, 654 aa, Oryza sativa
MATSRLTPAYDLKNAAAAVYTPLPEQPHSAEVEIRDRKPFKIISAIILSSLLLLALILVAVNYQAPPSHSSGDNSQPAAVMPPSRGVSQGVSEKAFRGASGAGNGVSFAWSNLMLSWQRTSYHFQPVKNWMNDPNGPLYYKGWYHLFYQYNPDSAVWGNITWGHAVSTDLINWLHLPFAMVPDQWYDVNGVWTGSATILPDGRIVMLYTGDTDDYVQDQNLAFPANLSDPLLVDWVKYPNNPVIYPPPGIGVKDFRDPTTAGTAGMQNGQRLVTIGSKVGKTGISLVYETTNFTTFKLLYGVLHAVPGTGMWECVDLYPVSTTGENGLDTSVNGLGVKHVLKTSLDDDKHDYYALGTYDPVKNKWTPDNPDLDVGIGLRLDYGKYYAARTFYDQNKQRRILWGWIGETDLEAVDLMKGWASLQAIPRTIVFDKKTGTNVLQRPEEEVESWSSGDPITQRRIFEPGSVVPIHVSGATQLDITASFEVDETLLETTSESHDAGYDCSNSGGAGTRGSLGPFGLLVVADEKLSELTPVYLYVAKGGDGKAKAHLCAYQTRSSMASGVEKEVYGSAVPVLDGENYSARILIDHSIVESFAQAGRTCVRSRDYPTKDIYGAARCFFFNNATEASVRASLKAWQMKSFIRPYPFIPDQKS

SEQ ID NO: 15261 - protein, 604 aa, Oryza sativa
MAERLTRIAIVSEDKCKPKKCRQECKKSCPVVKTGKLCIEVTPASKLAFISEELCIGCGICVKKCPFDAIEIINLPKDLEKDTTHRYGPNTFKLHRLPVPRPGQVLGLVGTNGIGKSTALKVLAGKLKPNLGRFKNPPDWQEILTYFRGSELQNYFTRILEDNLKAIIKPQYVDHIPKAVQGNVGQVLDQKDERGVKAELCVDLELNQVIDRNVGDLSGGELQRFAIAVVAVQNAEIFMFDEPSSYLDVKQRLKAAQVVRSLLRPNSYVIVVEHDLSVLDYLSDFICCLYGKPGAYGVVTLPFSVREGINIFLAGFVPTENLRFRDESLTFKIAETQESAEEIETYQRYKYPTMSKTQGNFKLTVVEGEFTDSQIVVMLGENGTGKTTFIRMLAGLLKPDTVEGTEIEIPEFNVSYKPQKISPKFQHSVRHLLHQKIRDSYTHPQFVSDVMKPLQIEQLMDQEVINLSGGELQRVAICLCLGKPADIYLIDEPSAYLDSEQRIVASKVIKRFILHAKKTAFIVEHDFIMATYLADKVIVYEGRPSIDCTANAPQSLVSGMNKFLSHLDITFRRDPTNYRPRINKLDSTKDREQKSAGSYYYLDD

SEQ ID NO: 15262 - protein, 178 aa, Triticum aestivum
  misc_feature (145)..(145): Xaa can be any naturally occurring amino acid
  misc_feature (151)..(151): Xaa can be any naturally occurring amino acid
MAPTVMASSATSVAPFQGLKSTAGLPVSRRSNGASLGSVSNGGRIRCMQVWPIEGIKKFETLSYLPPLSTEALLKQVDYLIRSKWVPCLEFSKVGFIFREHNASPGYYDGRYWTMWKLPMFGCTDATQVINEVEEVKKEYPDAYXRIIGFXNMRQVQSSVHAFSTGCKIGRLTVTTAI

SEQ ID NO: 15263 - protein, 458 aa, Staphylococcus epidermidis RP62A
MKVAKFGGSSVSTAEQIKKVLTIVNEDPERKIIIVSAPGKRHNDDIKTTDLLIRLYEKVLNKLNYESKKQEIIQRYADIVEELGIGNDILITINDTLEEYIKNLSDKPNRLYDALLSCGENFNAQLIAQYNNSQGIPTRYISPKEAGLTVTDLPQQAQILDSAYNDIYKLRDYDEKLIIPGFFGVSKQNYIVTFPRGGSDITGAIIARGVRASLYENFTDVSGIYKANPNIINNPELIEEITYREMRELSYAGFGVFHDEALQPLYKDRIPVVIKNTNRPNDKGTYILHDREIDSKNVISGISCDKGFTVINIKKYLMNRLVGFTRKILGVLEDYNISFDHMPSGIDNISIIMRTNQIQGKESQVLNAIRKRCEVDELSIDHDLAVLMIVGEGMNQVVGTASKITHALSESNINLIMINQGASEISMMFGIHEADAEKAVLSTYEFCYNGVCLKNLCK

SEQ ID NO: 15264 - protein, 500 aa, Coccidioides immitis RS
MDTPSFPTQQLYYNGAVRKATSGKTFETVNPSDASVLASVEVASHADVDNAVKSAERAFSDWSKTPVSTRAKILLRAAEILRERNDEIAQIETLDTGKAFSETSTVDVVTGADVLEYYAGLISGGGLNGETTQLREDAWVYTKKAPLGVCAGIGAWNYPIQIALWKSAPCLAAGNTMVYKPSEFTPLHGLVLSQIYTEAGLPAGVFNVVHGAGDVGAYLTAHPTIAKVSFTGQVSTGKKVAGSAAGNMKYVTMELGGKSPLIILPDADLESAVDGAMLANFFSTGQVCTNGTRVFVPSKMKADFEALLLGKMGYIRAGPLMDPNTNFGPLSSSVHREKVMSYIRHGIDNDKATLLYGGPHPPANLDSSFRDGYWVSPTVFTNCTDDMKIVQEEIFGPVMSILTYDTIDEAVRRANNTPLGLAAGVFTRDINLAHKIIDRLDAGITWINSWGESPAEMPVGGWKMSGVGVENGRRGIEAWVRNKSTLVDMSGTVATVFTKL

SEQ ID NO: 15265 - protein, 477 aa, Brucella melitensis 16M
MTFHQNLIAGEWVGGDDIANINPSDTNDVVGTYARATAEDTKAAIAAAKAAFPAWSRSGILERHAILRKTADEILARKEELGRLLSREEGKTLVEGIGETIRASQIFDFFAGECLRLAGEVLPSARPGIGVEVTREPVGVVGIITPWNFPIAIPAWKIAPALCYGNTIVFKPAELVPGCSWAIADILHRAGLPKGVLNLVMGKGSVVGQTILDSADVNAATFTGSTGTGKRVAAASIEHNRRFQLEMGGKNPVVVLDDADLNVAVESVVNSAFFSTGQRCTASSRIIVTEGIHDKFVAAAIEKLKTVVVDNALKPGTHIGPVVDETQLQQDMDYIELGRKEGAKLAFGGERLNRETPGFYLQPALFTEATNQMRISREEIFGPVASVIRVKDYEEALATANDTSFGLSSGICTTSLKYATHFKRNSEAGMVMVNLPTAGVDFHVPFGGRKGSSFGPREQGRYAAEFYTTVKTAYTLA

SEQ ID NO: 15266 - protein, 382 aa, Gibberella zeae PH-1
MSQIKTFRILVLPGDHVGPEIMTEALKVLDVIEASRPDIHFERDVDICGGCSIDKYGTPITESVLEKAVASDAVLFGSIGGPEWAGAEPTPESGLLRLRQRLDAFANLRPCEILVPSLVSASPIKPELVAGTKFIVVRENCGGAYFGKKEESEDEASDLWIYSRSEVERLARVSAAVARILHAGSEKANNGSKPVVWSADKANVLASGRLWRRATTNIFNRELTDIDLKHQLADSLAMLMVLDPKRFNNSVIHTDNTFGDVLSDISGGITGTLGVLPSASLAGVPGEGSCKGIYEPVHGSAPDISGKNLANPVAQILSLAMMLRYSFLLEKEADAIEQAVAKVLDTKDGGGLEIRTKDLGGSAMCSEVGDAVCKVLGDMLET

SEQ ID NO: 15267 - protein, 481 aa, Cytophaga hutchinsonii
MSDSNKILEEITSSEYKWGFVTDIDNDSLPKGLNEDTVRYISAKKNEPEWLLEWRLDAFRKWLKMEEPTWPNVKYPKIDFQDIIYYSAPKPKVTLNSLDEIDPELRATFEKLGISLDEQKRMTGVAVDAVIDSVSITTTFKGKLSELGIIFCSMSEAVQEHPELVRKYLGSVVPVTDNYYAALNSAVFSDGSFCYIPKGVRSPMELSTYFRINAANTGQFERTLLIADEGAYVSYLEGCTAPVRDENQLHAAVVELVAMEKAEIKYSTVQNWYPGDKNGKGGIYNFVTKRGICAGDYAKISWTQVETGSAVTWKYPSCILKGDHSIGEFYSVAVTNNYQQADTGTKMIHIGKNTKSRIVSKGISAGHSHNSYRGLVKVMKRAEGARNYSQCDSLLMGDQCGAHTFPYIEVENNTSTVEHEATTSKIGEDQIFYCNQRGIDTEKAVALIVNGYCKEVLNQLPMEFAVEAQKLLAISLEGSVG

SEQ ID NO: 15268 - protein, 120 aa, Zea mays
  misc_feature (110)..(110): Xaa can be any naturally occurring amino acid
TCSNTPRSCGWPALVAAALLASSASTAITCGQVRSSLAPRIPYSTTRTSGLSASCCSGVKSLNRTARTNADRHAAWLCVKSLVNSVKSVNMGTVLTIPVQCGVSVGFPIXSMATDCSQIS

SEQ ID NO: 15269 - protein, 499 aa, Gibberella zeae PH-1
MANPFQRPFQLENESLFHCTSLINGDFVSAKEGKTFNVVDPGSGKTWASCPDCTASDVDSAVASSYETFKTYSKTTPRFRAQTLMKWHNLILAAREDLARILVHETGKTLVEARGEIDYALTFVWWFSGEADRAHGTSMSCAIPGRRAVTIKQPIGVAAALVPWNFPIALALRKAAAALAAGCTMVVKPSPETPLTCVSIAHLALEAGFPRGALNVVTTSLENTPTVAEALCLDARVKKVSFTGSTRVGKIIASFCAPNLKKTTFELGGNCPFIVFDDADVGQAVSQLMPLKWRHAGQACITSNRVFVHSSIYDTFVEKVVQETRGLKLGHGMEEGSTMGALTTPRGLDKAEELYQDAISKGAKTVLGTGKREEGQGYFMAPTILTEMEDDMLMTHEEIFAPVLGFYRFESEEEVVQRANDTPLGLASYIFTKNVDRLWRLFENLDAGMIGLNAGNSSSAEAPFGGIKDSGHGKESGKDVAIDEFLITKTATLTIDGHY

SEQ ID NO: 15270 - protein, 167 aa, Arabidopsis thaliana
RLNPRFTHQSLILSINPVKQSAETGIFWDIEDCKIPDDLNAGDALKNIKSALSSDGHHGTVSVRAYGDTTGLDFPSEGIKLNHFPAGERYARQTKMLEDIVSWSAEHPEPSTLFLIVGDTSRDFLDVVQLLKSKKNYNFIIYNFILYVYYQKTEHSYLAPIPSILLI

SEQ ID NO: 15271 - protein, 955 aa, Staphylococcus aureus subsp. aureus MW2
MNNKKTVTNRKGMIPNRLNKFSIRKYSVGTASILVGTTLIFGLSGHEAKAAEHTNGELNQSKNETTAPSENKTTEKVDSHQLKDNTQTATADQPKVTMSDSATFKETSSNMQSPQNATASQSTTQTSNVTTNDKSSTTYSNETDKSNLTQAKDVSATPKTTTIKPRTLNRMAVNTVAAPQQGTNVNDKVHFSNIDIAIDKGHLNKDTGKTEFWATSSDVLKLKANYTIDDSVKEGDTFTFKYGQYFRPGSVRLPSQTQNLYNAQGNIIAKGIYDSTTNTTTYTFTNYVDQYTNVSGSFEQVAFAKRENATTDKTAYKMEVSLGNDTYSEEIIVDYGNKKAQPLISSTNYINNEDLSRNMTAYVNQPKNTYTKQTFVTNLTGYKFNPNAKNFKIYEVTDQNQFVDSFTPDTSKLKDVTNQFNITYSNDNKTATVDLMNGQTSSNKQYIIQQVAYPDNTSTDNGKIDYTLDTDKTKYSWSNSYSNVNGSSTANGDQKKYNLGDYVWEDTNKDGKQDANEKGIKGVYVILKDSNGKELDRTTTDENGKYQFTGLSNGTYSVEFSTPAGYTPTTANAGTDDAVDSDGLTTTGVIKDADNMTLDSGFYKTPKYSLGDYVWYDSNKDGKQDSTEKGIKGVKVTLQNEKGEVIGTTETDENGKYRFDNLDSGKYKVIFEKPAGLTQTGTNTTEDDKDADGGEVDVTITDHDDFTLDNGYYEEETSDSDSDSDSDSDSDSDSDSDSDSDSDSDSDSDSDSDSDSDSDSDSDSDSDSDSDSDSDSDSDSDSDSDSDSDSDSDSDSDSDSDSDSDSDSDSDSDSDSDSDSDSDSDSDSDSDTDSDSDSDSDSDSDSDSDSDSDSDSDSDSDSDSDSDSDSDSDSDSDSDSDSESDADSDTDSDSDAGKHTPAKPMSTVKDQHKTAKALPETGSENNNSNNGTLFGGLFAALGSLLLFGRRKKQNK

SEQ ID NO: 15272 - protein, 684 aa, Agrobacterium tumefaciens str. C58
MATKVKENEEAENERDGATDGPLLDLSDDAVKKMIKAAKKRGYVTMDELNSVLPSEEVTSEQIEDTMAMLSDMGINVIEDEDAEEAAPAEDDGDSDNEESEGGELAPSGGTALATAKKKEPTDRTDDPVRMYLREMGSVELLSREGEIAIAKRIEAGRETMISGLCESPLTFQALIIWRDELNEGTTLLREIIDLETTYSGPEAKAAPQFQSPEKIEADRKAAEEKEKTRRLRAPTGDEDVTDVGGDGLPPEEEEEDDDESNLSLAAMEAELRPQVMETLDTIADTYKKLRKLQDQQVEARLACTGTLSSGQERRYKELKDQLITAVKSLSLNQNRIDSLVEQLYDISKRLMQNEGRLLRLAESYGVKRDSFLEQYHGAELDPNWMKSITNLAARGWKEFAREESNTIREIRQEIQNLSTETGISIAEFRRIVSMVQKGEREARIAKKEMVEANLRLVISIAKKYTNRGLQFLDLIQEGNIGLMKAVDKFEYRRGYKFSTYATWWIRQAITRSIADQARTIRIPVHMIETINKIVRTSRQMLHEIGREPTPEELAEKLAMPLEKVRKVLKIAKEPISLETPVGDEEDSHLGDFIEDKNALLPIDAAIQANLRETTTRVLASLTPREERVLRMRFGIGMNTDHTLEEVGQQFSVTRERIRQIEAKALRKLKHPSRSRKLRSFLDS

SEQ ID NO: 15273 - protein, 1347 aa, Staphylococcus aureus subsp. aureus MW2
MLNRENKTAITRKGMVSNRLNKFSIRKYTVGTASILVGTTLIFGLGNQEAKAAESTNKELNEATTSASDNQSSDKVDMQQLNQEDNTKNDNQKEMVSSQGNETTSNGNKSIEKESVQSTTGNKVEVSTAKSDEQASPKSTNEDLNTKQTISNQEALQPDLQENKSVVNAQPTNEENKKVDAKTESTTLNVKSDAIKSNAETLVDNNSNSNNENNADIILPKSTAPKRLNTRMRIAAVQPSSTEAKNVNDLITSNTTLTVVDADKNNKIVPAQDYLELKSQIKVDDKVKSGDYFTIKYSDTVQVYGLNPEDIKNIGDIKDPNNGETIATAKHDTANNLITYTFTDYVDRFNSVQMGINYSIYMDADTIPVSKNDVEFNVTIGNTTTKTTANIQYPDYVVNEKNSIGSAFTETVSHVGNKENPGYYKQTIYINPSENSLTNAKLKVQAYHSSYPNNIGQINKEVTDIKIYQVPKGYTLNKGYDVNTKELTDVTNQYLQKITYGDNNSAVIDFGNADSAYVVMVNTKFQYTTSESPTLVQMVTLSSDNSKSASMGNALGFTNNQSGGAGQEVYKIGNYVWEDTNKNGVQELGEKGVGNVTVTVFDNNTNTKVGEAVTKEDGSYLIPNLPNGDYRVEFSNLPKGYEVTPSKQGNNEELDSNGLSSVITVNGKDNLSADLGIYKPKYNLGDYVWEDTNKNGIQDQDEKGISGVTVTLKDENGNVLKTVTTDADGKYKFTDLDNGNYKVEFTTPEGYTPTTVTSGSDIEKDSNGLTTTGVINGADNMTLDSGFYKTPKYNLGNYVWEDTNKDGKQDSTEKGISGVTVTLKNENGEVLQTTKTDKDGKYQFTGLENGTYKVEFETPSGYTPTQVGSGTDEGIDSNGTSTTGVIKDKDNDTIDSGFYKPTYNLGDYVWEDTNKNGVQDKDEKGISGVTVTLKDENDKVLKTVTTDENGKYQFTDLNNGTYKVEFETPSGYTPTSVTSGNDTEKDSNGLTTTGVIKDADNMTLDSGFYKTSKYSLGDYVWYDSNKDGKQDSTEKGIKDVKVTLLNEKGEVIGTTKTDENGKYRFDNLDSGKYKVIFEKPAGLTQTGTNTTEDDKDADGGEVDVTITDHDDFTLDNGYFEEDTSDSDSDSDSDSDSDSDSDSDSDSDSDSDSDSDSDSDSDSDSDSDSDSDSDSDSDSDSDSDSDSDSDSDSDSDSDSDSDSDSDSDSDSDSDSDSDSDSDSDSDSDSDSESDSDSDSDSDSDSDSDSDSDSDSDSDSDSDSDSDSDSDSDSDSDSDSDSDSDSDSDAGKHTPVKPMSTTKDHHNKAKALPETGNENSGSNNATLFGGLFAALGSLLLFGRRKKQNK

SEQ ID NO: 15274 - protein, 642 aa, Monochoria vaginalis
MAASKPSPFPSSASSSRLLLHPFSKPLHPSPKLQRQQRIFVPLVTSSTTVAAPDAVFPPRRNFAPDEPRKGADILVEALEREGVTDLFAYPGGASMEIHQALTRSPSITNHLLRHEQGEAFAASGYARSTGRPGVCIATSGPGATNLVSALADALLDSIPMVAITGQVPRRMIGTDAFQETPIVEVTRSITKHNYLVLDVDDIPRIIKEAFFIATSGRPGPVLVDIPKDIQQQLAVPVWNPPVRLPGYVSRLPKPPALHLLQQIVRIVSESSRPVLYVGGGSLHASEELRRFADLTGIPIASTLMGIGVYPLDGPLSLKMLGMHGTVYANYAIDKADLLLAFGVRFDDRVTGKLEAFASRAKIVHIDIDPAEIGKNKQPHVSICGDIKLALQEMNEMIEESGIHNKLDFSAWREELDQQKKNYPLEYKTFGDLIPPQHAIELLEELTNGEAIITTGVGQHQMWAAQYYSYKRPRQWLTSAGLGAMGFGLPAAVGAAVGNPGVMVVDIDGDGSFQMNAQELAIIRIENLDVKMLILNNQHLGMVVQWEDRFYKSNRAHTYLGNPANESKVFPDFVKLAESYDIPAARVSKKSEVRDAIRKMIQTPGPYLLDVIVPHEEHVLPMIPSGGAFKDMILDGDGRTVH

SEQ ID NO: 15275 - protein, 163 aa, Methanococcoides burtonii DSM 6242
MSYEPLLQSMGRTAVGGTFEFLHDGHMALIRKAFELAKGDVVDIGLTSEEMAGRKNRIIPDIATRKKSLTAFIKELGFPEEKYNIQTLKDPYGSTLEEDYEYLVVSPETLPVARKINEIRKTNGKREIKIVSINYVMAEDDLPISSTRIEQGEIDVHGHLKHN

SEQ ID NO: 15276 - protein, 201 aa, Oryza sativa
NSARGAPSRRFLIPLPFSSLSWRSAPSTTASGLAPPPFSSARGARLLPGALLRLPPPPASVGSFRVVGPAAAPPGGRRIASARVRCGAAVRFIGQSEFEAEVLQSDLPVLVDFVADWCGPCRLIAPVVDWAAEEYEGRLKIVKIDHDANPQLIEEYKVYGLPSLILFKDGKEVTRSRREGAITKAKFKEYLEPLLSTSTVA

SEQ ID NO: 15277 - protein, 91 aa, Glycine max
  misc_feature (45)..(45): Xaa can be any naturally occurring amino acid
  misc_feature (51)..(51): Xaa can be any naturally occurring amino acid
  misc_feature (80)..(80): Xaa can be any naturally occurring amino acid
MSRKIESLGVERVISGEGSHGMFGGYLYFSKAPSKEEFLPEAMRXIKALLXYDCLRATRSTFDRGLEARVPFLNKECYEXAMNIDPQCAMI

SEQ ID NO: 15278 - protein, 206 aa, Cucumis sativus
MPSRRRTLLKVIILGDSGVGKTSLMNQYVNKKFSNQYKATIGADFLTKEVQFEDRLFTLQIWDTAGQERFQSLGVAFYRGADCCVLVYDVNSMKSFDNLNNWREEFLIQASPSDPENFPFVVLGNKVDVDGGNSRVVSEKKARAWCASKGNIPYFETSAKEGINVEEAFQCIAKNALKSGEEEEIYLPDTIDVGSNNQPRSSGCDC

SEQ ID NO: 15279 - protein, 642 aa, Monochoria vaginalis
MAASKPSPFPSSASSSRLLLHPFSKPLHPSPKLQRQQRIFVPLVTSSTTVAAPDAVFPPRRNFAPDEPRKGADILVEALEREGVTDLFAYPGGASMEIHQALTRSPSITNHLLRHEQGEAFAASGYARSTGRPGVCIATSGPGATNLVSALADALLDSIPMVAITGQVSRRMIGTDAFQETPIVEVTRSITKHNYLVLDVDDIPRIIKEAFFIATSGRPGPVLVDIPKDIQQQLAVPVWNPPVRLPGYVSRLPKPPALHLLQQIVRIVSESSRPVLYVGGGSLHASEELRRFADLTGIPIASTLMGIGVYPLDGPLSLKMLGMHGTVYANYAIDKADLLLAFGVRFDDRVTGKLEAFASRAKIVHIDIDPAEIGKNKQPHVSICGDIKLALQEMNEMIEESGIHNKLDFSAWREELDQQKKNYPLEYKTFGDLIPPQHAIELLEELTNGEAIITTGVGQHQMWAAQYYSYKRPRQWLTSAGLGAMGFGLPAAVGAAVGNPGVMVVDIDGDGSFQMNAQELAIIRIENLDVKMLILNNQHLGMVVQWEDRFYKSNRAHTYLGNPANESKVFPDFVKLAESYDIPAARVSKKSEVRDAIRKMIQTPGPYLLDVIVPHEEHVLPMIPSGGAFKDMILDGDGRTVH

SEQ ID NO: 15280 - protein, 130 aa, Oryza sativa
MPTSMITSPLVAPARAKGLPSISRRGSSFAIVCSGGKKIKTDKPYGIGGGMSVDIDASGRKSTGKGVYQFVDKYGANVDGYSPIYSPEEWSPTGDTYVGGTTGLLIWAVTLAGLLGGGALLVYNTSALAG

SEQ ID NO: 15281 - protein, 346 aa, Brassica napus
  misc_feature (161)..(161): Xaa can be any naturally occurring amino acid
STHASAGLKPMRHPYSLSVGQSVFRPGRVTHALNGDALAQALMDSNHPTGGLANYEEWTIDLRKLHMGPAFAQGAFGKLYRGTYKGEDVAIKLLERPENSPEKAQALEQQFQQEVSMLAFLKHPNIVRFIGACVKPMVWCIVTEYAKGGSVRQFLTKRQNXAVPLKLAVKQALDVARGMDPRDERNFIHRDLKSDNLLISADRSIKIADFGVARIEVQTEGMTPETGTYRWMAPEMIQHRPYTQKVDVYSFGIVLWELITGLLPFQNMTAVQAAFAVVNRGVRPTVPADCLPVLGEIMTRCWDANPEVRPCFAEVVNLLEAAETEIMTTARKARFRCCMTQPMTID

SEQ ID NO: 15282 - protein, 771 aa, Legionella pneumophila str. Paris
MKENVSHLPRELSRMVFWSLTCLKKAIAEVYGKETYERIEQIRLSMQDTIGSESFSLGKALHSLQIELSKLEKKQLYQIAHGFSLMMELINTCENAYRIFRINQRKEQVYSDMPQGIHYVLTAHPTEARTNEFLKLFKEIRDYLIEVLKSPYLMNESHLDQMLKISLQINISYHEKPSVEDEAQYIYQYALHPLNIKLYHSFLAKGVPIQLRTWVGGDKDGHSGVNEKIMLKSLELSRSFFIAYIQECLREVLEIIKLSTSLDKNKPLADQINQLIKKAYGLKKIQSKEHEKISIFKNELTATQINTLKFLNFEPEQFSIISSIFHLYPALVMPIELREDSAVVKESLTSIKKTTITKMLEQVHSITHGTDPKNYIRGFILSMVESAEDIKNGINLVKKVFKSYALPVVPLFENQLALTNADTILNNSITEAIRQKHLKQWDGNYEVMLGYSDSSKENGVLPSRLMIAKSLKNIQSTLENKNLRPIFFHGSGGSIERGGGDIKEQTASWSKEIMSNYKVTVQGEMVARLFGSSSILKSQIDKFLDIYSQKGKSNDNDYPEELSLFSTRVSQKYKTLIQSDWFWQIVEQASPYHFLKELKIGSRPTKRKSGPDQRKLRAIPWILCWTQTRLLFPTWWGIGSTWSELNGIEKNRLKALYKENALFAAFVKQLGVTLSKVYLPVWEQYLLQLTGSIEYLRPFQSELESTIQFFYQITGEKDFCFHQPWLGESIQLRSTLIHPLNLIQIEAMKRKDLPLLRKTVTGISCGMLTTG

SEQ ID NO: 15283 - protein, 749 aa, Spiroplasma citri
MDRDIKYEEVLAQIKLYIKDEATLKEIQKAYEYAEEKHHGQVRNSGARYIIHPLWTTFFLAQWRMGPKTLIAGLLHDVLEDTPATFEELQELFGIEIANLVEGVTKVSYFAKENRTQIKAQYLRKLYLSMAKDIRVIIVKLADRLHNLKTIGYLKPERQQIIARESLEIYSAIAHRLGMKAVKQEIEDISFKIINPVQYNKIVSLLESSNKERENTINQKIEELKKILITEKKMSVKVYGRSKSIYSIYRKMNQFGKNFDDIHDILAVRIITNSVDDCYKVLGFVHQHYTPLNNRFKDYIATPKHNLYQSLHTTIVADDGLIFEVQIRTEEMDELAEQGVAAHWRYKEGENYDIAKKQKDIDERLDIFKRILDLENISVQERDEIQQEVYKPDHLMEQIIQNDIFSSLIYVLTPNGKVVTLPFGSTVLDFAYKIHSEIGEKTIGAKINGLFSPISTVLKSGDVVDIKTAATQKPNHSWLVVSKTSSALEKIKKYLKKELVEVTSDAKSVNLEKIKQTKSQIEEYIAKKDLKWKLVNSETQLERLHAINFNNIEDFLLDVANDEYTLEEAINLVYLDHETSQNEKILKKLQDKQYKKAQLKDDIIVQGISNIKVVISQCCLPIPYEDITGYVSKAEGIKVHLKTCRNIQSGDKQDRQVEVSWNEAVCKNKQYDCAIRIEAIDRPALLVDVTKVLSHLNASVQMMSANVSGDLMNLTIKTIIKVSNADRLQQIRSSLLTIPDIKVVERVMM

SEQ ID NO: 15284 - protein, 642 aa, Monochoria vaginalis
MAASKPSPFPSSASSSRLLLHPFSKPLHPSPKLQRQQRIFVPLVTSSTTVAAPDAVFPPRRNFSPDEPRKGADILVEALEREGVTDLFAYPGGASMEIHQALTRSPSITNHLLRHEQGEAFAASGYARSTGRPGVCIATSGPGATNLVSALADALLDSIPMVAITGQVPRRMIGTDAFQETPIVEVTRSITKHNYLVLDVDDIPRIIKEAFFIATSGRPGPVLVDIPKDIQQQLAVPVWNPPVRLPGYVSRLPKPPALHLLQQIVRIVSESSRPVLYVGGGSLHASEELRRFADLTGIPIASTLMGIGVYPLDGPLSLKMLGMHGTVYANYAIDKADLLLAFGVRFDDRVTGKLEAFASRAKIVHIDIDPAEIGKNKQPHVSICGDIKLALQEMNEMIEESGIHNKLDFSAWREELDQQKKNYPLEYKTFGDLIPPQHAIELLEELTNGEAIITTGVGQHQMWAAQYYSYKRPRQWLTSAGLGAMGFGLPAAVGAAVGNPGVMVVDIDGDGSFQMNAQELAIIRIENLDVKMLILNNQHLGMVVQWEDRFYKSNRAHTYLGNPANESKVFPDFVKLAESYDIPAARVSKKSEVRDAIRKMIQTPGPYLLDVIVPHEEHVLPMIPSGGAFKDMILDGDGRTVH

SEQ ID NO: 15285 - protein, 818 aa, Candidatus Blochmannia floridanus
MRVLKFGGTSLSNASQFIHVANILEKNAQKEQIAVVLSAPARVTNYLVEAINNTLRGNNILESVLNIENIFNTLLKDIAQFQSKFNYVVFHNTLKQEFNSLKQLLQGISLLNFCPDSVNAHIICLGEKWSVILMQGILIAKDLKIINLDPVKSILTQGDGYSTSVVNIEESTCRIHNVLLSHYADIILMAGFMAGNKKGELVTLGRNGSDYSAAILAACLQARRCEIWTDVDGIYTCDPRQVPDARLLHELSYQEAMELSYFGAKILHPRTIVPIAQFHIPCLIKNTSKPDFSGTLISAKNKDINIIAKGITYLKDMVMINVSGPGMKGMIGMAARVFAAMSRATCSVVLITQSSSEYSISFCVPYQEYAKACDALDEEFNLELKNGLLEPIGVICDLAIISVVGDGMRTQLGLSGKLFGALARASINIIAISQGSSERSISVVVKNNVTTIGVKAVHQTLFNTDQIIEVFIIGVGGVGSALIEQIKKQYSWLKNKHIDLRVCGIVNSQVMLTDSDGINLNNWKSLLIQSCKSSDLEKLIITIKQYHLLNPVIVDCTSSEKVANYYVNFLSGGCHVIAPNKKANTGPIGYYRKLRETMVIARRKFLYDTNVGAGLPVIENLQNLLNAGDELIKFSGILSGSLSYIFGKLDEGLSLSEATILAKKNGYTEPDPRDDLSGMDVARKLLILAREVGYVLEMKDIKIEPVIPDNFIKNDVISVDNFFEKLLSLDNMFTLKVKKARESGCVLRYIGNIQEGKCCVKMESVNDEHPLFQVKDGENALAFLTKYYQPLPLILRGYGAGNNVTAAGVFADLLRTVY

SEQ ID NO: 15286 - protein, 249 aa, Mycobacterium avium subsp. paratuberculosis
MGETATLVLLRHGESEWNSLNLFTGWVDVGLTDKGRAEAVRSGELLAEQGLLPDALYTSLLRRAITTAHLALDAADRLWIPVRRSWRLNERHYGALQGLDKAETKARYGEEQFMAWRRSYDTPPPPIERGSTYSQDADPRYADIGGGPLTECLADVVVRFLPYFTDVIVPDLRSGKTVLIVAHGNSLRALVKHLDQMSDDDVVGLNIPTGIPLRYDLDARLRPLVPGGTYLDPEAAAAGAAAVASQGRG

SEQ ID NO: 15287 - protein, 119 aa, Arabidopsis thaliana
MRNITTTTRKMLLLVITILLGIAYHGEAIACPQVNMYLAQCLPYLKAGGNPSPMCCNGLNSLKAAAPEKADRQVACNCLKSVANTIPGINDDFAKQLPAKCGVNIGVPFSKTVDCNSIN

SEQ ID NO: 15288 - protein, 212 aa, Haemophilus somnus 129PT
MNQSLLSQFGTSEERVKRAIEAFKRGNGVLVLDDEDRENEGDLIFPAETITVEQMAKLIRYGSGIVCLCITDELCQQLDLSPMVQNNTSINQTAFTVSIEAAQGVSTGVSAQDRVTTIQAAIADNAKPQDLSRPGHVFPLRAKKGGVLARRGHTEAAVDLASWAGHKPAGVICEITNDDGSMARTPEIVEFGKKFNYPVVTIEDLVRYASNK

SEQ ID NO: 15289 - protein, 422 aa, Methanosarcina barkeri str. fusaro
MKRESELKKELNLLEVTLVGIGDILGAGIYVLMGKAAGLAGNMVWFSFLFAGATATLSAFSYMELASMFPKAGAEYGFVRRAFGERIGLFIGLLVIYFVAITSSAVALGFGRYFSNLFGNGYLTGTLGLFILLSLIMVYGIKESARLAIFISFIEVSGLLIVIYTGLPYLGTVNYFETPDLAGIFKASTLIFFAFLGFEDIVRLSQETKEAEKTTPKALLIAIFFTVFLYMCVAITAVSMLDFRVLGLSGAPLADVVAISLGNKAFVLMSWIALFSTMNTVLVVMLGGSRIVYGMADSGALPRFLSRVHPGYRTPWVAILGVSFLSALFVLFRDVAIVANISNFMIFIIFFMVNLSLIKLRYTDPGRNRPFKVPLNIGRFPLLPFLGALSTVFLFFQLSLEVITYGLVFIGIGILIVLFRTR

SEQ ID NO: 15290 - protein, 162 aa, Zea mays
MPVPLAPYPAPPAPFTPPNGAQSQLVCTGCRNLLMYPAGATSVCCAVCSTVTAVPAPGTEMAQLVCGGCHTLLMYIRGATSVQCSCCHTVNLAMEANQVAHVNCGNCRMLLMYQYGARRLPLFRCYSYCKTTCVSHEKQRTNRQVSLYSDLTWCRAEAQQLS

SEQ ID NO: 15291 - protein, 417 aa, Rhodopseudomonas palustris CGA009
MTEIRVPTLGESVTEATIGRWFKKPGEAVAVDEPLVELETDKVTIEVPAPSAGTLGEIVAKDGETVAVGALLGQITDGAAPAKPAAAAPAKAAAPAAAPAPAAPAPAAAPAAKAPPSDAPLAPSVRRLSTESGVDASTVPGSGKDGRVTKGDMLAAIEKAASAPTPVNQPAAAVQVRGPSPADDAAREERVKMTRLRQTIARRLKEVQNTAAMLTTFNEVDMTNVMALRAQYKDVFEKKHGAKLGFMGFFTKACVQALKDIPAVNAEMDGTDLIYKNYYHIGVAVGTDKGLVVPVVRDCDEKSIADIEKSIVDYGKRARDGQLKIEEMQGGTFTITNGGIYGSLMSTPILNAPQSGILGMHKIQERPVVIGGKIEVRPMMYLALSYDHRVIDGKEAVTFLVRVKESLEDPARLVLDL

SEQ ID NO: 15292 - protein, 294 aa, Rhodopseudomonas palustris CGA009
MSILIDSNTRVICQGFTGKNGTFHSEAAIAYGTKMVGGTSPGKGGSTHLGLPVFDTVREARDKTGADASVIYVPPPGAADAICEAIDAEIPLIVCITEGIPVLDMVRVKRSLNGSKSRLIGPNCPGVMTAGECKIGIMPANIFKPGSVGIVSRSGTLTYEAVFQTSAEGLGQTTAVGIGGDPVKGTEFIDVLEMFLADDNTESIIMIGEIGGSAEEDAAQFLIDEAKRGRKKPMVGFIAGVTAPPGRRMGHAGAIISGGKGDAASKTAAMEAAGITVSPSPARLGKTLAEKLKS

SEQ ID NO: 15293 - protein, 306 aa, Methanosarcina barkeri str. fusaro
MKENSNPENPESQEKNLSETPIPKITIICSAPDLASQNIKTQLLNLIEWKLLEIPENSEFSAARESQDGKFRLVDIEETHVFQDGLDRKLENAGLPASLIIFASKHRSKEEISSLTVHCTGNPSDDVRLGGCPKSLAVSSPAAMKSILVEMKRLAEQKGLKYDVTLEVTHHGPTELSVPSLYAEIGSTEVQWKDPEAGEVAAKAILAVSLVKVPVAVGFGGGHYAMRQTKLLFETGISFGHNFPKYKLEFVDEALIRQAIEKSKADFAYFDRKSMKSEERKKISKILENLGLSVLKESEIREKYGN

SEQ ID NO: 15294 - protein, 335 aa, Burkholderia thailandensis E264
MRLQGGAKFPTGGRPACCRRARERPRDARGQQIWSDARADGHSPDERRCADGHVRPVSPAARGVVRAARKRRRAVCLLCPETFFAPFFPRGAFHIMSFPLPSKSAPADAFSDLPLLDVEPVPPRIAAALAALREGRAVVLQDDHDRENEADLIVAAERLTDETMALLIRECSGIVCLCLTDEKVRALALPPMAQLNESKNGTAFTVSIEARAGVTTGVSAADRVTTIRAAIADDAQPHDIVRPGHVFPLRAAPGGVLARRGHTEGTVDLAILAGLKPAGVLCELMNPDGTMTRGADVERFAAQHGLPMLTIAELVEFRERLASLRERDACCEGVA

SEQ ID NO: 15295 - protein, 320 aa, Prochlorococcus marinus str. MIT 9211
DDVRRLIVSRELKSIPAVMQELGWMTSCGCAKCRPALNFYLLAAWPGEYVDDNQSRFINERVHANIQKDGTYSVVPRTWGGVTTASELRAIADVVDKFKIPTVKYTGGQRIDMLGVKKEDLPAVWADLNAAGMVSGHAYGKSLRTVKTCVGTDWCRVGTQDSTGLGIKLEKLMWGSWTPHKVKLAVSGCPRNCAEATCKDIGVVCVDSGYEIHFAGAAGMEVKATELLTKVTSEAEAVEMCTAVLQLYREQGFYLERIYKWAARVGIDRVQAQIVEDAENRKNLVERFAYSQRFAQIDPWAERATGGVDAHEFKKLEPMG

SEQ ID NO: 15296 - protein, 514 aa, Ipomoea batatas
MGNRTSRHKHGEKHRSEAGSHQTHIEYTKSPGQGAGLPVRPPSIPKSVSKSDAILGKAYEDVRAHYSLGKELGRGQFGVTYLCTEIRTGKQYACKSISKKKLVTKGDKDDMRREVQIMQHLSGQPNIVEFKGAYEDANSVYLVMELCAGGELFDRIIAKGHYSERAAASLCRSIVNVVHTCHFMGVMHRDLKPENFLLSDKTENAALKATDFGLSVFIEEGRVYKDLVGSAYYVAPEVLGRKYGKEADVWSAGVMLYILLSGVPPFWAETERGIFNAILKGELDFQTKPWPSISSIAKDLVRGMLAPDPKRRLTAAQVLEHPWMREDGEASDRPLDSAVLSRMKQFRAMNKLKKLALKFIAENLSEEEIHGLKAMFTNIDTDNSGTITYEELKKGLAQLGANLTEAEVKQLMEAADVDGNGSIDYIEFITATMHKHRLEREENLYKAFQYFDKDSSGFITRDELETAMKEHGIADAATIKEIISEVDADHDGRINYEEFCTMMRSGTKQQAKLF

SEQ ID NO: 15297 - protein, 532 aa, Oryza sativa
MATCAADLAPLLGPVAANATDYLCNRFADTTSAVDATYLLFSAYLVFAMQLGFAMLCAGSVRAKNTMNIMLTNVLDAAAGALFYYLFGFAFAFGTPSNGFIGKQFFGLKHMPQTGFDYDFFLFQWAFAIAAAGITSGSIAERTQFVAYLIYSAFLTGFVYPVVSHWIWSADGWASASRTSGPLLFGSGVIDFAGSGVVHMVGGVAGLWGALIEGPRIGRFDHAGRSVALKGHSASLVVLGTFLLWFGWYGFNPGSFTTILKTYGPAGGINGQWSGVGRTAVTTTLAGSVAALTTLFGKRLQTGHWNVVDVCNGLLGGFAAITAGCSVVDPWAAIICGFVSAWVLIGLNALAARLKFDDPLEAAQLHGGCGAWGILFTALFARQKYVEEIYGAGRPYGLFMGGGGKLLAAHVIQILVIFGWVSCTMGPLFYGLKKLGLLRISAEDETSGMDLTRHGGFAYVYHDEDEHDKSGVGGFMLRSAQTRVEPAAAGCLQQQQPSVTNPERTTSQRRKKSRVSLPLRSRSSRHKFDPHI

SEQ ID NO: 15298 - protein, 555 aa, Haemophilus influenzae R2866
MSKQIQIPDIGSDEVTVTEVMVNVGDTISVDQSIINVEGDKASMEVPAPEAGVVKEILVKVGDKVSTGTPMLVLEAAGAAPAADEPTAPVADAPTAPVVATAPTASAIVEVNVPDIGGDEVNVTEIMVAVGDTITEEQSLITVEGDKASMEVPAPFGGVVKEILVKSGDKVSTGSLIMRFEVLGAAPAESASASASTSAPQTAAPATTAQAPQATAPDTTAQAPQSNNNVSGLSQEQVEASTGYAHATPVIRRLAREFGVNLDKVKGTGRKGRIVKEDIEAYVKTAVKAYESGATAQATGNGVANGAGLGLLPWPKVDFSKFGEIEEVELSRINKISGANLHRNWVMIPHVTHFDKADITDLEAFRKEQNALAEKQKLGVKITPVVFIMKAVAKALEAYPRFNSSITEDAQRLILKKYINIGVAVDTPNGLVVPVFKNVNKKGIIELSRELMEVSKKAREGKLTASDMQGGCFTISSLGGIGTTHFAPIVNAPEVAILGVSKSSMEPVWNGKEFAPRLILPMSLSFDHRVIDGADGARFISYLGSVLADLRRLVM

SEQ ID NO: 15299 - protein, 515 aa, Haemophilus influenzae
MTDRVIIFDTTLRDGEQALKASLTVKEKLQIALALERLGVDVMEVGFPVSSQGDFESVQTIARHIKNARVAALSRAVDKDIDAAYEALKVAEAFRIHTFIASSALHVEAKLKRSFDDVVGMAVAAVKRARNYTDDVEFSCEDAGRTGIDNICRIVEAAINAGATTVNIPDTVGFCLPNEYGNIIAQVRNCVPNIDKAVISVHCHNDLGMATANSLTAVQNGARQIECTINGIGERAGNTSLEEVVMAMKVRQDFMGVDTHINTQEIHRVSQMVSQLCNMPIQPNKAIVGSNAFAHSSGIHQDGMLKNKNTYEILSPETIGLKKEKLNLTARSGRAAVKGHMADMGYNEQDYDLDKLYDEFLKLADKKGQVFDYDLEALAFIDMQQGDEDRLVLDKLSAHSTKEYPATAFVQLKLDGEKLSTSSIGGNGPVDAVYNAILNLTGLEIKMSHYNLTAKGEGAEALGQVDIVVEHKGRKFHGVGLATDIVESSALALVHAINAIYRAHKVADIKNHKHH

SEQ ID NO: 15300 - protein, 404 aa, Listeria monocytogenes
MGLVVLKFGGTSVSTVDKIGKTADQAIYEKKQGNKVIVVVSAMGKSTDKLVAMAEEISEAPDKREMDMLLSTGEQITIALLAMTLKEKGHDAISYTGWQAGIETEAVHSNARIADIDSARIESALDAGQIVVVAGFQGFTTDGEITTLGRGGSDTTAVAIASALNAEKCAICTDVVGVFTTDPRYVKKAQKLEQITYDEMLELANLGAGVLHPRSVEYAKNFRIPLEVRASHEQVPGTMIEEDLTMENTKVVRGIAFEDQITRVTIHWKQKEAMRVSKVFTKLAENNIDVDIIIQGITGLGHGNLSFTIKTSALLATLAVLEESKELLQIEKLESEQELAKVSIVGSGMVSNPGVAAQMFEALTENNIPIKMISTSEIKVSTVVPARKMVEAAQVLHDQFELDK

SEQ ID NO: 15301 - protein, 381 aa, Synechococcus sp. WH 8102
MQPIQHRSASTMEMGSGTSFDATGIQPSQNAKIEVIGVGGGGSNAVNRMILSDLEGVAYRVLNTDAQALIQSQAQHRLQLGQTLTRGLGAGGNPTIGQKAAEESRTDLHDALQGSDLVFIAAGMGGGTGTGAAPVVAEVAREVGALTVGIVTKPFGFEGRRRMRQADEGIARLAEHVDTLIVIPNDRLREAIAGAPLQEAFRSADDVLRMGVKGISDIITCPGLVNVDFADVRSVMTEAGTALLGIGIGSGRSRAVEAAQAAISSPLLETERIDGAKGCVINISGGRDMTLEDMTTASEVIYDVVDPEANIIVGAVVDEALEGEIHVTVIATGFDQGQQYRSDRSSASGLPVQPQRSAIEENGARIPEFLRQRQQQTNDPT

SEQ ID NO: 15302 - protein, 477 aa, Escherichia coli O157:H7 EDL933
  misc_feature (100)..(100): Xaa can be any naturally occurring amino acid
MTQSRLHAAQNALAKLHERRGNTFYPHFHLAPPAGWMNDPNGLIWFNDRYHAFYQHHPMSEHWGPMHWGHATSDDMIHWQHEPIALAPGDENDKDGCFSXSAVDDNGVLSLIYTGHVWLDGAGNDDAIREVQCLATSRDGIHFEKQGVILTPPEGIMHFRDPKVWREADTWWMVVGAKDPGNTGQILLYRGSSLREWTFDRVLAHADAGESYMWECPDFFSLGDQHYLMFSPQGMNAEGYSYRNRFQSGVIPGMWSPGRLFAQSGHFTELDNGHDFYAPQSFVAKDGRRIVIGWMDMWESPMPSKREGWAGCMTLARELSESNGKLLQRPVHEAESLRQQHQSISPRTISNKYVLQENAQAVEIQLQWALKNSDAEHYGLQLGTGMRLYIDNQSERLVLWRYYPHENLDGYRSIPLPQRDTLALRIFIDTSSVEVFINDGEAVMSSRIYPQPEERELSLYASHGVAVVQHGALWQLG

SEQ ID NO: 15303 - protein, 218 aa, Vibrio vulnificus YJ016
MNQSSLLAEFGDPITRVENALLALKEGRGVLLLDDEDRENEGDIIYSVEHLTNAQMALMIRECSGIVCLCLTDEHANKLELPPMVVNNNSANQTAFTVSIEAKQGVTTGVSAQDRVTTIKTAANPSAKADDLARPGHVFPLRARPGGVLARRGHTEGTVDLMQMAGLQPAGVLCELTNPDGTMAKTPEIIAFGKQHNMPVLTIEDMVMYRNQYDLKLA

SEQ ID NO: 15304 - protein, 524 aa, Thermus thermophilus HB27
MVEILDTTLRDGTQGEGVSLSVDDKVAIARRLAAFGIHLIEGGWPGSNPKDAEFFQRMRGVDLGAARLAAFGATRRKGLAPEEDPSVLALLEAETPVVVLFGKSWTLHVLEALETSLEENLRMIEETVAFFARRGRRVVYDAEHFFDGYKEDPAYALATLEAAFRGGADTLVLCDTNGGSLPEEVYAITKAVVERFPGVRVGIHPHNDADLAVANALAAVRAGATHVQGTINGYGERCGNLNLTSFLPTLVFKYGIPAISPEKLRELREVSHFVDERANLTPNRRAPYVGEAAFAHKAGVHVSAVLKNPRTYEHIPPEWVGNQRRFLVSDVSGRSNLLAKLQELGVDLSKEEARRLLEEVKALEYEGYAFEGAEASFYLLAHRLKGGSLPFSVEGFSVFVHGRGLSTAWAEATVRVRVGESLQHTAAESPFGPVSALDRAFRKAVLQFYPELSEVELTDYKVRILSGQEAGTNSGVRVMVEMKRGEERFATVGASENILEASLKALTDGYAYALLYPVATPRGA

SEQ ID NO: 15305 - protein, 520 aa, Thermus thermophilus HB27
MEKERHIRIFDTTLRDGEQSPGVALSLDQKLEIAQALAQLNVDIIEAGFPVSGPMEFEAVRRIATEVKGPIIAALARTHTLDIDQAAKALEKAEKPRIHVFTSASKVHLQYMLRKTEEEVLEMADRMVRYARRYVDDVEFSAQDVMRADWEFVKRLYEVAIEAGATTINIPDTTGYGTPQEYGALIRRIRDEVVRGRDVIISTHTHDDLGMATANALAGVENGAGQIECTINGIGERAGNCALEEVVMALYVRRDWYKAYTRINTREIYRVSRLVERYTGMPVPPNKAIVGDNAFAHESGIHQDGVIKHRATYEIMDAELIGRRPAVLVLGKHSGRAAFKKALEDLGYKDLSEEEVKKLFARFKEIAEKKGPLSAEELQALVESEREPTSHFFQLEHVQFFSGSGLLPTATVKVKTPDGERVATHTGDGPVDAVYKAIQEAIGLRPELELYRVEAITGSTEALGQVTVRLRLGELQAVGVGVSPDIIEASALAFLDAAGKLASGRATRHPPSIEEVHRGV

SEQ ID NO: 15306 - protein, 250 aa, Thermobifida fusca YX
MKGTVQLDERPDTAQRTSDRKIRSGGLAQRLNALRAGVLGANDGIVSTAAVVVGVAGATTDAGPILMAGLAAAVGGAVSMALGEYVSVSSQRDSERHLIEQQSQALRNDPEGELLALARSYEERGISAATARRAAEELFASNALEAQMRERHNIDPDEVTSPWHAAIASFLAFAVGALLPLLAILLPSPELRVPVAFGATLLSLALTGAIAAGIGGGSQLRAAARVTLGGALALAVTYAIGSLIGTTGLV

SEQ ID NO: 15307 - protein, 160 aa, Arabidopsis thaliana
IRVEAHPIPEHPRPRRLSKRVALVGDAAGYVTKCSGEGIYFAAKSGRMCAEAIVEGSQNGKKMIDEGDLRKYLEKWDKTYLPTYRVLDVLQKVFYRSNPAREAFVEMCNDEYVQKMTFDSYLYKRVAPGSPLEDIKLAVNTIGSLVRANALRREIEKLSV

SEQ ID NO: 15308 - protein, 604 aa, Monochoria vaginalis
ILVPAVASSTTVAVPDAVTPPRRDFASDEPRKGADILVEALGREGVTDLFAYPGGASMEIHQALTRSPSITNHLLRHEQGEAFAASGYARSTGRPGVCIATSGPGATNLVSALADALLDSIPMVAITGQVPRRMIGTDAFQETPIVEVTRSITKHNYLVLDVDDIPRIIKEAFFIATSGRPGPVLVDIPKDIQQQLAVPVWDQPVRLPGYVSRLPKPPALHLLERIIRLVSASSHPVLYVGGGCLHASEELRRFADLTGIPIASTLMGLGVYPLDAHLSLKMLGMHGTVYANYSIDKADLLLAFGVRFDDRVTGKLEAFASRAKIVHIDIDPAEIGKNKQPHVSICADIKLALQEMNKIIEESGIYNKLNFSAWREELDQHKKNYPLNYKTFGDLIPPQYAIEVLDELTNGDAIITTGVGQHQMWAAQYYNYKRPRQWLTSAGLGAMGFGLPAAVGAAVGNPGVTVVDIDGDGSFQMNAQELAVIRIENLDVKMLILNNQHLGMVVQWEDRFYQSNRAHTYLGNPANESKVFPDFVKLADSYDIPASRVSKKSQVRDAIRKMLQTPGPYLLDVIVPHEEHVLPMIPSGGAFKDMILDGDGRTVH

SEQ ID NO: 15309 - protein, 562 aa, Thermus thermophilus HB27
MKGAEALLRALEREGVEVIFGHPGGAIMPTYDALYDSPIRHILVRHEQGGVHAATAYARASGRVGVVMATSGPGALNLVTGLADAMMDSTPVVAITGNVPRALIGTDAFQEADVTGVTMPITKHNYLVQDVNEIPRVVKEAFHIAATGRPGPVLIDIPKDVQLAEFTGSFDVKLDLPGYKPTLKGHPKQIERALDALEKAERPVLMVGGGAQHAHAELLAFAEKTGLPVITTLMGLGAFPGNHPLWLGMPGMHGTVAANRAIHHADVILAIGLRFDDRVTGKVSRFAPHAHTIIHVDIDPAEIGKVVRTHIPIVGDSRLVLKELLKGAKALRLAAWWRELEEWRTRYPLRYRPKPHLQSQEVIRAFYEATGGHAIVTTGVGQHQMFAAQFFPVTRPRSFLTSGGLGTMGVGLPFAIGAKIARPEELVIDFDGDGSFQMTLQELATVVKYKLDVKVVILNNGYLGMVRQWQDLFHAKRYSEVYLADSNPDFARLAEAYGIKGVRVERKEDLMKGVEAVLNADGPVVAEFKVYHEEGVFPMIPAGGAAEDMILEPPEEKEEVGA

SEQ ID NO: 15310 - protein, 506 aa, Hordeum vulgare subsp. vulgare
MAFFLLLCILVSVAIVSYAHHAIRRRRQGCAHGRHEQAALKLPPGSMGLPYVGETLQLYSQDPSVFLSSKQKRYGEIFKTHLLGCPCVMLASPEAARFVLVSRAHLFKPTYPRSKERLIGPSALFFHQGDYHLRLRRLVQGPLGPEALRKLVPDIEAAVRSTLAAWADGDVASTFHAMKRLSFDVGIVTIFGGRLDERRKEELRRNYAVVEKGYNSFPNSFPGTLYYKAIQARRRLNGVLSDVVHERRERGEHGDDLLGCLMRSRAGGDDADDEGALLTDEQVADNVIGVLFAAQDTTASVLTWIVKYLHDRPKLLEAVRAEHAAIHEANDGGRRPLTWAQTRSMTLTHRVILESLRMASIISFTFREAVADVEYKGFLIPKGWKVMPLFRNIHHSPDYFQDPHKFDPSRFKVAPRPNTFTPFGSGVHACPGNELAKLEMLVLIHHLVTGYRWEVVGSSDDVEYSPFPVPRHGLLARVRRDDGVCAGRKGCPTDEDDNYDDDEVIV

SEQ ID NO: 15311 - protein, 465 aa, Halobacterium sp. NRC-1
MGGFIVTRPRGYALWEAIQDNLDGWFKDTGVENAYFPMFIPEDYLEREKDIVEGFDPEVAWVTQGGHDDLDQRLAVRPTSESIIAPYLSQWVRSHRDLPLRVNQWNSVVRWEATETKPFFRTKEFLWQEGHTAHATDEAAWAETTLRLDQYHRLYEDVLGIPVLRGRKPDHDKFPGADTTMSVEALMPDGKSVQGGTSHHLGQSFADAFDITFADEDEAERTAYTTSWGLSWRAIGALVMSHSDDQGLVLPPTVAPKQVVIVPIWQEDTKDDVEQYGAEIAAELEAQGVRVHFDDRDGRNPGFKFNEWELNGVPVRFEIGPNEVEDDEVTVVHRPDGESTVEDRAAIADRVHDHLDEVYDKLYDAAADRLAENVREADNRADILGTIGQHGGYVKAPWCGDQDCEAEIKDQIAAEIVMVPLGEDSAARAASELEGERVPEPDHDGEDCAICGDEATRTAYFAKSY

SEQ ID NO: 15312 - protein, 349 aa, Schizosaccharomyces pombe
MAEFIRTQIFGTCFEITTRYSDLQPIGMGAFGLVCSAKDQLTGMNVAVKKIMKPFSTPVLAKRTYRELKLLKHLRHENIISLSDIFISPFEDIYFVTELLGTDLHRLLTSRPLETQFIQYFLYQILRGLKFVHSAGVIHRDLKPSNILINENCDLKICDFGLARIQDPQMTGYVSTRYYRAPEIMLTWQKYNVEVDIWSAGCIFAEMIEGKPLFPGRDHVNQFSIITELLGTPPMEVIETICSKNTLRFVQSLPQKEKVPFAEKFKNADPDAIDLLEKMLVFDPRKRISAADALAHNYLAPYHDPTDEPVADEVFDWSFQDNDLPVETWKVMMYSEVLSFHNMDNELQS

SEQ ID NO: 15313 - protein, 542 aa, Zea mays
MQDWRVREFEGKFTDEFAHSSSNEHKGGVEASGVISSKKLKHAVANEKIQGVIPGTNSSGSLKRNSENIQHANGVLSQNISCAGDYKNGSIAFPLREENTITETRCPDDNWNSCQFALNNGSSILNNHSAPQDSLTYGDNDLNYIEWPGIDNFEDVDTLFRSSDSTYGQQQLENADGLSWIPSSDAVYSTDVALQQGLDSSYSDYGILDDLSAFQCAEDKSLPLVDPSSALCDNQFNDTYLFSEQKNVNAYSEQIYQEDLMELLPTDQICSGHENIDMLQVGNQYPSENAIQGTEDKKFSIASTSQLSSRNLLNQRHHLDSSSPSNITSESYPGKFGPSSCSSAQRNSKAGVTLKCANAVQKKTVNIQPRQPANDNVMNTSRASYPCENYETERRGLGKRTLGDPQVTMGSSMVVDGSFVSSMSSDNSVEESSFQQLQDAVSQLDVQTKLCIRDGLYRLARSAQHRQVFPNTMNSNGGSEDGKELENAETSCKFMDPRSIETQTNPIDRSIALLLFRESSGGHVPVAVAADDASSLKSPPGI

SEQ ID NO: 15314 - protein, 341 aa, Zea mays
MATAAAAVAATFRTLIQHAAACGAPVPLPSVRFQSLQRHRVGLRRLAPPRGRPVLTPPFAAEDFSSYVDDFSGDDGEEHFDEEEGSEPEEEAEAPRAYSSPRSRPPRGDDPGRLFVGNLPYTYTSEELAQVFSEAGRVDDAQIIYDKVTNRSRGFAFVTMATAEEAAKAIQMFDGALLGGRTARVNYPEVPRGGERRTVTMSGRRRDDGTYKIYAGNLGWGVRADTLRNVFEGRAGLLDARVIFERETGRSRGFGFVSFSTAEDAQAALESLDGVELEGRPLRLSLAEQNPPPGSPPSTAQAQQEETDSGAPAGAGTEAASSSEPSEAEVGESNLQTAANY

SEQ ID NO: 15315 - protein, 335 aa, Zea mays
TRTNTTSPGAMAAAMTSFVAKNPLLAAAARRRAPPLAGRALPFSPLASTRAPRRRGLRLRTVTCFVPQDTAAPAAPVPALDEEARAAAARRVAEKEARKRSERRTYLVAAVMSSLGVTSMAVAAVYYRFSWQMEGGEVPVIETLGTFALSVGAAVGMEFWARWAHRALWHASLWHMHESHHRPREGPFELNDVFAIVNAAPAISLLAYGFFHRGIVPGLCFGAGLGITLFGMAYMFVHDGLVHRRFPVGPIADVPYFRRVAASHKIHHMDKFGGVPYGLFLGPKELEEVGGLDELVSSPVSEATDTEDAREEKTRPVVCVVRTSVFMGQSVPNEF

SEQ ID NO: 15316 - protein, 124 aa, Glycine max
  misc_feature (83)..(83): Xaa can be any naturally occurring amino acid
  misc_feature (120)..(120): Xaa can be any naturally occurring amino acid
MAAVLNSRKTPQAVVAVLVAAALLASSASAAITCGQVGSSLAPCIPYATGRASALPASCCSGVKSLNSAARTSADRQAACRCXSRALANSVKSVNMGTVATIPGKCGVSVGFPISMSTDXAQIS

SEQ ID NO: 15317 - protein, 100 aa, Zea mays
MGPQQGRRSNGGAAARSKEEEEVGGAKKVVRYRECQRNHAASLGGHAVDGCREFMAAGADGTAAALACAACGCHRSFHRREVEQQPAADCCDCSSTTSGA

SEQ ID NO: 15318 - protein, 434 aa, Rickettsiella grylli
MSSLKEIHVPDLGNISTAAIIDIPVKEGQRIAVEEALITLESDKASVDIPSPFAGTLKELKVNVGDNVSQGDLIAILETEESSDAEEPKIKSIPTGNEEKKSLSETGVEKASILLNKNEEISETVNVSDEEMEDDDPGTIHAGPGVRRLARELGIDLNNIQGTGPKGRILKEDLQKFVKTKLQFASNDKMGLPPVPEIDFNQFGETEKQPLSRIKKLSAQYLHRNWLQVPHVTQFNDADITELEVFRKAQAGFAAKQQIKLTPLVFIMKAVVTSLKAFPSFNASLSANDQELTLKKYYHIGIAVDTSEGLVVPVIRDVDKKSLLTLAEELGHVSQKARAKQLSSGDLQGHSFTISSLGGIGGTAFTPIVNVPDVAILGVSRAQFKPCYREGEFIPRFMLPLSLSYDHRVIDGAEGARFIMHLTECLSDIRRWLL

SEQ ID NO: 15319 - protein, 154 aa, Methanosarcina mazei Go1
MPKVAVGGTFQYLHDGHARLIEKAFEIAGSGKVYIGLTSDEMLQKNHSVESYKIRRSRLLEYIKKMGVPEEKYEVTRLNDPCGPTIEEDFDHIIVSPETYPVALKINTIREKKGKKPLEIVYVEYVMAEDGIPISSTRISKGEIDRHGRLKKEA

SEQ ID NO: 15320 - protein, 258 aa, Gibberella zeae PH-1
MDQQLILPSTPADGVRVLALNRPSKRNALSQELITVFLEQLKTASQDDGVRVIVITGSSTFFCAGADIGEISRLDAEGARDCRYLSDLCTGMQAVRKPLIAAVEGMALGGGFELALMCDLIFAAHDSRFGLPEVSIGLIPGAGGTQRLTNAVGKFKAMQMILLGRPIQAEEAQSAGLVAQLYESGSVLDNVVKDTASTLAALSPTALGLAKEAICKSDDLGVDHEFERSLYYFAFGTKDKEEGVRAFLEKRKPEWTSK

SEQ ID NO: 15321 - protein, 557 aa, Ustilago maydis 521
MSILLPTVHSSFEHLTPTHVAIASVLILGLLCLIAPDRYIFVSHRKGIKEVPGALPLIGNLLFLLDIAAKRRRFLDEFLRMQKSIGAGGMPWAATFPYLGGRVTSINRPEYIRWVQKTNFENYIKGSFFQKSMGDVMSLHGIFVADGEIWRKQRKMASHIFSVGNFRTHVQNTIHRDLAILNKLFRDASSKNTELNLPDLFFRFTLSSFSLMAFSADIKCLPSNVGDLSKVVEFAANFDYAQRVMDERFVDPLARFTELFSPQGRKMRRTIKELHSFCYEIIDLRLAARARGEAQAASGKGDKDLLALFMEQNLTRDELLPVVLNFLIAGRDTTAQALGWLFYELSKHPECIEKARQEIHEKLGSGSSFQSMAYDDLSSLVYVQACFLEALRLHPSVPKNIKLAVKDDVIRPYAQPCSDADVAPNAVPTTQKLPDLVIKKGETVTWQDHTMARMPELWGEDCEQFKPERFIEERKDGSIGIKTYSQYLFHAFNAGPRLCLGQTLATYEGCAVVAEILGNFDVVYDHKALKEDEPTYDDSLTLPIKNPYTIHVRARDD

SEQ ID NO: 15322 - protein, 479 aa, Lycopersicon esculentum
IPIMNPAPLSTPAPVTLPVRSIPGSYGLPLVGPIADRLDYFWFQKPENFFTKRMEKHKSTVFRTNVPPCFPFFGSVNPNVVAVLDVKSFSHLFDMEIVEKANVLVGDFMPSVVYTGDMRVCAYLDTSEPKHAQIKNFSQDILKRGSKTWVPTLLKELDTMFTTFEADLSKSNTASLLPALQKFLFNFFSLTILGADPSVSPEIANSGYIFLDSWLAIQLAPTVSIGVLQPLEEILVHSFAYPFFLVKGNYEKLVQFVKNEAKEVLSRAQTEFQLTEQEAIHNLWFILGFNAFGGFSIFLPTLLGNLGDEKNADMQEKLRKEVRDKVGVNPENLSFESVKEMELVQSFVYETLRLSPPVPSQYARARKDFKLSSHDSVYEIKKGELLRGYQPLVMKDPKVFDEPEKFVLERFTKEKGKELLNYLFWSNGPQTGRPTESNKQCAAKDMVTLTASLIVAYIFQKYDSVSFSSGSLTSVKKAS

SEQ ID NO: 15323 - protein, 405 aa, Methanosarcina barkeri str. fusaro
MSESEQYSRNKLMDFIEYRPLDVEICDVTLRDGEQTPGVVFTKEQKLAMASELDSMGVEVIEAGFPVVSANEKETVKEIANQGFDSRICCLSRAVKGDVDAALECDVDIVSIFIAMSDMHLKYKYHRSLEEMLGCAKETIEYATDHGLKVRFAAEDASRTPIDRLKQAFKEVENEYKVQYVSLADTIGILNPTTTHYLVSEIFKEVNTSICIHCHDDLGMATANTLAAAEAGAKQLHTTVNAIGERAGNASLEEVIVALRVQYGIDRYDTTKLTSLSKMVSEYSGITPSVNKAVVGQNAFTHESGIHVAAILEEPRTYELFLPEMVGGQRNLVVGKHTGTKALKGIINSIGFCLEREELCALIEKVKVCTEEKHKSISRDQLERLITQVRQESKTTEQEEEKFSI

SEQ ID NO: 15324 - protein, 435 aa, Thermoplasma volcanium GSS1
MIQLLNNLWVLFSAFLVFLMTIAVGFLEYGELGIALKRSLYKTILITGIAFVVMAVIGFNTAFAPTLYGIIGNPLYKPGFVLGYLNSPTAMFSTIWWATSASYFNTGLLGITYFLFETAFASVTLALVSVVILRKVKMSVFVVFSIVYFIVIYNLPAAWIWNPTGWLYLLGMRDFAGGLVVHGAAGFAGLAIIIRIWQEERKKGIVRSPGEIIKVNDGFLTLAILLLMMGWFGFNPGSVLAFNYDTLIVVMTTFMAALTSMLSTLTVSYLLYKDAGGIMNAVNGILMGLIIVTPLAGFVSPLSAAILGILGGPIFIFANRFFSKRKWFSDPVGLFSGHFTGGIFGVLMIGFFTQHSYAVLSGNSILPNGLFFGGGYLALHTLGIEIMGICAVGLAVFAISYATMYFLSLGFHGILEEPEWKKEERKSLPSSETSK

SEQ ID NO: 15325 - protein, 440 aa, Saccharomyces cerevisiae
MSENNEFQSVTESTTAPTTSNPYGPNPADYLSNVKNFQLIDSTLREGEQFANAFFDTEKKIEIARALDDFGVDYIELTSPVASEQSRKDCEAICKLGLKAKILTHIRCHMDDARVAVETGVDGVDVVIGTSKFLRQYSHGKDMNYIAKSAVEVIEFVKSKGIEIRFSSEDSFRSDLVDLLNIYKTVDKIGVNRVGIADTVGCANPRQVYELIRTLKSVVSCDIECHFHNDTGCAIANAYTALEGGARLIDVSVLGIGERNGITPLGGLMARMIVAAPDYVRSKYKLHKIRDIENLVADAVEVNIPFNNPITGFCAFTHKAGIHAKAILANPSTYEILDPHDFGMKRYIHFANRLTGWNAIKSRVDQLNLNLTDDQIKEVTAKIKKLGDVRPLNIDDVDSIIKDFHAELSTPLLKPVNKGTDDDNIDISNGHVSKKAKVTK

SEQ ID NO: 15326 - protein, 119 aa, Magnetospirillum magnetotacticum MS-1
MEEMLPAVAQGALGIECRARDDAIRALLAPVACATTTTALDAERGLLAELDGSCRTPIAALARIQGDRLSLDGLLFLPDGSRHWAVHREGATSDAAEIGRDAGAELKRAAGDVYFAHLK

SEQ ID NO: 15327 - protein, 105 aa, Haemophilus somnus 2336
MTLNITSKQMEITPAIRSHIEERLAKLGKWQTQLINPHFILNKVPQGFAVEVAIGTPYGDLFASSESDDMYKAINEVEEKLERQLNKLQHKGEARRASERLKDLF

SEQ ID NO: 15328 - protein, 493 aa, Picrophilus torridus DSM 9790
MKIYIDGEWRDSSSGETIKKYNPSTGEVLDTFPAATRNDVDAAIDSAEDAFKRWSDMTSMERSKILYKALELISKDKDQLTDLLIKENGKVKREAMDETEGVIDQLQYYTEFERKLTGDIVEGTSNKRKIFQYKVPYGIVIAITPWNFPAAMVIRKLAPALLTGNTVILKPSSDTPLTAEWLVKKFVDAGIPKGVLNLITGKGSEIGDYIVEHKKVSLITMTGSTSTGQRIMEKASKNMAKLILELGGKAPFMVWKDANIERALKSLVWAKYLNVGQSCIAAERLYIHEDIYDEFMKKFIEVSKRIKLGDPESSDMGPLINKSAVETTEKYVDIARSSGYKILLGGKKPELSGKYKNGYFYEPTIIENVPQDSPLFQEEIFGPVIGAESVSSVDELYEKANDSKYGLASYLFTEDPELIFEASEKIRFGELYVNMPGPEASQGYHTGFRLTGQAGEGSKYGISEYLKLKNVYVDYSRGNLSISTVNDDLFKNL

SEQ ID NO: 15329 - protein, 889 aa, Nostoc sp. PCC 7120
MTDSMKIAIMRRWLMISLLGLFALVIAHGMALIYRIQPGVSLWFPPSGVAIALTFWFGPCGIILTGLASFLMSPFWGLHGWERLIALVDIIEPLSAWLLYRRLWKGSRTINTLKDATLFTVSAPLVACATLAIIGSVCLVAIGKMPLASLSSNIPHWWLGNAIGVMAIAPTALLVFTPYFQSQGWLHPTESLNSGFVSQNFHPSRCLLLEFSAILLLCLAIATLTVAETNQNGFKLQQLSFLGFVPVLWAATRFGVTSGMLTSSFCVLVTLFAYLVAYPKAMYLATFPVQAEVLHVHKLSLLVQCAVSLFVGIAITERSSIQVELAVEKVRRGEYQTRAELSEKLIQLNESLVAINDCLEESHREKDELLQREQALRSRLSNILSSMTDAFIAVNRDWDITYCNHQAAKIQDLEPEDLIGKNYWEQWTRTKGTDFEREYRRSLAENIPVHFEILYELWDMWLEVHAYPSEDGLGIFFRNITERKQAEQEREYLLMREQIARGEAERANRLKDDFLAVLSHELRTPLNPILGWATLLKKRNLEEATRRRGIETIERNAKLQIQLIEDLLDVSRIQQGKLSLNIQSVNLVHTIEEALETVRLAIEAKSIHIKTALGVNVGMVAGDAARLQQIIWNLLANAIKFTPPAGQIQVVLERVNNSAQIQIQDNGKGISSEFLPYVFEYFRQADGTITRQFGGLGLGLAIVKHLTELHGGTVKAESAGEGMGAIFTVNLPLMLNAPQKVPQVGQPDNTWSLGGLYILVVDDDVDTGEFLTLMLEQSGAEVTAVTSAGEALEVIARTKVDLLLSDIGMPGIDGYMLMQLIRAMPSAKGGKIPAIALTAYAGEINQKQALAAGFQLHLVKPVEAEKLLQGISEVLAASPPEFSYVSVEN

SEQ ID NO: 15330 - protein, 296 aa, Porphyromonas gingivalis W83
METTYKLLDGKKISGEIKQEIAAVVNELLEKGGRRPHLAGVLVGHDGGSETYMASKVKACEEVGFTSSLIRYEDDVTEEELLACVHRLNQDPTVDGFIVQLPLPKHIDEQKIIEAVDPRKDVDGFHPINVGRLSIGLPGFVSATPKGIVELLRRYNIPTRGKHCVVLGRSNIVGKPVSQLLLQKGEPGDCTITICHSRTPNIKEVCLTADIIIAALGQPEFLTADMVKPGAVVVDVGTTLVPDSTRKSGFRLTGDVKFDEVAPKCSYITPVPGGVGPMTIVSLMSNTLLASKGLYR

SEQ ID NO: 15331 - protein, 1267 aa, Oryza sativa
MHQTSSQLVLASFLLLLCHHAHADCEPATCGNLTINPPFWLDEPGRPPCGPPTFQLQCRGSEAFVAHSFFQTYQVVRIFTGNSSVVVVDRSLPLESGCPVPWFNISIGFVMGPFLISRANKELVFVHNCTTTKRRPPQGFRRMPCSPDESFVFLGDGRPRLLLPGCSMSVVPVLGLQDGDYVASMRRGLLLEWMLVPGDCQKCSASGGQCEYSSDGMGFSCKCPSGVHNPTSCVAGGCISPIPDSKSNGRKKTLIAPKRYKYSEVAKITSFLSNKLGEGGYGVVFKGKLQDGRLVAVKFLHDSKGNGEEFVNEVMSIGRTSHVNIVSLFGFCLEGSKRALIYDYMPNSSLDNYIYSEKPKETLGWEKLYDIAIGIARGLEYLHHGCNTRIVHFDIKPQNILLDQDFCPKIADFGLAKLCCTKESKLSMTGARGTIGFIAPEVLYRSFGVVSIKSDVYSYGMMLLEMIGGRKNVKSMVQNSSEKYFPDWIYDHFYQGDGLQACEVTSEVEEIAKKMTLIGLWCVQVLPMHRPTITQVLDMFEKALDELDMPPKQSFCESLEHPVHKLNAESTSSATDKAYASPAHRCRNSPSADLTAVITEPDRVGTILCSATPFVAKAAKSAFTPATELWPVTAMAAARRALRHLHGFRVVVLFGCGGRYAWAVKAIGPKVRRTAAAHPRRKTEAGACWGRERRPVLFATASSSSSLSLLTGGGARGRRLRPTHAGREGTAPCDLRRGIVVVVVADPAAARARRKTEAGTQTEGGRRWSSPACGGRAAASRARRKEEAGARGVVTARRRSSPARGREAPPPPDLRLIYPAATGSTACTPPWPELHHHRCSSSSSSSPSPPRQLGATAPTARRCRSHKSAPPRAPSDRRRRLLSSPPPPPQIVAAAPSDRRRLGPPQIAAAAALHHNEWALAGQCLTPPPPPPQLAAAAPLASRRHTRRSSPPLHARSQWPPSSPSLSPHHSSEPVAAVVPVALAPPLVGAGGHRRGGGGDDEELGDGCGEQEGERERWRGGRCRRRGSRCWLRTPAAEEDDDGAASARVVLKLASLAAPLWLPALVGLLIGCPASPTTGFAAASSTLRLADHRIRAPPPSPAPRGCLLLSLFLLQAPGYQVPGTKHQGTRYQVSRVSGTRYQSGEEETAGFFCFCGGGGGATCAHRQGGGGSSGQGRRRPWRGARGRRGEAPAPAATRALVEEAAPQRVEAAPQRAEDDVVEVRRDHPRRRPYLTDAVTSSSMAAGDDDDPFLLSSFISALSFSSPV

SEQ ID NO: 15332 - protein, 470 aa, Listeria monocytogenes
MNNLKLSEEIKRAINELGYTEATPVQKAVIPVALTGEDIVAKSQTGSGKTAAFAIPIAEQVEWEENKPQALIIVPTRELAMQVKTECTNIGRFKRVKAAAIYGQSPFAKQKLELSQKNHIVVGTPGRLLDHIEKGSLNVDKVAHLVLDEVDEMLSMGFIDQVEDILSRLPKQRQNLFFSATMPEEMQDLIKRYQDNPMVIEMASEKTNPIFHVEMQTDNKEKTLKDVLITENPDSAIIFCNTKNQVDELTDLLDVKASKIHGGLRQEDRFRAMDDFKSGKSRFLIATDVAGRGIDVDNVSLVINYDLPIEKENYVHRIGRTGRAGKSGKAISFVKTNENPLLRDIEEMLDVTIEKKRKPTVIEVKVNEDAFRKKQQKRPTIKKARGEKLNKNIMKLYFNGGKKKKIRAVDFVGTISKLEGITAEDIGIITIEDHVSFVEILNGKGPAVLEMMRSRKVKGRRLKVNEARKR

SEQ ID NO: 15333 - protein, 121 aa, Zea mays
MARTQSAVAVAVVAAVLLLAAAATTSEAAITCGQVSSAIAPCLSYARGTGSGPSASCCSGVRNLKSAASTAADRRAACNCLKNAARGVSGLNAGNAASIPSKCGVSIPYTISTSTDCSRVN

SEQ ID NO: 15334 - protein, 366 aa, Pseudomonas syringae pv. phaseolicola 1448A
MSQSFLSPVTTQTWANGRHLVRVVKVIQETWDVRTFCFMADQPIMFFFKPGQFVTLELEIDGLPIMRSYTISSSPSVPYSFSITVKRVPGGKVSNYLHDTLSEGQELAVHGPVGLFNAIDFPNPKILYLSGGVGITPVMSMARWFYDTNANVDMVFVHSARSPKDIIYHRELEHMASRIDNFSLHLVCEKHGLGEPWAGYRGYLNQKMLELMAPDFMDREVFCCGPTPYMAAVKRLLLENGFNMAQYHEESFGATPPEARADAVEQAEIAADTPDVDAADLHQVEFTDTGKSIRVAPGETVHAAAAKLGLMIPKACGMGICGTCKVMKLSGEVEMEHNGGITDEDVAEGYILSCCSVPKGDVRIEY

SEQ ID NO: 15335 - protein, 228 aa, Methanosarcina acetivorans C2A
MCKNMTKEYVKGDLPEKAAILQRDGETYAIAPHIPGGIVYPETLRKIADIAEKYGAAALKVTSAQRIAIVGLKEENLDAAWGELGMSPGAAIGLCVRSIKICPGTTFCKRGKQDSVGLGLKLDKKYHGMQLPSKFKMAVSGCPNSCSETSIKDLGIMGTAKGYNLTVGGSAGPSPRLGDLVAKDLSEEQVLDLVEKIINFYKGYGKPKRLGKVIDEIGIEKFKEEIGL

SEQ ID NO: 15336 - protein, 315 aa, Mycobacterium leprae
MIRIGTRGSLLATTQAALVRDALIANGHPAELVIVNTAGDQSSASIDSLGVGVFTTALRAAIEEGCVDAAVHSYKDLPTADDPRFTVAAIPPRNDPRDAVVTRDELVLAELPAGSLVGTSSPRRAAQLRALGLGLEIRPLRGNLDTRLNRVSSGDLDAIVVARAGLARLGRLDEVTETLDPVQMVPAPAQGAIAVECRAGDSRLVAVLAALDDADTRAAVTAERVLLAELEAGCSAPVGAIAQVVESIDGEGRVFEELSLRGCVAALDGSDVIRASGISTSGRASELGLAVAVELFELGARELMWGARSDRARGS

SEQ ID NO: 15337 - protein, 419 aa, Thermobifida fusca YX
MSTTVVLFTRDLRVSDHPALHAAVTEADRVVPLFVVDPALVRVSARNRIAYLLEALAELRGLLRERGGELVVRQGDTVAETVRIVAEAGAQAVYLSADVSAAAVRRARQLTEAVRAAGAHVRTFPGVTVVPPGALRPAHGDHYQIFTPYLNAWRAAQWRSPRPAPERVRLPEGLVPGPLPGAELIRLGTGVLAPQREQGGPRTARERIRAWLAQPNQDSRFGCHLHFGCLSPLEVALVAREHPRGALLLRQLALRDFHHQVLQAFPRLPRADYRPRPIQWRDDDSAFAAWCSGRTGVPIVDAGMRQLLWEGYVPGRIRMLTATYLTQVLRIHWKRGADHFYSLLVDGDVANNYGNWQQIAGTGGVPRPARRINLYRQAERYDPSGDYVRRFVPELRSISGSAVHHPPVPRPGGYPPPLR

SEQ ID NO: 15338 - protein, 589 aa, Flaveria pringlei
MESILKQMKEGESVVDPSSAVGGGVDDVYGEDRASEDQLITPWTVSVASGYTLLRDPHHNKGLAFTERERDSHYLRGLLPPAVATQELQEKKLMQNIRSYEVPLHRYVAMMELEERNERLFYKLLIDNVEELLPVVYTPTVGEACQKYGSIFKRPQGLYISLKEKGKILEVLRNWPERNIQVIVVTDGERILGLGDLGCQGMGIPVGKLALYTALGGVRPSACLPITIDVGTNNQKLLDDEFYIGLRQKRATGKEYYDLLEEFMSAVKQNYGEKVLVQFEDFANHNAFELLAKYRTSHLVFNDDIQGTASVVLAGLVASLKLLGGSLADHTFLFLGAGEAGTGIAELIALEISTKANIPIDEARKKIWLVDSKGLIVSSRKETLQHFKKPWAHEHEPLSTLLDAVKAIKPSVLIGTSGVGQTFTQNVVEAMAAFNERPLIMALSNPTSQAECTAEQAYTWTQGRAIFSSGSPFDPYEYNGNLFIPGQANNAYIFPGLGFGLVISGAIRVHDEMLLAASEALANQVTQEHYDKGMIYPPLTNIRKISAHIAANVAAKAYDLGLATRLPRPTDLVKYAESCMYTPNYRSYR

SEQ ID NO: 15339 - protein, 604 aa, Monochoria vaginalis
ILVPAVASSTTVAVPDAVTPPRRDFASDEPRKGADILVEALEREGVTDLFAYPGGASMEIHQALTRSPSITNHLLRHEQGEAFAASGYARSTGRPGVCIATSGPGATNLVSALADALLDSIPMVAITGQVPRRMIGTDAFQETPIVEVTRSITKHNYLVLDVDDIPRIIKEAFFIATSGRPGPVLVDIPKDIQQQLAVPVWDQPVRLPGYVSRLPKPPALHLLERIIRLVSASSHPVLYVGGGCLHASEGLRRFADLTGIPIASTLMGLGVYPLDAHLSLKMLGMHGTVYANYSIDKADLLLAFGVRFDDRVTGKLEAFASRAKIVHIDIDPAEIGKNKQPHVSICADIKLALQEMNKIIEESGIYNKLNFSAWREELDQHKKNYPLNYKTFGDLIPPQYAIEVLDELTNGDAIITTGVGQHQMWAAQYYNYKRPRQWLTSAGLGAMGFGLPAAVGAAVGNPGVTVVDIDGDGSFQMNAQELAVIRIENLDVKMLILNNQHLGMVVQWEDRFYQSNRAHTYLGNPANESKVFPDFVKLADSYDIPASRVSKKSQVRDAIRKMLQTPGPYLLDVIVPHEEHVLPMIPSGGAFKDMILDGDGRTVH

SEQ ID NO: 15340 - protein, 324 aa, Agrobacterium tumefaciens str. C58
MSARHTKVLIIGSGPAGYTAAIYAARAMLKPVLIAGMEQGGQLMITTDVENYPGFADPIQGPWLMDQMLKQATHVGAEIVSDLVTEVETNVRPFVVRTDSGQVWTADTLIIATGAKAKWLGIESEQHFQGFGVSACATCDGFFYRNKDVIVVGGGNSAVEEALYLAHIAKSVTVVHRRDSFRSEKILQERLFAKENVKILWNTEIAEITGAPAKPPMPPSVSGVRLRDTKTGAISDTPIDGVFVAIGHAPAVELFKGKVKLKDNGYMWTAPDSTATDVEGIFAAGDVTDDIYRQAITAAGMGCMAALEAERYLTAQQPLAVAAE

SEQ ID NO: 15341 - protein, 589 aa, Flaveria pringlei
MASTLKQMKEGESVVDHSSAVGGGVDDVYGEDRASEDQLITPWTVSVASGYTLLRDPHHNKGLAFTQRERDSHYLRGLLPPAVATQELQEKKLMQNIRSYEVPLHRYVAMMELEERNERLFYKLLIDNVEELLPVVYTPTVGEACQKYGSIFKRPQGLYISLKEKGKILEVLRNWPERNIQVIVVTDGERILGLGDLGCQGMGIPVGKLALYTALGGVRPSACLPITIDVGTNNQKLLDDEFYIGLRQKRATGKEYYDLLEEFMSAVKQNYGEKVLVQFEDFANHNAFELLAKYRTSHLVFNDDIQGTASVVLAGLVASLKLLGGSLADHTFLFLGAGEAGTGIAELIALEISTKTYIPIDEARKKIWLVDSKGLIVSSRKETLQHFKKPWAHEHEPLSTLLDAVKAIKPSVLIGTSGVGQTFTQDVVEAMAAFNERPLIMALSNPTSQAECTAEQAYTWTQGRAIFSSGSPFDPYEYKGNLFIPGQANNAYIFPGLGFGLVISGAIRVHDEMLLAASEALANQVTQEHYDKGMIYPPLTNIRKISAHIAANVAAKAYDLGLATRLPRPADLVKYAESCMYTPNYRSYR

SEQ ID NO: 15342 - protein, 604 aa, Monochoria vaginalis
MLVPAVASSTTVAVPDAVTPPRRDFASDEPRKGADILVEALEREGVTDLFAYPGGASMEIHQALTRSPSITNHLLRHEQGEAFAASGYARSTGRPGVCIATSGPGATNLVSALADALLDSIPMVAITGQVPRRMIGTDAFQETPIVEVTRSITKHNYLVLDVDDIPRIIKEAFFIATSGRPGPVLVDIPKDIQQQLAVPVWDQPVRLPGYVSRLPKPPALHLLERIIRLVSASSHPVLYVGGGCLHASEGLRRFADLTGIPIASTLMGLGVYPLDAHLSLKMLGMHGTVYANYSIDKADLLLAFGVRFDDRVTGKLEAFASRAKIVHIDIDPAEIGKNKQPHVSICADIKLALQEMNKIIEESGIYNKLNFSAWREELDQHKKNYPLNYKTFGDLIPPQYAIEVLDELTNGDAIITTGVGQHQMWAAQYYNYKRPRQWLTSAGLGAMGFGLPAAVGAAVGNPGVTVVDIDGDGSFQMNAQELAVIRIENLDVKMLILNNQHLGMVVQWEDRFYQSNRAHTYLGNPANESKVFPDFVKLADSYDIPASRVSKKSQVRDAIRKMLQTPGPYLLDVIVPHEEHVLPMIPSGGAFKDMILDGDGRTVH

SEQ ID NO: 15343 - protein, 604 aa, Monochoria vaginalis
ILVPAVASSTTVAVPDAVTPPRRDFASDEPRKGADILVEALEREGVTDLFAYPGGASMEIHQALTRSPSITNHLLRHEQGEAFAASGYARSTGRPGVCIATSGPGATNLVSALADALLDSIPMVAITGQVPRRMIGTDAFQETPIVEVTRSITKHNYLVLDVDDIPRIIKEAFFIATSGRPGPVLVDIPKDIQQQLAVPVWDQPVRLPGYVSRLPKPPALHLLERIIRLVSASSHPVLYVGGGCLHASEELRRFADLTGIPIASTLMGLGVYPLDAHLSLKMLGMHGTVYANYSIDKADLLLAFGVRFDDRVTGKLEAFASRAKIVHIDIDPAEIGKNKQPHVSICADIKLALQEMNKIIEESGIYNKLNFSAWREELDQHKKNYPLNYKTFGDLIPPQYAIEVLDELTNGDAIITTGVGQHQMWAAQYYNYKRPRQWLTSAGLGAMGFGLPAAVGAAVGNPGVTVVDIDGDGSFQMNAQELAVIRIENLDVKMLILNNQHLGMVVQWEDRFYQSNRAHTYLGNPANESKVFPDFVKLADSYDIPASRVSKKSQVRDAIRKMLQTPGPYLLDVIVPHEEHVLPMIPSGGAFKDMILDGDGRTVH

SEQ ID NO: 15344 - protein, 183 aa, Brassica napus
MAEVLRPEMLDISNDTSSLASPELLHVLAVDDSIVDRKFIERLLRVSSCKVTVVDSATRALQYLGLDGDNSSVGFQDLKINLIMTDYSMPGMTGYELLKKIKESSAFREIPVVIMSSENILPRIDRCLEEGAEDFLLKPVKLADVKRLRDSLMKAEERVFKNIMHKRELEANDIYSQLKRAKI

SEQ ID NO: 15345 - protein, 614 aa, Monochoria vaginalis
SKPLHPPPKLQRQQRIFAPLVTSSTTVAAPDAVFPPRRNFAPDEPRKGADILVEALEREGVTDLFAYPGGASMEIHQALTRSPSITNHLLRHEQGEAFAASGYARSTGRPGVCIATSGPGATNLVSALADALLDSIPMVAITGQVLRRMIGTDAFQETPIVEVTRSITKHNYLVLDVDDIPRIIKEAFFIATSGRPGPVLVDIPKDIQQQLAVPVWDPPVRLPGYVSRLPKPPALHLLQQIIRILSESSRPVLYVGGGSLHASEELRGFADLTGIPIASTLMGLGVYPLDGPLSLKMWGMHGTVYANYAIDKADLLLAFGVRFDDRVTGKLEAFASRAKIVHIDIDPAEIGKNKQPHVSICGDIKLALQEMNEMIEENGIHSKLDFSAWREELDQQKKNNPLKYKTFGDLIPPQHAIELLEELTNGEAIITTGVGQHQMWAAQYYNYKRPRQWLTSAGLGAMGFGLPAAVGAAVGNPGVVVVDIDGDGSFQMNAQELAIIRIENLDVKMLILNNQHLGMVVQWEDRFYQSNRAHTYLGNPANESKVFPDFVKLAESYDIPAARVSKKSEVRDAIRKMIQTPGPYLLDVIVPHEEHVLPMIPSGGAFKDMILDGD

SEQ ID NO: 15346 - protein, 524 aa, Oryza sativa
MALKSPVDFAGSITSGQKDPCCFGVPGCNPRCVRYNKKSRTCRLVTRAISVDRPQLDFSNSDWKKQFQEDFDRRFSLPHLKDVIDVEPRPTTFSLKSRTPLENVNGSMQGSWNGYVNDDDRALLKVIKFASPTSAGADCIDPDCSWVEQWVHRAGPRKQIYFEPQYVKAGIVTCGGLCPGLNDVIRQIVLTLEKYGVKNIAGIQHGFRGFFEDHLAEVPLNRQVVQNINLAGGSFLGVSRGGANISDIVDSIQARRLDMLFVLGGNGTHAGANLIHEECRKRKLKVSIVGVPKTIDNDILLMDKTFGFDTAVEAAQRAINSAYIEAHSAFHGIGLVKLMGRSSGFITMHASLSSGQVDICLIPEVPFTLDGPNGVLQHLEHLIETKGFALICVAEGAGQEHLQQSNATDASGNMILGDIGVHLHQKIKAHFKEIGVHSDVKYIDPTYMVRAVRANASDAILCTVLGQNAVHGAFAGFSGITTGICNTHNVYLPISEVIKSTRFVDPNSRMWHRCLTSTGQPDFH

SEQ ID NO: 15347 - protein, 112 aa, Mesorhizobium sp. BNC1
MKFVMAIIKPFKLEAVREALTELGIQGLTVTEVKGYGRQKGHTEIYRGAEYAVSFLPKVKIEVAVDSDIADQAVQAIAGAAKTGQIGDGKIFVYSIEKAVRIRTGETDADAL

SEQ ID NO: 15348 - protein, 493 aa, Zea mays
MSADASAAMEKIRAAGLLKTQGLIAGQWVDAYDGKTIEVQNPATGEVLANVSFMGSRETSDAIASAHSTFYSWSKLTASERGKALRKWYDLIISHKEELALLMTLEQGKPMKEALGEVNYGASFIEYFAEEAKRIYGDIIPPTLSDRRLLVLKQPVGVVGAITPWNFPLAMITRKVGPALACGCTVVVKPSELTPLTSLAAADLALQAGIPAGALNVVMGNAPEIGDALLQSTQVRKITFTGSTAVGKKLMAESANTVKKVSLELGGNAPCIVFDDADIDVAVKGSLAAKFRNSGQTCVCANRILVQEGIYEKFASAFIKAVQSLKVGNGLEESTSQGPLINEAAVQKVEKFINDATSKGANVMLGGRRHSLGMSFYEPTVVGNVSNDMLLFREEVFGPVAPLIPFKTEEEAVHMANDTNAGLAAYIFTKSIPRSWRVSESLEYGLVGVNEGIISTEVAPFGGVKQSGLGREGSKYGVDEYLELKYICMGNLG

SEQ ID NO: 15349 - protein, 354 aa, Brassica oleracea
FEKPSAIQQRGIIPFCKGLDVIQQAQSGTGKTATFCSGVLQQLDYTLVQCQALVLAPTRELAQQIEKVMRALGDYLGVKVHACVGGTSVREDQRILQSGVHVVVGTPGRVFDMLRRQSLRADAIKMFVLDEADEMLSRGFKDQIYDIFQLLPSKVQVGVFSATMPPEALEITRKFMNKPVRILVKRDELTLEGIKQFYVNVDKEEWKLETLCDLYETLAITQSVIFVNTRRKVDWLTDKMRSRDHTVSATHGDMDQNTRDIIMREFRSGSSRVLITTDLLARGIDVQQVSLVINFDLPTQPENYLHRIGRSGRFGRKGVAINFMTTDDERMLSDIQKFYNVVVEELPSNVADLL

SEQ ID NO: 15350 - protein, 428 aa, Candida albicans SC5314
MVDGYKEVSESFDRSKIQHNPYGPNPGDFLSNVGNFQLIESTLREGEQFANAFFSTETKIEIAKALDDFGVDYIELTSPVASEQSRKDCEAICKLGLKAKILTHIRCHMDDARVAVETGVDGVDVVIGTSQFLRQYSHGKDMNYIAQSAIEVIEFVKSKGIEIRFSSEDSFRSDLVDLLNIYRTVDKIGVNRVGIADTVGCANPRQVYELVRTLKSVVKCDIECHFHNDTGCAIANAYTALEGGARLIDVSVLGIGERNGITPLGGLMARMIAADREYVLSKYKVHKLRDIENLVAEAVQVNIPFNNPITGFCAFTHKAGIHAKAILANPSTYEILSPSDFGLTRYIHFANRLTGWNAIKSRVDQLNLHLTDEQCKEVTNKIKKLGDVRQLNIDDVDSIIKDFHADMSTPLLKSNGAEEEPDVKKQKV

SEQ ID NO: 15351 - protein, 505 aa, Burkholderia thailandensis E264
MKHDSNVTSTLGHLIDGKRVDGGERVQPVFDPATGASTKRVRLADGPTVEAAIAAAQAAYPAWRNTPPLKRARVMSRFKTLLEEHADELCALVTAEHGKVLADAMGELQRGIENVEYASYAPELLKGEHSKNVGPAIDSWSEFQALGVVAGITPFNFPVMVPLWMWPMAVACGNTFVLKPSERTPSSTLRMAELALEAGLPPGVLNVVNGDKEAVDTILTDSRVKAVSFVGSTPIAEYIYTTGCAHGKRVQALGGAKNFAIVMPDADIGNAVNALMGAAYGSCGERCMAIPLVVAIGDDAADQVVEGLKAEIAKMKVGPGTGERVDMGPLVTRQHFDKVTGFVEAGVAAGATLVVDGRGVKVDGHDGGYYLGPCLFDHVKPGMPIYQHEIFGPVLGVVRVASLAEAMALVDAHEYGNGTCLFTRDGEAARYFSDNIQVGMVGINVPLPVPVAYHSFGGWKRSLFGDLHAYGPDAVRFYTKRKTITQRWPSAGVREGTVFSFPSSR

SEQ ID NO: 15352 - protein, 408 aa, Shewanella oneidensis MR-1
MTVSELRFALDTFYFLISGALVMWMAAGFAMLEAGLVRSKNTTEILTKNVVLYAIACVMYLLVGYNIMYVDNAEGGWLPSFGTLIGSQAADANHALESDFFFQVVFVATAMSIVSGAVAERMKLWAFLVFSVVMTGIIYPVEGYWTWGKGFIASLGFVDFAGSGIVHMTGAAAAIAGVLLLGARKGKYGPNGQVNPIPGSNLPMATLGMFILWMGWFGFNGGSQLMVSDAANASAVAKVFVNTNTAAALGAISALIVCKMIWGKADLTMILNGILAGLVAITADPLSPSLLMAGVIGLVAGGLVVFSIVGLDRIKIDDPVGAISVHGVAGFLGLMCVPLSNANATITAQLTGAAIIFAWVFSASFAVWFVLKMTMGIRVSEEEEYNGMDASDCGIDAYPEFVTVKSAG

SEQ ID NO: 15353 - protein, 158 aa, Staphylococcus epidermidis RP62A
MESIYDFVVQKNNGESYKLEQYKGDVMLIVNTASECGFTPQFEGLQKLYDEYKDQRFIILGFPCNQFGGQEPGSGEEAAQNCKINYGVTFPIHEKVDVKGDNQHPLFHFLTNAAKGMINEKIKWNFTKFLIDREGNVIKRFSPQKKPEQIKTEIEKLL

SEQ ID NO: 15354 - protein, 362 aa, Synechocystis sp. PCC 6803
MSQTYNVTLLPGDGIGPEIMAVAVAVLGKVADQFGFAFNFQEALIGGAAIDATGQPLPEATLAQAKDSDAVLLAAIGGYAWDNLPRSQRPETGLLAIREGLGLFANLRPATIFPQLIDASSLKREVVEGVDIMVVRELTGGIYFGKPKGIFETETGEKRGVNTMAYTVGEIDRIAKVAFETARKRRGQLCSVDKANVLDVSQLWRDRVMAIAVDYPDVELSHLYVDNAAMQLVRSPRQFDTIVTGNLFGDILSDIAAMLTGSIGMLPSASLGSDGPGLFEPVHGSAPDIAGQDKANPLAQVLSAAMMLRYGLDQPQAADRLEDAVKKVLEQGYRTGDILSPGTQLVGCRQMGEQLLSILDEM

SEQ ID NO: 15355 - protein, 335 aa, Moorella thermoacetica ATCC 39073
MAIKVGINGFGRIGRLVFRASLEKPELEVVAINDITDVKTNAHLLKYDSVHGRLNATVEAREGAMVVNGREIKVLAERDPAKLPWKDLGVDIVIESTGVFTDATKAAAHRQAGAKKVIITAPAKNEDITIVMGVNNDKYNPAQHHIVSNASCTTNCLAPIAKVLHDNFTIKRGLMTTAHSYTNDQRILDLTHKDLRRARAGALSIIPTTTGAAKAIGLVLPELKGKLNGMAMRVPTPNVSVVDLVAELEKPATVESINAAMKAAAEGPMKGILGYCEEPLVSRDFNGDPRSSIVDALSTMVIDGTLAKVVSWYDNEWAYSKRVVDLAAFMAAKGL

SEQ ID NO: 15356 - protein, 508 aa, Burkholderia thailandensis E264
MTGSTHSNDSRVRALTHFIGGRALDGASDRYGDVFDPALGKVTARVPLASGAEVEAAVAAAAAAFPAWSETSPLKRARVMFKFKELLDRHHDELAELITREHGKVFSDAKGEVMRGIEVVEFACGIPNLLKTDFTDQIGGGIDNWNLRQPLGVVAGITPFNFPMMVPCWMFPVAIACGNTFVLKPSERDPSASIRLAELLKEAGLPDGVFNVVHGDKTAVDALIAHPDVAALSFVGSTPIAEYIHTEAARRGKRVQALGGAKNHLVVMPDANLDQAVDALVGAAYGSAGERCMAISVAVAVGGVADALVERLAERARTLKIGNGMQSDVDMGPLVTAAHRAKVSAYIDAGVAAGARLVVDGRKHVVDGCENGFFLGGTLFDDVTTDMSIYREEIFGPVLAVVRVPDFASAVELINAHEFANGVSCFTSDGGIARAFARKIQVGMVGINVPIPVPMAWHSFGGWKRSLFGDHHAYGEEGVRFYTRYKSVMQRWPDSIAKGAEFAMPVAK

SEQ ID NO: 15357 - protein, 224 aa, Methanopyrus kandleri AV19
MRTVRRALRRGEPVFIFDSEDREGETDMVFWAPEVTPDHVAELRRTAGGLICVVIHPEHAREIRLPFLVDVYERADHPLLRATWPDDIPYDERSTFSITVNHRDTFTGVTDEDRALTVRKLAEFFTRNHEDPVREFGEEFRSPGHVHLLRPFDGLLEERRGHTELTATLLELVGLEPKVAVICEMLEPGGGALPREEAERVARERGAPFLTGEDILKAWKGGER

SEQ ID NO: 15358 - protein, 308 aa, Campylobacter upsaliensis RM3195
MKKLIIATRKSPLALWQSEFVADILRKTHGIEVHLEGFSTKGDILLDSPLAKIGGKGLFTKELENAMLENKAHLAVHSLKDVPSFLPQGLVLAALSVREDDTDALLSELYKDLNALPQNAKVGTTSLRRKMQLLSLRPDLHIINLRGNVNSRLKRLKGGEFDAIILASAGVKRLGLESEVKFIYRFSKDELVPAATQGILGIQSPDKNEILTLLQCLNDEKSLIESTVERDFIRTLEGGCQVPIGINAELMGEQITVRSILGLPDGSEILRDKRIILKKNYQGFGERLALEFIKRGAKELLKRAEAML

SEQ ID NO: 15359 - protein, 118 aa, Bacteroides fragilis NCTC 9343
MKVIDLTKESFVEKVAEFQEYPNKWDFKGDKPCLVDFHAPWCVYCKALSPILDQLAVEYDGKIDIYKVDVDQEPELEAAFAIRTIPNLLLCPMGGKPSMKLGTMNKTQLKALIEEVLL

SEQ ID NO: 15360 - protein, 400 aa, Staphylococcus epidermidis RP62A
MNRSVLKFGGSSVSDFKKIKNIAEMLKTRIEDGEELIVVVSAMGKTTDQLMNNVSSLTSTPKDQELALLLTTGEQQTVSYLSMVLNDIGVNAKAMTGYQAGIKTVGHHLKSKIAEINPNIFDEAFKDHDILVVAGFQGINDDFELTTLGRGGSDTTAVALAASNQIPCEIYTDVDGVYATDPRILNEAKRLEYVSYEEMMEMSALGAGVLETRSVELAKNYDIPLYLGRTLSNMKGTWIMSKSDLLEKKAVTGVALDTHMMHVTISYPLPDNQLLTQLFTALEEESVNVDMISQIVNLEGLQLSFSIKDSDAHQISSILENLSIHFSALDYKINEAYVKISLIGSGMRDMSGVASKAFMTLINSDIPFYQTTTSEISISYVIDEENGEKAVEELYHAFEI

SEQ ID NO: 15361 - protein, 343 aa, Mycobacterium leprae
MRIGILTGGGDCPGLNAVIRAIVRTCDARYGSSVVGFQDGWRGLLENRRMQLCNDDRNDRLLAKGGTMLGTAHVHPDKLRAGLHQIKQTLDDNGIDVLIPIGGEGTLTAAHWLSQEDVPVVGVPKTIDNDIDCTDVTFGHDTALTVATEAIDRLHSTAESHQRVMLVEVMGRHAGWIALSSGLASGAHMTLIPEQPFDVEEVCCLVKRRFQRGDSHFICVVAEGAKPVPGSITLRQGGMDEFGHERFTGVAAQLGAEVEKRINKDVRVTVLGHVQRGGTPTAFDRVLATRFGVNAADASHAGEYGQMVSLRGQDIGRVPLEDAVRQLKLVPESRYDDAAAFFG

SEQ ID NO: 15362 - protein, 533 aa, Synechocystis sp. PCC 6803
MNSPVDRILIFDTTLRDGEQSPGATLTVEEKLSIARALARLGVDIIEAGFPFASPGDFEAVQKIAQTVGTENGPVICGLARATQKDIKAAAEALKPAAKHRIHTFLATSDIHLEHKLKKTRAEVLAIVPEMVAYAKSLVNDIEFSPEDAGRSDPEFLYQVLEAAISAGATTINIPDTVGYTTPAEYGALIKGIADNVPNIDQAIISVHGHNDLGLAVANFLEAVKNGARQLECTINGIGERAGNAALEELVMALHVRRSYFNPFLGRPADSTAPLTNIDTKHIYATSRLVSELTGMMVQPNKAIVGANAFAHESGIHQDGVLKNKLTYEIMDAESIGLTNNQIVLGKLSGRNAFGTRLKELGFDLSDTELNNAFIRFKEVADKRKEITDWDLEAIVNDEIRQPPELFRLERVQVSCGEPSVPTATLTIRTPAGPEETAVAIGTGPVDAVYKAINQIVQLPNELLEYSVTSVTEGIDALGKVSVRLRHNGVIYTGYAANTDIIVASARAYLGALNRLYAALEKSREHPPVVASL

SEQ ID NO: 15363 - protein, 478 aa, Thermosynechococcus elongatus BP-1
MSATVQSLVNQPYKYGFVTPIETETIPKGLNEDIIRLISAKKNEPEFMLEFRLRAYRQWLKMSEPQWPRVSYPPINYQDIVYYSAPKQKEKLKSLDEVDPVLLETFEKLGIPLSEQKRLTNVAVDAIFDSVSVATTFREELAKQGIIFCSISEALQDYPELVQKYLGSVVPIGDNFYAALNSAVFSDGSFVYVPKNTRCPMELSTYFRINNGESGQFERTLIIADAGSYVSYLEGCTAPMFDTNQLHAAVVELVALDNAEIKYSTVQNWYAGDENGKGGIYNFVTKRGLCLGRNSKISWTQVETGSAITWKYPSCVLVGDNSVGEFYSVALTNHYQQADTGTKMIHIGKNTRSRIVSKGISAGHSQNSYRGLVKIGPKATGARNYSQCDSMLIGDTAAANTFPYIQVQNPTAQVEHEASTSKIGEDQLFYFAQRGISAEDAVSMMISGFCRDVFNQLPMEFAVEADRLLSLKLEGSVG

SEQ ID NO: 15364 - protein, 506 aa, Oceanospirillum sp. MED92
MSEQLQENIAKAEGYLARFKENTLGHYINGEWTLGQGETFDNTTPFDQSFLGKVAAATEADVNAACEAAEAAAAEWAATPGAERRKILHRLGDELEKRAEEIAMVESMDCGQAIRFMRQAAVRGAANFRFFADQAPEARNGLSLHQQEHTNYTVRNPIGPVAVITPWNTPFMLSTWKIAPALAAGCTVVHKPAELSPLTASILAECAEAAGLPKGVWNMVNGFGAVAGKTLTEHPAIKAVALVGDSATGKLIQAQTAQTLKRLHLELGGKNPVIVFDDADFDRALDAVVFMIYSLNGQRCTSSSRLLVQSGIKDKFLAALKERVANIKVGHPLDPATEVGPLVHTGHYDKVTSYFEIAKEDGATVAVGGKSLRDEMGPGNFVTPTLFVEAKNSMRIAQEEIFGPVLTAIEFETEEEAVKLANETIYGLAGYIWTSNTGRAMRMADKVEAGMLWVNSENNRNLPSPFGGVKMSGIGRDGGDWSFDFYMETKNVCIAHDTHRVPVLGR

SEQ ID NO: 15365 - protein, 389 aa, Methanosarcina acetivorans C2A
MKFRLFHDIFEGTTFMYDVIIIGGGPSGASAGRRAGKLGLNTLLLEKEEFPRYKPCGGGLSKHAISYLDFELPQDIIEWEVTGARVSFREHIIEVHKDHCLSVMVSRDVFDNLLLEKAKESGAEVHTGERVSQCMETPECVEVTTEKGTYQARFAIIAEGANGLLKTSVRPVDSDEDCGVCVVTEVPAGEEEMEKRIGKTVYMRFGVAGGGYGWFFPHRTYYSVGIGGLIKDLPHPRETMLEFLRCNGFTGDYKLKGHKIPLGGVKRRVTGSRILLSGDAAGFVDAFLGEGLAYAISSGQFAAEVIAGICQCNGKIKDLKKYEYLCQAEFGPHLKYSLMFSRIMHRFPDKTFKIFTSNEKMIDKYLDVVDSKINYKDYLRWSLLNFKLR

SEQ ID NO: 15366 - protein, 345 aa, Thermus thermophilus HB27 [sequence omitted]

SEQ ID NO: 15367 - protein, 389 aa, Methanosarcina acetivorans C2A
MYDLIIVGGGPSGASAGRVAGSAGISTLLLEKENFPRYKPCGGALSPYALSCLDFELPESVVERDISKVRVHFRELCLERQRDYRLALLVSRKAFDNLLLDKARETGIEVHCGEKVLDCEEGEEWVEVRTSRNSYLAKFVLIAEGSEGILKYKVRPQRARRTEYDLALVSEIPEEDEVIRNRFPGMVDIHFGVAPGGYGWVFPHAGYYSVGVVGTAEHLKHPKKVMQDFLQANDFSGEFQVCSHIIPVGGIKRKTVSSRILLSGDAAGFVDAFIGEGIAYAIRSGQLAAEIVADLVLYNRKLSDLKEYESRCGQEFGNFLVSSLKLEKVMHRFPETSFKLALSREEILDKYLDEVVINRSHKDYVRWLLLNFSLAEPASRIMSMAGKNQ

SEQ ID NO: 15368 - protein, 318 aa, Nocardia farcinica IFM 10152
MPTMKVTVAQIVSETPSIRSLRLVREDGRPLGPYRAGAHIDVTGPTGILRQYSLCGPPSEAQSLTIAVKREPDSRGGSAALHEVCEGDIIEIGEPRNILAVDPDATRHVLVAAGIGVTPLLSMAYELHGNGAEFELRYFTRSRTETAFADLLENRAEFRDRVRLHTGLSRADQRSTLDDLAATLTPGTAVYTCGPAGFMDTVAEVVTPVVGAPNLHIEHFEAAAVDTSGDTAFTVELDTGESFEIPADRSILSVLEENGIEVFKSCEEGICGSCVSGVLEGEPEHRDNCLSVADKAAGDQIALCVSRARTPKLVIELF

SEQ ID NO: 15369 - protein, 405 aa, Halobacterium sp. NRC-1
MGPMETYVVTEPALVERLLVSDAAEFRKPEFQADAIDDLLGDGLLLSEGESWREQRGRANPAFSMARVAGFDADIAAHAADRVDDWPVGDTVDVEAAMTHITLDVILDVMLGVSLPEARVDAIGDALEPVGARFEPDPVRFAVPEWLPMPDDREYAAAVATLDDLVDDIVAAREGTASGGDGDDPMDLLSVLLRARDRGEQSLDRLRDEVMTTLLAGHDTTALTLTYTWFLLSEHPDVEARLHAELDGALDDGAQPTVAQLQDLDYLEWVLQESMRLYPPVYNVFRTPIEPVELAGSEVPAGAPIMLPQWAIHRSPDHWDDPEAFDPERWRPERRADRPRFAYFPFGGGPRHCIGKQLALLEAKLIVATVASDYRLRYEGDTPLSFVPSLTIHPEQEMRMRVEPR

SEQ ID NO: 15370 - protein, 122 aa, Triticum aestivum
MARLNSKAVAAAVVLAAVVLMMAGREASAALSCGQVDSKLAPCVAYVTGRASSISKECCSGVQGLNGLARSSPDRKIACRCLKSLATSIKSINMGKVSGVPGKCGVSVPFPISMSTNCNNVN

SEQ ID NO: 15371 - protein, 618 aa, Agrobacterium tumefaciens str. C58
MSSNRPSGSSISKAKAGWKQAMTDKDNTENSNRMTGAEIVLQALKDNGVEHIFGYPGGAVLPIYDEIFQQEDIQHILVRHEQGAGHAAEGYARSTGKVGVMLVTSGPGATNAVTPLQDALMDSIPLVCLSGQVPTSLIGSDAFQECDTVGITRPCTKHNWLVKDVNELAGIIHEAFRIAQTGRPGPVVVDIPKDIQFATGTYTPPSAAIQQKSYKPKVQGDLNAIHAAIELMSKAKKPVFYTGGGVINSGPEATRLLRELVELTNFPITSTLMGLGAYPASGKNWLGMLGMHGSYEANMTMHDCDVMVCIGARFDDRITGRINAFSPNSKKIHIDIDPSSINKTVRVDVPVIGDVGHVLEDMVRLWRALPKKPEKAQTADWWSQIERWRARNSFAYKNSKDVIMPQYALQRLYEASKGRDTYITTEVGQHQMWAAQFFGFEEPNHWMTSGGLGTMGYGLPAAIGVQVAHPEALVIDIAGDASIQMCIQEMSCAIQYGLPVKIFILNNQYMGMVRQWQQLLHGNRLSNSYTEAMPDFVKLAEAYGAVGMYCDDPKELDDKIAEMIAVNKPVIFDCRVANLANCFPMIPSGKAHNEMLLPDEATDEAVANAIDAKGRQLV

SEQ ID NO: 15372 - protein, 131 aa, Zea mays
  misc_feature (53)..(53): Xaa can be any naturally occurring amino acid
MSGARRAPALAAALLLLVAAALASPPASAAATLQCAQVAQLMAPCTPYLTGAXPGMTPYGVCCNSLAVLSQLAAARADRVAACACAKAAAAAGLPAAVDFARAAGLPAACGLSISFTISPDMDCNQVTEEP

SEQ ID NO: 15373 - protein, 104 aa, Zea mays
QNEKTRKTGRVLLASGATTSDAGITCSQVSFAIAHCLSYARGTESGPCEYCCSGVRNLMSADSTVADWRTACNCLKNALRGLSGLNDGNGGSIPFKCMFSIPFT

SEQ ID NO: 15374 - protein, 252 aa, Helianthus annuus
QYGRETRHTGDYESPIHSTGGQYEQEVLQTDEYGNPVRRTGQTDEYGNPVRRTDEYGNPVHSTTGGTMGDYGSTGLGQGTGTGGIGTGGYGTTGHHGLGTGVGHTTGGTGTDYTSGGRSTGQTGYQGLGTESDFGGKTGTFQNQPSATPVGGVGLNSGTGAGVGGTGTGTGILHRSGSSSSSSSEDDGQGGRRKKKGVMQKIKEKLPGGHRQEEQYQSQTTTTTTGGGAGYGETHEKKGMMEKIKEKLPGHH

SEQ ID NO: 15375 - protein, 256 aa, Halobacterium sp. NRC-1
MSDTVALAVDDGVATITISRPDSLNALNVATLHALRDTLDTAESEGARAVVLTSAGDDAFIAGADISYMVEMDTAEAQAYAELGHSVADAIESFPAPVVAAIDGYAFGGGMELALACDLRVASEDAILGQTEIDIGIIPGWGGTQRLPRIVGDETARRMIYFGDRLSAADASEHGLVGEVVPAAEIDDHVASLARDLAAQPAAAMRAAKDAINTSHETTLSAGLEFEARTWAGLFGSHDQQEGMQAFLEDRDPDFE

SEQ ID NO: 15376 - protein, 614 aa, Monochoria vaginalis
SKPLHPPPKLQRQQRIFAPLVTSSTTVAAPDAVFPPRRNFAPDEPRKGADILVEALEREGVTDLFAYPGGASMEIHQALTRSPSITNHLLRHEQGEAFAASGYARSTGRPGVCIATSGPGATNLVSALADALLDSIPMVAITGQVSRRMIGTDAFQETPIVEVTRSITKHNYLVLDVDDIPRIIKEAFFIATSGRPGPVLVDIPKDIQQQLAVPVWDPPVRLPGYVSRLPKPPALHLLQQIIRILSESSRPVLYVGGGSLHASEELRRFADLTGIPIASTLMGLGVYPLDGPLSLKMLGMHGTVYANYAIDKADLLLAFGVRFDDRVTGKLEAFASRAKIVHIDIDPAEIGKNKQPHVSICGDIKLALQEMNEMIEENGIHSKLDFSAWREELDQQKKNYPLKYKTFGDLIPPQHAIELLEELTNGEAIITTGVGQHQMWAAQYYNYKRARQWLTSAGLGAMGFGLPAAVGAAVGNPGVVVVDIDGDGSFQMNAQELAIIRIENLDVKMLILNNQHLGMVVQWEDRFYQSNRAHTYLGNPANESKVFPDFVKLAESYDIPAACVSKKSEVRDAIRKMIQTPGPYLLDVIVPHEEHVLPMIPSGGAFKDMILDGD

SEQ ID NO: 15377 - protein, 391 aa, Prochlorococcus marinus str. MIT 9312
MNKIGVLLMNLGGPERITDVGPFLYNLFSDPEIIRTPFPAFQKPLAWLISTLRSTTSQQAYLSIGGGSPIRRITEQQARELQSKLREKGLNATTYIAMRYWHPFTESAIADMKADCVDQIVVLPLYPHFSISTSGSSFRELKKLRDSDNDFKKIPMRCVRSWFSQSGYLKSMVELISQQISCCESPPNAHIFFTAHGVPKSYVEEAGDPYKQQIEDCSLLIINELEKYLGHSNPHTLSYQSRVGPVEWLKPYTEEVLADLGKSNVEDLIVVPISFVGEHIETLQEIDIEYKEIAEKAGIKNFRRVKALNTHPTFIEGLSDLVISCLEEPQVNIEEASKLPEKVKLYPQEKWQWGWNNSSEVWNGRVAMIVFLVLFIELIAGSGPLHRLGIL

SEQ ID NO: 15378 - protein, 112 aa, Shewanella oneidensis MR-1
MKLVSAIIKPFKLDDVREAIAGIGIEGMTVTEVKGFGRQKGHTELYRGAEYQVDFLPKVKLEIATKAENLDMLIEAITTAAHTGKIGDGKIFVIDLEHAIRIRTGELDTEAL

SEQ ID NO: 15379 - protein, 1034 aa, Flaveria pringlei
MERARRLAILGRLVSQTKHNPSISSPALCSPSRYVSSLSPYVCSGTNVRSDRNLNGFGSQVRTISVEALKPSDTFPRRHNSATPEEQTKMAEFVGFPNLDSLIDATVPKSIRLDSMKYSKFDEGLTESQMIAHMQDLASKNKIFKSFIGMGYYNTSVPTVILRNIMENPGWYTQYTPYQAEIAQGRLESLLNFQTMITDLTGLPMSNASLLDEGTAAAEAMAMCNNIQKGKKKTFIIASNCHPQTIDICKTRADGFDLKVVTSDLKDFDYSSGDVCGVLVQYPGTEGELLDYSEFIKNAHANGVKVVMASDLLALTILKPPGELGADIVVGSAQRFGVPMGYGGPHAAFLATSQEYKRMMPGRIIGVSVDSSGKPALRMAMQTREQHIRRDKATSNICTAQALLANMAAMFGVYHGPEGLKTIAKRVHGLAGTFASGLKKLGTVQVQDLPFFDTVKVTCADSKAIAEEAYKHKMNLRIVDKNTITVAFDETTTIEDVDTLFKVFALGKPVTFTAASIAPEVQDAIPSGLVRETPYLTHPIFNMYHTEHELLRYISKLQSKDLSLCHSMIPLGSCTMKLNATTEMMPVTWPAFADIHPFAPTEQAQGYQEMFKNLGDLLCTITGFDSFSLQPNAGAAGEYAGLMVIRAYHMARGDHHRNVCIIPVSAHGTNPASAAMCGMKIITVGTDSKGNINIEELRKAAEANKENLSALMVTYPSTHGVYEEGIDEICKIIHDNGGQVYMDGANMNAQVGLTSPGWIGADVCHLNLHKTFCIPHGGGGPGMGPIGVKKHLAPYLPSHPVVPTGGIPAPEQSQPLGTIAAAPWGSALILPISYTYIAMMGSQGITNASKIAILNANYMAKRLENHYPILFRGVNGTVAHEFIVDLRPLKTTAGIEPEDVAKRLIDYGFHGPTMSWPVPGTLMIEPTESESKAELDRFCDALISIRQEIAEIEKGNVDFNNNVIKGAPHPPQLLMADKWTKPYSREYAAYPAPWLRAAKFWPTTCRVDNVYGDRNLICTLQPPQEYEEKAEATA

SEQ ID NO: 15380 - protein, 614 aa, Monochoria vaginalis
SKPLHPPPKLQRQQRIFAPLVTSSTTVAAPDAVFPPRRNFAPDEPRKGADILVEALEREGVTDLFAYPGGASMEIHQALTRSPSITNHLLRHEQGEAFAASGYARSTGRPGVCIATSGPGATNLVSALADALLDSIPMVAITGQVPRRMIGTDAFQETPIVEVTRSITKHNYLVLDVDDIPRIIKEAFFIATSGRPGPVLVDIPKDIQQQLAVPVWDPPVRLPGYVSRLPKPPALHLLQQIIRILSESSRPVLYVGGGSLHASEELRRFADLTGIPIASTLMGLGVYPLDGPLSLKMLGMHGTVYANYAIDKADLLLAFGVRFDDRVTGKLEAFASRAKIVHIDIDPAEIGKNKQPHVSICGDIKLALQEMNEMIEENGIHSKLDFSAWREELDQQKKNYPLKYKTFGDLIPPQHAIELLEELTNGEAIITTGVGQHQMWAAQYYNYKRPRQWLTSAGLGAMGFGLPAAVGAAVGNPGVVVVDIDGDGSFQMNAQELAIIRIENLDVKMLILNNQHLGMVVQWEDRFYQSNRAHTYLGNPANESKVFPDFVKLAESYDIPAACVSKKSEVRDAIRKMIQTPGPYLLDVIVPHEEHVLPMIPSGGAFKDMILDGD

SEQ ID NO: 15381 - protein, 965 aa, Pseudomonas fluorescens Pf-5
MITLFDPATDIDLNAVDFGTPARDSQVQVSLNIDGRSISVPQGTSVMRAAALMGTTIPKLCATDSLEAFGSCRMCLVEIDGMRGYPASCTTPVSEGMVVHTQTPKLATLRRNVMELYISDHPLDCLTCSANGNCELQTVAGQVGLREVRYGYDGANHLDDQKDTSNPYFDYDPSKCIVCNRCVRACEETQGTFALTISGRGFESRVAAAGGDNFLDSECVSCGACVQACPTATLMEKSVVQMGQPERAVITTCAYCGVGCSFRAEMKGDQLVRMVPDKNGQANHGHSCVKGRFAWGYATHPDRITKPMIRKHISDPWQEVSWDEAVSYAASELRRIQFKYGRDSIGGITSSRCTNEETYLVQKLVRAAFGNNNVDTCARVCHSPTGYGLKQTLGESAGTQSFDSVMQADVILVMGANPSDAHPVFGSQLKRRLREGAKLIVIDPRRIDLVDSVHARAELHLALRPGTNVAMLNALAHVIVTEGLVDQEFVSARCEPEAFALWSAFVSRADNSPEVLGAICGVPAADIRAAARLYATGGNAAIYYGLGVTEHSQGSTSVMGIANLAMATGNIGREGVGVNPLRGQNNVQGSCDMGSFPHELPGYRHISNQAVRQQFEQAWNVTLQADPGLRIPNMFEAALGGSFKGLYCQGEDIAQSDPNTQHVTAALSAMECVVVQDIFLNETAKFAHVFLPGSSFLEKDGTFTNAERRISRVRKVMEPLGGKADWEGTLALAAALGYPMHYSHPSEIMDEIARLTPTFTGVSYASLDRHGSLQWPCNDAAPDGTPTMHIDEFVRGKGRFMLTGYVPTDEKVNGRYPLLLTTGRILSQYNVGAQTRRTDNVAWHAEDRLEIHPTDAESRGINEGDWVGIGSRAGQTVLRARVTERVAPGVVYTTFHFPESGANVITTDNSDWATNCPEYKVTAVEVSRVYHPSEWQKRYQAFSEEQHRLLDKRGRSRGGKAEVRR

SEQ ID NO: 15382 - protein, 537 aa, Marchantia polymorpha
MGASNVDAKGSEEEVPLKQSSSRKEAVNPADGNAAVSIKIRTRLPDFLNSVNLKYVKLGYHYVITHALYLLMVPLLMVVAAEFGRLGHEDFGQLWEQLQFNLVSVLVCSGTLVFGGTLYFMSRPHPVYLVDFACYKPIDERKVTREIFMECSRITGNFNEKSLEFQRKILERSGLGQDTYLPPAVLRVPPNPNMHEARLEAETVMFGALDELFEKTGVKPKEVGILVVNCSLFNPTPSLSAMIVNHYKMRGNIKSLNLGGMGCSAGVISIDLARDLLQVHNSTYAVVVSMENITLNWYMGNDRSKMLSNCIFRMGGAAILLSNKMKERRRAKYELVHTVRTHKGADPKCFSCVVQEEDDEGKIGVSLSRDLMGVAGDALKANITTLGPLVLPLSEQILFFATLVGRKLFKMKIKPYIPDFKLAFEHFCIHAGGRAVLDELEKNLNLTEWHMEPSRMTLYRFGNTSSSSLWYELAYTEAKGRVRRGDRLWQIAFGSGFKCNSAVWRALRTVKSPKQSPWADEIDSFPVEVPAFTSMLN

SEQ ID NO: 15383 - protein, 149 aa, Crocosphaera watsonii WH 8501
MEVQFREFNPFNVWIWLEFETVPAPMERQYLEEVFNSWFYLGKLGGFNAENLQVQDMGVEISYMEYNTKVSDEMMMAPMHNMAEFEYEGVWGRCWFDLGTSDLIALDVLINALTQLGQELIVIKKLIIGGENEDWPISNKQQAMFAEDN

SEQ ID NO: 15384 - protein, 614 aa, Monochoria vaginalis
SKPLHPPPKLQRQQRIFAPLVTSSTTVAAPDAVFPPRRNFAPDEPRKGADILVEALEREGVTDLFAYPGGASMEIHQALTRSPSITNHLLRHEQGEAFAASGYARSTGRPGVCIATSGPGATNLVSALADALLDSIPMVAITGQVPRRMIGTDAFQETPIVEVTRSITKHNYLVLDVDDIPRIIKEAFFIATSGRPGPVLVDIPKDIQQQLAVPVWDPPVRLPGYVSRLPKPPALHLLQQIIRILSESSRPVLYVGGGSLHASEELRGFADLTGIPIASTLMGLGVYPLDGPLSLKMLGMHGTVYANYAIDKADLLLAFGVRFDDRVTGKLEAFASRAKIVHIDIDPAEIGKNKQPHVSICGDIKLALQEMNEMIEENGIHSKLDFSAWREELDQQKKNYPLKYKTFGDLIPPQHAIELLEELTNGEAIITTGVGQHQMWAAQYYNYKRPRQWLTSAGLGAMGFGLPAAVGAAVGNPGVVVVDIDGDGSFQMNAQELAIIRIENLDVKMLILNNQHLGMVVQWEDRFYQSNRAHTYLGNPANESKVFPDFVKLAESYDIPAARVSKKSEVRDAIRKMIQTPGPYLLDVIVPHEEHVLPMIPSGGAFKDMILDGD

SEQ ID NO: 15385 - protein, 469 aa, Zymomonas mobilis subsp. mobilis ZM4
MTIEFMQPSDSSEVSELPRISVIGVGGGGGNAVANMIASGVQGVDFIVANTDAQALNISPAEQRIQLGPTTTQGLGAGSRPEVGKAAAEETIEQIQEALEGARMCFIAAGMGGGTGTGAAPVIAKVARDRGILTVGVVTKPFNFEGKRRARSAESGIEELQKHVDTLIVIPNQNLFLIANPNTTFKQAFQMADEVLQQGVRGITDLMVCPGLINLDFADIRSVMSEMGKAMMGTGEASGDNRAIEAAERAIANPLLDGVSMNGARGVIVSIIGGEDITLMEVDEAANHIRELVDDDANIIFGSAFNEDLDGRIRVSVVATGIDSSKKEGEEEKSSYNPTSSASGYTAVSSQSMSSVSQSTVAPAPKAVVPQPQPPVEDELVLGQEAVKPVEKKDNLKAASPSVDDSDFNQNSNAGWNSEPTRPAPRLAREGSTLFERMSNIARGADRKDSTENRGRVDIPQFLNRQGNS

SEQ ID NO: 15386 - protein, 191 aa, Zea mays
LGQSEPKDPNSIRVIQRKLVYIVGMPTEFASEKLLRQKSFLGQYGKIENIIIDNVGANQQVPDSGRVYVTFAKEVEAIRCIQAVDGYSLDGRPLKATFGVTRYCHIWLSNKDCYKPNCSYVHYKAPAEEICTKDDVSVVCARSSFCAVAMAAAVSNRLVVAIARKADETGEGFEVVRWPERGSKNGKKNRT

SEQ ID NO: 15387 - protein, 340 aa, Prochlorococcus marinus str. MIT 9211
MTLRVAINGFGRIGRNFMRCWLSRGSNTGLEVVGVNVTSDPKTNAHLLRYDSILGELKDTEIGYTDDNFIINGKEIKCFSDRNPLNLPWKDWGVDLVIESTGVFNTYEGASKHLAIGAKKVILTAPGKGDGVGTFVVGVNADQYNHSDFNVLSNASCTTNCLAPVVKVLDQTFGINKGLMTTIHSYTGDQRILDNSHRDLRRARAAAMNIVPTSTGAAKAVALVYPEMKGKLTGIAMRVPTPNVSAVDIVFEAGCSITAEDINAAMKTASEGSMKGIIKYGDLPLVSSDYAGTNESSIIDTDLTMAIGNNMGKVVAWYDNEWGYSQRVVDLAEIVAKNWK

SEQ ID NO: 15388 - protein, 458 aa, Streptomyces coelicolor A3(2)
MATSVVLFTRDLRLHDHPPLRAALDRSDAVVPLFVRDRAVDAAGFAAPNRLALLADCLRDLDSGLRDRGGRLVVRSGDLVEEVCAVAGEAEADEVHLAADVSAHAHRREELLRSALSARGCRLHVHDAVTTVLAPGSVTPASSDHFAVFTPYFRRWSERAVREPLAAPRRVRVPDGVGSEPLPARGDLTGLSPGLPTGGERDARKRLTAWLRGGIADYADHHDDLAGDATSRLSPDLHLGALSPVELVHRARRAGGPGAEAFVRQLAWRDFHHQVLAARPHASAADYRTRHDRWRTGAAAEADAAAWRDGRTGYPVVDAAMRQLRHEGWMHNRGRLLVASFLTKTLYVDWRVGAWHFLELLVDGDVANNQLNWQWAAGTGTDTRPHRVLNPTTQARRFDPGGTYVRRWVPELAGLAGRSVHEPWRLARAARAAYDAYPDPIVDLSEGLDRFRRARGRD

SEQ ID NO: 15389 - protein, 328 aa, Polaromonas sp. JS666
MTLPDFQHFPNQFFTMKHSKVLILGSGPAGYTAAVYAARANLDPVLITGIAQGGQLMTTTDVDNWPADAQGVQGPDLMQRFLEHAERFKTEIIFDHINQVDLSKRPFTLTGDSGTYTCDTLIIATGASAKYLGLESESAFMGRGVSGCATCDGFFYRNQDVCVVGGGNTAVEEALYLSNIASKVTLVHRRDKFKAEAILIDKLHEKVAAGKIELRLHHTLDQVLGDASGVTGVRLKSTLHDTAQDLALKGCFIAIGHQPNTEIFAGQLEMKDGYIITKTGLQGFATMTSVPGVFAAGDVQDHVYRQAITSAGTGCMAALDAQRFLEQS

SEQ ID NO: 15390 - protein, 170 aa, Brassica napus
  misc_feature (130)..(130): Xaa can be any naturally occurring amino acid
  misc_feature (160)..(161): Xaa can be any naturally occurring amino acid
MSAIIHGAGAATALSTFNSKKLVARSRTNLPGRSKRCIVAAGSDDGSKSFGSSSLSLRHSHKLIANNAVATKADTSATTGHELLLFEALQEGLEEEMDRDPHVCVMGEDVGHYGGSYKVTKGLADKFGDXLRVLDTPICENAFTGMGIGAAMTDLRPVIXXMNMGFLLLA

SEQ ID NO: 15391 - protein, 313 aa, Porphyromonas gingivalis W83
MSEHARCLIIGSGPAGYTAAIYASRANLNPILYEGIQPGGQLTTTTEVENFPGYPEGITGTELMEDLRKQATRFGADIRSGIATKADLSKAPYRITIDGEKEITADTLIISTGATAKYLGLADEAKYAGMGVSACATCDGFFYRKKKVAVVGGGDTACEEALYLASLAEHVYLIVRKNYLRASKVMQERVMNTANITVLFEHNTVGLFGENGVEGAHLVKRKGEPDEEMVDIAIDGFFLAIGHTPNSKIFADYLDLDEVGYILTEGSSPRTKVPGVFAAGDVADPHYRQAITAAGSGCKAAIEAERYLGEHGL

SEQ ID NO: 15392 - protein, 387 aa, Debaryomyces hansenii CBS767
MVSDGEFTRTQIFGTVFEITNRYTDLNPVGMGAFGLVCSAIDKLTGQNVAVKKIMKPFLTSVLAKRTYRELKLLKHLRHENLITLDDIFLSPLEDIYFVTELQGTDLHRLLTSRPLEKQFIQYFTYQILRGLKYVHSAGVIHRDLKPSNILINENCDLKICDFGLARIQDPQMTGYVSTRYYRAPEIMLTWQKYDTEVDLWSVGCILSEMIEGKPLFPGKDHVHQFSIITELLGSPPPDVIETICSENTLRFVQSLPHRDPIPFSERFAQCSHVEPEAIDLLAKMLIFDPKKRISALDALSHPYMEPYHDPTDEPVCEVKFDWSFNDADLPVDTWRVMMYSEILDFHQIIGAGANGTTQEQMAQIQQEGIQAPSSQYQQTNQEQKVE

SEQ ID NO: 15393 - protein, 485 aa, Sinorhizobium meliloti 1021
MTNAEVTIAVRHEPMRIAGRLVDTDDRVEVRYPWNDTVVGTVPAGRAEHAREAFAIAAAYQPKLTRYERQKILLATAEALAARKEEISDVITLELGISKADSLYEVGRAFDVFTLAGQMCIRDDGEIFSCDLTPHGKARKIFTMREPLTAISAITPFNHPLNMVAHKVAPAIATNNCVVVKPTELTPMTALLLADILYEAGLPPEMLSVVTGWPADIGMEMITNPHVDLVTFTGSVPVGKLIAANAHYKRQVLELGGNDPLIILNDLSDDDLARAADLAVAGATKNSGQRCTAVKRILCQESVADRFVPLVLERAKRLRFGDPMDRSTDLGTVIHEKAAALFEERVMRAAEEGADILYHPGRSGALLPPIVVDRVPHQSDLVLEETFGPIIPIVRVPDDDDATITLSNSTAFGLSSGVCTNDYRRMQKYIAGLKVGTVNIWEVPGYRIEMSPFGGIKDSGNGYKEGVIEAMKSFTNVKTFSLPWP

SEQ ID NO: 15394 - protein, 338 aa, Pseudomonas aeruginosa PAO1
MSATVHYPLSAVVAADELKLALCLAAVDPAIGGVLIEGPRGMAKSTLARGVAELLPAGEFVTLPLGASEERIVGSLDLDAALGEGRARFSPGVLAKADGGVLYVDEVNLLPDHLVDLLLDVAASGVNLVERDGISHRHPARFVLIGTMNPEEGELRPQLLDRFGLNVRLDTQPPPAERAEIIRRRLAFDADPQAFVERWEGQQDTLRRRCAEARRRLARIPLDDAALDSIARRCFEAAVDGLRADLVWLRAARAHAAWRGGERIEAEDIDAVEHFALLHRRRQSNPPPSAANPPPPPAAAPVALPERTGDGEGQWGELPARPVAMGTARELPRWPKKP

SEQ ID NO: 15395 - protein, 60 aa, Arabidopsis thaliana
TLMPNVGYGSDKKTRHYLPNGFKKFVVPNTSEVELLIMPNRTYCAENAPNVSPKKRKAIG

SEQ ID NO: 15396 - protein, 350 aa, Caulobacter crescentus CB15
MATLLLLPGDGIGPEVCAQVRRVAAALTPDLKVDEALYGGASYDTHGTPLTDEVREQALASDAVLMGAVGGPKWADAPRHLRPEAGLLNLRKAMDVFANLRPAYCFEALAGASSLKPELVSGLDIMFVRELVGGVYFGQPRGIEDLADGQKKGFDTQVYTTSEIERVGRVAFELARGRTNKVHSAEKSNVMESGLLWKQVITELHAREYPDVQLEHILADNCAMQLVRAPKQFDVIVTDNLFGDILSDAAAMLTGSLGMLPSAALGAPGKPGLYEPIHGSAPDIAGKGLANPLAAILSFEMALRWSLKQTEAADALLAAVKAALDNGARTRDLGGSLTTTQMGDAVLAAL

SEQ ID NO: 15397 - protein, 521 aa, Eremothecium gossypii
MGFLIAYVFNLSPCSGDEMFETIGLAIIHFEGLNTNRVSKCNQNWHQESKQVAMELIQKVSQGLWELENCDTVNSVVVLGKEYPPVPEQRQEERHENGVNMFQHIFTRQGRWNEEFLADVHTRLHFTYRTRFVPIPRHPNGPSPMSISVMLRDNPLNVIENVLNNPDCFQTDIGWGCMIRTGQSLLANALQRACLGRDFRIDDNAANEHELRIIKWFEDDPKYPFSLHKFVQEGFSLSGKKPGEWFGPSATSRSIQALVAKFPACGIAHCVISTDSGDVYMDEVEPLFRADPSAAVLLLLCVRLGVDVVNEVYWEHIRHILSSEHSVGIAGGRPSSSLYFFGYQDEHLFYLDPHKPQLNLASYQQDLDLFRSVHTQRFNKVHMSDIDPSMLIGILLNGKDDWQLWQQHIASSQIIHLSDSKPVDLMLDHQLESAILGDRYLSEDGQGPSSKVDTGDYIDVGSFVPCTDSSCKINESEDEYQDVKCKNQRIVVVGETTTNGSPEVEVEKVLVEKETIPVRSK

SEQ ID NO: 15398 - protein, 587 aa, Prochlorococcus marinus str. MIT 9312
MTLTSRSLLKDSSKNENSVWITGADALMDALKINGVKVIFGYPGGAILPIYDSVHKAEQDGWLKHYMVRHEQGGSHAADGYARSTGEVGVCFGTSGPGATNLVTGIATAQMDSIPLVVVTGQVPRPAIGTDAFQETDIFGITLPIVKHSWVIRDPANIAKVVSEAFFIASSGRPGPVLIDIPKDVGQEFFHYQRVLPGEIIPKGFKRNGDINDSDIKKAIKLIEDSERPLLYVGGGAISSGSHDEIRTLAKNYQIPVTTTLMGKGAFDEKDNLSVGMLGMHGTAYANFAVTECDLLIAIGARFDDRVTGKLDTFAPNAKVIHIDIDPAEVNKNRRVDVAIVSDVSKAVRKINEKSRDNKFACQTKKWLEKIDFWKNKHPLYEPPQEGEIYPQEVLLKVRELLPEAYVTTDVGQHQMWAAQYLRNSPRKWISSAGLGTMGFGLPAAIGVKAALPNSDVICIAGDASVLMNIQELGTLSQYGLNVKLIIINNRWQGMVRQWQESFYNERYSSSDMSCGEPDFVKLAESFGVKGYLISDRKQLQNELQHALNHDGPALINILVRRGENCYPMVPPGKSNAQMVGYVNCEE

SEQ ID NO: 15399 - protein, 612 aa, Leifsonia xyli subsp. xyli str. CTCB07
MCGIVGWVSFDRDLTEHRESVDAMTATMACRGPDAEGVWLDRHGALGHRRLAIIDVEGGSQPMSAHTDDGAVTLTYSGEVYNFSELRGELMRRGHRFETRSDTEVVLHGYLEWDEAVAERLNGMYAFAIWDARAEKLVMIRDRMGVKPLYFFTTDDGVLFGSEPKAILAHPLADRAVDLDGLREVVSFAQTPGSAVWCGMREIVPGGVVTVCRAGLREYRYWTLTTRPHTDDLPTTIARVRSLLEDTVGRQLVSDVPRCTLLSGGLDSSAITAFSAAQLAGHGEKVRSFAVDFVGREDDFVADDLRSTPDAPYAREVASHVGSQHETIVLDNDAIADPAVRRAVIAARDNPLSLGDLDASLYLLFQAIRAHSTVALSGESADEVFGGYRWFHQPEVQAAPTFPWMALPVSGSPTRVRDRFTAKITAALDLPAYLRERYTSAIAEVQPLENESAHERRMREICYLHLTRLVRMLLDRKDRISMAVGLEVRVPFCDHRLVEYVYNVPWAMKTFDGREKSLLRAATADLLPESVLQRTKAPYPTTSDPGYARTLIQQSRDLLSADDRVFGLVDRGRLEEITRQDPATMTLDVRNGMETALDLSTWLEIYQPELRM

SEQ ID NO: 15400 - protein, 359 aa, Dehalococcoides sp. CBDB1
MYHNVTLIPGDGIGPEISEATRRVLEATGVKFNWEVVNAGADVVAEYGTPLPDMVLESIRKNKVAIKGPVTTPVGSGFRSVNVGMRKALNLYTCLRPCKTYPGVPSRYDNVDIVIVRENMEDLYAGIEFEKGSAEALRLIEFIKENKKVEIRTDSGISIKPISVFGTERIFRWAFKYAKDNNRKKVTAVHKANIMKYSDGLFLAVGRKVAEEYPEIEFEDRIVDNMTMQLVKTPTQFDILVCPNLYGDILSDLCAGLVGGLGVAPGANIGDEYALFEPTHGSAPKYKGLNKVNPMAMMLSGVLMLRYLKEEKAADKLENAIAAVIAEGKSVTYDMLSPDKQAVAVGTSQVADAIIAKMK

SEQ ID NO: 15401 - protein, 365 aa, Mycobacterium marinum
MKTTDVRVRRAITAIAAGRPVVVTHDHAAQGYLVFAAEAATSSLVAFTVRHTAGYVRVALPGAECARLNLPPMCHHNPTHRVSVDVRATGTGISARDRARTIAALASAGSQAADFLRPGHVAPLLAEPHGVLAKCEPAEAAVDLARLAGHRPAAALCEIVSRRNPTLMAHGAELVEFAVEHGLAVVSIAELLAYRQRTEPQVIRLTETTLPTWAGNSRVIGFRDLGPANPGGEHLAVIIGAPDSGVPVALHVHIECLTGDVFGSTGCRCGGELNGALSAMSAQGSGVVLYLRPPGPPRACGLFASDEETPADFMSETVTWMLRDLGVYAIKLSDDMPGFGLVMFGAIREAGAAAGPADTPLAAAG

SEQ ID NO: 15402 - protein, 614 aa, Monochoria vaginalis
SKPLHPPPKLQRQQRIFAPLVTSSTTVAAPDAVFPPRRNFAPDEPRKGADILVEALEREGVTDLFAYPGGASMEIHQALTRSPSITNHLLRHEQGEAFAASGYARSTGRPGVCIATSGPGATNLVSALADALLDSIPMVAITGQVSRRMIGTDAFQETPIVEVTRSITKHNYLVLDVDDIPRIIKEAFFIATSGRPGPVLVDIPKDIQQQLAVPVWDPPVRLPGYVSRLPKPPALHLLQQIIRILSESSRPVLYVGGGSLHASEELRRFADLTGIPIASTLMGLGVYPLDGPLSLKMLGMHGTVYANYAIDKADLLLAFGVRFDDRVTGKLEAFASRAKIVHIDIDPAEIGKNKQPHVSICGDIKLALQEMNEMIEENGIHSKLDFSAWREELDQQKKNYPLKYKTFGDLIPPQHAIELLEELTNGEAIITTGVGQHQMWAAQYYNYKRPRQWLTSAGLGAMGFGLPAAVGAAVGNPGVVVVDIDGDGSFQMNAQELAIIRIENLDVKMLILNNQHLGMVVQWEDRFYQSNRAHTYLGNPANESKVFPDFVKLAESYDIPAACVSKKSEVRDAIRKMIQTPGPYLLDVIVPHEEHVLPMIPSGGAFKDMILDGD

SEQ ID NO: 15403 - protein, 405 aa, Cytophaga hutchinsonii
MEQIKLDSIADAIEAIRKGEVIIVVDDEDRENEGDFICAAECVTPEIINFMSKEGRGLICAPISEARCTELKLDLMVGSNTATHETPFTVSVDLLGNGCTTGISASDRSKTIRALVDPDTKPEDLGRPGHIFPLKAKDEGVLRRVGHTEAAVDLARLAGFKPAGVLIEIMSEDGSMARLPELKQIATKFNLKLISIKDLIEYRLTHESLVKREIGVDMPTNLGDFDLIAFRQISTGEVHLALIKGTWEKDEPVMVRVHSSCVTGDIFGSCRCDCGPQLHKAMEMIQQEGKGVILYMNQEGRGIGLLNKLKAYKLQEQGRDTVEANLELGFKMDQRDYGTGAQILRDLNISKLRLITNNPVKRAALAGYGLEITEAVPIEIPSNPHNLEYLKTKRDKMGHTILKKD

SEQ ID NO: 15404 - protein, 614 aa, Monochoria vaginalis
SKPLHPPPKLQRQQRIFAPLVTSSTTVAAPDAVFPPRRNFAPDEPRKGADILVEALEREGVTDLFAYPGGASMEIHQALTRSPSITNHLLRHEQGEAFAASGYARSTGRPGVCIATSGPGATNLVSALADALLDSIPMVAITGQVPRRMIGTDAFQETPIVEVTRSITQHNYLVLDVDDIPRIIKEAFFIATSGRPGPVLVDIPKDIQQQLAVPVWDPPVRLPGYVSRLPKPPALHLLQQIIRILSESSRPVLYVGGGSLHASEELRGFADLTGIPIASTLMGLGVYPLDGPLSLKMLGMHGTVYANYAIDKADLLLAFGVRFDDRVTGKLEAFASRAKIVHIDIDPAEIGKNKQPHVSICGDIKLALQEMNEMIEENGIHSKLDFSAWREELDQQKKNYPLKYKTFGDLIPPQHAIELLEELTNGEAIITTGVGQHQMWAAQYYNYKRPRQWLTSAGLGAMGFGLPAAVGAAVGNPGVVVVDIDGDGSFQMNAQELAIIRIENLDVKMLILNNQHLGMVVQWEDRFYQSNRAHTYLGNPANESKVFPDFVKLAESYDIPAARVSKKSEVRDAIRKMIQTPGPYLLDVIVPHEEHVLPMIPSGGAFKDMILDGD

SEQ ID NO: 15405 - protein, 82 aa, Medicago sativa
SCGTVTGALSPCIAYLRGGAGPSPACCAGVKRLNAAATTTPDRQAACNCLKSAAGAISGLNASTAAGLPGKCGVNIPYKIST

SEQ ID NO: 15406 - protein, 245 aa, Prochlorococcus marinus str. MIT 9211
MSIFVGNLPFRAEQEDVIQLFAPFGEVANCSLPLERDTGRKRGFAFIEMADEAAESSAIEALQGAELMGRPLRINKAEPRGGGGGPRRGGYGGGGYGGGYGGGGQGGYGGGYGGGGGQGGYGGGGGQGGYGGGGQGGYGGGGGQGGYGGGGQGGYGGGGQGGYGGGGYGGGYGGGGGQGGYGGGGGQGGYGGDQDPGQRSSGAKGWEDRSYGSSDTSDRDENRSRRRRGAASETDETSDYGGAEG

SEQ ID NO: 15407 - protein, 107 aa, Carboxydothermus hydrogenoformans Z-2901
MVLKFTDANFEDEVINSDMPVLVDFWAEWCGPCRMIAPIIERLAIDYLGQVKVGKLNVDENRETAIALGIMSIPTVMIFKDGKVLDTIIGYQPENVFREKIEKALKK

SEQ ID NO: 15408 - protein, 218 aa, Gibberella zeae PH-1
MSTPSGTGSWTSLIQQARQLEKQFAAAPNIPPKPTEKERETEKKLEELLEKREDVISKLVRLLDSEAALTSSAMKQNNLALFQKKLASHRKDLIRLRSNLQEARNRANLLTNVRSDIDQYRQNNPEAAEADYMLQERNRIDNSNSMADNVLSQAYAVNDNFNLQRETLASINRRITHAASQVPGINTLIGRISAKKRRDGIIMGGFVAFCFIVFFLFS

SEQ ID NO: 15409 - protein, 315 aa, Erythrobacter sp. NAP1
MSEFGHDTTADEVLEGKDLSGKTVFITGGNSGLGQETGRAMAAKGAHVILAGRDQGKLDEAVSAIRSEVPDANLETITCDLASLDSVHAAGAEANERFDKIDLLINNAGVMACPKMHTDDGFEMQLGTNHLGHFALTKHLMPLVEAGTDKRIVNLSSRGHHIAPVDFDDPNFESTDYVPFLSYGRSKTANVLFTVGLEKRFGDKGIHSYAVHPGGIQTNLGRHMSEEESAALVERVTENDPGFSWKTIPQGAATQTWAATADELEGKGGLYCEDCNVAEVDDASPNSGVRTYALDPVAADKLWAMSEEMTGVTFA

SEQ ID NO: 15410 - protein, 127 aa, Pisum sativum
MATISGLSLSNPRLLFNSPGFPQTIKISSASPLSTRQTLTGSGRMKIVQPVRAAPEQISKKVEESIKSAQETCADDPVSGECVAAWDEVEELSAAASHARDRKKESDPLEDYCKDNPETDECKTYDN

SEQ ID NO: 15411 - protein, 954 aa, Pseudomonas syringae pv. syringae B728a
MTDRIELTTANEFIARHIGPRAADELAMLQTLGFDSIEALSESVIPESIKGTSVLNLPAGQSEADALASIKAIASKNQLFKTYIGQGYYNTHTPAPILRNLLENPAWYTAYTPYQPEISQGRLESLLNFQTLISDLTGLPIANASLLDEATAAAEAMTFCKRLSKNKASQQFFASSHCHPQTLDVLRTRAEPLGITVVVADEHELGDVSDYFGALLQYPASNGDVFDYRELVERFHAANALVAVAADLLALTLLTPPGEFGADVAIGSAQRFGVPLGFGGPHAAYFSTRDAFKRDMPGRLVGVSVDRHGKQALRLAMQTREQHIRREKATSNICTAQVLLANIASMYAVYHGPRGLTQIANRVHQLTAILAEGLSTLGLNAEQAFFFDSLTLHTGDRTAALHAAARARHINLREIDDQRLGLSLDETTSQSAVETLWAIFANDGQSLPDFAALADSVQSRLPAGLLRQSAILSHPVFNRYHSETELMRYLRKLADKDLALDRTMIPLGSCTMKLNAASEMIPVTWAEFGNLHPFAPAEQSAGYQQLTDELEAMLCAATGYDAISLQPNAGSQGEYAGLLAIRAYHQSRGDEHRDICLIPSSAHGTNPATANMAGMRVVVTACDARGNVDIEDLRAKAVQHRDQLAAIMITYPSTHGVFEEGIREICGIVHDNGGQVYIDGANMNAMVGLCAPGKFGGDVSHLNLHKTFCIPHGGGGPGVGPIGVKSHLAPFMPGHARMERKEGAVCAAPFGSASILPITWMYIRMMGGEGLKRASQLAILNANYISRRLEEHYPVLYTGSNGLVAHECILDLRPIKDSSGISVDDVAKRLIDFGFHAPTMSFPVAGTLMIEPTESESREELDRFCDAMIKIREEIRAVENGTLDKDDNPLKNAPHTAAEIVGQWSHPYSREQAVYPVDSLIENKYWPPVGRVDNVFGDRNLVCACPSIENYQEA

SEQ ID NO: 15412 - protein, 126 aa, Vibrio cholerae
MSKSILIVDDSSTVLMSVDAMLSKLGFQVEKAKDGVEAETRLKGGLKVNLIITDINMPRMDGIELISKIRAIASYRFTPILVLTTEQEQAKRNEARAKGATGYLVKPVTGDQLKAVIQQVLPGSIS

SEQ ID NO: 15413 - protein, 485 aa, Xanthomonas axonopodis pv. citri str. 306
MATELAPPQNAQILERLGRRYDAGFITEIESDSLPPGLDEDVIRALSAKKDEPQWMTDWRLEAYRHWLKMPMPEWAKLQISPIDFQALSYYSAPKGPKYASLDEVPKELLDTYDKLGVPLHERAKLAGVAVDAVFDSVSVGTTFRKELAEKGVIFCSMSEAIKEHPEIVRQYLGSVVPVGDNYFAALNSAVFSDGSFVFIPKGVRCPMELSTYFRINAGHTGQFERTLIVCEDKAYVSYLEGCTAPMRDENQLHAAVVELVTLEDAEIKYSTVQNWYPGDEEGRGGIYNFVTKRAECRGARSKVTWTQVETGSAITWKYPSCVLIGDDSVGEFHSVALTHHRQQADTGTKMIHIGKRTKSKIVSKGISAGRGQNTYRGQVKVDRNADGARNYTQCDSLLIGKQCGAHTFPYIEVKNPGATVEHEATTSKISDDQLFYCRARGISQEDAVSLIVDGFCKQVFRELPMEFAVEAKKLLEVSLEGSVG

SEQ ID NO: 15414 - protein, 248 aa, Debaryomyces hansenii CBS767
MVKLILVRHGQSTWNEKNLFTGWVDCRLSDIGEKEAARAGELLKEANLKGDVLYTSKLSRAIQTANIALNTADQLYIPVKRSWRLNERHYGALQGKDKAATLEEYGQEKFQTWRRSFDVPPPVIADDSEFSQAGDERYRDVDPSVLPKTESLKLVIDRLLPYWQDEISKDLLEGKTVIVAAHGNSLRALVKHLDNISDDDIAGLNIPTGIPLVYELDEKLQPTKPAYYLDPEAAAAGAAAVAAQGSKK

SEQ ID NO: 15415 - protein, 497 aa, Oceanospirillum sp. MED92
MTTTIGHLIDGAMIDDASRAQDVYNPSTGEVSKQVSLACAGTVERAIASAQAAFPAWRDTPPAKRAQIMFRFKALLEANADKICEMIGEEHGKIHHDAMGELIRGIENVEYACGVPELLKGEHSRNVGPGIDSWSEFQPLGVVAGITPFNFPAMVPLWMYPMAIACGNTFILKPSERDPTSTLFIAELLHEAGLPKGVLNVVNGDKEAVDILLTDERIKAVSFVGSTPIAEYIYSTANAHGKRCQALGGAKNHAIVMPDADMDNAVNQLLGAAFGSSGERCMALSVAVAVGDEAADTLVSKLTEAMKPLKVGAFSEKTNDFGPVITRAHQEKVVGYINSAEADGAQVVVDGRAPAVAGYENGFFVGATLIDRVTSEMVSYQEEIFGPVLQVVRANSMEEAMKLINDHEYGNGTCIFTRDGEAARYFSDHIQVGMVGINVPLPVPVSYHSFGGWKRSLFGDLHAYGPDAVRFYTKRKTITQRWPSSGVREGVSFAFPS

SEQ ID NO: 15416 - protein, 637 aa, Cynara scolymus
MASSTTTPLLPHHHLQNPQQLAGSPAAHRLSRPTLLSGILVSVLVICALVAVIHNQSQQPYHDGGAKPSSSAATTTFPTASPEAGLKRFPIELKTNAEVEWQRSAYHFQPDKNYISDPDGPMYHMGWYHLFYQYNPESAIWGNITWGHSVSKDMINWFHLPFAMVPDQWYDIEGVMTGSATVLPDGQIIMLYTGNAYDLSQLQCLAYAVNSSDPLLLDWKKYEGNPILFPPPGVGYKDFRDPSTLWLGPDGEYRMVMGSKHNETIGCALIYHTTNFTHFELKEEVLHAVPHTGMWECVDLYPVSTTHTNGLDMVDNGPNVKHVLKQSGDEDRHDWYALGTYDVVNDKWYPDDPENDVGIGLRYDFGKFYASKTFYDQHKKRRVLWGYVGETDPPKYDVYKGWANILNIPRTIVLDTKTNTNLIQWPIAEVENLRSNKYNEFKDVELKPGSLIPLEIGTATQLDITATFEVDQTMLESTLEADVLFNCTTSEGSAGRGVLGPFGLVVLADAERSEQLPVYFYIAKDTDGSSKTYFCADESRSSNDVDIGKWVYGSSVPVLEGEKFNMRLLVDHSIVEGFAQGGRTVVTSRVYPAKAIYGAAKLFLFNNATGISVKASLKIWKMKEAQLDPFPLSGWSS

SEQ ID NO: 15417 - protein, 397 aa, Xylella fastidiosa Ann-1
MSASFSPHTITLIKSTVPLLAEHGTTIIEAMYHRLFEDPQIEALFNQANQKNGTQIHALAGAILAYARNIDNPGVLASAIERISQKHVGYAIHPEHYPHVATALLGAIKQVLGDVATSEVLEAWGEAYWFIANLLKDREAVIREGIMTKNGGWIHWRRFVISKRIPESETITSFMLHPEDGGPVVPHQAGQYLTFRFDAAGMPGMKRNYSISCGPNSDYYRITVKREHGTGASAFLHDQAKVGTIIECTPPVGDFFLPSVIERPIVLLSGGVGLTPMVSMMEQIAEAHPDAQVWYVHGTQNRETHAMDAHIRALVSRHKHMKATTFYTQRSEADDAEAGFITIDWLRANTPFQKADFYLCGPRPFLRTFVRDLIGAGVPAAQVHYEFFGPMDEEMAA

SEQ ID NO: 15418 - protein, 462 aa, Streptococcus agalactiae NEM316
MAVEIIMPKLGVDMQEGEILEWKKQVGDVVNEGDVLLEIMSDKTNMEIEAEDSGVLLKITHGNGDVVPVTETIGYIGAEGEEVTEASSSENTSVEENATQVTSEPEKVEETSEPSVPAATSGEKVRATPAARKLAREMSIDLALVSGTGANGRVHREDVESFKGAQPRITPLARRIAEDQGVDIAEITGSGIRGKIVKNDVLAAMSPQAAEAPVETKATPTTEEKQLPEGVEVIKMSAMRKAISKGMTNSYLTAPSFTLNYDIDMTEMMALRKKLIDPIMAKTGLKVSFTDLIGMAVVKTLMKPEHRYLNASLINDAQEIELHNFVNIGIAVGLDDGLIVPVVHNADQMSLSDFVIASKDVIKKTQEGKLKSAEMSGSTFSITNLGMFGTKTFNPIINQPNSAILGVGATIPTPTVVDGEIVARPIMAMCLTIDHRIVDGMNGAKFMVDLKNLMENPFGLLI

SEQ ID NO: 15419 - protein, 213 aa, Oryza sativa
  misc_feature (59)..(59): Xaa can be any naturally occurring amino acid
MPRRGGALYSFGTPWPEFNEGISYIDTFRCADAGATTTLIEFYSTSYKSSALLYCCALXWIKRIRDGQITVDGEVATDPDMILREGSKLVYHRLPWQEPFAPHLLDVLYEDDDMIALNKPSGLQVLPKGLFQQRTVLAQLQLKDWKMPSSFCSKRKDAQSHPVPVHRLGRGTSGLFLCFCSVHAQKPWSIDTQLSSSGCKFLFTDHQSVKLVV

SEQ ID NO: 15420 - protein, 399 aa, Bifidobacterium adolescentis
MAKEKYERTKPHVNIGTIGHVDHGKTTLTAAISKVLHEEYPDVNPEYDFNQIDSAPEEAARGITINIAHIEYQTEKRHYAHVDCPGHADFVKNMITGAAQMDGAILVVAATDGPMAQTREHVLLARQVGVPKILVALNKCDMVDDDELIELVEEEVRDLLDENGFDRDCPVIHVSAYGALHDDAPDHEKWVEQIKKLMDAVDDYIPTPVHDLDKPFLMPIEDVFTISGRGTVVTGRVERGKLPVNSNVEIVGIRPTQTTTVTSIETFHKQMDECEAGDNTGLLLRGINRDQVERGQVLAAPGSVTPHTKFEGEVYVLTKDEGGRHSPFFSNYRPQFYFRTTDVTGVITLPEGVEMVQPGDHATFGVELIQPIAMEEGLTFAVREGGHTVGSGRVTKIIE

SEQ ID NO: 15421 - protein, 112 aa, Oceanospirillum sp. MED92
MKLVTAVIKPFKLDDVREALSEIGIQGVTVTEVKGFGRQKGHTELYRGAEYVVDFLPKVKIEIAVDDDMIDQVIEAISKTANTGKIGDGKIFVTPLEQVIRIRTGESGPDAL

SEQ ID NO: 15422 - protein, 317 aa, Thermus thermophilus HB27
MNVLLMAYGTPYAPEEVEPYYTDIRRGRRPSEELLKELAERYEAIGKSPLNEITLAQAVRLQALLNLEAPPYPKRLLGPFPPRAPHGPARVYVGTKHWHPSIGEAVAAMHEDGVRRAVAIVAAPHYSLRSVAEYREKVDSALKTLPEPIDFVWVESYEAHPGLIAAYARRLEEVIWRLKNPGKAAYVFTAHSIPLSAVEKGDPYPRQVEKTAELIAKKLALPRFHVAYQSAGRTPEPWLGPDINELLRTLKEEGYEEVAVQAVGFPADHLEVFYDLDLEAQATARELGLRLLRARSLNADLDYIQVLKDLVEAAWPR

SEQ ID NO: 15423 - protein, 514 aa, Cucumis sativus
MGHPLDHSDAHHRPPSNGVIKVLPPDSDPSLPPPLPKQLPTSSAPPALGRVLARPFSDVRSFYSFRGELGRGQFGVTYLVTHKETKQDFACKSIATRKLIDQDDVEDVRREVQIMHHLTGHPHIVELKEVYEDRHYVNLIMELCAGGELFDRIIAKGHYSECTAASLCRQIVTVVHNCHSMGVMHRDLKPENFLFLSADENSPLKATDFGLSVFFKPGDVFKDLVGSAYYVAPEVLRRRYGPEAAVWSAGVILYILLSGVPPFWAENDQGIFDAVLRGHIDFSSDPWPSISSGAKDLIRKLLHSDPKERLSAIEALNHPWMKEDGEASDKPLDIAVLTRMKQFRAMNKLKKVALKVIAENLSEEEIVGLKEMFKSMDTDNSGTITFEELKAGLPKLGTKLSESEVRQLMEAADVDGNGSIDYIEFITAAMHMNRVEREDHLFKAFEYFDKDKSGYITMEELETALKKYNMGDETTIKEIIAEVDTDNDGRINYDEVVAMMRKGNQELTTTSRQK

SEQ ID NO: 15424 - protein, 488 aa, Bacillus licheniformis ATCC 14580
MSVAAESKTYFNFINGRWVKAESGGMEQSLNPADTRDIVGLVQKSSIEDVDRAVEAAKQAKKAWRKLSGAERGQFLYKAADIMEQRLDEIAECATREMGKTLPEAKGETARGIAILRYYAGEGLRKTGDVIPSTDSSAFMYTDRVPLGVVGVISPWNFPVAIPIWKMAPALIYGNTVVIKPATETAVTCLKVISCFEEAGIPSGVVNAVTGPGSSAGQRLAEHPDVNGITFTGSNQTGKIIGRTAFERGAKYQLEMGGKNPVIVADDADLDIAVEAVISGAFRSTGQKCTATSRVIVLNGVYDRFKEKLLQQTKEITIGDSLKEDVWMGPIANKQQLDNCLSYIAKGKQEGADLIFGGERLADGKYENGYYIRPAIFDNVTSGMTIAQEEIFGPVIALIKADTLEEALETANDVKFGLSASIFTQNIRRMLSFTDEIEAGLIRVNAESAGVELQAPFGGVKQSSSHSREQGEAAKEFFTAVKTVFVKP

SEQ ID NO: 15425 - protein, 471 aa, Legionella pneumophila str. Paris
MNKGMNAFVFLIAVIAGFGGFLFGFDSSVIADVKDQVISQLALTDWQWAQVVSSSLLGCILGIPISGLVADKLSRRSLLKVVALGFILGSSLCALAPGFVSILLGRFIIGICIGIASYIAPLFIAEIAPPHQRGTLVLINGLTITFGQAIAYLIGYFLHDYSLMSWRYLFWIGSLPALVLFSGMYFVPHSPRWIMMKYGADATLKTLKQIRPVGYNIQQELTEISNNLVNPAPAYIQMFKKPIVFVLLLGVGLGIFQQFSGINALMYYGPVVFESFGFSPVKNAILATFFLGLVNFIFTVVTLFYVDKLGRRFLLISGTLIASISLYLVSLLSSNSLLVNKFWILGGLSFYVMGYCISLGSLFWVLISEIYPLSVRGLAMSIATVFQWGANFVVSLLFLPIYQFSGQTVTFAMFATFCLLACWFIYYFVPETTSVSLEKLEDNLSSGKKIRDIGQPVSKNIKIAKFNLIMD

SEQ ID NO: 15426 - protein, 962 aa, Shewanella oneidensis MR-1
MTKQTLTQLEQHDLFLRRHIGPDSSQQQEMLNYVGAESLDDLTAQIVPESIRLSQELSIGDSCGEAEGIAYIRGLAKQNQVFKSYIGMGYYGTQVPNVILRNVLENPGWYTAYTPYQPEIAQGRLEAILNFQQVSMDLTGLDLASASLLDEATAAAEAMALAKRVSKAKKANIFFVADDVFPQTLDVVKTRAECFGFEVVVGPASEAVNHELFGALFQYSNRFGQITDFTDLFAELRAKNVIVTVAADIMSLVLLKSPGSMGADVVFGSAQRFGVPMGFGGPHAAFFVARDEHKRSMPGRIIGVSKDTRGNRALRMAMQTREQHIRREKANSNICTAQILLANMASFYAVFHGPQGLKTIASRINRFADILAAGLQAKGVSLVNNTWFDTISIKGLDVAAVNARALAAEMNLRFDADGIVGVSLDETTIRTDIDALFEVILGAGHGLDVAALDAQIVAQGSQSIPASLVREDAILSHPTFNRYQSETEMMRYIKRLESKDLALNYSMISLGSCTMKLNAAVEMIPVSWPEFANMHPFCPLDQAKGYTQLIEELSSWLVNVTGYDAVCIQPNSGAQGEYAGLLAIRKYHESRGEAHRNICLIPQSAHGTNPASAQLAGMQVVVTACDKQGNVDLEDLKAKAAEVAENLSCIMITYPSTHGVYEETVREICNIVHQHGGQVYLDGANMNAQVGLTSPGFIGADVSHLNLHKTFAIPHGGGGPGMGPIGVKAHLAPFVAGHVVVKPGRESDNNGAVSAAPYGSAGILPISWMYIKLLGSKGLKKSTQTALLNANYVMKKLSEHYPVLFRGRNDRVAHECIIDLRPIKEASGVTEMDIAKRLNDYGFHAPTMSFPVAGTLMIEPTESESKVELDRFIDAMVSIRAEIAKVEAGEWPADNNPLHNAPHTMADIMDSAFDSRPYSREVAVFPSAAVRTNKFWPTVNRIDDVYGDRNLFCACVPLSDYE

SEQ ID NO: 15427 - protein, 153 aa, Brassica napus
MMTTPGGRGRFKPLPTAMYAGSSGTASSWVAKTSVSASGKRIQREMAELNVDPPPECSAGPKGDNLYHWIATIIGPSGTPYEGGSFFLDMIFPSDYPFKPPKVVFKTRIYQCNVDPSGIVSVEILRDSWSPALTITKVLQAIRTIFLKPEAFK

SEQ ID NO: 15428 - protein, 364 aa, Pyrococcus horikoshii OT3
MSSAIKIAEEFYNDEYSDSVLYAELAKYEKNKEIKEEFLRLSRMEAKHAKFWHDFLVRRGVKPKKPRIKKLTFFTVKLLRKLFGPAMVVSMLEMGENSAIQKYFKFFGEFSDEITEEEFEGLRGIIIDELEHEKFFSESKKLFHVENIRDFVLGMNDGLVEILGAVTGLSAVYPNSPRLVGISGLIVGVAGALSMGIGALISVRSQRQVSEAIRERTKILFKVSPEKAKEELYEKLVEGGLPEEIAREVSEKLLEKEEAIIKLLVPEEEENEFRAALYTGIAYLFGVAFPVTPYFFASTSLRALPISVTLAGLALAIVATSISLISGISIRKKVIEMVTTGLGAAFLSYIFGHIMESLFNVSAL

SEQ ID NO: 15429 - protein, 540 aa, Bordetella parapertussis
MSNIVEIKVPDIGDFKEVEVIEVLVSAGDTIKAEQSLITVESDKASMEIPASAAGVVKSVKVKVGDKIAEGTVILEVEAAGEAAAAPKAEQAPEAAEAPKADAAKAEAPAAAGPIEVKVPDIGDFKEVEVIEVLVAEGDTIKAEQSLITVESDKASMEIPASAGGVVQSLKVKVGDKVAMGTVIAVVQGQGAAAPAAKAEAPAAAEPAASASASAPAPAQRPAPAAALQDEDLKPGQLPHASPSVRKFARELGVNLSRVTGSAAKGRITADDVRAYVKQALSAGAPAGASGGGDGAALGLLPWPKIDFTKFGPIEAKPLSRIKKISGANLHRNWVMIPHVTNNDEADITDLEALRVALNKENEKSGVKVTMLAFLIKAVVAALKKFPEFNASLDGDNLVLKQYYHIGFAADTPNGLVVPVVRDADKKGILELARETSELARKAREGKVSPAEMQGGCFSISSLGGIGGTHFTPIINAPEVAILGVSRSAHKPVWDGKQFVPRLTLPLSLSYDHRVIDGASAARFNAYLGQLLADFRRIAL

SEQ ID NO: 15430 - protein, 144 aa, Zea mays
HASASTVASLSVPVTTATFAAAAAAGGADVLIVVPRRAGAGRVVWFPAAARRGGGRLVAVRSSGPATPSEISDKVSESIKQAEETCADDQKGDAECAAAWDEVEELSATASHARDSLKETNANDPLEKYCKDNPDSEECRIYDN

SEQ ID NO: 15431 - protein, 554 aa, Flavobacteria bacterium BBFL7
MCGIVGMFQLKKDSQEQREKVLELSKKLRHRGPDWSGIYCGDKAILAHERLTIVDPQSGGQPLYSPDGKIVLAVNGEIYNHQKIRNHYKDTYEFKTKSDCEVILALYQDKGVDFMDELTGMYGFALYDSDKDVFLCARDHQGIIPLYYGTDDLGQFYVASELKALEGTCNEIAPFPPGHYYYSETGEFVKWYNREWKDYDAVKDNTSSVADLKQAMEDSVHRHLMSDVPYGVLLSGGLDSSIVSAVAKKYAAKRIESGDNKEAWWPQLHSFAIGLEGSPDLAAAQEVADHIGTVHHSVNFTIQEGLDAIKDVVYYLETYDVTTIRASTPMYLLARVIKSMGIKMVLSGEGSDEIFGGYLYFHKAPNAEEFHKETVRKLDTLHLYDNLRANKSLAAWGIEGRVPFLDKEFMDVAMRLNPEDKMCGGGKMEKHILREAFEDYLPHSVAWRQKEQFSDGVGYSWIDTLKEVVNDVVTDDMMEAAPFKFKINPPKNKEEYYYRSIFSEHFPSDTAASCVPSLKSVACSTPVALEWDEAFKNMNDPSGRAVSGVHDEGY

SEQ ID NO: 15432 - protein, 85 aa, Fragaria vesca subsp. vesca
KWKGKTAEELTESVEFFGEIVTGPFEKFTQVTMILPLTGQQYSEKVSENCVAIWKKFGIYTDAEAKAIEKFIEVFKDQTFPPGAS

SEQ ID NO: 15433 - protein, 331 aa, Geobacter metallireducens GS-15
MALRVAINGFGRIGRSVLRAAIKEKGIEFVAINDLTDAKTLAHLLKYDSVHGPFPGKVEAGNGEIIVNGKPIKILAVRNPEELPWKKEKIDVVLESTGLFTSREKAELHLKAGAKKIIISAPATNEDITIVMGVNSNLYDPKKHNIISNASCTTNCLAPVAKVLHETFGIEKGLVTTVHSYTNDQQILDLPHKDLRRARAAAMSMIPTSTGAAKAVALVLPELKGKLDGMAIRVPTPNVSVVDLVVTLSKKADADKVNAALKKASKGSLKGVLGFSEEPLVSIDFNGNPLSSIVDAGCTKVIEGNMVKVLSWYDNETGFSHRVVDLMKLIA

SEQ ID NO: 15434 - protein, 462 aa, Thermoplasma volcanium GSS1
MENKKENFSEWYNEIVTISDLSDKRYPIKGMNVWRPYGWKIMKLIDNIIRNAVDKHSFDEVNFPVLISRGMLEVEFEHIRGFENEIYWVTKGGKEKLEEELALRPTSESAMYPMFSLWVRSHADLPLKIYQIVSVYRYETKHTRSFIRIREIHFFEAHTAHESYEDAEKQMDEYRIIWTEIADALCLPFLYDQRPEWDKFPGAMYTIAFDTVMPSGRSLQIGTIHQYGTNFSKNYDIKYLKEDGTFEYVHQTTFGMSERLLAAIIGIHGDDKGLILPPAIAPIQVVIVPIPGEGVERYAKDIETTLNGIGIRCHVDNRDNYTPGYKYNDWEMRGVPLRIEVGERELKEKTVTLAARNIRGKKTVQREKLVYEVPDMLDLVKEKITEDAKKTFNSLVVSASSLDDFKKEGLIKAFWCGSKECSDKIENETEKSALGFNLNNDETGKCIVCGKAGKLAIFSRSY

SEQ ID NO: 15435 - protein, 124 aa, Spinacia oleracea
MASMSLSMTPKILLPNNPTTNFDAPKLANMVTYKLHGGRRSHGLVAVRAAPDNRISENVEKSIKEAQETCSDDPVSGECVAAWDVVEELSAAASHARDKAKDVEPLEEYCKDNPETDECRTYDN

SEQ ID NO: 15436 - protein, 340 aa, Streptococcus agalactiae A909
MKRIAVLTSGGDAPGMNAAIRAVVRKAISEGMEVYGINQGYYGMVTGDIFPLDANSVGDTINRGGTFLRSARYPEFAELEGQLKGIEQLKKHGIEGVVVIGGDGSYHGAMRLTEHGFPAVGLPGTIDNDIVGTDYTIGFDTAVATAVENLDRLRDTSASHNRTFVVEVMGRNAGDIALWSGIAAGADQIIVPEEEFNIDEVVSNVRAGYAAGKHHQIIVLAEGVMSGDEFAKTMKAAGDDSDLRVTNLGHLLRGGSPTARDRVLASRMGAYAVQLLKEGRGGLAVGVHNEEMVESPILGLAEEGALFSLTDEGKIVVNNPHKADLRLAALNRDLANQSSK

SEQ ID NO: 15437 - protein, 392 aa, Debaryomyces hansenii CBS767
MARTRSKGIASPRVPTPTKSKKNGAIANSPAASPSIKKSKSIPKTKSNEKSKVKQLQNEEAQGSIVSKNVADKAISELSKFLDREAEKEQSDKTLLFDNDEETKNLFLQITTKKYYSTKPNFKPKLIKLSNAIHNPESRSLKTCLIIRDQLITDPEQLEIIENASLPTLQQIVPLSALKTEYKHYEKRRQLYSEYDLFLVDDALLNSMPTLLGKVFYGNGNTKIPLPIRVTSTSNNKEFSITTIGNQLNKCLNSTFFLPPVGVNISVKIGSISSDFKKNQLVENLEDVLSHFDKDSLRSVMIKTDLSPSLPLYYAEKLYNDEDVLEENAKASKNTDDEQEVRLSTFEKGLLELGDADEVAKIIGKKLKKQQQQEQQKLNKVTKPKKTKSISK

SEQ ID NO: 15438 - protein, 333 aa, Pseudomonas syringae pv. syringae B728a
MTLRIAINGFGRIGRNVLRALYTQGYRQDLQVVAINDLGDSEMNAHLLRFDTVHGPFSGTVECDKDSLTVNGDRISVSAIRNPAELPWKAQDIDVVFECTGLFTSRDKAAAHLTAGARKVIISAPASGADATIVYGVNHDTLRQSHQIISSASCTTNCLAPVAQILHRELGIENGLMTTIHAYTNDQNLIDVYHTDPYRARSATQSMIPSKTGAAEAVGLVLPELAGKLTGMAVRVPVINVSLVDLTVTLKRETTADEVNALMKEASQHSKVLGYNSLPLVSHDFNHNPLSSIFDANHTKVSGKLLKVLSWYDNEWAFSNRMLDNCLALHNAQ

SEQ ID NO: 15439 - protein, 225 aa, Bradyrhizobium japonicum USDA 110
MSAGFRVLPRKRKVGEDVVAGFARLPVANVSDSMSRLTAAGARLRPMHQGGGLAGPALTVKAPPGDNLMVHKAIALAEPGDIIVVDAGGDLTNAIIGEMMLMQMAKRGVAGVVINGAIRDAGHIRGQELPVFAAGVTHRGPYKNGPGEINVPIAIDGMVIEPGDLIIGDDDGLLCVPFDQTGAVFKAATAKFEAEQKQIVNIEAGTHDASWVDRQLRELKCENID

SEQ ID NO: 15440 - protein, 418 aa, Oceanospirillum sp. MED92
MEELLNSTAADVTQLKYALDTFYFLVCGALVMWMAAGFAMLEAGLVRAKNTTEILTKNIALYAISCIMYLVCGYAIMYGGDYLLSGITGDGFTGAEEPATYAPSADFFFQVVFVATAMSIVSGAVAERMKLWAFLAFAVVMTGIIYPMEGSWTWGGNSVFGMYTLGDLGFSDFAGSGIVHMAGAAAALAGVLVLGARKGKYSKDGAVNAIPGANLPLATLGTFVLWLGWFGFNGGSVLATSDVENSNAVAVVFMNTNAAAAGGVVAALIVARMLFGKADLTMALNGALAGLVAITAEPSTPSALQATLFGAMGGALVVFSILTLDKLKIDDPVGAISVHGVVGLLGLLLVPVTNDGSSFSGQIIGALTIFVWVFGTSLVVWLALKAVMGIRVSEEEEYEGVDISECGMEAYPEFTSAK

SEQ ID NO: 15441 - protein, 376 aa, Pichia angusta
MDGEDVAALVIDNGSGMCKAGFAGDDAPRAVFPSIVGRPRHQGIMVGMGQKDSYVGDKAQSKRGILTLRYPIEHGIVTNWDNLEKIWHHTFYNELRVAPEEHPVLLTEAPMNPKSNREKMTQILFETFNVPAFYVSIQAVLSLYSSGRTTGIVLDSGDGVTHVVPIYAGFSLPHAILRIDLAGRDLTDYLMKILSERGYTFSTTAEREIVRDIKEKLCYVALDFDQELQTSSQSSAIEKSYELPDGQVITIGNERFRAPEVLFHPGPLGLEAAGIDQTTYNSIIKCDVDVRKELYGNIVMSGGTTMFPGIAERMQKEITALAPSSMKVKIIAPPERKYSVWIGGSILASLSTFQQMWISKQEYDESGPSIVHHKCF

SEQ ID NO: 15442 - protein, 349 aa, Zymomonas mobilis
MRIALLAGDGIGPEITAEAVKILKAVVGQEIEFDEALIGGAAWKVTGSPLPEETLKLCKNSDAILFGSVGDPECDHLERALRPEQAILGLRKELDLFANLRPARLFPELQAESPLKENIVTGTDLMIVRELTGDVYFGTPRGQRKDDQNRREGFDTMRYNEDEVKRIARIGFETARSRSGNLCSIDKSNVLETSQLWRTVVLEIAQEYPDVELSHMYVDNAAMQLVRAPDQFDVIVTGNLFGDILSDLASACVGSIGLLPSASLNSEGKGLYEPIHGSAPDIAGLGKANPLATILSGAMMLRYSLKREADADRIEKAVSTALEKGARTADLGGKMTTSEMGNAVLAALN

SEQ ID NO: 15443 - protein, 112 aa, Oceanospirillum sp. MED92
MKMVSAVIKPFKLDDVREALSEIGVQGITVTEVKGFGRQKGHTELYRGAEYVVDFLPKVRVDAAVASDIVDQVVEAISSAAQTGKIGDGKIFVSEIEQVVRIRTGETGTEAL

SEQ ID NO: 15444 - protein, 124 aa, Aegilops comosa
  misc_feature (2)..(2): Xaa can be any naturally occurring amino acid
DXEETLKRLVFDMKKSPAEVFDALKNQTVDLVLTAHPTQSVRRSLLQKHSRIRNCLVQLYSKDITPDDKQELDEAPQREIQAAFRTDEIRRTQPTPQDEMRAGMSYFHETIWKGVPKFLRRVDT

SEQ ID NO: 15445 - protein, 132 aa, Triticum aestivum
MATMTGVSLSSPRVFFNASPSPQNTYAVKFAVPLSQGMRLGSVRLGRVMRIRPVRAAPERISEKVEESIKNAQEACAGDPTSGECVAAWDEVEELSAAASHAKYKQKEKDSDPLETYCKDNPETIECKTFED

SEQ ID NO: 15446 - protein, 95 aa, Agropyron cristatum
DAFKNQTVDLVLTAHPTQSVRRSLLQKHSRIRNCLVQLYSKDITPDDKQELDEALQREIQAAFRTDEIRRTQPTPQDEMRAGMSYFHETIWKGVP

SEQ ID NO: 15447 - protein, 455 aa, Campylobacter lari RM2100
MSMAKQYINETLEKIQTISPRQPIFFQAATEVLNSLEPLLESNKTYQDHAILERIVMPEKTTIFRVVYINDAGKAQTHFGYRVQFNSSLGPYKGGLRFHPSVNLDVLKFLGFEQIFKNSLTGLMIGGAKGGANFDPKGKSEAEIMRFCQAFMAELSKIIGANTDVPAGDIGVGAREIGYMFGAYKKISSNFDGTLTGKKIPWGGSLARTEATGYGCVYFTQEMLAKYNNALEGKECAVSGSGNVAIYTIEKLHQLGAKAITISDSDGFVYDKDGIDLDLLKEIKEVKRARVSDYAALKKGAIFTPKSAYKQGCNGVWSIPCDLAFPSATQNELNLEDIKTLYHNGCRMVAEGANMPSTLEAIDFMLNQKDFLFAPAKAANAGGVATSQLEMQQNASMCQWSFEEVDAKLHKIMKNIFENSYECAKAYNHEGNLVVGSNIAGFKKVADAMIDHGYI

SEQ ID NO: 15448 - protein, 450 aa, Streptococcus agalactiae A909
MKVVKFGGSSLASSQQLYKVLNIIKSDYTRRFVVVSAPGKRYEEDLKMTDALIQYYQNYINGKDIVKDQTWIINRYQEIISDLSLGSTIAEEITRSIEQLASLPIENNQFLYDCFLAAGEDNNAKLVATFFNQNDIPARYVHPNEAGIIVTKEPCNARIIPGSYDKIENLCLYNEVLVIPGFFGVTEDNQICTFSRGGSDITGSLIAAGIKADLYENFTDVDGIFAAHPGVVKNPHAIPELTYKEMRELAYAGFSVLHDEALLPAYRGRIPLVIKNTNNPQQPGTKIVLKHTRSNIAVTGIASDSRFASINVSKYLMNREVGFGRKVLQILEDLNISFEHMPTGIDDLSIVLREKELTPIKEQEILNYLTRKLEVDYVDIQHNLSTIVIVGENMKSQIGVTATATQALSREKINITMISQGSSEVSIMFVINSKDEKRAIKALYETFFQK

SEQ ID NO: 15449 - protein, 673 aa, Arabidopsis thaliana
MSTNSASDGDFGTNSVPAEMAEAQYVRAKTSVWWDIENCQVPNGLDAHGIAQNITSALQKMNYCGPVSISAYGDTNRIPLTIQHALNSTGIALNHVPAGVKDASDKKILVDMLFWALDNPAPANFMLISGDRDFSNALHGLRMRRYNVLLAQPLKASVPLVHAAKTVWLWTSLSAGGIPLTRAESLQLVANQTTPKPGSEIPSSQPLDSNSDSRRVFDNKSKVKYVPKPSNHQPNNNYRQQQQNTQGKQFKKAPHEFFGTSEPSVSTSRPPPPNLPSSNVNTFPGNVMTNPQNQNQYTYPPRPGPFPPRQPYPNTDPSWNNGNSIPNHAQNYYPNAARPGAATMRPPYGNVFRPYRPENLNPPVGNGFRPMQHPRNDGPRFPSPPLLTPLDISNLSVSQYPSQTQNRPNFNPQVRQEFRPKMESSYTHNGPNKSYIPRCSSAPVTQSTTTTAHTYPSSPGVPPSQPPMVTGSGSSNDRWGTQECPPPSEYVQGLIGVILHALHILKTEKVMPTEPNISDCIQYGDPKHHGTDVKKALESALEHHMIMMTNVGKLKLYIGKNEALWNCVNPLGANAKQYPKETWDRIQQFLTSSSGRVEFTATTCRYEAAQVLKKECLKEFTLGDILQILNITATTKKWITHHQTGWKPITISLAAETTNETATEADPGIQTVA

SEQ ID NO: 15450 - protein, 115 aa, Triticum aestivum
MARSAVAQVVLVAVVAAMLLAVTEAAVSCGQVSSALSPCISYARGNGASPSAACCSGVRSLASSARSTADKQAACKCIKSAAAGLNAGKAAGIPTKCGVSIPYAISSSVDCSKIR

SEQ ID NO: 15451 - protein, 462 aa, Cytophaga hutchinsonii
METAVLDTIEAAVPAIDSIKAVAAITVDTLASKSSLAATDAAVSQLGLTANNIWMMLCTALVFIMNLGFATVESGLARSKNTTNILFKNTITPAIGIIIFCLWGFNLMYPGGAYEGGFFGFGGFGLTAPAAESGGLDLTYAGGYTYWTDFLFQAMFAATAATIVSGAVAERIKLTSYIIFTCIIIGVIYPVVGMWNWGGGWLKSLGFYDFAGSTMVHSLGGWAALAGVIVLGPRIGKYVDGKINPIPGHSLPLATIGVFLLWLGWFGFNGGSVLSADPALTSLVLVTTSLAAAAGAIGALLASVIYLKTLDLSMVLNGILGGLVGITAGADLMSPNDAILIGLISGAAVVFAVIFFDKIKVDDPVGATSVHLVCGILGTLFVGIFGDKGFGGSAEGAGMSQLIKQLIGVGAAASLVFPASYVIFTIISKTVGLRVAAKEEIEGLDIAEHGMKAYNIDVDKEY

SEQ ID NO: 15452 - protein, 112 aa, Cytophaga hutchinsonii
MKKIEAVIRTSKFLELKEALNKMGIQFFTYADVKGVGHQATEKAVYRGVQYDLGYIARTKLDIIVSEKVEEVIKCIVDTCKTGELGDGKIFVSNIEECVRIRTGERGVPALQ

SEQ ID NO: 15453 - protein, 623 aa, Gibberella zeae PH-1
MEKVNNFHAIMKMGNVRAISLTFDRNYMSTLFLKVANNCYPTPTMDPSYQSSETLFEGLPIDTLGNGLSASAVKSGIDRLLEHDIEPEHNLGRIHDRCVETLGAVWGSSCNDKPTGCAASGSSEAILLGILAMKRKWETENGGMASSNGSALNLITGSHAHVAVTNAAKANDIEIRSVPVRPEGNYSFDPSKMQGLLDRFTRHFDPIEDTSTVLDNYEQSHGHSIPIHVDAASCDFVAPFNGGKCSRWDFSVPRVISINASGHKFGLTAAALGWIIWRDQRFLSSDMLHESPYLSGHHGLPTLRYSQPSSSVLIQYYYLAHLGRKGFENIIQALLQRSSALSRTLEGTGIFACISESHRTAANTLPVVVFRVNSAVREQRPKFNEQWISDQLFHKGYSVPCSKLPIDGEDIEVLRVVIVLKVILVDKAVITRLAYDHVEIAIEDETGHLHIRKYEQYYKTIGVELRQNQHPPSTHYCERLQSPDHLRVIMSNRHVPTRRLKSGVLFSAPDDILRVPSDESTRRPKRKKFNNIRKMIPGVRKKGVGEEMALDASPALGHQESIAMFAKFVDPSSYGSSNHPNNPPVSSQKKETLCLSVLKVSLTATVEGTLAHMVLKQSFYNPL

SEQ ID NO: 15454 - protein, 408 aa, Pseudomonas sp. KKS102
MSQEALKAPVVVLGAGLASVSFVAELRQAGYQGLITVVGDEAERPYDRPPLSKDFMAHGDAEKIRLDCKRAPEVEWLLGVTAQSFDPQAHTVALSDGRTLPYGTLVLATGAAPRALPTLQGATMPVHTLRTLEDARRIQAGLRPQSRLLIVGGGVIGLELAATARTAGVHVSLVETQPRLMSRAAPATLADFVARYHAAQGVDLRFERSVTGSVDGVVLLDDGTRIAADMVVVGIGVLANDALARAAGLACDDGIFVDAYGRTTCPDVYALGDVTRQRNPLSGRFERIETWSNAQNQGIAVARHLVDPTAPGYAELPWYWSDQGALRIQVAGLASGDEEIVRGEVSLDAPKFTLIELQKGRIVGATCVNNARDFAPLRRLLAVGAKPDRAALADPATDLRKLAAAVAA

SEQ ID NO: 15455 - protein, 488 aa, Photorhabdus luminescens
MTIINHWINGKNVSSKTYFETTNPATGEVLAEVAAGGQEEIDQAVAAAKEAFPKWADLPMKERARLMRRLGELIDENVPEIAAMETKDTGLPIHQTQNVLIPRASHNFNFFAEICQQMNGHTYPVDDKMLNYTLVQPVGVCALISPWNVPFMTATWKVAPCLALGNTAVLKMSELSPLTANRLGELALEAGIPAGVLNVVQGYGATAGDALVKHHDVRAVSFTGGTVTGRQIMKNAGLKKYSMELGGKSPVLIFEDADIERALDASLFTIFSINGERCTAGSRIFIQQSIYPEFIKRFAERANRLRVGDPQDPNTQIGALISKPHWEKVSGYIRLGIEEGATLLAGGPDKPIDLPAHLKEGNFLRPTVLADVDNRMRVAQEEIFGPVACLLPFKDEAEGLRLANDVEYGLASYIWTQDVSKVLRLARNIEAGMVFVNTQNVRDLRQPFGGVKASGTGREGGEYSFEVFAEMKNVCISMGDHHIPRWGI

SEQ ID NO: 15456 - protein, 154 aa, Bacteroides thetaiotaomicron VPI-5482
MKKVLAMVAFVMLSVIVYAFNDKPDANQGKKEVTGNGEVVVMDKEMFLKDVFDYEKSKEWKYKGDKPAIIDLYADWCGPCRQTAPIMKELAKEYAGKITIYKVNVDKQKELAALFNATSIPLFVFIPMKGDPQLFRGAADKATYKKAIDEFLLK

SEQ ID NO: 15457 - protein, 99 aa, Bacteroides thetaiotaomicron VPI-5482
MEKFEDLIQSPIPVLVDFFAEWCGPCKAMKPVLEELKTMVGDKARIVKIDVDQHEDLATKYRIQAVPTFILFKNGEAVWRHSGVIHSSELKGIIEQNYI

SEQ ID NO: 15458 - protein, 338 aa, Agaricus bisporus
MVKVGINGFGRIGRIVLRNALQFQDIEVVAVNDPFIDLEYMAYMFKYDSVHGRFKGTVEVKNGSFVVDGRPMKVFAERDPAAIPWGSVGADYVVESTGVFTTIDKASAHLKGGAKKVVISAPSADAPMYVCGVNLDKYNPKDTIISNASCTTNCLATLAKVIHDNFGIVEGLMTTVHATTATQKTVDGPSHKDWRGGRGVGNNIIPSSTGAAKAVGKVIPSLNGKLTGLSMRVPTQDVSVVDLVVRLEKPASYEQIKEVMRKAAEGEYKGIIAYTDEDVVSTDFISDNNSCVFDAKAGIQLSPNFVKLIAWYDNEWGYSRRVCNLLQYVAKEDAKAGI

SEQ ID NO: 15459 - protein, 112 aa, Wigglesworthia glossinidia endosymbiont of Glossina brevipalpis
MNNKEIISVNDEDFEINVLKNKKPVLVDFWAQWCMPCKSMIPILKKISEKYVNKLEVFKINIEKNSIYQEKYLVKSIPSFFLFFKEKIIDKKIGIVSQKQLEIFIDENLNRL

SEQ ID NO: 15460 - protein, 231 aa, Solibacter usitatus Ellin6076
MHIPHVEKHFQASDTVRDVVIGMSDGLTVPFALAAGLTGTAVATSKLVVIAGLAEIAAGSIAMGLGGYLAARTDRDHYESERQRELRETVELPQKERDEVAEVFRDFGMAEADIKPVVAAISADQKRWVDFMMRFELGFEEPDPARARNSAATIAISYVVGGMVPLSSYMVTQDLHTALLSSVVVTLIALFIFGYVKGRLTGISPFRGGVQTVVIGGLASAAAFGLARWIS

SEQ ID NO: 15461 - protein, 490 aa, Photorhabdus luminescens
MTNDVNTELLRQQAYINGQWVDADNQATFKVTNPANGQVIAHVSNMGAAETERAIAAAQQALPAWRAMTAKQRSQILQRWFQLMMANQQALAELLSREQGKSQAEAMGEIAYGASFIEWFAEEGKRTYGETIPSPMPGRRIVTIKQPIGVVAAITPWNFPNAMITRKVGPALAAGCTVILKPASETPLSALALAALAEQAGIPAGVFNVVTGVDAKTIGGVLTQSPIVRKLSFTGSTRIGKLLMAQSADTVKKLSLELGGNAPFIVFDDANIDAAVQGALIAKFRNSGQTCVCANRILVQETIYDAFAERLAQAVNKLQVGPASDAKSQQGPLINQAAVDKVEEHINDAVSRGARILAGGKPHALGGLFFEPTVLADVNESMLISQEETFGPVAPLFKFRDEAEAIHLANDTEFGLAAYFYSRDIGRIYRVAEALESGMVGINEGLISNEVAPFGGIKQSGLGREGSRYGIEDYLEVKYLCFGGIEDTGV

SEQ ID NO: 15462 - protein, 466 aa, Lentinula edodes
MLGRVLKSAARSQRGLRSFATTTNLGPFTEISTLSNGLTVATESQPHAQTATVGVWIDAGSRAETDKTNGTAHELEHMAFKGTGRRSQHALELEVENIGAHLNAYTSREQTVYYAKSFSKDVPVAVDIISDILQNSKLESGAIERERDVILREQQEVDKQLEEVVFEHLHAVAFQGQPLGRTILGPKNNILSIQRDDLASYIQTNYTADRMVLVGTGGVDHQSLVKLAEKHFSSLPVSANPLALGRLSSERKPTFVGSEARIRDDELPTAHVAIAVEGVGWSSPDYFPMMVMQSIFGNWDRSLGASSLLSSRLSHIISSNSLANSFMSFSTSYSDTGLWGIYLVSENLMNLDDTLHFTLKEWTRMSIAPTEGEVERAKSQLKAGLLLSLDGTTAVAEDIGRQIVTSGKRMTPAQIENAVDAVSVDDIKRVAQKYLWDKDFALAAFGNIDGLKDYGRIRNDMSSMLY

SEQ ID NO: 15463 - protein, 539 aa, Glycine max
MDSSSSSPNNNNNHHASTTKTNGFLIHPKLGFEPARSRSRLAMASPANTSEPKIVTGTAGYILEDVPHFTDYIPNLPTYPNPLQDNPAYSVVKQYFVHVDDSVPQKVVVHKDGARGVHFRRAGPRQKVYFEADEVQAAIVTCGGLCPGLNTVIRELVCGLHHMYGVKKVLGINGGYRGFYARNTITLTPKSVNDIHKRGGTVLGTSRGGHDTKKIVDSIQDRGINQVYIIGGDGTQKGASAIFEEVRKRGLKVSVVGIPKTIDNDIPVIDKSFGFDTAVEEAQRAINAAHVEAESVENGIGVVKLMGRNSGFIAMYATLASRDVDCCLIPESPFYLEGPGGLYEYIEKRLKENGHMVIVIAEGAGQELVSESVQSMSKQDASGNKLFQDVGLWISQKIRDHFAAQKTLPITLKYIDPTYMIRAIPSNASDNVYCTLLAQSAVHGAMAGYTGYTSGLVNGRQTYIPFYRITERQNHVVITDRMWARLLSSTNQPSFLDAKGDNEEKEEEEALNQLPDGHCAKDTSLASKEINSSIYPTAC

SEQ ID NO: 15464 - protein, 180 aa, Glycine max
KHHLNACVRSHRFSLWSKNLARTLQFKVRVDIQRTKLKLTFELQRSPTEEELVERIGISLERYHEVMKASKPILSLHSRHITTQEEYINGITDVDGVNGDNRRQLAVLRLALDDVLDSLKPKESLVIRQRYGLDGKGDRTLGEIAGNLNISREIVRKHEVKALMKLKHPARLDYLRRYVV

SEQ ID NO: 15465 - protein, 117 aa, Zea mays
MPVPLAPYPAPPAPFTPPNGAQSQLVCTGCRNLLMYPAGATSVCCAVCSTVTAVPAPGTEMAQLVCGGCHTLLMYIRGATSVQCSCCHTVNLAMEANQVAHVNCGNCRMLLMYQYGL

SEQ ID NO: 15466 - protein, 368 aa, Oryza sativa (japonica cultivar-group)
MARKKIREYDSKRLLKEHLKRLAGIDLQILSAQVTQSTDFTELVNQQPWLSTMKLVVKPDMLFGKRGKSGLVALNLDIAQVKEFVKERLGVEVEMGGCKAPITTFIVEPFVPHDQEYYLSIVSERLGSTISFSECGGIEIEENWDKVKTIFLPTEKPMTPDACAPLIATLPLEARGKIGDFIKGVFAVFQDLDFSFLEMNPFTIVNGEPYPLDMRGELDDTAAFKNFKKWGNIEFPLPFGRVLSSTEGFIHDLDEKTSASLKFTVLNPKGRIWTMVAGGGASVIYADTVGDLGYASELGNYAEYSGAPNEEEVLQYARVVLDVSTQDITITTFLSTPLLCQFVNDNIQCSVRLLILMAARELFSLEGV

SEQ ID NO: 15467 - protein, 323 aa, Streptomyces coelicolor A3(2)
MDTRPLVSTPFTASSTADEVLEDVDLTGVRAIVTGASSGLGIETARALTAAGAEVTLAVRNTAAGASAAETIARSTGAAPPRVVRLDLADRAGVTRFVDAWDGPLHLLVNNAGVVTGGLERTPEGWELHFATNHLGHFALATGLHQALARGAAERGGARIVSVSSTAHMRSGIDFDDLHFERRSHDPQTAYAQSKTANSLFAVEATRRWGSAGIVANAVNPGGVATGLQRNFTPEQKASLDAAEAAGVFTYKTVEQGAATSVVAAVAPEFAHSGGHYLDDGQEAYTVPNDADLAQHPHGVKEWALDPAAAKRLWTVSTDLLRS

SEQ ID NO: 15468 - protein, 356 aa, Pyrococcus horikoshii OT3
MRLEKFIHLLGERGFDGALISPGTNLYYLTGLRLHEVGERLAILAVSAEGDYRFLAPSLYENVVNNFPATFWHDGENPYAKLREILEELGISKGRILIEDTMRADWLIGIMKLGKFTFQPLSSLIKELRMIKDKEEVKMMEHASRIADKVFEEILTWDLIGMKERELALKIELLIRELSDGIAFEPIVASGENAANPHHEPGERKIRKGDIIILDYGARWKGYCSDITRTIGLGELDERLVKIYEVVKDAQESAFKAVREGIKAKDVDSRAREVISKAGYGEYFIHRTGHGLGLDVHEEPYIGPDGEVILKNGMTFTIEPGIYVPGLGGVRIEDDIVVDEGKGRRLTKAERELIIL

SEQ ID NO: 15469 - protein, 536 aa, Solibacter usitatus Ellin6076
MKIFTFDTTLRDGTQGESISFSVDDKLIIAQKLDDLGIDYIEGGWPGSNPKDKDFFARSGELNLKHSKLTAFGSTRFAKNPVEEDRNVKALVEAGTPVVSIFGKSWDLHVRRALGISLEENLVLISDTVGYIHGHGREVVYDAEHFFDGYTADPDYALRTLEAAHKAGASVLCLCDTNGGTVTGRLVEIVAEVRKRFDGIIGIHTHNDGDLAVANTIAAVEAGATHVQGCMNGYGERCGNANLASVIANLELKLGHTTVGPEKLAGLSSTCRFIAELANLPLRNDQPFVGKSAFAHKGGVHVSAVLKDSATYEHIKPEAVGNRQRVLVSDLSGRGNIIYKLKQHGLADRLEEDTRRVLLERIKQMEYEGYELEAAEGTFELLVREALHPGMHFFDVESYEVSTRAAGNAASHSTATVTLKSQDGVHSATETGHGPFDALQVCLRKCLSKLYPQIVDVRLTDYKVRVLDTNKGTAANVRVLIEWSDHRRSWSTVGVSDNVIEASWKALVDAIRLELMRLTEKDDTIEKAVEDYCWGV

SEQ ID NO: 15470 - protein, 262 aa, Polaromonas sp. JS666
MSASNSNPVILTCEGGMATMTFNRPSAMNALDVPTASAFLAACQSLADDPQLRVIVIRGEGRAFGVGGDLAALQHDSAATAQDLIGRLHEAVVLLAGLNAPVIASLHGVVAGGSLSLSMACDLVIAADSTRFNLAYANVGASCDVSGSWSLPRLVGLRNAMQIALLSETFDAAEALRLGLVNRVVPADKLQEETVALARRLAAGPTLAYGRMKRLMRQSFETDLPTQLDAERENFKASTQTEDFKEAAKAFFAKRPAVFKGH

SEQ ID NO: 15471 - protein, 281 aa, Flaveria trinervia
MKETLNNDYHITEEIGRGRFGTVYRCYSTVSGDSFACKTIDKRLLNDHTDRECLQKEPKILHILGGNPNIVQIYRLYEDDNYVHMIIDLCDSPDLFDRISNRNGVFSETEAATVFAPLMSAISYCHRLGIAHRDLKPDNVLFDSRGGLKLADFGSAEWFAMNDRRTMSGIVGTPYYVAPEVLSGMEYNEKVDVWSAGVILYIMLAGVPPFHGDSPADTFEAVLRGNLRFPTRLFRSVSPEAKDLLRKMLCKDVSRRFSADQVLRHPWVVNGGKTRSMADLT

SEQ ID NO: 15472 - protein, 458 aa, Yarrowia lipolytica CLIB122
MNYPAEPEFQQAYDELYNSIHDSTLFDKHPEFEKVIPVVSVPERIIQFRVVWEDDQGKLQVNRGYRVQFNSALGPYKGGLRFHPSVNLSILKFLGYEQIFKNALTGLNIGGGKGGADFDPKGKSDAEIRRFCYAFMGELHRHIGADTDVPAGDIGVGGREVGFLFGAYKKYKNTWEGVLTGKGLTWGGSLIRPEATGFGLVYYVEKMIEYATSGKESFKGKRVAISGSGNVAQYAALKVIELGGNVVSMSDSKGALVLVSDFTEGFTPAEIEQIADIKLQHKELASLYPSATLPETKFKYIEDARPWCHVGKVDVALPCATQNEVSGEEAKSLVAAGCKFIAEGSNMGCESDAIEVFEAERMARPNGIWYGPGKAANAGGVAVSGLEMAQNSQRISWTKEEVDQKLKDIMVDCFNTCVETASTYSSEKVDGLPSLVKGANIAGFLKVSAAMKDHGDFW

SEQ ID NO: 15473 - protein, 636 aa, Oryza sativa
MDGCDCIEPLWPTDELLIKYQYISDFFIALAYFSIPLELIYFVKKSSFFPYRWVLIQFGAFIVLCGATHLINLWTFTTHTKTVAMVMTVAKVSTAVVSCATALMLVHIIPDLLSVKTRELFLKNKAEQLDREMGLIRTQEETGRHVRMLTHEIRSTLDRHTILKTTLVELGGTLGLEECALWMPSRSGSSLQLSHTLRHQITVGSTVSINLPVVNQVFSSNRAIIIPHTSPLARIRPLAGRYVPPEVAAVRVPLLHLSNFQINDWPELSAKSYAIMVLMLPSDSARKWHVHELELVEVVADQVAVALSHAAILEESMRARDLLMEQNVALDLARREAEMAIRARNDFLAVMNHEMRTPMNAIIALSSLLLETELTPEQRLMVETVLKSSNLLATLINDVLDLSKLEDGSLELEIKAFNLHAVFKEVMSFIKPIAAIKRLSVSVMLAPDLPLCAIGDEKRLMQTILNISGNAVKFTKEGHITLVASVVKADSLREFRTPDFHPTASDDNFYLKVQIKDTGCGISPQDLPQVFTKFPQSQPGGNRGYSGSGLGLAICKRFVTLMGGHIWLDSEGTGRGCTVTFVIQLGICDNTNAYQQKLIPLVWPSSGDADFVGPVPNAPNEEKGQASLKSRYQRSI

SEQ ID NO: 15474 - protein, 116 aa, Haynaldia villosa
DIEETLKRLVFDMKKSPAEVFDALKNQTVDLVLTAHPTQSVRRSLLQKHSRIRNCLVQLYSKDITPDDKQELDEALQREIQAAFRTDEIRRTQPTPQDEMRAGMSYFHETIWKGVP

SEQ ID NO: 15475 - protein, 586 aa, Vicia faba
MCGILAVLGCSDDSQAKRVRILELSRRLKHRGPDWSGLHQHGDNYLAHQRLAIVDPASGDQPLFNEDKSIIVTVNGEIYNHEELRKQLPNHTFRTQCDCDVIAHLYEEYGENFVDLLDGIFSFVLLDTRDNSFIVARDAIGVTSLYIGWGLDGSVWIASELKGLNDECEHFEVFPPGHLYSSKEREFRRWYNPPWFNEAIIPSTPYDPLVLRTAFEKAVIKRLMTDVPFGVLLSGGLDSSLVASVTARYLADTKAAKQWGAKLHSFCVGLKGAPDLKAGKEVADFLGTVHHEFQFTIQDGIDAIEDVIYHTETYDVTTIRAATPMFLMSRKIKSSGVKMLISGEGSDEIFGGYLYFHKAPNKEEFHQETCRKIKALHRYDCLRANKSTYAWGLEARVPFLDKDFIKAAMDIDPEFKMIKHDEGRIEKWILRKAFDDEENPYLPKHILYRQKEQFSDGVGYGWIDGIKDHAAKHVTDKMMFNASHIFPFNTPNTKEAYYYRMIFERFFPQNSARLTVPGGPSVACSTEKAIEWDASWSGNLDPSGRAALGVHVSAYENQINPITKGVEPEKIIPKIGVSPLGVAIQT

SEQ ID NO: 15476 - protein, 378 aa, Magnetospirillum magnetotacticum MS-1
LVPPVVIVVSTPLMFHDLAAQIAGVVPRGTNPGELDLDAVAPAKDRRRMDDFIVYGLAAASEAVEDSGWMPTDSESLERTGVMIGSGIGGLPNIADGAITLEKSGPRRISPFFIPAALINLVSGHVSIRYGFKGPNHAVVTACATGAHAIGDAARLIMFDDADVMVAGGTEAAVHRLGIAGFAAAKALCTSYNDRPTEASRPWDKDRDGFVMGEGAGIVVLEELEHAKKRGAKIYGEVIGYGMSGDAHHITAPAEDGNGAVRAMRAAIKRAGVSLDEIDYVNAHGTATMGDTIELGAVKQVFGDHAYKLSMSSTKSAIGHLLGAAGAVEAIYSLLAIRDQVAPPTLNLHNPDEGCDIDLVPLKAKQRKIKVALSNSFG

SEQ ID NO: 15477 - protein, 342 aa, Campylobacter upsaliensis RM3195
MNFINIEQAIKDLKEGKMLVMVDAEDRENEGDIIFPAQFSTKEKVNFAIKEARGVLCVALDETLAKKFELPLMVPKNTSSHETAFTITVDAKKATTGVSAYERDMTIKIFADDTACANDFIRPGHINPLIAKKGGVLERTGHTEGSVDLCHLAGLKGACVICEIVKDNGDMARREDLLEFCEKFKLNMITVSDLIEYRLKNESLITLKKQQASFLAGFKAQKFIFEDHNQIQHIAFCFNQPRKSENIKFHISGSDFELLTSNKFSQLLEQIQFLSQNGGIIIFMQGEKSNAAQFKNYGIGAQILRFFKVEEVHLMSQNCDKDFIALKGFGLDIKTCQFKNLL

SEQ ID NO: 15478 - protein, 247 aa, Sulfolobus solfataricus P2
MEKEKGEELVHYIHEADIFRTKVFGIQDGLIGVGAIALGAAGFSHDAIAVLVAGLIATIGQAFSMGIGEYISTRVRMQVIQNEIRKEKYQLKKFPEMEKQELVNFYMKKGFTKEVSEKIADYLLKNEDVALEEMLMHELKVFPEEFERPVKLGFLMSFYLIFGGLIPVFPFAISTYLKQFGFNFALITSILLVILTLGIFGILGTKYTGLSKPRGALEQIGTGLIALMGSYLAGVILAHFIPISYLP

SEQ ID NO: 15479 - protein, 124 aa, Elymus canadensis
DIEETLKRLVFDMKKSPAEVFDALKNQTVDLVLTAHPTQSVRRSLLQKHSRIRNCLVQLCSKDITPDDKQELDEALQREIQAAFRTDEIRRTQPTPQDEMRAGMSYFHETIWKGVPKFLRRVDT

SEQ ID NO: 15480 - protein, 447 aa, Zea mays
LASASSRPASGGATILPSPAGSPRTPPPLQIDHDDRENLSLLRFEALWEAEFAQDSLLVFSTGRTPVSYKGLRRDKPLVTPDVTIMSVGTVIAYGEEMVRDVGWEERLDSDWDRAVVVEETARLPQLTRMQPERNQGPHKVSFFVDKQGAQEVMDYLPKKLERRGVDVKIVYSSGNALDVLPRGAGKGQALVYLLKKLDSNGKPPKNTLVCGDSGNDAELFGVPSVHGVMVCNAQEELVQWYQENARDNPRIIQATERCAAGIMQAIGHLGLGPNVSARDLVGFPAYYPNNNKKGAAATAKPADVVVRFYVLYEKWRRGELPSSNYFSSSSAMRYLKSITHPNGTIIHPCGSERSLHASVDALLSSCYGDKKNFRVWVDRLVTSPIGTSSWLARFDSWEMEGGVRYCCRTTILLNIKPESPEGLELTHIHKTWVQGHSAGPGSALVF

SEQ ID NO: 15481 - protein, 494 aa, Bacillus cereus ATCC 14579
MLKTNIELKPKVEAFLNEEIKMFINGEFVAAIGGKTFETYNPATEDVLAVVCEAQEEDIDAAVKAARSAFESGPWAEMTTAERAHLIYKLADLIEEHREELAQLEALDNGKPYQVALDDDISATVENYRYYAGWATKIIGQTIPISKDYLNYTRHEPVGVVGQIIPWNFPLVMSSWKMGAALATGCTIVLKPAEQTPLSLLYTAKLFKEAGFPNGVVNFVPGFGPEAGAAIVNHHDIDKVAFTGSTVTGKYIMRQSAEMIKHVTLELGGKSPNIILEDADLEEAINGAFQGIMYNHGQNCSAGSRVFVHRKHYETVVDALVKMANNVKLGAGMEKGTEMGPLVSKKQQERVLHYIEQGKKEGATVAAGGERALEKGYFVKPTVFTDVTDDMTIVKEEIFGPVVVVLPFDSTEEVIERANNSSYGLAAGVWTQNIKTGHQVANKLKAGTVWINDYNLENAAAPFGGYKQSGIGRELGSYALDNYTEVKSVWVNIK

SEQ ID NO: 15482 - protein, 124 aa, Elymus canadensis
DIEETLKRLVFDMKKSPAEVFDALKNQTVDLVLTAHPTQSVRRSLLQKHSRIRNCLVQLYSKDITPDDKQELDEALHREIQAAFRTDEIRRTQPTPQDEMRAGMSYFHETIWKGVPKFLRRVDT

SEQ ID NO: 15483 - protein, 93 aa, Zea mays
AISCGQVASAIAPCISYARGQGSGPSAGCCSGVRSLNNAARTTADRRAACNCLKNAAAGVSGLNAGNAASIPSKCGVSIPYTISTSTDCSRVN

SEQ ID NO: 15484 - protein, 174 aa, Rhizobium etli
ARKPSIVPIVEPECLMDGKPGDHNIDRCAEVTESTLQIVFEELAEARVSLEGMILKPNMVIDGKNARKASVAEVAERTVQVLKRTVPSAVPGIAFLSGGQTTEEATAHLSAINGFDLPWLVTFSYGRALQDSALKAWNGKPENVAAGQREFTHRAEMNSLAAKGSWKKDLEQAA

SEQ ID NO: 15485 - protein, 98 aa, Triticum aestivum
MARLNSKAVVAAVVLAAVVLMMAGREASAALSCGQVDSKLAPCVAYVTGRASSISKECCSGVQGLNGMARSSSDRKIACRCLKSLATSIMSTNCDTVN

SEQ ID NO: 15486 - protein, 539 aa, Caulobacter crescentus CB15
MADLDAAWTRLEAAAKAAGDKRIVEFFDAEPGRLDALTLDVAGLHLDLSKQAWDEAGLEAALDLAHAADVEGARARMFDGEAINSSEGRAVLHTALRAPAGADVKALGQPVMAEVDAVRQRMKAFAQAVRSGAIKGATGKPFKAILHIGIGGSDLGPRLLWDALRPVKPSIDLRFVANVDGAEFALTTADMDPEETLVMVVSKTFTTQETMANAGAARAWLVAALGEQGANQHLAAISTALDKTAAFGVPDDRVFGFWDWVGGRYSLWSSVSLSVAVAAGWDAFQGFLDGGAAMDEHFRTAPLEQNAPVLVALAQIFNRNGLDRRARSVVPYSHRLRRLAAFLQQLEMESNGKSVGPDGQPAKRGTATVVFGDEGTNVQHAYFQCMHQGTDITPMELIGVAKSDEGPAGMHEKLLSNLLAQAEAFMVGRTTDDVVAELTAKGVSDAEIATLAPQRTFAGNRPSTLVLLDRLTPQTFGALIALYEHKTFVEGVIWGINSFDQWGVELGKVMANRILPELESGASGQHDPSTAGLIQRLKR

SEQ ID NO: 15487 - protein, 342 aa, Dechloromonas aromatica RCB
MAIKVAINGFGRIGRCTLRAIYEQGLQNEFDVVAINAAGDLATNAHLLKYDTTHGRFRTSVETEGENCIIIDGKKIAFYSTKNPKDINWADHGVDIVLECTGAYTSKAKALPLLEQGAKRVLISAPGGDDVDATIVYGVNEGILKSGMTVVSNASCTTNCLAPVAKILSDSIGIKQGLMTTIHAYTNDQVTVDVRHKDLRRARAAAANIIPTKTGAAKAVGLVLPQLVGKVDGFALRVPTINVSLVDLTFTAGRATTKDEINALMTAAANGPLKGVMDVNNEPLVSSDFNHTTVSSTFDATQTRVIQGEDGSTLVKVLAWYDNEWGYSCRMLDAARAWMAAK

SEQ ID NO: 15488 - protein, 353 aa, Mesorhizobium sp. BNC1
MTLERTGRDEEKALTQPPSGHSSVQAGKVGVLLVNLGTPDGTDYWPMRRYLGEFLSDRRVIEWPRAVWYPILYGIILARRPKKSGALYAKIWNREQNESPLRTFTRAQGQKLATALADKENVIVDWAMRYGSPSIETVTKSLIERGCDRIVMFPLYPQYSATTTATVNDKFFEALIEMRHQPAVRTVPAYPEEPVYIDALVRSIERHLATLDFEPEVVVASYHGIPQSYARRGDPYYEQCLATTARVRERLGWDEKKLITTFQSRFGPEEWLQPYTDKTVEQLARDGVRSIAVINPGFVSDCLETLEEIAVEADRTFREAGGKNFTHIPCLNDSDEGMAVIESLIRREMSGWA

SEQ ID NO: 15489 - protein, 415 aa, Streptomyces coelicolor A3(2)
MRRIVYLGGLTPRGVPERTLSPHLRSRAEVGPILVRDVLHYLAGAATMPDDIDRAFDVGGPDVPTYREMMRRHATVSGLRRRIIVPAPVLTPGLSSHWVGLVTPVPASIARPLTESLRHEVVCQEHDIARYVPDAPGRPLPFDVALTLALRRVREAQVATRWSSASVPGAPSDPLPTDPDWAGGSLYEDERHLPVDASPEALWKVVEGIGGDNGWYSFPPAWAVRGWLDRFVGGVGLRRGRRDAQRLHPARPVAWRGGRRRGHRRLAGRTGYPVVDAAMRQLRHQGWMHNRARLLVASFLTKTLYVDWRIGARHFLDLLVDGDVVNNQLNWQWAAGTGTDTRPHRVLNPLVQARRFDPDGVYVRRWVPELRSVEGGKVHEPWRLAAAERGELDYPDPLVELADGLARFKHARGRD

SEQ ID NO: 15490 - protein, 431 aa, Burkholderia cepacia
MAYHSTNPLLSRVVIVGAGQAAAAVAKTLRAEGHRGEIMMLGAERVGPYERPPLSKAWLSAENVPEIAALLEKSEAGQSDVDLRTGVNVTRIDRPSCTVHVDDGSEICFDRLVIATGGRARRLAVPGDASDQIAYLRTIDDALHIRRGLKAGKRLLLIGGGWIGLETACSARKLGVDVVLVEAAQRLCERTVPAIVGERLLGIQRSLGVDVRLGAGIEQLSKLPGGRYAASLSGVREEFDLVVAGVGMVANDELAAEAGLPCAGGVLCDVEGRTVDPHVFACGDVASFEHPSGPIGMRRLESWDNAQQQGAACARAILGKRAAAHPLPWFWSDQGDVNIQILGFPNATATPVVREGDGKATLVWLEEHAADEPAQIVAAVCINAPADMPILRRMWQKGVRVDRKTLAVQEVSLKSLLQRSAGAARNGGANT

SEQ ID NO: 15491 - protein, 391 aa, Rhodobacter capsulatus
MAKAKFERNKPHVNIGTIGHVDHGKTTLTAAITKYYGEFRAYDQIDGAPEERARGITISTAHVEYETPNRHYAHVDCPGHADYVKNMITGAAQMDGAILVVAASDGPMPQTREHILLGRQVGIPYMVVYMNKVDLVDDEELLELVEMEVRELLSSYEYPGDDIPIIKGSAHQAMIGESKEIGEDSIHALMKAVDEYIPTPARAVDQPFLMPIEDVFSISGRGTVVTGRVERGVINVGDELEIVGIRDTKKSVCTGVEMFRKLLDRGEAGDNIGALLRGIDRDGVERGQVLCKPGSVKPHTNFEAEAYILTKEEGGRHTPFFANYRPQFYFRTTDVTGTVKLPEGREMVMPGDNLKFEVELIAPIAMEEKLRFAIREGGRTVGAGVVSKIIK

SEQ ID NO: 15492 - protein, 801 aa, Solibacter usitatus Ellin6076
MKKLVVVGNGMAGVACVEQILKYRHEFQITIIGDETHVNYNRILLSSVLAGEKSADDIVLNDIEWYRANHITPRLGLRVAAIEAGERIVRGTDGSAIPFDKLILATGSTAFVPPVPGTDKQNVHVFRTLDDTRALLEKSRPGRKAVVIGGGLLGLEAARGLQVQGCDVTVVHLAPTLMERQLDAGGGAYLARKMENLGVKVLLGRQTQAMLGNGRVEGLRFKGGEEVEAELVVVAAGIRPNIELGRTAGLEVRRGIVVNDYMETSNPDIFAVGECTEHRGQIFGLVAPLMEQGKVLAATITGNRGPVFLGASTAAKLKIMGVEVFSAGSIDDTERGVETVRYEDPALGIYKKLLIKDNRLHGVILVGDASDDHRYKAWLTEATDLTPHRRHLLFPPPAQDAGLDVAQIPDRETICGCMGVTKGELITAIHQHGIATMTELKDRTRASTGCGSCGNLCARLLKAVAPEFEEEKQKVLCACVPFPQEKLREIVRSQQLRSVQDVLDVYGNGRGCEICKPALSYMVDMVWCGDHEEDRSARFINDRVHANIQKDGTFSVVPRMRGGVTTPAELRRIADVAEKYHVPLVKVTGSQRIDLLGVHKSDLPAIWSELGMPSGQAYTKGVRMVKTCVGSQFCRFGTQDAIAAGVDLETRLENLYSPHKFKMAVVGCPRNCAEATVKDVGLVGNEGSWQVVVGGAAGKSVRKADLLVTVETTDAALEAAEVFFQYYRENANYLERSYDFVERLGIEKVRKETVYSLPEVRRALLDRLHKSKDKSSDAWLERINPRPTQFVKIQPMETVSL

SEQ ID NO: 15493 - protein, 146 aa, Desulfovibrio desulfuricans G20
MSDSIHIVCPHCQSINRVPANKLAEKPNCGRCQHPLFTGEPIDLTTATFARHLERSDLPLLVDFWAPWCGPCKMMAPQFEQAASLLEPKVRLAKVNTEAEPHLAAQFGIRSIPTLILFRGGHEVARQTGAMGAQDIMRWVTSRLPQ

SEQ ID NO: 15494 - protein, 319 aa, Alkaliphilus metalliredigenes QYMF
MKTIGVLTSGGDSPGMNAAIRAVVRSGIYNGCKIMGIKQGYSGLINAKIEEMNLSSVADIIHRGGTILRTARCEEFRTEEGRKKALNVLKVLKIDGVVVIGGDGSFQGAKKLSELGIPTVAVPGTIDNDLGYSDYTIGFDTAMNTVLDAISKIRDTSTSHGRANIIEVMGRHCGDIALYTGLAGGAESIIIPEVGLDIDEICRKLLQGKNRGKLHSLIVLAEGVGGAIDLGKIIEEKTGIETRSTVFGHIQRGGSPTAFDRILASKMGARAVDLLIEEKGNRAVGIKGNQIFDMDIEEALNIENKFDQETFELAKILSI

SEQ ID NO: 15495 - protein, 477 aa, Symbiobacterium thermophilum IAM 14863
MYIGGEWREAVSGRRFEVTNPATGEVIATVPDAGREDARAAIEAAHAAFGEWSSLPAHVRARYMRRLYDLIVQNVDRLARVLTEENGKPLAEAKGEVFNGAEYLNWYAEETRRIYGETIPSSSRRTRIWVLRQPVGVVGAITPWNFPSSMVTRKIAPALAAGCTVVLKPAEQTPLSALLIAELIHEAGLPAGVVNVVTTLDPAAVGQEFLENRLVRKISFTGSTEVGKHLMQGAAAQMKRVSMELGGNAPFIVFEDADLDAAVQGVVISKFRNAGQTCICANRIYVQESIAPAFTERLVEAVRGLRVGHGLEEGINVGPLIDEAAYVKVEGHVSDARGKGARVLTGGHRLTGPGFDRGFFYAPTLLDQVSDEMRIVHEETFGPVAPILTFRTEEEVIRRANDTNYGLAAYIFTRNLGRTVRVSEALEYGMVAVNDSLLAVPQAPFGGVKESGLGREGGHHGLDDYLEYKYLSVVLDG

SEQ ID NO: 15496 - protein, 141 aa, Arabidopsis thaliana
  misc_feature (42)..(42): Xaa can be any naturally occurring amino acid
PSVRGKEEEITRRGKCASYMHSSAVVVTSPTQATMVAPFTGXKSSAAFPVTRMTNKDIASIAIIGGRVSRTKGRPPNEKNKEETVSYLPDLSDAELTKEVDYLVRNKWIPCVEYELEHGSVSREHGNTPGYYEGRNWTMGK

SEQ ID NO: 15497 - protein, 120 aa, Carboxydothermus hydrogenoformans Z-2901
MKKIEALIRPQKLGEVKEALNKLGISGMTVTEVVGCGRQKGQKEIYRGIEYEINLLPKVKIEIVTVDEKVEEIIKIISESARTGAIGDGKIFISEVLDAVRIRTGERGTAAITSPKEGER

SEQ ID NO: 15498 - protein, 391 aa, Rhodobacter capsulatus
MAKAKFERNKPHVNIGTIGHVDHGKTTLTAAITKYYGEFRAYDQIDGAPEERARGITISTAHVEYETPNRHYAHVDCPGHADYVKNMITGAAQMDGAILVVAASDGPMPQTREHILLGRQVGIPYMVVYMNKVDLVDDEELLELVEMEVRELLSSYEYPGDDIPIIKGSAHQAMIGESKEIGEDSIHALMKAVDEYIPTPARAVDQPFLMPIEDVFSISGRGTVVTGRVERGVINVGDELEIVGIRDTKKSVCTGVEMFRKLLDRGEAGDNIGALLRGIDRDGVERGQVLCKPGSVKPHTNFEAEAYILTKEEGGRHTPFFANYRPQFYFRTTDVTGTVKLLEGTEMVMPGDNLKFEVELIAPIAMEEKLRFAIREGGRTVGAGVVSKIIK

SEQ ID NO: 15499 - protein, 279 aa, Methanopyrus kandleri AV19
MRRVVILWNPDDPASKNIAESLTEDAEKLDTEDLQHYTVETWERDGVRFHLTAALGDLIEEDEARELARKFDVIVFASRHESRTKKPSLTVHVPGNPTPEAKFGGKPLEVCTADPAGMKAALLELKRFRDKRGLDYDVCYEVTHHGPRDPGAPCFFIEIGSDEERWTDEEAGEACARAILAAVDPPDVKAVVGYGGGHYAPAHTDAALSNRKLAYGHIVPDYAVDHDYLRDQFREVVDKTPRAREIIVDDRNLDSGIVERLEDLVRDRGLRLRDVEEVK

SEQ ID NO: 15500 - protein, 469 aa, Glycine max
  misc_feature (282)..(282): Xaa can be any naturally occurring amino acid
MRARKLFNSFYRTISSSTFPPPPVVSSRRVVVTGLGMVTPLGCGVDTTWKRLVDGECGVRALSLEDLKMNSFDKETQLSTFDQLTSKVAALVPTGTHLGEFDDQIWLNSKDHRSIARFIAYALCAVDEALKDSNWFPIEQEDKERTGVSIGGGTGSVSDILDSAQLICEKRLRRLSPFFIPRILINMASGHVSIKYGFQGPNHAAVTACATGSHSIGDAMRMIQFGDADVMVAGGTESSIDALSIAGFCRSRALTTKYNSSPQEASRPFDSGRDGFVYTFTXIGEGSGVLVLEEFEHAKNRGAKIYAEVRGYGMSGDAYHITQPPSDGRGAILAMTRALRQSGFHPSEVDYINAHATSTPLGDAIEANAIKTMFSDRASSSALALSSTKGAIGHLLGAAGAVEAIFAVLAIRHGIAPLTLNLTKPDPVFGDGFMPLSASEEMPIRVAMSNSFGFGGTNASLLFAQTGSD

SEQ ID NO: 15501 - protein, 119 aa, Elymus hystrix
LKRLVFDMKKSPAEVFDALKNQTVDLVLTAHPTQSVRRSLLQKHSRIRNCLVQLYSKDITPDDKQELDEALQREIQAAFRTDEIRRTQPTPQDEMRAGMSYFHETIWKGVPKFLRRVDT

SEQ ID NO: 15502 - protein, 214 aa, Vasconcellea cundinamarcensis
  misc_feature (180)..(180): Xaa can be any naturally occurring amino acid
  misc_feature (184)..(184): Xaa can be any naturally occurring amino acid
YPESIDWRKKGAVTPVKNQGSCGSCWAFSTIATVEGINKIVHGNLTSLSEQELVDCDRRSHGCKGGYQTTSLKYVVDHGVHTEKEYPYEEKQYKCRAKDKKPPIVKISGYKKVPSNDEISLIKAIAKQPVSVLVESKGKAFQFYKKGIFGGPCGTKVDHAVTAVGYGKDYILIKNSWGPXWGEXGYIKIKRASGHCEGICGIYKSSYFPAEGYR

SEQ ID NO: 15503 - protein, 481 aa, Streptomyces avermitilis MA-4680
MAATHAFWLAGRQATGETTFDVTSPWDGRLVGKVSVPTEAQTEEAVAAAYAVRDEFAATPAHVRAAALDHVSKRLVERTEEIAQLISAENGKPIKWARGEVGRAVSVFRFAAEEARRFNGGEAQRLDTDAGGQGRLALTRRFPKGVVLGIAPFNFPLNLCAHKVAPAIAAGAPIILKPAPATPLSGLVIGDLLAETDLPAGSWSILPVSNDRMPALVQDERLPVISFTGSEKVGYAIMDSVPRKHCTLELGGNGAAVVLADYASDADLDWAAGRIATFSNYQGGQSCISVQRVIADASVYERLLPRVVAAVEAQVTGDPSDDATEVGPLVSEDAAKRVESWVDEAAQAGARVLTGGKREGASYAPTVLVDVPADVTLSCEEVFGPVLTVQKVEGEAAAFAAVNESKYGLQAGVFTHDLQAAFRAHRALEVGGVVIGDVPSYRADQMPYGGVKQSGVGREGVKFAMDDYTYERVLVLTGLAL

SEQ ID NO: 15504 - protein, 250 aa, Oryza sativa
MHKLGRGSRDKVQQFMTITGASEKVALQALKASDWHLEGAFDFFYSQPQISLTNSRHLEDLYNRYKEPDVDMIMVEGVSQFCTDLQVDPQDIVMLVISWHMKAATMCEFTRQEFIGGLQSIGVDSIEKLREKLPSLRAEIKDDHKFREIYNFAFAWAREKGQKSLALETALGMWQLLFAERHWPLIDHWCQFLQVRHNKAISRDTWSQLLEFVKTIDPQLSNYDEEGAWPYLIDEFVEYLTENGFVQLRK

SEQ ID NO: 15505 - protein, 246 aa, Aspergillus nidulans FGSC A4
MVRIFITGSSDGIGQAAAKVLSEQGHSVVLHARNADRAASAQEAVPGAEAVLVGDLSSIAETKALAEEANKLPPFDTVIHNAGIGYGATASQEITADKISAVFAVNTLAPYILTCLMHKPKARLLYMSSDSHYGGDESLRNITQSHSYGNTKLHDVMLANAFSRRWGNAIQVVSMHPGWVRTKMGGVMAPGALDRPARVLADWAIGKGDLARLKSGTFFTTSGPESAHPGADNVQKQEELLRICLR

SEQ ID NO: 15506 - protein, 130 aa, Echinochloa crus-galli
NEWPFFRVTLDLVEMVFAKGDPGIVGFYNDLLVADELKPFGEQLRKNYIDTVQLLLQVAGHKEILEGDPYLKQRLRLRDPYITTLNVFQAYTLKRIRDPNFKVTLNPPLSKEFNDVNKPAGLVKLNPASE

SEQ ID NO: 15507 - protein, 380 aa, Bacillus subtilis
IGTGSRHETPEINGISHFLEHMFFKGTSTKSAREIAESFDRIGGQVNAFTSKEYTCYYAKVLDEHANYALDVLADMFFHSTFDENELKKEKNVVYEEIKMYEDAPDDIVHDLLSKATYGNHSLGYPILGTEETLASFNGDSLRQYMHDYYTPDRVVISVAGNISDSFIKDVEKWFGSYEAKGKATGLEKPEFHTEKLTRKKETEQAHLCLGFKGLEVGHERIYDLIVLNNVLGGSMSSRLLEDVREDKGLAYSVYSYHSSYEDSGMLTIYGGTGANQLQQLSETIQETLATLKRDGITSKELENSKEQMKGSLMLSLESTNSKMSRNGKNQLLLGKHKTLDEIINELNAVNLERVNGLARQLFTEDYALALISPSGNMPS

SEQ ID NO: 15508 - protein, 327 aa, Synechococcus sp. WH 8102
MAGTLLFNALREAIDEEMARDPYVCVMGEDVGHYGGSYKVTKDLCEKYGDLRVLDTPIAENGFTGMAVGAAMTGLRPIVEGMNMGFLLLAFNQISNNMGMLRYTSGGNFTIPTVVRGPGGVGRQLGAEHSQRLEAYFHAVPGIKIVACSTPTNAKGLMKAAIRDNNPVLFFEHVLLYNLSEELPEGEFTCALDQADLVQEGSDVTILTYSRMRHHCLKAVEQLEADGISVELIDLISLKPFDMETIGRSIRKTHRVIVVEECMKTGGIGAELIALITEQCFDDLDARPVRLSSQDIPTPYNGSLENLTIIQPHQIVEAAQQMVRQGV

SEQ ID NO: 15509 - protein, 238 aa, Picochlorum eukaryotum
MTQIMFETFNVPAMYVAIQAVLSLYASGRTTGIVLDSGDGVSHTVPIYEGYALPHAITRLDLAGRDLTNFMMTILTERGYSFTTTAEREIVRDIKEKLGYVAMDYEAELAASQSSSALEKNFELPDGQVITVGSERFRCPEVLFQPSMIGLEGAGIHETTYQSIMKCDVDIRKDLYGNIVLSGGTTMFPGIADRMSKEITALAPSSMKIKVVAPPERKYSVWIGGSILSSLSTFQQMW

SEQ ID NO: 15510 - protein, 209 aa, Triticum aestivum
WDRMINLVLDPVHNDTPLWRWNAASSYTSKSTYDMLWHGSVRCASAAAIWKCWAPLSCKIFMWLAMQYPLWTADRRLRHGLQDHTSACYICAQEEDSIDHLLLHCVFARQVWHNCFLKARISDTLVPTVYDKIEDWWLEARACIPKVNRRGFDSVVMLICWHLWKHRNGLVFGPARTSLTVGAFTSQVFDVLRSWVSAGANGVEIFCEW

SEQ ID NO: 15511 - protein, 262 aa, Thermobifida fusca YX
MGEFVRVETDADHPAVAVIRLDRPKMNALNTQVQRELAEAAAQVSEDSAVAAAVIYGGERVFAAGADIKEMADMDYAAMAAHSRTLQDCFTAVARIPKPVIAAITGYALGGGCELALCADFRVAADNAKLGQPEIQLGIIPGAGGTQRLPRLIGPAKAKDLIFTGRHVDAAEALEIGLVDKVVPAEEVYATAVAMAARYANGPALALRAAKQAIDAGLEVDLDTGLEIERLQFSALFATEDQKTGMRSFMEHGPGKATFSGR

SEQ ID NO: 15512 - protein, 238 aa, Parachlorella kessleri
MTQIMFETFNVPAMYVAIQAVLSLYASGRTTGIVLDSGDGVSHTVPIYEGYALPHAITRLDLAGRDLTNFMMTILTERGYSFTTTAEREIVRDIKEKLGYVAMDYEAELAASQSSSALEKNSELPDGQVITVGSERFRCPEVLFQPSMIGLEGAGIHETTYQSIMKCDVDIRKDLYGNIVLSGGTTMFPGIADRMSKEITALAPSSMKIKVVAPPERKYSVWIGGSILSSLSTFQQMW

SEQ ID NO: 15513 - protein, 404 aa, Bacillus subtilis
MKIIVQKFGGTSVKDDKGRKLALGHIKEAISEGYKVVVVVSAMGRKGDPYATDSLLGLLYGDQSAISPREQDLLLSCGETISSVVFTSMLLDNGVKAAALTGAQAGFLTNDQHTNAKIIEMKPERLFSVLANHDAVVVAGFQGATEKGDTTTIGRGGSDTSAAALGAAVDAEYIDIFTDVEGVMTADPRVVENAKPLPVVTYTEICNLAYQGAKVISPRAVEIAMQAKVPIRVRSTYSNDKGTLVTSHHSSKVGSDVFERLITGIAHVKDVTQFKVPAKIGQYNVQTEVFKAMANAGISVDFFNITPSEIVYTVAGNKTETAQRILMDMGYDPMVTRNCAKVSAVGAGIMGVPGVTSKIVSALSEKEIPILQSADSHTTIWVLVHEADMVPAVNALHEVFELSK

SEQ ID NO: 15514 - protein, 472 aa, Methanosarcina acetivorans C2A
MKIVMKFGGTSVGDGKKIRHVAQLLKRYHEEGNQIVVVTSALGGVTDRLLENARLASTKGKVSLVKEFKTELTNKHHEAVKDAIEDPRVAKEVLQVLDLRIEELEKALIGICYLGELTSRSIDYISSYGERLAAPIVSGAVRSLGAASIEYTGGEAGIVTTSDYGNARPLEKTYELVLKRLGCRLESHILVVTGFIGENEDGIITTLGRSGSDFSASILGAALKADEIWLWKEVNGIMTTDPRIVPEAKTIPQISYAEAMELSYFGANVLHPRTIEPAMREHIPVRVKNTFNPEFPGTLVVAEKFQCRHVVKAVSLIKNVALINISGAEMPGTVGTVARLFTALARAGVNIVMISQGSSESNLSFVVSESHVESALKALHAEFNREIVKEITSDRNVCVVAVVGAGMAGTPGVAKRVFGALGNSMINIIMISQGSSQYNISFVVREGDAFAAVKTLHDEFELYNGNGIEKKL

SEQ ID NO: 15515 - protein, 124 aa, Elymus glaucus
DIEETLKRLVFDMKKSPAEVFDALKNQTVDLVLTAHPTQSVRRSLLQKHSRIRNCLVQLYSKDITPDDKQELDEAFQREIQAAFRTDEIRRTQPTPQDEMRAGMSYFHETIWKGVPKFLRRVDT

SEQ ID NO: 15516 - protein, 361 aa, Bryopsis maxima
TLTAAITMALAAIGQAKPKDYNDIDSAPEEKARGITINTAHVEYETENRHYAHVDCPGHADYVKNMITGAAQMDGAILVVSGADGPMPQTKEHILLAKQVGVPSIVVFLNKADQVDDEELLELVELEVRETLNEYEFPGDDIPITSGSALLALEALMDNPDTSGTEDPWVKKIYDLMNEVDNYIPLPTRDTDKPFLMAIENDVSITGHNAVTTGRVERGAVEVGDNIEIVGLKETRQATITGLEMFQKTLEKSVAGDNVGVLLRGIQKEDVERGMVLAKPGSITPHKQFEAQVYILKKEEGGRHTSFFAGYRPQFYVRTTDVTGKINSFQSDDNVEIKMVMPGDRIKMNVELIQPIAIEKG

SEQ ID NO: 15517 - protein, 360 aa, Pyramimonas disomata
TLTAAITMALAALGGTAKGYADIDSAPEEKARGITINTAHVEYETANRHYAHVDCPGHADYVKNMITGAAQMDGAILVVSGADGPMPQTKEHILLANEVGVPNIVVFLNKQDQVDDAELLELVEMEVRETLSNYEFPGDDIPVCPGSALLALEALTENPKLQKGDNEWVDKIYALMDSVDTYIPTPERETDKAFLMAVEDVFSITGRGTVATGRVERGVVKVGETVELVGLSDTRQTTVTGLEMFQKSLEEAMAGDNVGILVRGIQKDDIERGMVISKPGTITPHTKFDSQVYILTKEEGGRHTPFFEGYRPQFYVRTTDVTGKIESFRGDDGSAALMVMPGDRIKMEVELIQPIAIEKG

SEQ ID NO: 15518 - protein, 858 aa, Thermus thermophilus HB27
MSQDPFALLKAEVDLLGRLLGEAIRTLSGERFFALVEEVRALAKARRQGDEAAGEALLARVEGLSTEEAEALVRAFTHYFHLVNLAEERHRVRVNRLRAQAETLESPRPEGFLALAKALKERGLSLEEAEAHLNRLELLLTFTAHPTETRRRTLRHHLEALQRELEAGDRERLAARVALLYGTEEVRKARPTVEDEIKGGLYYLPTTLWEAVPRVVAGLEAALERVYGRRPRLKSPVRFRSWIGGDRDGNPFVTPEVTAFAGRYAREVARRRFLEALEDLVRDLSLAEARVPVPREVRERGEGVERFMGEPYRRYFAALYRALEREEATTEGLLAALKAAERGLREVGLGRVAEAFLDPLEARLSAFGLELAPLDLREESGRLLEAAAELLRVGGVHPDFLALPQEERERLLTEELKTARPLLPVGEAPEGEALRVALGALKAWRDKGAHVVSMTHHPEDLLAVFLLAREVGLYRPGRPLPFDVVPLFETLEDLRRAPGVLRRLLENPVFLAHARGRGGVEVMIGYSDSNKDAGFLMANLALYEAQEALSRVGEEVGLPVYFFHGRGTSTARGGGPAGRAIASLPPRSVGRRIRLTEQGEALADRYSHPDLAVRHLEQMLYHFALAALGPGQEPEARWREALAQAAEESTRRYRALLQEEGFFDFFEAFTPIREIGELPIASRPVYRRGRVRDIRDLRAIPWVMAWTQVRVLLPGWYGLSALEELPLDLLREMYRGWPFFASTLEAAAMALAKADMGVARLYLRLVPEPLRFFYRRLAEEHARTVALLEAVFQAPLLHNQRTLERQIRLRNPYVDPINIVQVELLRRYRAPGGKEDEALRRALLLSILGVAAGLRNAG

SEQ ID NO: 15519 - protein, 587 aa, Nocardia farcinica IFM 10152
MSRWCAFLTEDDPAAHVRAVGAEPITAGPITAGSITAAGPHGFGLLDGPGVAAGPFTAGALTAVGEVTLFNADRLRARLGADAPPPGRPDGEVLLHSYARFGLDGIAAAEGMFALAVADGPDLVLLRDQLGARTLFHARARAGWAASTSLRALRRWPALRTGLHLPAVRSFLTFAYLPGRETLLRDVHEVLPGRCLRLHPDGTSTEHTYWEPREHIDERPASEHALRLRALLEDAVTRRLPAGEPVGVLLSGGIDSSLVTALAAKLHDQAVHTYSISFGADAPDELGYSGLVATHCHTRHRVLTVPGQTVAARLADTVGLLDSPVGDPLTVPNLMLAEAVAADGIRVALNGEGGDPVFGGPKNLPMLIFELTRDDPAEDARAHAYLDSYRKCYADLPALLTRDALAALADAPGPVEHVAPYLRPGAMTSLLNQLLHTNLRTKGAHHILTKVERLTAASGIEGRAPLFDRAVVDHAFAVPPTMKLAGTSEKWILKQAVRDLLPKTIVDRPKSGMRVPVQQWLDGPLRELAHDLLLGRTARERGLFRADTIRAWLRGEGALLPRQGGKLWLVLSLQLWLRSFDLEESVR

SEQ ID NO: 15520 - protein, 118 aa, Oryza sativa
MARAQLVLVALVAAALLLAGPHTTMAAISCGQVNSAVSPCLSYPRGGSGPSAACCSGVRNLNSAASTTADRRTACNCLKNVAGSISGLNAGNAASIPSKCGVSIPYTISPSIDCSSVN

SEQ ID NO: 15521 - protein, 619 aa, Rhodopirellula baltica SH 1
MIGARSISTLFESHSVPSRPPPMSTASSSSSANAAKGDQQPMNGADVLVKSLVDHGVEVLFAYPGGCSMPMHQALTRYGDSIRTILPRHEQGGAFAAQGYSRSTGKIGVVMATSGPGATNLVTAIADAKLDSIPMLCITGQVPTGAIGTDAFQETPMVEICRGITKHHYLVTDLADLPRVMKEAFHIATSGRPGPVLVDMPKDVQLGNFPIDMDPEMDLPGYSPEAPKVAGETIKQMAAAIKLARRPVIYAGGGIISGEASEELRELIKKTGIPTVTTIMGLGAVSPDDPRSLDWLGMHGAAYANYAVRDCDLLIALGVRFDDRVTGKVEAFAKDAKIIHVDIDSSELNKNKQAHIPVRGDVKDVLVQLNKIVQPPEIEAWQKTCTDLKAKYPLKYDNSFDGILQQHAIATLSKITADRETYVSVGVGQHQMWAAQFFKFRNPRTWMSSSGLGTMGFGLPAAMGVQAAHPDALVIDIDGDGSFQMNIQELATCFCEKLPVKVLLLNNQHLGMVVQWEDRFMDRNRAHTYLGPIDHDEAKGKSTADRFEYASDRYPNFVQIAKGYGCGAATVKKKADLEGALQEMIDHKGPFLLDVEVPYQEHVLPMIPGGMTVDDMLLD

SEQ ID NO: 15522 - protein, 316 aa, Halobacterium sp. NRC-1
MSSDDAWTAAALPDQSGRRVVVTGANSGLGFEATRAFARAGAHVVMACRSTERGEDARDDIVAELPGASLTVHELDLAALDSVAAFADWFTAEFDSLHVLANNAGVMAIPRSETADGFETQFGVNHLGHVALTAGLLGVLRRTSGETRVVTQSSGAHRRGRIDFEDLQHEAEYGKWEAYSQSKLANLLFAYELDRRLRAASASVTSVACHPGYAATNLQLRGPQAAGSRLRLLAMRAANALVGQSAEQGAWPLLYAATNPSIDGGEYIGPGGVLNMRGHPERQQPSARSRDEDTARRLWTVSADRTGVDFDLPDPA

SEQ ID NO: 15523 - protein, 378 aa, Arabidopsis thaliana
MSDLPLDLVEEILSRVSATSLKRLRSTCKQWNTLFKKRSFSQKHFHIAPKESMVLMLKEYRVCSMNINLNVSPPSVEFQGTLGIKDDSHSNLGQVEIVEVYHCDGLLLCATRDNRLVVWNPCLGETRWIQLKDECRRYSTFALGYENNKFCRRNYKILRYWGWFHDHIPDDGGRFRFEIYDFRSDSWKVLDDVPDDRFPPVSVVSLKGNTYWFGSNKKDFLRSFDFTTERFNHIGLPPSRDHGFMALSVVGEEQLSVLQEIETSKMEIFVTNKVGTEEAALLWSKSFIVDLPIGGHCSEVFASLLINEEKKVALCCNLDFETDGNLIFTIGEDNKYYSEIPYATNKPWWLCRFSEKFTKKWWWFPFIYNYVPSLVQIL

SEQ ID NO: 15524 - protein, 121 aa, Clostridium acetobutylicum ATCC 824
MDYKMSKVDIVTRPEKFDELKSELNKIGVTGMTVTNVLGCGLQKGTLEYYRGNPVEITLNPKIKVEIVVCSVPVEKVVETAKNVLNTGKIGDGKIFVYDVSKVVKIRTGEEDYDALQDDKE

SEQ ID NO: 15525 - protein, 1315 aa, Botryotinia fuckeliana
MEDSTIAHTTAILQTLALSSIDLPLTNVYGNKGIRLPGADTAEKLALERELAALVSRVQRLEARAITVNNQTLPDTPNELGAPSAFADVLTGAPSRASKSTTSRQQLVNSLLAAREAPTGGERPPKFTKLSDEELEALREHVDHQSKQLDSQKSELAGVHAQLFEQKQRQEQALNVLEVERVAALERELKKHQQANEAFQKALREIGEIVTAVARGDLSKKVQIHSVEMDPEITTFKRVINTMMDQLQIFSSEVSRVAREVGTEGILGGQAKISGVDGTWKELTDNVNVMAQNLTDQVREIASVTTAVAHGDLTQKIERPAQGEILQLQQTINTMVDQLRTFAAEVTRVARDVGTEGILGGQAEIEGVQGMWNTLIVNVNAMANNLTTQVRDIAIVTTAVAKGDLTQKVQAECKGEIKQLKETINSMVDQLQQFAREVTKIAREVGTEGRLGGQATVHDVEGTWRDLTENVNGMAMNLTTQVREIAKVTTAVARGDLTKKIEVEVQGEIASLKDTINTMVDRLSTFAFEVSKVAREVGTDGTLGGQAQVDNVEGKWKDLTENVNTMARNLTTQVRGISTVTQAIANGDMSQKIEVAAAGEILILKETINNMVDRLSIFSNEVQRVAKDVGVDGKMGGQADVAGIGGRWKEITTDVNTMANNLTTQVRAFGDITNAATDGDFTKLITVEASGEMDELKRKINQMVYNLRDSIQRNTLAREAAEFANRTKSEFLANMSHEIRTPMNGIIGMTQLTLDTDLTQYQREMLNIVHNLANSLLTIIDDILDLSKIEANRMIMEEIPYTLRGTVFNALKTLAVKANEKFLDLTYRVDSSVPDHVVGDSFRLRQVILNLVGNAIKFTEHGEVSLTIQKAEQDHCAPNEYAVEFCVSDTGIGIQADKLNLIFDTFQQADGSMTRKFGGTGLGLSISKRLVNLMRGDVWVKSQYGKGSSFYFTCTVRLATSDISFIQKQLKPYQGHNVLFIDKGQTGHGKEIITMLTQLGLVPVVVDSEQHTILLGNGRTKEKIASTYDVIVVDSIESARKLRSIDEFKYIPIVLLAPVIHVSLKSALDLGITSYMTTPCLTIDLGNGMIPALENRAAPSLADNTKSFDILLAEDNIVNQRLAVKILEKYHHVVTVVGNGQEALDAIKEKRYDVILMDVQMPIMGGFEATAKIREYERSLGTQRTPIIALTAHAMLGDREKCIQAQMDEYLSKPLKQNHLIQTILKCATLGGALLEKGREVRQSANEESPNSQNGPRGTQHPASSPTPAHMRPAIEPRAYTTTGPINHGSAESPSLVTADAEDPLARLLMRAHSS

SEQ ID NO: 15526 - protein, 217 aa, Shewanella oneidensis MR-1
MNQSLLAPFGTAIERVEAGLNALRQGLGVLVVDDEDRENEGDLIFAAESLTNAQMAMLIRECSGIVCLCLPDEKVKALALPPMVENNSSQYGTAFTVSIEAKVGVTTGVSAADRVTTIKTAIADHAKPSDLARPGHVYPLRAQPGGVLTRRGHTEGTIDLMQLAGLKPAGVLCEVTNPDGTMARLPEIIAFGALHNMPVLTIEDIVVYRKSLLANVG

SEQ ID NO: 15527 - protein, 370 aa, Pyrococcus horikoshii OT3
MRYDVLIIGGGPVGNYLASLLAGKVNVGVIEKKGAFGGKACTGIVGAENYESLGLPEKAILNAFNGAFFISREKVFEIHRSLPQAYLIDRKVLERELAKRAMRKGAEYYLSTNFLGFKNGKAILQHLDSRLEIEAKYYVGADGVNSSVAKEIQARTEGEVLKGWEIEVLGNFKRDHVEVWVNKNINPEFFFWVAPINEEEARVGTFGEIDSLAKFLKIRRLNPFKTVEIKSGAVILGWRKPWVKGNVALVGDAALQIKPTTAGGIVFGAYCAKSLAKAILNDNLEIYERECSWVREQVSFGLKIRKVFKNLTQEKIEEIFEVLSSEEVRKIIVERADFDDHVKTVKALLKNPRVLAKLIRISPIILRALL

SEQ ID NO: 15528 - protein, 322 aa, Arabidopsis thaliana
  misc_feature (245)..(245): Xaa can be any naturally occurring amino acid
MRPLSIKPTSLDVARHATPVESFGNHRPPISPWHSPVPYLFGGLAAMLGLIAFALLILACSYWRLSTSGDDSGERVDEEKESRSGVKAASAACEEKVLVIMAGEDLPRCYRQIKGKPYPKSRYCRGVPDPKIRIYDVGMKRKGVDEFPFCVHLVSWEKENVSSEALEAARIACNKYMVKSAGKDAFHLRIRVHPFHVLRINKMLSCAGADRLQTGMRGAFGKALGTCARVAIGQVLLSVRCKDAXMGHHAQEALRRAKFKFPGRQKIIVSRKWGFTKFNRADFTKLRQEKRVVPDGVNAKFLSCHGPLANRQPGSAFLPAHY

SEQ ID NO: 15529 - protein, 369 aa, Corynebacterium diphtheriae
MLPLPTWTLSDVDAILVLSFGGPEGQQDVIPFLENVTRGRGIPRERLEEVAVHYRHFGGISPLNALNREIIGNIIEVLSSRGLEIPVYFGNRNWHPFVNDTAEKMVRDGVRNVAVFATSAWGGYSGCRQYDEDIVRMNHHLEEKELPTLNCLKLRQFFDHPLFIEEMSSVVFQAARELGISALDELQLHQKVVFTAHSIPEVANENSGRKEDGPLYSRQVYEAASLVAKHLGISQERYDVVWQSASGNGQIPWLEPDILDYAKCQHDEGVSELVVAPIGFISDHMEVVWDLDHELQDLASDLGMSISRAATVGHTDSFATMIVELVEESLGVKPHQNLGTVPSKGCSFNGEPCEVNCCKPVQRPHSAKA

SEQ ID NO: 15530 - protein, 328 aa, Burkholderia thailandensis E264
MHAWSAQHVPPQGGKVAVVTGANSGLGWQIAQTLAAKGAQVVMGCRDTAKGELAAHAIRTRYPRARIEVEALDLADLASVCRFADAVADRHGRVDILCNNAGVMFLPLRRTRDGFEMQMGTNHLGHFALTGLLLPALRASHRARVVTMSSGFNRLGKIRLDNMLAERGYNKYRAYCDSKLANLMFTLELQRRFDHAGLSMRSIAAHPGYAATNLQFAGPVMENSSLGSFAMRLSNRLVAQPADVGALPAIHAATAVDIEGGAYIGPAHLCETRGYPANARIPHQARDVRMGKRLWEKSEQLTGVRYLDTPPPGSRRGASRYDATFRAL

SEQ ID NO: 15531 - protein, 391 aa, Tropheryma whipplei str. Twist
MIRRSAVSRVVAEGSAIASDSGFALGASQYDAVVLLSFGGPEGPEDVVPFLKKVTSGRGVPDERLYEVAEHYNHFSGISPINDCNRRLRGALEKELFSRGIRIPVLWANRNWQPQLEEVLREAYDRGFRAFLTLFTSAYSCYSSCRQYREDIAHAVERAGLSGRIIVDKLRQFFDHPGFVLPFIEGIQDCLEQVKERGFKVSRTAILFSTHSIPELDAAFSGPEDAHFGKYGAYVSQHKAVVEVIMSRLRVTDPDLQNYQLVYQSRSGDPSTPWLEPDINDAIRVLRGCEAVLIVPLGFISDHMEVLWDLDNESMQTARECGLFAIRTPTPGTHPLYISGMVDLIVERLEGVPRSARPAMTDLGPWFDVCQPGCCKNSRSGFKPAYGGVAP

SEQ ID NO: 15532 - protein, 209 aa, Parvularcula bermudensis HTCC2503
MSFVSVEEAAKAVAAGRFVIICDDEGRENEGDLMIAAEFADADAVNFCTIHGRGLICCAVEPAIADRLGLQLMVPQKDNRSGFGTAFTVSVEAREGVTTGISAADRARTIEVLCDPKSTPEDLVSPGHMFPLRAHPEGTLGRGGQTEASVDLARIAGCRPAGVICEVMNEDGTMARRDDLMKVAAKHDIPMVTVEAIKAYRKAKKVEAA

SEQ ID NO: 15533 - protein, 234 aa, Streptococcus agalactiae
LAISPFNYPVNLAGSKIAPALIAGNVVALKPPTQGSISGLLLAEAFAEAGIPAGVFNTITGRGSVIGDYIVEHEAVSFINFTGSTPIGEGIGKLAGMRPIMLELGGKDSAIVLEDADLALAAKNIVAGAFGYSGQRCTAVKRVLVMDKVADQLAAEIKTLVEKLSVGMPEDDADITPLIDTSAADFVEGLIKDATDKGATALTAFNREGNLISPVLFDHVTTDMRLAWEEPFGP

SEQ ID NO: 15534 - protein, 170 aa, Brassica napus
ISGTRKVFVEKTDMRAKRMARKAGALVIFVVDASGSMALNRMQNAKGAALKLLAESYTSRDQVAIIPFRGDAAEVLLPPSRSIAMARNRLERLPCGGGSPLAHGLTTAVRVGLNAEKSGDVGRIMIVAITDGRANITLKRSTDPEGIAPDAPRPSSQELKDEILEVAGKI

SEQ ID NO: 15535 - protein, 638 aa, Azotobacter vinelandii
MSEIIRVPDIGGDGEVIELLVKTGDLIEVEQGLVVLESAKASMEVPSPKAGVVKSVSVKLGDKLKEGDAIIELEPAAGAAAAPAEAAAVPAAPTQAVDEAEAPSPGASATPAPAAASQEVRVPDIGSAGKARVIEVLVKAGDQVQAEQSLIVLESDKASMEIPSPASGVVESVAIQLNAEVGTGDLILTLRTTGAQAQPTAPAAAAAASPAPAPLAPAAAGPQEVKVPDIGSAGKARVIEVLVKAGDQVQAEQSLIVLESDKASMEIPSPAAGVVESVAVQLNAEVGTGDQILTLRVAGAAPSGPRARGSPGQAAAAPGAAPAPAPVGAPSRNGAKVHAGPAVRQLAREFGVELAAINSTGPRGRILKEDVQAYVKAMMQKAKEAPAAGAASGAGIPPIPPVDFAKYGEIEEVPMTRLMQIGATNLHRSWLNVPHVTQFESADITELEAFRVAQKAVAEKAGVKLTVLPLLLKACAYLLKELPDFNSSLAPSGQALIRKKYVHIGFAVDTPDGLLVPVIRNVDQKSLLQLAAEAAELAEKARSKKLGADAMQGACFTISSLGHIGGTAFTPIVNAPEVAILGVSKASMQPVWDGKAFQPRLMLPLSLSYDHRVINGAAAARFTKRLGDLLADIRAILL

SEQ ID NO: 15536 - protein, 447 aa, Saccharomyces cerevisiae
MPKESEVINSEFHVDVQDPERLNGHPVAKFINKLSGQPESYVNRTNYIFGRTLGAGSFGVVRQARKLSTNEDVAIKILLKKALQGNNVQLQMLYEELSILQKLSHPNIVSFKDWFESKDKFYIVTQLATGGELFDRILSRGKFTEVDAVEIIVQILGAVEYMHSKNVVHRDLKPENVLYVDKSENSPLVIADFGIAKQLKGEEDLIYKAAGSLGYVAPEVLTQDGHGKPCDIWSIGVITYTLLCGYSPFIAESVEGFMEECTASRYPVTFHMPYWDNISIDAKRFILKALRLNPADRPTATELLDDPWITSKRVETSNILPDVKKGFSLRKKLRDAIEIVKLNNRIKRLRNMYSLGDDGDNDIEENSLNESLLDGVTHSLDDLRLQSQKKGGELTEEQMKLKSALTKDAFVQIVKAATKNKHKVLAGEEEDDSKKTLHDDRESKSED

SEQ ID NO: 15537 - protein, 428 aa, Zea mays
MEDEDTGPGDGGEASPPHHVAASSDRARDMVASPTSSRSVTQTVNGSHHFVIQGYSLAKGMGVGKHIASETFTVGGYQWAIYFYPDGKNPEDNSTYVSVFIALASDGTDVRALFELTLLDQSGKGKHKVHSHFDRSLESGPYTLKYRGSMWGYKRFFRRTALEQSDFLKDDCLKINCTVGVVVSTMDYSRPHSIEVPESDIGFHFGTLLDTQEGVDVIFSVAGEKFHAHKLVLAARSPFFRSEFFDHELGEEKNGTDTGDEIKEIVIDDMDPVVFKAVLHFIYRDNLVNDDELSASSSDCSIFDRLSGKLMAAADKYELPRLRLLCESYLCKHISVNSVATTLALADRHHAMELKSVCLKFAAENLSAVIRTEGFDYLKDNCPSLQSEILRTVAGCEEPCSSGLKSQSVWAQLSDGGDTSGRRVRPRV

SEQ ID NO: 15538 - protein, 572 aa, Debaryomyces hansenii CBS767
MLKDPSVKYQRFQLIKLPNRQWPSKDLDKTPRWLSTDLRDGNQSLPDPMSIAEKKEYFTKLIDIGFKEIEVAFPAASQIDFDFTRYAIETAPSDVSIQVLSPCREDLIKRTVESLRGAKRATVHIYLATSDCFRNVVFGMTKEQSVELAVKCTKLVKSLTKDDPTQKDTIWDFEFSPETFSDTSLEFAVEICEAVKSAWEPSKEKPIIFNLPATVEMATPNVYADQIEYFSTNITNRETVCISLHPHNDRGCAVAAAELGQMAGADRIEGCLFGNGERTGNVDLVTLALNLYTQGIAPHLDFSDINSVINIVEKCNKIPIHARAPYGGSLVVCAFSGSHQDAIKKGFNSHTKQIKDSKSKNVHWKLPYLPLDPEDIGRTYEAIIRVNSQSGKGGSSWIILRNLELDLPRGLQVDFSKVVQSQAEVKGQELSNEELCELFKEEYFIDYEKDKSIDQYYKLLDYSISNSKEGVRTIDVDLKINNETTSIKGQGNGPISAFADAICKDLKINLDVKHYHEHSLGDKSNARAATYIEVVLDDKSTRWGVGIHEDVSQASFLSLISILNGLRRAKKD

SEQ ID NO: 15539 - protein, 234 aa, Bacillus cereus
LAIAPFNYPVNLFAAKLAPALIMGNAVIFKPATQGAISGIKMVEALHKAGLPKGLVNVATGRGSVIGDYLVEHEGINMVSFTGGTNTGKHLAKKASMIPLVLELGGKDPGIVREDADLQDAANHIVSGAFSYSGQRCTAIKRVLVHENVADELVGLLKEQVAKLSVGSPEQDSTIVPLIDDKSADFVQGLVDDAVEKGATIVIGNKRERNLIYPTLIDHVTTDMRLAWEEPFAP

SEQ ID NO: 15540 - protein, 521 aa, Simmondsia chinensis
MKAKTITNPEIQVSTTMTTTTTTATLPNFKSSINLHHVKLGYHYLISNALFLVFIPLLGLASAHLSSFSAHDLSLLFDLLRRNLLPVVVCSFLFVLLATLHFLTRPRNVYLVDFACYKPHPNLITSHEMFMDRTSRAGSFSKENIEFQRKILERAGMGRETYVPKSVTKVPPEPSIAAARAEAEEVMYGAIDEVLEKTGVKPKQIGILVVNCSLFNPTPSLSSMIVNHYKLRGNILSYNLGGMGCSAGLISIDLAKDLLQVYRNTYVLVVSTENMTLNWYWGNDRSMLITNCLFRMGGAAIILSNRWRDRRRSKYQLLHTVRTHKGADDKSYRCVLQQEDENNKVGVALSKDLMAVAGEALKANITTLGPLVLPMSEQLLFFATLVARKVFKMTNVKPYIPDFKLAAKHFCIHAGGKAVLDELETNLELTPWHLEPSRMTLYRFGNTSSSSLWYELAYAEAKGRIRKGDRTWMIGFGSGFKCNSVVWRALRSVNPAREKNPWMDEIENFPVHVPKIAPIAS

SEQ ID NO: 15541 - protein, 124 aa, Elymus lanceolatus
DIEETLKRLVFDMKKSPAEVFDALKNQTVDLVLTAHPTQSVRRSLLQKHSRIRNCLVQLCSKDITPDDKQELDEALQREIQAAFRTDEIRRTQPTPQDEMRAGMSYFHETIWKGAPKFLRRVDT

SEQ ID NO: 15542 - protein, 507 aa, Streptomyces avermitilis MA-4680
MHNPGHRFQAQDRFADGAQYIAGRFAKGTSGRRHAVVDPATGEEVYRYELAGTADVDAAVAAARAAFPGWAATTPGDRSDALHRFAAVLADRAEEFARAESLQCGKPLKLTREFDVPGTIDNTSFFAGAARHLQGQSAGEYSGDHTSYIRREPIGVVGSIAPWNYPLQMAAWKVLPAIAAGNTIVLKPAEITPLTSLLFAEAATRAGIPDGVVNIVTGAGRDAGEHLVAHPDVAMTSFTGSTAVGRRVAEIATSTVKRLHLELGGKAPFVVFDDADLDAAVHGAVAGSLINTGQDCTAATRAYVQRPLYEEFVARTAALMETVRLGDPFAHGTDLGPLVSHAQRDRVAGFVDRARAYARVVTGGEIPEELKDGAYYRPTLIADAAQDSEIVQSEIFGPVLVVLPFDSDDEGIRLANDTPYGLAASAWSRDVYRANRATREIKAGCVWVNDHIPIISEMPHGGYKASGFGKDMSAYSFEEYTQIKHVMFDNTAIVRKDWHRTIFGDRP

SEQ ID NO: 15543 - protein, 119 aa, Elymus wawawaiensis
DIEETLKRLVFDMKESPAEVFDALKNQTVDLVLTAHPTQSVRRSLLQKHSRIRNCLVQLYSKDITPDDKQELDEALQREIQAAFRTDEIRRTQPTPQDEMRAGMSYFHETIWKGVPKFL

SEQ ID NO: 15544 - protein, 249 aa, Glycine max
MKFNIANPTTGCQKKLEIDDDLKLRAFWDKRISQEVLGDALGEEFKGYVFKITGGCDKQGFPMKQGVLTPGRVRLLLHRGTPCFRGYGRRNGERRRKSVRGCIVSPDLSVLNLVIVKKGESDLPGLTDVEKPRMRGPKRASKIRKLFNLSKEDDVRKYVNTYRRTFTTKAGKKVSKAPKIQRLVTPLTLQRKRARIADKKKRIAKAKSEAAEYQKLLASRLKEQRDRRSESLAKRRSKLSSAAKPTVTA

SEQ ID NO: 15545 - protein, 506 aa, Morus alba
MYRATASRLRALKARNFKLGNRFLSSAAVATSGGNISWLSGGGGYSSSLPSLMIPLADVKLPPPLPDHVEPAKTKITTLANGLKIASQTSVTPAASIGLYVDCGSIYETPVSFGASHLLERMAFKTTRNRSHLRVVREIEAIGGHVQASASREQMGYTFDALKTHVPEMVELLVDCARNPVFLDWEVNEQLQKVKAEISEASKNPEALVLEAIHSAGYAGALANPLLAPESAINRLEWVQFWEGIYWPKTTLLQEIVLAAYGGLNMKISIHCGATFGLISLLSLALRSQNLCIREGDYRCQADSGSTHFALAFEVPGGWHKEKEAIKLTVIQMLLGGGGSFSTGGPGKGMHSRLYARVLNNHPQFQSISAFSNIYNNTGIFGIQATTSSDFAAKAVDVVANELIAISKPGEVDQVQLDRAKKSTKSAILMNLESRVIASEDIGRQVLTYGKRMEVDHFLNAVDEVTVKDIASTAQKLLSSPVTLASYGDVLYFPSYDTVSSKFNSK

SEQ ID NO: 15546 - protein, 562 aa, Arabidopsis thaliana
IRHEKVEAFPWNNTILSWQRTAFHFQPEKNWMNDPNGPLFYKGWYHFFYQYNPNAAVWGDIVWGHAVSKDLIHWLYLPIAMVPDQWYDANGVWTGSATFLDDGSIVMLYTGSTDGFVQVQNLAYPEDPSDPLLLKWVKFSGNPVLVPPPGIGAKDFRDPTTAWKTSSGKWRITIGSKINRTGISLIYDTTDFKTYEKHDTLLHQVPNTGMWECVDFYPVSKTQVNGLDTSVNGPDVKHVIKASMDDTRIDHYAIGTYDDSNATWVPDNPSIDVGISTGLRYDYGKYYASKTFYDQNKGRRILWGWIGESDSEAADVQKGWSSVQGIPRTVVLDTRTHKNLVQWPVEEIKSLRLSSKKFDMTIGPGTVVPVDVGSATQLDIEAEFEIKTDDLKLFFDDDSVEADNKFSCETNGGSTARGALGPFGFSVLADENLSEQTPVYFYVTKGKHSKLNTVFCTDTSRSTLANDVVKPIYGSFVPVLKGEKLTMRILVDHSIVEGFAQGGRSCITSRVYPTKAIYGATKLFLFNNAIDATVTTSFTVWQMNNAFIHPYSSDDLGVPSST

SEQ ID NO: 15547 - protein, 118 aa, Eremopyrum orientale
KRLVFDMKKSPAEVFDALKNQTVDLVLTAHPTQSVRRSLLQKHSRIRNCLVQLYSKDITPDDKQELDEALQREIQAAFRTDEIRRTQPTPQDEMRAGMSYFHETIWKGVPKFLRRVDT

SEQ ID NO: 15548 - protein, 398 aa, Candida glabrata CBS 138
MLSEQTRTIIKATVPVLEKQGTQITKCFYGHMLTEHEELLNIFNRTNQKIGAQPTALATTVLAAAKHIDNLAALLPHVEQIGHKHRALQILPEHYPIVGKYLLIAIKEVLGDVATPEIITAWGEAYQEIADVFISVEAKMYKEAAWPGWKQFEVVGKDKVAEDIYEFTVKPTGDSGVDLAKLPIIPGQYITVNSHPVRQDNKYDALRHYSICSADTTNGLKFAVKLQTSTNNPDGLVSEFLHKDVKVGDVLKLSAPAGDFAVNKDLINQNDIPLVLLSSGVGVTPIVSMLEAQVKENPSRPIVWIQSAYNEPHVAFKNHVDNLLKQAKDAKKVVVLTDSQPRIDDKFLKENVPAHADVYICGSLNFMQSMIDHFQVLEHKNDMIHYEPFGPKMSTVKV

SEQ ID NO: 15549 - protein, 468 aa, Methanosarcina acetivorans C2A
MSEHYESASLVKTLRPFHVWALGVGIVLVGEYMGWNFTVAKGGVLGSLLAMLVAGTMYVIISLCASELGAATKLAGGPYDWARLFIGPGAAASVGLAVYMEYIALEAADAIVVAFIAQSIFPELQVFPVTLLVIALLTFINYRGVVAALTLNFFLTMIAFISIVVFFFATAFGGVDIHPEYLFHGALPNGMIGLFAALQFGPWFYLGIEGAAMCAEECKHPSRAVPLGQQAGMITLLVGAAMTLYLCSVLIPTDQLGVSVYPLFEAAQNSGMFIFIALLGLGTFLTCVASANGCVCDSSRSWFALSRDNYVSSWFSAVHPRYNTPYRAVIFTMPVAIGFAFSGFLDQVITFSIVSGLLCYVLIPFALIRFRSLFPQNTSTIRPFVSPLQPYIAYFAIAIAITILSTLYWGYKYNLIFAFVFYGIAYFYFSHRHRSLNIENNWTEMGWPLPRGSENTGIRKEATGIGDE

SEQ ID NO: 15550 - protein, 959 aa, Candidatus Protochlamydia amoebophila UWE25
MNIQKAKSNPGHSIVNTDTHSYSQSNNPLKFFERISLLCKTIFQCFLNLFFNCITRDQLQSQWREVFWGQKEIIISNFTTTHSAKSEMPLLSSSQTPFLTESQNRESSDYPEDESNLIINSLDIPTNLNTSNKPFLEEINATTIHSSDFLSLPQEFKLSFQDETSLTIPNSQLTLLKEKSPYFKSLWSGNFQETLREPLTLTQKEFTHLLDCLLIVDFKVSIEDILTFIQLADYYQLAEVVKNLEQQLIDTYKSEKCELFNSTADSLIELKALLNFAQQYQLNNLKNYLELTVVSSLLNQASHLTEFEKILKCFSNEIERLNFSKNASLTDAHLLALKDCKKLKVLYLQECNNLTDVGLAYLRPLITLQGLNLNSCKKFTDAGLAHLDSLIDLTQLGLAKCHNITDNGLAYLRPLIALQGLNLNGCKKLTDAGLVHLKSLVTLTYLNLSQCDDLTDAGLAHLTPLVALQHLDLSFCCYNITDAGLAHLTPLVALQNLDLSFCYKLTDDGLAHLKPLVALKQLNLWACSNLTGAGLAHLTPLIALKHLDLGFCYGLTDDGLAHLKPLVALQYLSLSGCKKLTDAGLAHLTSLITLQQLNISSCANLTDDGLAHLKPLIALQQLNLSSCKKLTGVGLAHLTSLVNLTHLSLSECGNLTDAGLAHLAPLVALQQLDLNFCYNLTDAGLAHLITLVALQQLYLSACGNLTDAGLAHLTPLVALQQLNLSGCKKLTGVGLAHLTSLATLTHLSLSACANLTDDGLAHLTTLVALTYLNLSDCNNFTGAGLTHLKPLVALQYLSLSGCKKLTDAGLAYLKPLVALQQLNLRGCKKITDAGLTHLMSLVALQCLSLSGCKKLTDDGLAHLKPLVALTHLSLGECVKLTDDGLAHLTPLLALTHLNLSDCNNLTVAGLAHLTPLENLTYVDLNNCNNFTDVTLTYLTSLLTVQHFNRTWEECYFKLN

SEQ ID NO: 15551 - protein, 165 aa, Cichorium intybus x Cichorium endivia
MSFSEEQEALVKEAWEIMKEDIPALSLYFFTQVLEIAPAAKGLFSFLKDAEEIPQDNPKLKSHAVKVFKMTCEAIQLREKGEVVVSGSTLKYLGSVHLQKGVIDAHFAVVKEGVLRTVEKGVGEKWSEEMKGAWSEAYDQLAAAIITEMKKEATEMDEEAEETQT

SEQ ID NO: 15552 - protein, 314 aa, Chlamydia trachomatis D/UW-3/CX
MVTYLLANFGGPRTSQEIVSFLQALLTDRDVTGGMIPSMLHRPLFSYIAKRRAPHVARQYAYLGGGSPIFQDTERLAQNLSQELQASVIPFHRYLPETHRETLQALQESQGSIVGIPLFPHYTFAVTGSIIRFFLQHLPEKPISWITQFGVHPEFVSCMQQHIRDCLAAQQIAVEDCYFLFSVHGLPQRHIRLGDPYAQQCQASFEALRGELEGKIAFQSKFGIGKWLDPSTQEVCQSLRTKKRYIVIVPFGFVSDHIETLHEIDHLYVPILLQKGYRVVRIPAINASSRWVSSLAAIVRSSPQETSLEPLLMP

SEQ ID NO: 15553 - protein, 347 aa, Camellia sinensis
MKDSVASATASAPGTVCVTGAAGFIGSWLVMRLLERGYIVRATVRDPANLKKVKHLLDLPKADTNLTLWKADLNEEGSFDEAIEGCSGVFHVATPMDFKSKDPENEVIKPTINGVLSIIRSCTKAKTVKRLVFTSSAGTVNVQEHQQPVFDENNWSDLDFINKKKMTGWMYFVSKTLAEKAAWEAAKENNIDFISIIPTLVVGPFIMPTFPPSLITALSPITRNEGHYSIIKQGQFVHLDDLCESHIFLYERPQAEGRYICSSHDATIHDLAKLMREKWPEYNVPTEFKGIDKDLPVVSFSSKKLIGMGFEFKYSLEDMFRGAIDTCREKGLLPHSFAENPVNGNKV

SEQ ID NO: 15554 - protein, 480 aa, Photobacterium profundum SS9
MSSSVETSSKKHNLSYIIRICCIAALGGILLGYDTAVISGAIGPIREYFNLTAAQTGWAVSSVVLGSIIGAISSGWCALKYGRRKALFLAALLFIISAIGSALAATFTIYVLFRIVGGIAVGLACVVSPMYMSEVAPKDFRGRAVSMFQQSAVIGQTGVFYVNYLIAKGMSEAWLVDIGWRWMLASEVLPALLFGSLLIIIPESPRWLVLKGHLDQAKETLSRISNPEHADRVILEIQKSLVPTNASKNNKVSLRSPLLFSILVIGTFVAAAQQLTGINVIMYYTPEILNPIAGGTENALLQTTFVGVVFIFGNALGMYLIDKVGRLPLMKYGTFGCALGMTIVGYVLYTGTEGYAALFALCLYVVAYAASWGCACWTMISEIFPNSIRSRAMAIAVGAQWFTGFIVTQSFPMLNENAYLKEHFNGAFSFWVFAVLSIMCMYVVVKYVPETKGVSLEDMEKVMAEKLGKNKKRQVAEASA

SEQ ID NO: 15555 - protein, 1109 aa, Oryza sativa (japonica cultivar-group)
MTMSDDGDRTCPLCAEDMDITDQQLKPCKCGYEICVWCWHHIIDMAEKEDTEGRCPACRTRYDKDRIVKMAATCDRTVVEKNVDKKQKTQKVKSKAAVTVEAKKHLASVRVIQRNLVYIIGLPANLCNESILERREYFGQYGKVLKVSVSRPTGAPSQQAPTNNSISVLIELRTFAYADVRYITYAKEEEAIRCIQAVHNFVLEGKVLRACFGTTKYCHAWLRNMTCGNPDCLYLHDVGSQEDSFTKDEIISAYTRSRVPQMASNVSQRRAGTVLPPPAEDFSYSAVVAAKHPIKNGITNTANQSRLSPPNSSSGRSTLPPAASWGHRDLNTRTTATGVASSQSLTKSKADPQSNSFSSSSTVSSTKLPSSWNDDTSTVPKMTEGRDSLSKTLKPYKPGIAKETQAVTSLESSLDIDFSTIPSAWNDDDVTSDGMSKGSDEKQVVNDNGKFECSVSSKPAESGHLTSKSTTSPKKDIAVNSTRQSPLNCVSSPSVSKSEVKDGDGDYQVTNMASKTSTLVIRKDQSNQAAIDTATEDTRSESTDIDRLSVGVSSVTLSRKDGVQSIAENQQPDAILSTSVVVPFSQNLKLAECNDSTCQPSSDKHRDWCSDIQSSVSPQLNDIESYAVATDKSHGRVLDAADQASSSPYVHFPNTAPISLWNGKEINHTSTSDRTSTMMQPGLLSSVDSTSTMLNGHQEGLGTIYAPGKVSEHPRMKNHQPGAVGAVRIDNIGSFDKAVSVNKDESSIIADILSLEFDPWDESYSTANNFAKMLSASEKNDVLFDARSWKTKTSNSESRFSFARQDNQGSLLDSSMRNYKSEQNFSLPSQNSHGNIYQSGIAFQSPEEGFSKSNSLTMLDMLATGTSKPKVSAPPGFSAPARVPTGFSSGFSSHEGLNPPPGFSSHNGPNPPPGFSSQGGSNQIYGSAYSETRPFDDLLGINTSHYQPQLARQTSDIEFVDPAILAVGKGRMPGISDSGLEMKTSHTFPSQLQTSNDPRFQLLMQQNMPSHQNVGFAEHVQDAFNPMNDNYLASRLIPQNHGSLSSYTQMSLQQPRSSHLTNGHWDGWGDLRQGNNVSMPDMSRMLYPTEANNFHMLGSNDLYNRAFGL

SEQ ID NO: 15556 - protein, 133 aa, Medicago sativa
MAVPLLTKKIVKKRVKRFIRPQSGRKICVKQSWRRPKGIDSRVRRKFKGVTLMPNIGYGSDKKTRHYLPNGFKKFVVHNVQDLELLMMHNRTYCAEIAHNVSTRKRKEIVERAAQLDVVVTNKLARLRSQEDE

SEQ ID NO: 15557 - protein, 111 aa, Glycine max
  misc_feature (65)..(65): Xaa can be any naturally occurring amino acid
MDLAKGKWKQNMIFKAWERCRLTSRPHLKLKSLSENDDDDHHEKKKKKNSQIAPHGCFSVHVGPXEKKVVVKTKYVNHPLFQMLLEEAEHEYGFESDGPIWLPCNVDLFYK

SEQ ID NO: 15558 - protein, 234 aa, Bacillus licheniformis
LAIPPLNYPVNLFAAKLAPALIMGSAVIFKPATQGAISGIKMVEALHKAGLPKGLVNVATGRGSVIGDYLVEHEGINMVSFTGGTNTGKHLAKKASMIPLVLELGGKDPGIVREDADLQDAANHIVSGAFSYSGQRCTAIKRVLVHENVADELVSLLKAQVAELSVGSPEQDSTIVPLIDDKSADFVQGLVDDAVEKGATIVIGNKRERNLIYPTLIDHVTTDMRLAWEEPFGP

SEQ ID NO: 15559 - protein, 1032 aa, Oryza sativa
  misc_feature (267)..(267): Xaa can be any naturally occurring amino acid
  misc_feature (335)..(335): Xaa can be any naturally occurring amino acid
MERARRLANRALLRRLLAAATAESPAAPSRGISTLAKGSRPRAPPRPAPHQYTTGRRPVSASALQPSDTFPRRHNSATPAEQAAMASECGFGTVDALIDATVPAAIRAPEMRFSGRFDAGFTESEMIEHMQRLAAMNRAYKSFIGMGYYNTHVPAVILRNLMENPAWYTQYTPYQAEIAQGRLESLLNYQTMVADLTGLPMSNASLLDEATAAAEAMAMCNGILKSKKKTFLIASNCHPQTIDVCQTRAAGFDLDVVVADAKDFDYXAGDVCGVLVQYPGTEGEVLDYAEFVRDAHAHGVKVVMATDLLALTSLRPPGEIGADIAVGSAQRFGVXPMGYGGPHAAFLATSQEYKRLMPGRIIGVSVDSSGKPALRMAMQTREQHIRRDKATSNICTAQALLANMAAMYAVYHGPEGLKAIADRVHGLAGTFAQGLKKLGTVTVQELPFFDTVKVKVADANAIAQEACKNEMNLRVVDATTITVAFDETTTLEDVDKLFKVFNGGKPVNFTAESLAPEVSSSIPSSLVRKSPYLTHPIFNMYHTEHELLRYLYKLQSKDLSLCHSMIPLGSCTMKLNATVEMMPVTYPNFANMHPFAPTDQAAGYHEMFDDLGDLLCKITGFDSFSLQPNAGASGEYAGLMVIRAYHRARGDYHRDVCIIPVSAHGTNPASAAMCGMKIVAVGTDSKGNINIEELRKAAEANKDNLAALMVTYPSTHGVYEEGIDEICMIIHENGGQVYMDGANMNAQVGLTSPGFIGADVCHLNLHKTFCIPHGGGGPGMGPIGVKKHLAPFLPSHPVITTGGFPLPEKTDPLGTISAAPWGSALILPISYTYIAMMGSKGLTDASKIAILNANYMTKRLEKHYPVLFRGVNGTVAHEFIIDLRGFKTTAGIEPEDVAKRLMDYGFHAPTMSWPVPGTLMIEPTESESKAELDRFCDALISIREEIAEIESGKADVNNNVLKSAPHPPQLLMSDSWTKPYSREYAAFPAAWLRGAKFWPTTCRVDNVYGDRNLICTLQQGSQVAEEAAAATA

SEQ ID NO: 15560 - protein, 335 aa, Parvularcula bermudensis HTCC2503
MTVKVGINGFGRIGRLALRSMLEHGRTDIEVVAINDLGPVETNAHLLQYDSVHGRLPMTVSTGDGKLTVDGKSIAVFAERDPKALPWGDHGVDVVMECTGIFTDRDKAAQHLAAGAKRVLISAPGKDADKTIVYGVNHDVLTADDHVVSNASCTTNCLSPVAKVLNDAIGIEKGMMTTIHSYTGDQPTLDTMHKDLYRARAAAMSMIPTSTGAAKAVGLVLPELNGKLDGFAMRVPTPNVSVVDLKFIAARDTSVEEINAAIREAADGPMKGILGYTLVKNVSTDFNHDSHSSIFHMDQTKVMDGSLVSVLSWYDNEWGFSTRMADTALAMAKFI

SEQ ID NO: 15561 - protein, 409 aa, Erythrobacter sp. NAP1
MRRVVITGLGIVSSIGNNADEVLASLKAGKSGISFNEEMAEHGFRSQIAGAIDLDVKEHVDKRTLRFMGPGAAYAHIAMGQAIADAGLEEKDVINPMTGVIAGSGGPSTSAMLAAHQSVLKTGGTKRIGPFAVPKTMSSTVSANLATAYQIKGMNFSITSACSTSLHCIGMAAQQIALGTQDVMFGGGGEELDWTLSCLFDAMGAMSSKYNDTPERASRAFDADRDGFVIGGGGAMVVLESLEHAQARGAKIYAEVTGFAATSDGADMVAPSGEGGERAMRGAIRTLGEDRKVSYINAHGTSTPVGDVGEIEAVRRVFGDGSTPPVSSTKSMTGHSQGATGAQEAVYCLLALENDFIIPSINVETLDPALKPEEIATKLVENAGLDTVMTNSFGFGGTNGSMLLSKFHG

SEQ ID NO: 15562 - protein, 136 aa, Methanocaldococcus jannaschii
MVIIMPGTKQVNVGSLKVGQYVMIDGVPCEIVDISVSKPGKHGGAKARVVGIGIFEKVKKEFVAPTSSKVEVPIIDRRKGQVLAIMGDMVQIMDLQTYETLELPIPEGIEGLEPGGEVEYIEAVGQYKITRVIGGK

SEQ ID NO: 15563 - protein, 234 aa, Clostridium acetobutylicum
LAISPFNYPVNLSGSKVAPALIAGNSVVLKPSTTGAISALHLAEIFNAAGLPAGVLNTVTGKGSEIGDYLITHEEVNFINFTGSSAVGKHISKIAGMIPMVLELGGKDAAIVLEDANLETTAKSIVSGAYGYSGQRCTAVKRVLVMDKVADELVELVTKKVKELKVGNPFDDVTITPLIDNKAADYVQTLIDDAIEKGATLIVGNKRKENLMYPTLFDNVTADMRIAWEEPFGP

SEQ ID NO: 15564 - protein, 236 aa, Clostridium perfringens
LAIPPFNYPVNLSASKIAPAIVAGNSVVLKPATQGSLSALFLAKMFHDAGLPGGVLNTVTGRGSEIGDYCVTHDKIDFINFTGSTEVGRRISEITVMKPLLMELGGKDAAIVLEDADLDLTVNNIIAGGYSYSGQRCTAVKRILVMNSVADKLVEKLKEKISKLKMGNPLEVEDVTIVPLIDNKAADFVMELIDDAKEKGATLVCGGHREGNLIEATLFDDVTTDMRLAWEEPFGP

SEQ ID NO: 15565 - protein, 235 aa, Clostridium pasteurianum
LAIPPFNYPNVLSASKIAPALMAGNSVVLKPATQGSLCGLFLARVFEKAGVPAGVLNTVTGKGSEIGDYVTTHKEINFINFTGSTEIGARISKMTSMVPLLMELGGKDAAIVLEDADLELSANNIVAGAYSYSGQRCTAVKRVLVVDKVADKLVEKIKENIAKLTVGNPLEKDADVVPLISSKAADFVYVLIEDAKGKGADLVVGGNRDDNLIYPTLIDNVTPDMRLAWEEPFGP

SEQ ID NO: 15566 - protein, 309 aa, Prunus persica
MESKGGKKKSSSSKSLFYEAPLGYSIEDVRPHGGIKKFRSAAYSNCVRKPSMAVPVSAIGFEGYEKRLEVSFFEPGLFADPAGMGLRSLSKDQLDEILKPAECTIVSSLSNDDLDSYVLSESSLFVYPYKVIIKTCGTTKLLRSIPAILKLAETLSLAVKSVRYSRGSFIFPGAQPSPHRSFSEEVAVLDGHFGKLGLVSRAYVMGSSDKTQKWHIYSASAELASLLWGARQSGPTYTLEMCMTGLNRKKASVFYKSKASSAAGMTEESGIRKILPQSEICDFEFDPCGYSMNSIEGNAISTIHVTPEE

SEQ ID NO: 15567 - protein, 490 aa, Synechocystis sp. PCC 6803
MVYTPAPIKFGTDGWRGVIAAEFTFERVVLVAAAAAQVLAAEFGSSGREHRLIVGYDRRFMAEQFALLVAQTVQELGFEVWLSESYAPTPAFSWAAHHENALGALVLTASHNPANYLGLKVKGAFGGSVGSDVTEKIEAQLQNSLPQPQAGGSLQYFDPWPSYCQGLQAKVNVQPIREAVQQGKLRVFADVMHGAAASGLERLLGCPIDEINGDRDPLFGGASPEPLPKYVPKLLAALQTAAKAGGPELRVGLIFDGDADRIAAVDGQGNFLSSQGLIPILIYHLATQKGLQGEIVKTVSGSDLIPKLAELYGIPLTETAIGYKYIADRMLTSPVLIGGEESGGIGYGGHIPERDALLSALYVLETVVQSQQDISEQYGRLQEKVCFVSEYDRIDLPLASMDVRTALVQTLNENPLTAIAGEQVTDLLTTDGYKFRMAGGGWLLIRFSGTEPLLRLYCEAPTSSRVQTVLHWAKDWANGVTPAKPAQSSH

SEQ ID NO: 15568 - protein, 369 aa, Chorispora bungeana
MNAGGQFTDFPAVQTHGGQFISYDIFGSLFEITSKYRPPIIPIGRGAYGIVCSVLDSETNELVAMKKIANAFDNHMDAKRTLREIKLLRHLDHENIIAIRDVVPPPLRRQFSDVYIATELMDTDLHQIIRSNQSLSEEHCQYFLYQLLRGLKYIHSANVIHRDLKPSNLLLNANCDLKICDFGLARPTSENEFMTEYVVTRWYRAPELLLNSSEYTAAIDVWSVGCIFMELMNRKPLFPGKDHVHQMRLLTELLGTPTESDLGFTHNEDAKRYIRQLPSFPRQPLAKLFSHVNPLAIDLVDRMLTFDPNRRITVEEALNHQYLAKLHDPNDEPICQKPFSFEFEQQPMDVEQIKEMIYKEAIALNPTYG

SEQ ID NO: 15569 - protein, 236 aa, Clostridium sporogenes
LAIPPFNYPVNLSASKIAPAIVAGNSVVLKPATQGSLSALFLAKMFHDAGLPGGVLNTVTGRGSEIGDYCVTHDKIDFINFTGSTEVGRRISEITVMKPLLMELGGKDAAIVLEDADLDLTVNNIIAGGYSYSGQRCTAVKRILVMNSVADKLVEKLKEKISKLKMGNPLEVEDVTIVPLIDNKAADFVMELIDDAKEKGATLVCGGHREGNLIEATLFDNVLRDMRIAWEEPFGP

SEQ ID NO: 15570 - protein, 455 aa, Bacteroides fragilis NCTC 9343
MARFEIKMPKLGESITEGTILSWSVQVGDVVNEDDVLFEVNTAKVSAEIPSPVAGKVVEILFKEGDTVPVGTVVAIVDMDGEGSGEASETAGSVETASAPKAAEVSDTASVPKVQAEVAAPKVERWYSPAVLQLAREAKISQEELDSIPGTGYEGRLSKKDIRTYIEMKKGAPAADVSTTVVSTVLANNSGSSPVPSAEVQKKAAAAAPQAQHGQSASAVSSDASVEVKEMDRVRRIIADHMVMSKKVSPHVTNVVEVDVTRLVRWREKTKDAFFRREGVKLTYMPAIAEATAQALAAYPQVNVSVDGYNILYKKHINVGIAVSQDDGNLIVPVVHDADRLNLNGLAVAIDSLAKKARVNKLMPDDIDGGTFTITNFGTFKMLFGTPIINQPQVAILGVGVIEKKPAVVETPEGDVIAIRHKMYLSLSYDHRVVDGSLGGNFLHFIADYLENWKE

SEQ ID NO: 15571 - protein, 345 aa, Sinorhizobium meliloti
MTEYKKPIITEMRPKITVIGVGGGGGNAINNMIAENLQGVDFIAANTDAQALATSKAERRIQLGAAITEGLGAGSVPDIGNAAAQESIDEIMDHLGGTHMCFVTAGMGGGTGTGAAPVIAEAARRAGILTVAVVTKPFSFEGQRRMQTAELGVERLRESADTVIVIPNQNLFRIADAKTTFADAFMIADRVLYSGVSCITDLIVKEGLMNLDFADVKTVMKGMGRAMMGTGEATGENRAMLAAEAAIANPLLDEVSMRGAKGVLVSISGGMDMTLFEVDEAATRIREEVYDEADIVVGAIFDRSLDGTFRVSVATGLDSNRSAQPTAPEAMNGQTAAAVPSRTLQ

SEQ ID NO: 15572 - protein, 122 aa, Hordeum marinum
DIEETLKRLVFDMKKSPAEVFDALKNQTVDLVLTAHPTQSVRRSLLQKHSRIRNCLVQLYSKDITPDDKQELDEALQREIQAAFRTDEIRRTQPTPQDEMRAGMSYFHETIWKGVPKFLRRV

SEQ ID NO: 15573 - protein, 678 aa, Bacteroides fragilis NCTC 9343
MKKYDIKTTDEQTLRKWYHLMTLGRALDEKAPAYLLQSLGWSYHAPYAGHDGIQLAIGQVFTLGEDYLFPYYRDMLTVLSAGMTPEELILNGISKATDPGSAGRHMSNHFAKPEWHIENISSATGTHDLHAAGVGRAMVYYGHKGVAITSHGESATSEGFVYEAINGASNERLPVIFVFQDNGYGISVPKKDQTANRKVADNFSGFKNLRIIHCNGKDVFDSMNAMTEAREFAIANRTPVIVHANCVRIGSHSNSDKHTLYRDENELAYVKEADPLMKFRRMLLRYKRLTEEDLQQIEAAAKKELAAANRKALAAPDPIPESIYDFVLPEPYIPQKYKDGLPGPVEGEKSFMVNAINETLKEEFRRNPDTFIWGQDVANKDKGGVFNVTKGMQQEFGDARVFSAPIAEDYIVGTANGMCRFDPKIHVVIEGAEFADYFWPAVEQYVECTHEYWRSNGKFTPNITLRLASGGYIGGGLYHSQNLEGALTTLPGARIVCPSFADDAAGLLRTSMRSKGFTLYLEPKALYNSVEAAAVVPEEFEVPFGKARIRREGTDLTIITYGNTTHFCLDVAERLAREGVGSVEVIDLRSLIPLDKEAIFASVRKTGKVMVVHEDKVFSGFGAEIAAQIAGEMFRYLDAPVQRVGSTFTPVGFNPILERAILPNDEKIYKAAKELLEF

SEQ ID NO: 15574 - protein, 120 aa, Hordeum murinum
DIEETLKRLVFDMKKSPAEVFDALKNQTVDLVLTAHPTQSVRRSLLQKHSRIRNCLVQLYSKDITPDDKQELDEALQREIQAAFRTDEIRRTQPTPQDEMRAGMSYFHETIWKGVPKFLR

SEQ ID NO: 15575 - protein, 462 aa, Xanthomonas axonopodis pv. citri str. 306
MPLPTDSVAETAAPAAPALRHALKPRQLMMMGLGTAIGAGLFLGSGVGIHAAGPAVLISYLIAGALVIIVMNALGEMAAAKPASGAFSVYAADAMGPTAGATVGWLWWFQIVVVIAAEAVGAAGLLATVWPALPVPLLSLLFMATFTAINLLGVRNFGEFEFWFAILKVLAIVVFLLIGVALLAGWLPGVASPGLSNFTQNGGFAPKGLAGIGSALLVVVFAFGGTEIVAVAAAETADPGRSLARTIRTVAWRILVFYIGSISVIVAVVPWTSAALSSPFAAVLEVARIPGAATAITLVAVVALLSALNANLYGASRMIFSLAQRGEAPRLLARTSGEQVPLVAVIASVLFGFAAAALELLYPNKVLPMLLNIVGATCLLVWTISLVSQLILRARADRAGLALPFRMRGYPFLTVLALVILAVIFVLLASSADTRAQFLSMVALTAVIAAVSEIARRVRARM

SEQ ID NO: 15576 - protein, 110 aa, Hordeum vulgare
RLVFDMKKSPAEVFDALKNQTVDLVLTAHPTQSVRRSLLQKHSRIRNCLVQLYSKDITPDDKQELDEALQREIQAAFRTDEIRRTQPTPQDEMRAGMSYFHETIWKGVPK

SEQ ID NO: 15577 - protein, 460 aa, Bradyrhizobium sp. BTAi1
MSSHRFIPVAAALVSLLAFTAGAAAQTTFASEPPASFTLPNGLQVVVIQDHRTPVVTQMIWYKVGSADETPGKSGLAHFLEHLMFKGTEKHPAGEFSKTVLKIGGNENAFTSVDYTGYFQRVPRDQLPKMMEFEADRMTGLVLKDENVLPERDVVLEEYNMRVANSPEARLNEQIMAALYVNHPYGRPVIGWKPEIEKLSREDALAFYRRFYAPNNAILVIAGDTDAKEVRPLVEQTFAKIPSQADIPARRLRPQEPEPVAPRTVTLADPHVEQPSMRRFYLVPSATTAAPGQSAALDVLAQLMGSGSNSYLYRALVVDKPLAINASASYQGTSLDPTQFSIAVAPRPGVDFAQVEAVVDSVIAEIAQNPVPASDLERVKTQLIAEAIYAQDNQATMARWYGGGLTTGLSIEDIRSWPDRIRAVTAEQVRAAAQTWLQKTRSVTGYLVKDNAAKREEKRS

SEQ ID NO: 15578 - protein, 191 aa, Synechococcus elongatus PCC 7942
MTADNSVPSRLRNILVIAAALVLTILVVLGSRQPSAAASLASLAEQATPYEVAIANDRPMLLEFYADWCTSCQAMAGRIAALKQDYSDRLDFVMLNIDNDKWLPEVLDYNVDGIPQFVYLNGQGQPQGISIGELPRSVLAANLDALVEAQPLPYTNARGNLSEFSADLQPSRSSQTDPRSHSGQVQDGVLD

SEQ ID NO: 15579 - protein, 460 aa, Xanthomonas axonopodis pv. citri str. 306
MIDTPRRDDAATLERFGYAQELKRQLTLKDLLIYGLVCMVPTAPFSIFGGVFDISAGMVPLTYLVGFVAMLFTALSYQQMSQAFPVAGSVYAYVGRGLSSGMGFLAGWAILLDYLLVPTLLYVVGANAMHTVLPAVPQPAWIAFFVVLNTVVNLRGIETTARANRFFLLAQLLVLAVFVVLATLAIQRGVNGAHWSWRPLYNPQAFSPQLIFSALSVAVVSFLGFDAISTMSEEARGGNRVVGRATLLALLIVAGLFVLQTWLAALLQPTLQRYPSAQASNDAFFEIGRLIAGPWLQIVIALTVAISAAIANSLVAQAATSRLLFAMARDRQLPGFLRYIHPRTGVPQRAILLVAGLSLVLGEVFVGQIALLSSLCNVGALTAFVLLHIAVLWHFRTQGRHVLHGAVPLIGIVILAYVLLNADLHAQLGGAAWMAVGLAVLAFLKLSGRSTEFRASDALE

SEQ ID NO: 15580 - protein, 471 aa, Dehalococcoides sp. CBDB1
MKFGTDGWRGIIAKDFTFENVSVCAQATAAYLKNTSPDNLSLVIGYDTRFASADFARLVAEVMAASGIKTYFGSCPTPTPVISHGVVNLKAAGAVIITASHNPAIWNGFKVKSADGASAPTYMITAIETEIAKLGDNPSVSRLDFDTAVSRGLIECIDLAPAYFEQISKLVDIEKLREAGFNIAIDSMYGAGIGYFKHLLEGGCNRLNEINAEPNPNFPDVLQPEPIAPNLNKLMRLVKDIRSDIGLATDGDSDRLGVVDEMGNFLNQLQVFSLLALYILEVKGLRGPLVKTITNSSMIDKLGKLYNVPVFETKVGFKYVSPVMIEQNALIGGEESGGYGFAGHVPERDAILAGAYFLDFMITTGKSPAKMLEYLYSKVGPHYYNRVDYTFDEARREEIMNHLANQKPESLAETKVSSTDRLDGFRYKLEDGSWLLIRFSGTEPLLRIYAESPSQDKTASLLENGRKLSGI

SEQ ID NO: 15581 - protein, 436 aa, Dioscorea quinquelobata
QKIDRMYNGEKINCTENRSVLHIALRAARDKVIESDGKNVVPDVWHVLDKIKEFSERIRSGSWVGATGKALTDVVAVGIGGSFLGPLFVHTALQTDPEAAECAKGRQLRFLANVDPIDVARSIAGLNPETTLVVVVSKTFTTAETMLNARTLREWISGALGPQAVAKHMVAVSTNLTLVEKFGIDPANAFAFWDWVGGRYSVCSAVGVLPLSLQYGFSVVHKFLKGAASIDDHFHSTPFEKNIPVLLGLLSVWNVSFLGYPARAILPYSQALEKFAPHIQQVSMESNGKGVSIDGIPLPFETGEIDFGEPGTNGQHSFYQLIHQGRVIPCDFIGVMRSQQPIYLKGEVVSNHDELMSNFFAQPDALAYGKVADQLLNEKVPDHLIPHKTFPGNRPSLSLLLPSLNAYNVGQLLAIYEHRIAVEGFVWGINSFDHWG

SEQ ID NO: 15582 - protein, 459 aa, Corynebacterium diphtheriae
MGPYNYGWHDSDEAGKKARRGLDEDVVRYISAQKNEPEWMLEQRLKALNTFEKKPMPTWGPDLSYINFDDFKYYVRSTEKQATTWDDLPEDIKNTYDKLGIPEAEKQRLVAGVAAQYESEVVYHQIREDLETQGVIFLDTDTALKEHPELFQEYFGTVVPAGDNKFSALNSAVWSGGSFVYVPKGVHVEIPLQAYFRINTENMGQFERTLIIVDEGAYVHYVEGCTAPIYQSDSLHSAVVEIIVKKNARCRYTTIQNWSNNVLNLVTQRSKVEEGGTMEWVDGNIGSKVTMKYPAVWMVGPHAKGEVLSAAFAGEGQIQDTGAKMQHMAPYTSSNIVSKSVARSGGRAAYRGLVRVAANAHHSVSNVECDALLVDNISRSDTYPYNDIRNDHVSLGHEATVSQVSEEQLFYLQSRGIAEDEAMAMIVRGFVEPIAKELPMEYALELNRLIELQMEGSVG

SEQ ID NO: 15583 - protein, 566 aa, Zymomonas mobilis subsp. mobilis ZM4
MLHNPATKYRPFPAIDLPNRQWPSQVIKKAPIWLSTDLRDGNQALANPMDGEKKRRLFDLLVSIGLKEIEVGFPSAGATEFDFVRSLIEQNAVPEDVTLQVLTQARQDLITKSFDSLEGIHRAIIHVYNAVSPAWRRIVFNMERPEIKKLAIAGVTMLRDEAEKRPGTDWRFEYSPETFSTAELDFSLEVCEAVLDVLQPTPEKPLTINLPATVEAAMPNIYADQVEWFCRNISRRDSIIVSVHPHNDRGTGIAAAEMALLAGADRVEGCLFGNGERTGNVDLVTLALNLYTQAINPNIDLSDIDKVIKTVEYCTELPVSPRHPYAGDLVFTAFSGSHQDAIRKGFTQRAERKAKEEGEIIWDVPYLPIDPADLGRSYEAVIRVNSQSGKGGVAWVIEQDQGLKMPRRMQVDFSRKVQELADSSSKELDSSDIWNAFVDYYHLDNSGHFQLVDFQVKQGDNGYAIIGKIKAGDTIHEVEGHGNGLISSIIDALSSITNIRLEVVDYQEHAISHGNTAQAAAYIECSLPQGGTVFGVGVDDDIATASVRAVLSAVNRAYAVDPKSVG

SEQ ID NO: 15584 - protein, 555 aa, Kluyveromyces marxianus
MKFAYSLLLPLAGVSASVINYKRDGDSKAITNTTFSLNRPSVHFTPSHGWMNDPNGLWYDAKEEDWHLYYQYNPAATIWGTPLYWGHAVSKDLTSWTDYGASLGPGSDDAGAFSGSMVIDYNNTSGFFNSSVDPRQRAVAVWTLSKGPSQAQHISYSLDGGYTFEHYTDNAVLDINSSNFRDPKVFWHEGENGEDGRWIMAVAESQVFSVLFYSSPNLKNWTLESNFTHHGWTGTQYECPGLVKVPYDSVVDSSNSSDSKPDSAWVLFVSINPGGPLGGSVTQYFVGDFNGTHFTPIDGQTRFLDMGKDYYALQTFFNTPNEKDVYGIAWASNWQYAQQAPTDPWRSSMSLVRQFTLKDFSTNPNSADVVLNSQPVLNYDALRKNGTTYSITNYTVTSENGKKIKLDNPSGSLEFHLEYVFNGSPDIKSNVFADLSLYFKGNNDDNEYLRLGYETNGGAFFLDRGHTKIPFVKENLFFTHQLAVTNPVSNYTTNVFDVYGVIDKNIIELYFDNGNVVSTNTFFFSTNNVIGEIDIKSPYDKAYTINSFNVTQFNV

SEQ ID NO: 15585 - protein, 269 aa, Bordetella pertussis Tohama I
MSAADQPPRYGTLTLQTDGALAILTLDRPAALNAIDIAMARDLQAAARWLQDRAALRVVLLRGAGKAFCAGGDIALFQGPPEEIRASLRALFTPLNDCVARIAAMDQLWLADVHGVAAGAGLSLALACDLAIAADDARLVTAYLKLGATPDAGMTHALAHLLGRRRALALLLRAEPIDAAQALQWGLVDRVAPAAERADQALAYARELAAHAPHDVAAAKRLLRQAPATSLEQQLEDEAAAFLAAAGRADFAEGVQAFLAKRPPRFTGA

SEQ ID NO: 15586 - protein, 347 aa, Cyanophora paradoxa
MKNNNRPIFPFTAIVGQEEMKLALLLNIVDPKIGGVMIMGDRGTGKSTTIRALADLLPEIDIVANDPFNSHPTDIELMSDNVRQLKENGEEISLIQKKVPMIDLPLGATEDRVCGTIDIEKALTEGVKAFEPGLLAQANRGILYVDEVNLLDDHLVDILLDSAASGWNTVEREGISIRHPARFVLVGSGNPEEGELRPQLLDRFGMHAEIRTVKDPTLRVQIVEERSEFDRSPEDFLQEYKLQQEVLRQRIINAQQQLNNVQLNYEIKVKISQVCSELDVDGLRGDIVTNRAAKALAAFEGRDEVTVDDVLRIITLCLRHRLRKDPLEEIDSGQKVEKVFQRIFSNL

SEQ ID NO: 15587 - protein, 556 aa, Kluyveromyces marxianus
MKLAYSLLLPLAGVSASVINYKRDGDSKAITNTTFSLNRPSVHFTPSHGWMNDPNGLWYDAKEEDWHLYYQYNPAATIWGTPLYWGHAVSKDLTSWTDYGASLGPGSDDAGAFSGSMVIDYNNTSGFFNSSVDPRQRAVAVWTLSKGPSQAQHISYSLDGGYTFQHYSDNAVLDINSSNFRDPKVFWHEGENGEDGRWIMAVAESQVFSVLFYSSPNLKNWTLESNFTHHGWTGTQYECPGLVKVPYDSVADSSSNSSDSKPDSAWVLFVSINPGGPLGGSVTQYFVGDFNGTHFTPIDDQTRFLDMGKDYYALQTFFNTPNEKDVYGIAWASNWQYAQQAPTDPWRSSMSLVRQFTLKDFSTNPNSADVVLNSQPVLNYDALRKNGTTYSITNYTVTSENGKKIKLDNPSGSLEFHLEYVFNGSPDIKSNVFADLSLYFKGNNDDNEYLRLGYETNGGAFFLDRGHTKIPFVKENLFFNHQLAVTNPVSNYTTNVFDVYGVIDKNIIELYFDNGNVVSTNTFFFSTNNVIGEIDIKSPYDKAYTINSFNVTQFNV

SEQ ID NO: 15588 - protein, 411 aa, Bacillus sp. MGA3
MGLIVQKFGGTSVGSVERILNVANRVIEEKKNGNDVVVVVSAMGKTTDELVDLAKQISAHPPKREMDMLLTTGEQVTISLLAMALNEKGYEAISYTGWQAGITTEPVFGNARILNIETEKIQKQLNEGKIVVVAGFQGIDEHGEITTLGRGGSDTTAVALAAALKAEKCDIYTDVTGVFTTDPRYVKSARKLASISYDEMLELANLGAGVLHPRAVEFAKNYGITLEVRSSMEREEGTIIEEEVTMEQNLVVRGVAFEDEITRVTVFGLPNSLTSLSTIFTTLAQNRINVDIIIQSATDAETTNLSFSIKSDDLEETMAVLENNKNLLNYQGIESETGLAKVSIVGSGMISNPGVAAKMFEVLALNGIQVKMVSTSEIKVSTVVEESQMIKAVEALHQAFELSGSAVKSER

SEQ ID NO: 15589 - protein, 326 aa, Thermoplasma volcanium GSS1
MNLYRGMEFNLRSVSTEAKERDFDVIIIGAGAAGFSAAVYASRSGLSAVILDKNVAGGLTAEAPLVENYLGFKSIVGSDLAKNFAEHASEYASIREGVEVKSVKKGDGGFIVDTSDGEYHSKYIIITTGTTHKHLGVKGEAEYFGKGVSYCSTCDGYLFKNKNVVTIGGGNSGAIAAISMSEYVKNATIVEYMPRYMCENAYIEEIKKRKIPYIMNAQVTEIVGDGKKVTGVKYKDRSSGEEKTLPADGVFVYVGLIPQTSFLKDSGVKLDERGYIIVDGRQRTNVPGIYAAGDVTSGSFAQIASAVGDGCKAALSLYSDTISSKK

SEQ ID NO: 15590 - protein, 234 aa, Bacillus thuringiensis
LAIPPINYPVNLSAAKLAPALIMGNAVIFKPATQGAISGIKMVEALHKAGLPKGLVNVATGRGSVIGDYLVEHEGVNMVSFTGGTNTGKHLAKKASMIPLVLELGGKDPGIVREDADLQDAANHIVSGAFSYSGQRCTAIKRVLVHENVADELVSLLKAQVAELSVGSPEQDSTIVPLIDDKSADFVQGLVDDAVEKGATIVIGNKRERNLIYPTLIDHVTKEMKVAWEEPFGP

SEQ ID NO: 15591 - protein, 502 aa, Photobacterium profundum SS9
METVQNFINGQITESRSERFAPIYNPATGEQTRQVVLSSAAEVEQVVAVADAAFPAWAKTSPLKRARVMFKFKALLEQNMDKLARIISNEHGKVYSDAVGEVTRGLEVVEFACGIPHLQKGEHSANVGTGVDSHSLMQPLGVCVGVTPFNFPAMVPMWMFPISLATGNTFILKPSEKDPSLALELAKLLKEAGLPDGVFNVVNGDKEAVDVLLTEPRVQAVSFVGSTPIAEYIYSTASAHGKRCQALGGAKNHCILMPDADLEMAANAIMGAAFGAAGERCMALSVAVVVGDETGDKLIANLTDQIAKMHIGPGIVDGTENDMGPVISAVHKAKICDYITTGVEQGASLLIDGRNLVIEGHEEGYFVGPTLFDNVLPEMTIYKEEIFGPVLAIVRVPDYQTGLDLINRHEYGNGTAIFTRDGETARQFSEDVLAGMVGINVPIPVPMAFHSFGGWKRSVFGPLNVHGNDGVRFYTRMKTVTSRWPASVRLEQHTSAFTMPTM

SEQ ID NO: 15592 - protein, 103 aa, Pediococcus pentosaceus ATCC 25745
MVEAITDANFEEKTNTGVTLTDFWATWCGPCRMQSPVVEQLADEMGDKVSFSKMDVDQNPETARNFGIMSIPTLLVKKDGAVVDSIVGYHSKEQLAKILDQYI

SEQ ID NO: 15593 - protein, 315 aa, Leifsonia xyli subsp. xyli str. CTCB07
MIVTLTANPSLDRAVALAGPLRPGEVQFAASSREDAGGKGITVARVIAAAGVSTLAVLPLAGDDPFGAVLRSSAVPTRPVAIHGHARANLTITDPAGATTKLNLPGATLRAEEAETLGEAVVDACAGASWLVLAGSLPPGVGDDFYVTVIRAVRERWGEAAPRVAVDTAGEALRTVVADARPDLIKPNDDELAELSGAALDPGDVERSVLRVARTLVPGRVGAALITLGSRGSILVTPSGGYVAAAPRIRVQSTVGAGDSALAGYLLADVAGASAPQRLAGAIRYGSAAAALPGTQAPHPADLPRDDIRVAALQP

SEQ ID NO: 15594 - protein, 408 aa, Candidatus Kuenenia stuttgartiensis
MQFNSIQEVIEDLRNGKMTILIDDESRENEGDLILAAEKVTPEAINFILTHARGILCLAINAKRAEELDFYPMVSNNTSSFQTPFTVSVDAAREISTGVSSKDRATTILTAIDDNATAEDFVRPGHIFPLKAHNGGVLVRAGHTEGAVDLTRIAGLKNAAVICEIMREDGNMAKLPDLKKFAEKNNLKICTIADIIKYRHEQERLIEKRVTAKLPTIYGEFILHLYRSFVDEYLHLALCLEVGSKDINTPSPMQNEPILVRVHDECLTSDVFGSLRCDCGEQLHNALKIIKENGKGVLLYMRQEGRGIGLENKLHAYHLQDKGLDTVEANEKLGLPVDKRDYGIGAQILRDLGITKMRLLSNNPKKFAALAGYGLEIVERVPIVVEPNAENQKYLRTKKEKLGHMIET

SEQ ID NO: 15595 - protein, 234 aa, Clostridium difficile
LAISPFNYPVNLSMSKIAPALIGGNAVVLKPATQGAISALHVVEIMRKAGIPDGVLNTITGRGSEIGDYVVTHKGINFINFTGSTEVGQHISKISGMVPLLLELGGKDAAIVLEDADLDFAAKNIVSGAYSYSGQRCTAVKRILVQESVADKLVGKIKPLVEKLTIGNPMDEVVITPLIDNKATDFVQGLVDDALHKGAKLITGNVRKNNLFYPTLLDNVNVDMKIAWEEPFGP

SEQ ID NO: 15596 - protein, 234 aa, Streptococcus pyogenes
LAISPFNYPVNLAGSKIAPALIAGNVVALKPPTQGSISGLLLAEAFAEAGIPAGVFNTITGRGSVIGDYIVEHEAVNFINFTGSTPIGEGIGKLAGMRPIMLELGGKDSAIVLEDADLVLAAKNIVAGAFGYSGQRCTAVKRVLVMDKVADQLAAEIKTLVEKLSVGMPEDDADITPLIDTSAADFVEGLIKDATDKGATALTAFNREGNLISPVLFDHVTTDMRLAWEEPFGP

SEQ ID NO: 15597 - protein, 590 aa, Leifsonia xyli subsp. xyli str. CTCB07
MKNTQAPSAMPIHKYRPFHEQIAVDLPDRTWPAKRIAVAPRWCAVDLRDGNQALIDPMSPERKRIMFDLLVRMGYKEIEVGFPSASQTDFDFVRSLIEENAIPDDVTIQVLTQAREHLIKRTYDSLVGAKRAIVHLYNSTSVLQREVVFRSDRQGIVDIALAGARLCRQFEALAPGTEIYYEYSPESYTGTELEFAADICNQALEVFEPTPERKVIINLPATVEMATPNVYADSIEWMSRHLNHRENVILSLHPHNDRGTAVAAAELGYLAGADRIEGCLFGNGERTGNVDLVTLGVNLFTQGIDPQIDFSDIDHIKRTVEHCNQLPVGERSPWGGDLVFTAFSGSHQDAIKKGFEAMAARAQRESVDVDDLVWAVPYLPIDPKDLGRSYEAVIRVNSQSGKGGVAYLLKSDHALDLPRKLQIEFSGVVQAKTDAEGGEVTSNEIWAIFQDEYLPAPETESDAKWGRFELGSTSTANENGDHVTLTVTLRDGETVSKATGEGNGPIAAFFDILNARGINVHLYDYSQHTLSASESATAAAYVEVNVDGRRLWGVGIDADTTTASFKAVISAVNRSVRASASSVPAELAGV

SEQ ID NO: 15598 - protein, 447 aa, Candidatus Kuenenia stuttgartiensis
MDYISNTESDKKKMLEDMGISSLDALLGEIPEALRNFSLSLPPGLSEPEVLHAIKKLSKKNKTTDDYSSFLGAGAYDHFIPSVVNHLASRSEFYTCYTPYQPEVSQGTLQVMYEFQTLMCELTAMDVANASMYDGSTALAEAALLSIRHKEKNKIVCSSAIHPEYRQVMKTYLKGFNTEIVEINCPEGTTDMHQLEASLADNTAAVLVQSPNFFGCVEDMQEISAIAHKHDALFVACVNPISLGILMPPGEYNADIAVGEGQVLGNYLNYGGPYLGFFTVKNELLRKMPGRIAGETVDKAGRRCIVLTLQPREQHIRREKATSNICTNQALLALRACIYLCALGKKGIAEIGNLNIQKSHYAFERLCNLDIFEPVFHNPFFNEFVLKAKNDFRIASIIRRMQEKGIHCGIDISQYYPGMVNCMLLCVTETKTKESIDHLVNEFTKCT

SEQ ID NO: 15599 - protein, 286 aa, Escherichia coli
SILIDKNTKVICQGFTGSQGTFHSEQAIAYGTKMVGGVTPGKGGTTHLGLPVFNTVREAVAATGATASVIYVPAPFCKDSILEAIDAGIKLIITITEGIPTLDMLTVKVKLDEAGVRMIGPNCPGVITPGECKIGIQPGHIHKPGKVGIVSRSGTLTYEAVKQTTDYGFGQSTCVGIGGDPIPGSNFIDILEMFEKDPQTEAIVMIGEIGGSAEEEAAAYIKEHVTKPVVGYIAGVTAPKGKRMGHAGAIIAGGKGTADEKFAALEAAGVKTVRSLADIGEALKTV

SEQ ID NO: 15600 - protein, 537 aa, Capsicum annuum
MGNACRGSFRAKTFQGSYPQNHSTSKHSKVEEEQQPDPAPLVVKDHSTSTKNMNHRSSANQSCCVLGHKTPNIRDLYALGRKLGQGQFGTTYLCTELSTCIDYACKSIAKRKLISKEDVEDVRREIQIMHHLAGHKNIVSIKGAYEDPLYVHIVMELCGGGELFDRIIQRGHYTERKAADLTKIIVGVVEACHFMHRDLKPENFLLVNKDDDFSLKAIDFGLSVFFKPGQIFTDVVGSPYYVAPEVLLKNYGPEADVWTAGVILYILLSGVPPFWAETQQGIFDAVLKGHIDFDSDPWPLISESAKDLIRKMLCMRPSERLTAHEVLCHPWICENGVAPDRALDPAVLSRLKHFSAMNKLKKMALRVIAESLSEEEIAGLKEMFKAMDTDNSGAITFDELKAGLRKYGSTLKDIEIRELMDAADVDNSGTIDYGEFIAATIHLNKLDREEHLMAAFQYFDKDGSGYITVDELQQACADHNITDVLFEDIIREVDQDTDGRIDYGEFVAMMQKGNPCIGRRTMRNSLNFSMRDAPGAH

SEQ ID NO: 15601 - protein, 117 aa, Peridictyon sanctum
  misc_feature (116)..(116): Xaa can be any naturally occurring amino acid
DIEETLKRLVFDMKKSPAEVFDALKNQTVDLVLTAHPTQSVRRSLLQKHSRIRNCLVQLYSKDITPDDKQELDEALQREIQAAFRTDEIRRTQPTPQDEMRAGMSYFHETIWKGVXK

SEQ ID NO: 15602 - protein, 120 aa, Pseudoroegneria spicata
EETLKRLVFDMKKSPAEVFDALKNQTVDLVLTAHPTQSVRRSLLQKHSRIRNCLVQLYSKDITPDDKQELDEALQREIQAAFRTDEIRRAQPTPQDEMRAGMSYFHETIWKGVPKFLRRV

SEQ ID NO: 15603 - protein, 567 aa, Solanum ptychanthum
PRKGCDVLVEALEREGVTDVFAYPGGTSMEIHQALTRSNIIRNVLPRHEQGGVFAAEGYARATGFPGVCIATSGPGATNLVSGLADALLDSIPIVAITGQVPRRMIGTDAFQETPIVEVTRSITKHNYLVMDVEDIPRIVREAFFLAKSGRPGPVLIDVPKDIQQQLVIPNWDQPMRLPGYMSRLPKLPNEMLLEQIVRLISESKKPVLYVGGGCSQSSEELRRFVELTGIPVASTLMGLGAFPTGDELSLQMLGMHGTVYANYAVDSSDLLLAFGVRFDDRVTGKLEAFASRAKIVHIDIDSAEIGKNKLPHASICADIKLALQGLNSILEGKEGKLKLDFSAWRQELNEQKVKYPLNFKTFGEAIPPQYAIQVLDELTNGNAIISTGVGQHQMWAAQFYKYKKPRQWLTSGGLGAMGFGLPAAMGAAVGRPGEIVVDIDGDGSFMMNVQELATIKVENLPVKIMLLNNQHLGMVVQWEDRFYKANRAHTYLGDPANEEEIFPNMLKFAEACGVPAARVTHRDELRAAIQKMLDTPGPYLLDVIVPHQEHVLPMIPSGGAFKDVIT

SEQ ID NO: 15604 - protein, 562 aa, Shewanella sp. ANA-3
MDDNKRPLYLPFAGPAILEAPLINKGSAFSEEERIFFNLEGLVPYAIETIEEQASRAYDQFRSFNNDLDKHIYLRNIQDTNETLFYRLVQNHISEMMPIIYTPTVGLACERFSKNYRRNRGLFISYPNKDRIDDILNNSTRQKVKIIVVTDGERILGLGDQGIGGMGIPIGKLSLYTSCGGISPAYTLPITLDVGTDNPQLLEDPMYMGWRHPRIGGEEYAEFIEAFMQAVHVRWPDTLIQFEDFAQKNAMPILERYKDRYCCFNDDIQGTAAVTVGSLLAACKAAGTELNKQRIAFLGAGSAGCGIAEAIVAQMVSEGISDEQARSQVCMVDRWGLLLDNMPNLLPFQQKLAQKCADICNWNNFSDNISLLDVVNNAKPTVLIGVSGAPGLFTEEIVRAMHSHCERPIIFPLSNPTSRVEATPKDILHWTSGQALVATGSPFEPVVVDGETYEIAQCNNSFIFPGIGLGVLASGARHVSDAMLMASSRALAECSPLAINGSGPLLPKLEDIHSVSKHIAFAVGKVAIEQGLSLPASDELLMQSIEDNFWKPEYRRYKRTSF

SEQ ID NO: 15605 - protein, 555 aa, Zea mays
MESFGVPPAPVAAPEKRKKPLDLKDPVPAAAAAAANGGGATKASPAAKWAEKKKLVGGDAGYVLEDVPHLTDYLPQLPTYPNPLQDNPAYSVVKQYFVNPDDTVTQKIVVHKTSARGTHFRRAGPRQRVYFQPDEVNAAIVTCGGLCPGLNTVIRELVCGLYDMYGVTSVVGIEGGYKGFYSKNTVALTPRSVNGIHKRGGTVLGTSRGGHDTAKIVDCLQDRGINQVYIIGGDGTQKGASVIYEEVRRRGLKCAVVGVPKTIDNDIAVIDKSFGFDTAVEEAQRAINAAHVEAESAENGIGVLAATSCLFLHHCDGYKQQQQQQQQQQQQQQQQQQQQQQQQALNPSDLTQDCCLIPESPFYLEGKGGLLEFVERRLKDNGHMVIVVAEGAGQDLIAKSMNSVVRQDASGNKLLLDVGLWLSQKIKDHFKKKPRFPITLKYIDPTYMIRAVSSNASDNVYCTLLAHSALHGAMAGYTGFTVAPVNGRHAYIPFYRITEKQNKVVITDRMWARVLCSTNQPCFLSHEDVENMKHDDDEHHLHNTLLLDSPENSSK

SEQ ID NO: 15606 - protein, 522 aa, Kluyveromyces lactis NRRL Y-1140
MIETSNWVVQKFGGTSIGKFSKQIVNEIIKVYSQEYDNNVAVVCSARSSYTKAEGTTSRLLLACDLASNNNYEYKNVLDLVERDHVANAEESVKDITIQETLIEDTKREINIVRRYLDASQVLGEVSTRTLDLVMSLGEKLSCLYVTALCQDNGVNARYVDLSFIVPSDYECKEGTLDNSFYTFLVTAFREKLSPILKETENGTKIIPVITGFFGVVPMGLLNGVGRGYTDLCAALIAVALNADELQVWKEVDGIFTADPRKVPQARLLDTVTPDEAAELTYYGSEVIHPFTMEQVIRTHIPIRIKNVQNPKGNGTIIYPSDQAKKGESTPPHPPVALTSSIFESKKKGATAITTKSDIVVVNIHSNKKTLSHGFLAEMFSTLDKYKLVVDLISTSEVHVSMALPVPDSDSLKALRCAVEELKRLGTVDVIKKMAIVSLVGKQMKQFVGIAGTMFTTLAEQHINIEMISQGANEINISCVIDESNAVRALQSIHAKLLDSPQNENFESAVNERLEQIKQMSL

SEQ ID NO: 15607 - protein, 1263 aa, Wolinella succinogenes
MKYQWIIFFWLLPLLAWGADGWSAREREYIAAHPSITLGVIDNHPPMSFKHKETQVGILPDIVALLGRYTPFKIEAAYLPIGEVVAKSQSGEIEGFIGQPSTEREKSLRFTHPLHSFPYALFSKTSQTCTSMRELRGKRIAVLKDFAAHSILQEALKGEAETIAYGSFIEAMEGIMRDEADLYLDHMQAGVYQLKQWGVSQVQLACIFKESPQTFSIGVKKDQEILFSILNKSVAKIPTSEIEGIFFRWVYEGVGGFEKRLALTRAEEEFAERFPEITVLGDGNLPPYSWMDGEGRARGILPEVLEALSQKMGVKLSPKLLPYAKLTEELCLSKAKVATLVDVLDCKVKPQDYLHTLPYTRIPLASFALKENLKRLERVFALKGRRIVFLEGVLPSSLPSIHEDNHFLFAKDYQEAFSLLLSKEADLFVDAYYPVLALSQQMGLREVEFFRLLPENYRGDFLVHESLSPLKGMIDRALLEMESSGEMQGILTRHIGILETEELDITPQERQWLEEHPVIKIGAERDFPPFEWIDPESGKHLGVAPEMLAKVQKLLGVKLELESGKDWPRLMKDLEEGRLDMLSTIIRTPARENRFLFSAPYLSFPLVIVGHDERRGFIENLSALKRSKVGVVKGYYTEELLRRSGVEIEVMTYANAKEGMKALVDRRIDFFLENLPTINYIIAQEGYSGAKLLGRIDQDFSLTFGFYKEHPELASLIDKAIAAIPEKEKQEIYNRWSKFDIAPKTNWKMIVQILSIALLFVLFMLFVNRNLSREVRRRREVEAELLKAKELAESANRAKSEFLSNMSHEIRTPLNSILGFAEILQHSSLGIKEQRYAENILKSGKVLMDIINDILDLSRVEAGKMLIQKHPVELEALVREVYGLFLMKAKEKNLDLDLVIDERLPKILVIDGTRVRQILFNLVGNAIKFTHKGYVRISVERGERESEGGIELVLRIKDSGIGIAQADSNKIFEAFEQQSGQDNRLYGGTGLGLAICQRLARLMDGEISLVSQEGLGSEFIVSLQGVIAGVVDQPLERISPSYRFGSEWVLVVDDVEENLELTSALLEAFGLQVATAKDGEEAVEIAQNLEPKLILMDLRMPKMDGFEATKEMRKLKALRSTPIVALTASLIEKGKMEAHQDLFDEIWQKPLPLQTLQALLLRYFTPVETQEDSMEVKPSLAVLASLSSTHQTFLLELIRSYFTKGSLEEAKAFASYLHALAKEGNDALEGLSKEILEWVEGFEIDTLEKRFRGMERFLEGEKE

SEQ ID NO: 15608 - protein, 135 aa, Zea mays
  misc_feature (49)..(49): Xaa can be any naturally occurring amino acid
  misc_feature (94)..(94): Xaa can be any naturally occurring amino acid
  misc_feature (102)..(102): Xaa can be any naturally occurring amino acid
MSFIFHHIDNMFSTIFQGRVMYKKCVETPGQDALKLTGFLKTLMQRRNXSGESLYTVRTIKEKLCYVAADYEVELCKDTHASCEVDGEGWFTCXEERFKTPXFPFQAHMGGTCAMGLHKVVYLCMDHCYFFRNDW

SEQ ID NO: 15609 - protein, 322 aa, Thermosynechococcus elongatus BP-1
MSDQPRPTVIITGASSGVGLYATKALANRGWHVIMACRNLEKAEQAAKNLQIPPEAYTILHLDLSSLASVRGFVESFRALNRPLRALVCNAAVYYPLLKEPIYSVDGYEITVATNHLGHFLLINLLLEDLKNSPESDKRLVILGTVTANRKELGGKIPIPAPPDLGNLEGFEKGFKKPIAMINGKPFKSGKAYKDSKLCNMLTARELHRRFHESTGIVFNSLYPGCVADTPLFRHHFPLFQKLFPLFQKKITGGYVSQELAGERVAMVVADPEFRQSGVHWSWGNRQKEGRKAFVQELSAEASDEQKARRLWELSEKLVGLA

SEQ ID NO: 15610 - protein, 401 aa, Wolinella succinogenes
MLIVQKYGGTSVGDLDRIQNVANKVAKTKKEGHRLVVVVSAMSGETDKLLGYAKHFSQIPDPRELDMILSSGERVTSALLALALQAMGFKSISLSGRGAGMITDKSHSKARIDHIDTARIDSLLEDDTIVVVAGFQGITPDGEVTTLGRGGSDLSAVALAGALKADLCEIYTDVEGVYTTDPRIEPKAKKIDKISYDEMLELASMGAKVLLNRSVELAKKLNVNLITKSSFSDNPGTLITKEEEIMENPVVSGIALDKNQARVSITNVQDRPGIAAEIFGALAEANINVDMIVQTIGYDSLTDMDFTIPKTELESAKLVLKRFEGSVGGIEFDDNIAKVSIVGVGMKSHTGVASKAFKALAQDNINIMMISTSEIKISMIINLKYAELSVRTLHATYELDK

SEQ ID NO: 15611 - protein, 457 aa, Thermus thermophilus HB27
MSAPIRFGTEGFRGVIAREFTFATLHRLAEAYGRHLLERGGGLVVVGHDTRFLADAFARALSGHLAGMGLKVVLLKGPVPTPLLSFAVRHLKAAGGAMLTASHNPPQYLGVKFKDATGGPIAQEEAKAIEALVPEEARALEGAYETLDLREAYFEALKAHLDLKALSGFSGVLYHDSMGGAGAGFLKGFLRHVGLEIPVRPIREEPHPLFHGVNPEPIPKNLGVTLAVLGPETPPSFAVATDGDADRVGVVLPGGVFFNPHQVLTTLALYRFRKGHRGRAVKNFAVTWLLDRLGERLGFGVTTTPVGFKWIKEEFLKGDCFIGGEESGGVGYPEHLPERDGILTSLLLLESVAATGKDLAEQFKEVEALTGLTHAYDRLDLPLKAPLDLTPFREPRPLAGLTPKGVDTLDGVKWLYEEAWVLFRASGTEPVVRIYVEAQSPELVRALLEEARKLVEG

SEQ ID NO: 15612 - protein, 428 aa, Arabidopsis thaliana
MASLFAIGFSKFSPQPTSDYSKLLKVFHPKPYSLKFLFLKTLNPTRFFKVRANDGTEPSDKLQQYFQNQDYDKKYGFLENIDSFTIPKGLSEETIRLISKLKKEPAWILEYRLKAYAKFLKLEEPKWSDNRYPLLDLQDMCFYSAPKKKPTLNSSDIADEADDPKLLEEFDRLDVPLTKKKKCSPKVAVDAVYNSESIAITNKEPLEKSGVIFCSISEAIRKYPDLIKKYLGRVVPSDDNYYAALNTAVFSDGSFCYIPKNTRCPMPLSSYFRMNSIENTGQFERTLIVAEEGSFVEYSEGCTAISHDKNQLHAAVVELYCAEGAEIKAENARNTSTCDSMLIGDNAAANTYPYIQVKNPSARIEHEASTSKIGEDQIFYFQQRGIDHERALAAMISGFCRDVFNKLPNEFGAEVNQLLSIKLEGSVG

SEQ ID NO: 15613 - protein, 483 aa, Burkholderia sp. 383
MNEFLRTGHYIGGEWHESHGASDATYPVLNPATGETIAKVAKGGADDTQRAIDAAAHAFPAWRALTAKERGARVKRWGELMLENRDALAELLTREQGKPLAEARGEVVYAASFLEWFAEEAKRMYGDVIPSPKPNSQIVVTREPVGVVAAITPWNFPLAMITRKAGPALAAGCTMVLKPSEETPLSAFALAVLAERAGVPAGVFNVVSGDAVAIGETLTSSSVVRKLSFTGSTRVGKLLAKQSADTLKKLSLELGGNAPFIVFDDADLDAAVEGAIASKFRNTGQTCVCVNRFLVQDGVYDAFTRKLADAVRKLRVGNALAGEVDQGPLINEAALGKVERHVADATAKGAHALTGGKRHALGGTFYEPTVLTGMTADMLIAEEETFGPVAGCFRFATEEEAVAAANDTPFGLSAYFYTRDLGRAWRVSGALESGMVGVNDGIISTEVAPFGGVKQSGLGREGSKYGLDEYVELKYTLMAGLGR

SEQ ID NO: 15614 - protein, 555 aa, Chlamydophila pneumoniae CWL029
MELLSLNKSYFEIQRLRYRPEILTLLETIRSKHIQETSSPPSPPPELQKHIPNLCRIPEVSIYTEQETSSKPLKIGVLLSGGQAPGGHNVVIGLFDALRVFNPKTRLFGFIKGPLGLTRGLYKDLDISVIYDYYNMGGFDMLSSSREKIKTEEQKKNILNTVKQLKLDGLLIIGGNNSNTDTAMLAEYFLAHNCKTSVIGVPKTIDGDLKNCWIETSLGFHTSCRTYSEMIGNLAKDALSAKKYHHFIRLMGQQASYTTLECGLQTLPNIALISELIATRKISLKQLSEQLALGLVRRYKSGKNYSTVLIPEGLIEHIFDTRKLIDELNVLLANGDSSIEKILSKLSPETLKTFHLFPKDIANQLLLARDSHGNVRVSKIATEELLAVMVKKEIEKIKPHMEFHSVSHFFGYEARAGFPSNFDCNYGIALGIISALFLVRQKTGYMITINNLAQSYTEWQGGATPLYKMMHLENRCGTETPVIKTDSVDPKSPAVQHLLQQSDSCLVEDLYRFPGPLQYFGKEELIDQRPLTLLWENQTHSPFQALYSTSGKRSL

SEQ ID NO: 15615 - protein, 306 aa, Sulfurimonas autotrophica
  misc_feature (236)..(236): Xaa can be any naturally occurring amino acid
VYFSFDGDTPTGEPKVDRLTHFIVEPFTPHDQSEEYYISATVVGDEDVLYLSAEGGMEVEEGWDEKVTELAFPITATEEEIAEKIKAMSRPDVKPEDKENFAKFAIGFFKAYRKLNFAYLEINPFVMQGSKIELLDMVAKLDDTAGFMMTEEWGDIEYPTAFGMEAKSPEVEADLISRCKNRASLKLTLLKPDARIWTMVAGGGASVVYADTIADFAGIEDLANYGEYSGGPTTGXTKFYAETLLDLMTREKDPKGRDKILIIGGAIANFTDVAKTFTGIIQAFEEYADKMKEVGIKIYVRRGGPN

SEQ ID NO: 15616 - protein, 327 aa, Salinibacter ruber DSM 13855
MATLEFRTALREAMTEEMERDDDIFLIGEEVAEYDGAYKVSKGMLDHFGSDRVIDSPISELGFAGLGIGAAMNGLRPIVEFMTFNFSFVAFDQVINNAPNMRYMSGGQFDVPIVFRGPNGAAGQLGATHSNSTEALYSNIPGLKVVSPSVPDDGKGLLKTAIRDDDPVVFLESELMYGMKREVSEESDYTIPIGSARVAREGDDVTIVAHSKSYHIAMDAAETLEEQGYEAEVIDPRTIKPLDIETIVESVVKTNRLVVIDESTPFTSVASEITHQVQDRAFDYLDAPILRVTAPDTPAPYAPNLMDEYMPGADETVDKCLRVLYAE

SEQ ID NO: 15617 - protein, 297 aa, Zymomonas mobilis subsp. mobilis ZM4
MTEAIIIDGKEFSSNLRNKIAEDVKAFKKERNVVPGLAVVLVGEDPASRIYVRKKEEMTTAVGMNSLSYRLDANASQQELLDLIETLNHDPAVHGILVQLPLPKHIDTPTILEAIDPDKDVDGFHVVNAGRLAIGTPSLVPCTPAGCMMLLEHSLGSLKGKNALVIGRSTIVGRPMAQLLLAADCTVTVAHRHTKNLEELCRQADIVVAAVGIPHFVKASWLKPGAVVIDVGINRVPAEDEAAKAAGKTRIVGDVDFVEAAKVASAITPVPGGVGPMTIACLLNNTVQAARNLTSAS

SEQ ID NO: 15618 - protein, 409 aa, Chromobacterium violaceum ATCC 12472
MDKRRVVITGIGVVSPYGAGLQRFWQALAGGESARRPIQGFDASVYRSAQGGEAPAELLADAGARARCGDPGEDSAYFLALAAAEALADAGLGAAFSDEDRVGCVLGTLCAGMRNMREYGAAYEAGRPSPVAAETIPAHYQLDFLARRHNLTGPSSLVSTACSSTTDALGYAFDLIRGGECDSCLSGGGDVLAEMIHAAFNGLYSITTGEPRPFDSERDGFFIGEGAGLFHLETLESARARGARIHAEILGYGLSNTGHHLTATSEDGAGEALAIRRALDDAGLAPADIDYINCHGTGTRHNDASEIRAINRVFGDAAERLHISSNKASIGHCMGAAGALEAAATVLALEKGLIPPTLHTRGDEAELRSRLVGAEARPAALRRALSQSFGFGGACSCIVFGHYGEDGHA

SEQ ID NO: 15619 - protein, 305 aa, Glycine max
KLLGDNTDNQNGPLKKSSSWKVQSNNQSRFSFARQEESKFQANVHPSSGANQQFPKNGSLIQDFVDFYFSLDKLGFANGIPSNNLEESGNLGSGHFIASNNKLSAVSRAQISAPPGFSVPNRAPPPGFSSLERMGQAFDSLSGDIEFMDPAILAVVKGRIQGAQNSPVLDMRSNYPEQLNYFENEARVQLLMQRSLSPHQNLRFSEIGNSFSQLGDSYGISSRLNQSQVSNLGSFHQLSLQQSTNAVLSNGQWDGWNEVQSGNGLGVAELLRNERLGFNKFYSGYDDSKFRMPNSGDLYNRTFGM

SEQ ID NO: 15620 - protein, 388 aa, Mesembryanthemum crystallinum
MFATLRQPTQSHSLITLSLQKPSIPKTEQLSFPNLPSSKHEEISHLSVTKPLHVASLLKPRKHLVECNAYEANRSQPLDINIELPSVKSETAKRVKIGIYFATWWALNVVFNIYNKKVLNAFPYPWLTSTLSLAAGSLMMLISWASRVAHPPKTDLQFWKSLLPVAVAHTIGHVAATVSMSKVAVSFTHIIKSGEPAFTVLVSRFLLGDTFPMPVYMSLIPIIGGCALAAVTELNFNMIGFMGAMISNVAFVFRNIFSKKGMNGQSVSGMNYYACLSMLSLLLLTPFAIAVEGPQVWAAGWQKAVSQIGPNFVWWVAAQSIFYHLYNQVSYMSLDQISPLTFSVGNTMKRISVIVSSIIIFHTPIQPVNALGAAIAILGTFIYSQAKV

SEQ ID NO: 15621 - protein, 431 aa, Flavobacteria bacterium BBFL7
MTVIAKGKTKKLPLRGMMDNVMEQFNSAADHINLHLNIRKILSITNNEIIVHFPVKMDNGDVEIFTGYRVQHNNALGPYKGGLRYHPTVDIDAARALAMWMTWKTSLAGLPYGGGKGGIQLDPSKYSPSELERITRRFTFALADNIGPEHDIPAPDVNTNSQTMAWMADTYMSTRPPAERTANQHVVTGKPDGSGGLEGRDRATGYGVFLTIKFWAHKSAESLKDKRFIVQGFGNVGYWAAHFLEKEGAHLVAVQDAYGTLHNDDGIKVEDLYNYSIANKGSIVDFPEAKAIPKADFYTTDCDICIPAALGNQITSENAPYIKARLIAEGANGPTNVDGEKILLEKGVTIIPDILCNSGGVIGSYFEWLQNRNGELWQLDEVMIKLEKKMRESFNKVYTFSESEAMDMRTAAYCIAIKRIEKAYVQRGIFP

SEQ ID NO: 15622 - protein, 219 aa, Tropheryma whipplei TW08/27
MKIRISPSILSADFCNLERDLQLISSADMVHVDVMDGHFVPNITFGLPVVKRICEVSPVPLDVHLMVENPDYWALQYADLGVYSVTFHFEAAKDPIATARNIRSNKSKVGLAVSPDTDIGECVHVLPEVDMLQVMTVYPGFGGQKLIRRVLDKFSRITRSEFENLSFSVDGGVTLGNISEIASVGVDTFVAGSSVFLSQLPADSVESLRKLAKVAYKRS

SEQ ID NO: 15623 - protein, 334 aa, Corynebacterium diphtheriae
MTIRVGINGFGRIGRNFYRAITERGADIEVVAINDLTDNHTLSHLLKYDSILGRLGKEVSYDDESITVDGHRMVVTAERDPKNLKWGELNVDIVVESTGFFTDANAAKAHIEAGAKKVIISAPAKNEDATFVVGVNHTDYDPAKHNIISNASCTTNCLAPMAKVLDEKFGIVKGLMTTIHAYTGDQRLHDAPHRDLRRARAAAQNIVPTSTGAAKAVALVLPELKGKLDGFAMRVPVITGSATDLTFETTKEVSAEEINAAMKEAAEGELKGVLAYTEDPIVSTDIVTDAHASIFDAGLTKVIGNQVKVVSWYDNEWGYSNQLVSLTEYVGERL

SEQ ID NO: 15624 - protein, 632 aa, Erythrobacter sp. NAP1
MCGIAGIFHAETPKPVDPRRIERMCDAMAHRGPDGAGVWTEQGVGLGHRRLSIIDLEGSPQPMLSADGRAVIAFNGEIYNFRELRRELESQGAKFRTSGDTEVILAAWQRWGVDCLEKLHGMFAFALYDLDKRQLFLARDRFGVKPLFMTRLADGGLAFSSELKGLLAHPQMRRRVNPQAVDAYLTWGYVPDTHSILSGVEKLQAGHFLLLEQGRPIPAQRRWWDISFADRAKGSEADLSAELVHLMREAVQSRMVSDVPLGAFLSGGVDSSSVVALMSEASAEPVRTCSIGFDVAALDETNYASRIAQRFSTDHDSRIVASDDFEAVDQISAMFDEPFADASALPTWRVCQLAREKVTVALSGDGADEAFAGYRRQVFHHNEEKVRSLLPAGLRQPLFGALGRFWPKADWAPRPLRAKATLLALAESGESGYARALSVATHDQRASLYDPEFTRKLSGFRAEDELISLMKSAPARSGLDRAQYADLTFWLPGDILTKVDRTSMAVSLEAREPLLDHRLVEFAARLPEGMRVKGTTGKHLLKKCMERYLPNDILYRPKQGLVTPIAQWLREPLNSETRMIASSSTLSGLGWFKPNEIRRLADDHISGRSDHSRVLWQLLMLERSLKHLNVSG

SEQ ID NO: 15625 - protein, 327 aa, Arabidopsis thaliana
MVVMMMNFRVYLMRVNLDNNVVESSSSSSSSCIKREAKVISLGDEVDDISQVFHCDGLLLCISITQAKTRLVVWNPYWGHTRSIEPTHQFNKFDSYSYALGYDKSSKSHKILRCITCLRPHFHEFIIYDFNSNSWRVFHVTPDWQLGTINSGVSLKGNAFWVAEEKYYETSETNEEFFLLSFDFTRETFGPLLPLPFQFVESEDALSVSNVRDEQLAVLYQPWDTLMMEIWVTSKIEPNAVSWNSKVFLSVSIRKLIGPQFQFCLGSFFIDEEKKVAVVFDKGYRIQRYIAYIIGVDGSMKEVDLGESDRRCYPIVWSYVPSLVQLN

SEQ ID NO: 15626 - protein, 448 aa, Rickettsia typhi str. Wilmington
MALIIQKFGGTSVANIERIKKLVPIIKAEITKNNQVIVVVSAMAGVTNQLVTLCSEVSSLNKISQFAEYDVALSSGEIVTAALLALALQEEEIQAQSLLAWQLPILTNNNHSKALVEFITTDLLEKCLQLKIIPIIAGFQGINKSNRITTFGRGGSDTTAALIAAAMKADRCDIYTDVDGIFTADPRIIPNAKRIKEIDFLEMLELASSGAKVLHPRAVELVMRYKIDMRVLSTFLPNTEGTLITSKDTTPLVKSTYMDMEESAKNIKRSTKINIPDDTSGLTYKLPIELALQNRYNMENCIIRGITSNKNLLKVSVNTITLSFLQVANMITYNNNCIEFMQEIKNNIEYNFITNLTDKNNLQTLLTNCKNNKQIQNFTFDTEIATISLIGYGIKNDCKLLEMILSQLTQDNINVNMMQLSEVKITLLINDKDVEKTISNLYNLFKIS

SEQ ID NO: 15627 - protein, 555 aa, Candidatus Kuenenia stuttgartiensis
MGPKRMVIIGAVASGTKTAAKARREDPDAEITLITEEADISYAACGTPYFISDIIKDSSSLIIRTPDYFLKMLNINVLTEHRVEAINPGGKDIAVRNLKTNSSAFLPYDFLVLATGAKPYVPECEGVESGNIFTLHNIKSAMRIKSVLQQKKIGHAIIVGGGFIALEIAESLMEYGIKAHIIIRREHILSHIDKNIALLVQNHVRAKGVHIHEDDEVIKYEADSEGNVSKVITKKQTLPAEIVVLATGIKPNVSLAKNAGIAIGQTGAIQVNERLETNIPDIYAVGDCVETTHMVTGKPVWIPLATTANKQGRIGGINICGGNDTFPGVMGTFIVKVFDWTVAKTGLSEKEAIRNGFDVVSVIVPSHDKPHYYPGSKLIIVKLIAEKGSGILLGAEIAGEGVVDKRIDVVSAALMGRVTAGQLSKYDLSYAPPYSSPMDPLITAANVLRNKLEGKIQSISPLITKQKLERKDDFVLLDVRTKHEHDKGHIEGSLHIPLNELKSRSGALDKTREIITYCGVGLRASQAHLLLKTEGFENVKFMEGSLLAWPYAIEK

SEQ ID NO: 15628 - protein, 667 aa, Flavobacteria bacterium BBFL7
MSNEDFNSIAFDLPLNKSNVIKVIGVGGGGSNAIKHMFQQGIKGVDFVICNTDSQALDNSPVPNKIQLGVTLTEGLGAGANPEVGERAAQESIEELRGMLDTNTKMVFITAGMGGGTGTGAAPVIAQVSRDMGILTVGIVTTPFNFEGKVRNEQAQLGIEKFRSQVDSLIIINNNKLREVYGNLGFKAGFSKADEVLATASRGIAEVITHHYTQNIDLRDAKTVLSNSGTAIMGSAQSTGANRAQEGIIKALDSPLLNDNKITGAKNVLLLIVSGSEEITIDEIGEINDLIQTEAGGGANIIMGVGEDESLGDAISVTVIATGFNKEQQNDISNTEAKRIIHTLEDEQRASAVLQEKTSGVTPGNIIVDQEDGTEDIDDVDNAFAKAESPQPIVAPQPTEPVKIIHTLGEEEPEPMMPAVREENVLIPTTEFISNLNVVYEEVLDKVKPEEFVITEAQPEVTKMVEDVEEEKDQFFLDFDMPVSSKEKAVPEQPIVHNLEDIEVNDPVNVIPVTEVSASGITKYSLDDYMEIEETMNQAKPTSKQPTQVAEEEIQIVTKSVPSEPLNTEVVEDTNADDVDLTDLPINEMLVLRAEERKRKMHAYNFKFKNSHRLEEIEKKPAFERHGVQLDDLPSEADRSRTTLSTDDNDDIQLRTNNNSFLHDNVD

SEQ ID NO: 15629 - protein, 312 aa, Streptomyces coelicolor A3(2)
MPRRPIDITIPDLRDTRAVVTGASDGMGLGMAIRLASAGAQVVLPVRNPRKGEAALTKIRQHAPDADVSLRSLDLSSLASVAALGKTLLEEGQPIHLLLNNAGVMTPPERQATVDGFELQFGTNHLGHFALAAHLLPLLRAGQARVTSQVSIAANQHAINWDDLNWECSYNGRKAYSQSKIALGLFALELNRRSEAGGWGITSNLSHPGVAPTSLLAARPEVGRDKDTVLVRMIRAMSARGVIVGTVETAQLPALMAATSAAAKPGGFYGPSGPGHLGGPPGEQELYSRLRSADEAQRVWRTSEELTGTHLR

SEQ ID NO: 15630 - protein, 1314 aa, Debaryomyces hansenii CBS767
MSSHQRQDSIASLSSTATGNIHPQKIGPWKLGKTLGRGATGRVLLATHQSTGQKAAVKVVSKSELNDDEINKKSADEAGLPYGIEREIIIMKLLTHPNVLRLYDVWETSKALYLVLEYVEGGELFDLLVERGPLQEVEAIKYFRQIILGTAYCHALGICHRDLKPENLLLDSGLNVKLADFGMAALESNGKLLETSCGSPHYAAPEIVSGLKYHGAASDIWSCGVILFALLTGRLPFDDENIRNLLLKVQAGSFEMPCELSPEAVDLIDKMLTVDPMKRIPTERILSHPLLTKYPIPNEDLISVKSLPHPETAYKSLGSEKNIDKQILQNLSILWHDRSQGDIVDCLLKTGSNPEKTFYALLMRYRHNQEESAGSSPTRSNSQNFNNKIGNKDNNRKKRMSQVSASTSRNRPVLFQYKNGIKSSIGNGNGRLSSTSSVSNSPRKSPVRRSSNRYSFAQSPRKFGGTSDETTLHSSSVPRNIYNEIVSAQRNGQGVMPPPLPSKDNMDSKSNPIVDEVSNQDLLSSAKISPTKNKRGSVIRNSISKNRLSRRKSRTSFTPGLKRNSITTKLLSTYAKLAGETDWEFMDKQTKRTSATFATLCDKIFNQEQYDAEDEKLIDEEEKQAKEYERLMEIERKKHEAELRARKELAKQRKREKRKSLLSSRKLSILVKDDANNSEQDITVTDSDALSQPKRQSRNQAMRSISEGHGKESDDLTKEDLENLKRRSVTQPTPRRRKTPVLTRRPVSRLDPLWTAYENEEIERAQDALEAEYRDADFKTKKKINRESMVSVMDDKEVDNEPHVDDDATDEVQDEEAVKAKSRGYELPEPDMERSDLSDEYMSEIRKSRLLNSQLNINAIANGEKEVKSEKRQDKEPKTLIGDVRIPTVTRKSRCFTNSNKRLSVLSMYSTKQSYRDLNSILGDENDENNDVEGQLPQLRTSFADRLDRAGLADAEEEDDEPLDEGSIMDFDQHLANKRSSYYAGDKSRRQSRYSTTKRNSQAPTVDVPAIPKKSNKERDREDDTFVTKDDDVHRRKSAYSAKGANNNDDEDMIFENIKLPNEDRRQSASTAKSNKKKSFQPSAESMLIPNVDNIPEDAKTRKPDPRSQPYEKVRKPKVSNGELKSTGPEGQVKNPLEDTTNEPRENQKRKGSIFRKLSWGSKKTMDNSAAQLPSPADSRAPSVEEKPKSKSGFFRWFSSSSNQPGIESEIRRFKAILPKQEMSSALFALLNSWSNFGLKNLRNDTVGYNITGEISKNNAFNLKNCKFRIKVNPREFNQKSEIVCARVKGSKVTTDTLFKEIEKVLQKEGVMDI

SEQ ID NO: 15631 - protein, 436 aa, Leifsonia xyli subsp. xyli str. CTCB07
MAFGGLMAAVEAALGVQSRGDIADLAETSRASKSLTVIAEDPGPYFNAVSFSRIIAETTAAVLVTLAFEQIFEEWWISLLLSALIMTGVSFVLVGASPRSVGRANSTLLLRLTAPLVRIVCVVLGPIPGGLVALGNRVTPSRARSAPVTSEEQLLSIVDEATELDVLEEDDREFIHSIFEFSDTVVREVMIPRTDMITVDKSAGLGTAMGLFFSKGVSRIPVIDDDPDDVVGILYLKDAAKLSFESVPGRDAIALGELVRPALFVPESQKADALLREMQRESNHLAMVVDEYGGIAGLVTLEDLIEELVGDISDEYDQEVALVQEVGDGRHRVATRLPIDDLGELFDLEIEDEDVDSVGGLVAKALGRLAEVGSTVAAHGLRFTVDRIEGRHKHVASVLVERDTAVLPESAGKSDRAARNDKHRNDKNKQQREPRP

SEQ ID NO: 15632 - protein, 419 aa, Streptomyces griseoflavus
MSRRVFITGVGVVAPGAVGRDPFWELLTQGRTATRRLSLCDPEPFRSQVAAEADFDAEAAGLSERQSAELDRAAQFALVAAREAVEDAAWSETCPPERAGVIVGSAVGATTKLEEVYRQLSRDGSLWDVAPDSPAELYSYFVPSSFASGIAHDLGVTGQSGVVSTGCTSGIDSVGNAWELIQSGILDSAVCGATDAPISPITVACFDTIKATSTYNDTPESASRPFDATRGGFVLGEGSAMFVLESEESVHRRGARVYGEIRGYASRCNAYHMTGLKADGRELAEAVVSALGQAGVDPGRLDYVNAHGSGTKQNDRHETAALKSSLGPAAHDVPISSIKSMIGHSLGAIGSLEIAACALALRDDVIPPTANLTRPDPELDLDYVPVHARKQPTNSVLTTGSGFGGFQSAMVLTDPEHHS

SEQ ID NO: 15633 - protein, 274 aa, Burkholderia xenovorans LB400
MSGTFEGPTFEGSAVRLEWAERAIALITLTRPAQMNTLSLELLSEFDHALDLADMESTRALIVTGQERAFCCGAHLRYFAGPEASIHQPFDARDHYLADIAVLFDRLEELHFPTIAAINGFALGGGCELALSCDFRVIASHAKIGLPETRLGAVAGAGGVQKLIRHVGRSKALDWILRATHLDAATADRYGLVSAVVPGDMLLQSALDIALEIRKLGPRSVAQSKRSIYVSEDADLRTARRFGIEALSMLVGGDEWKEGMQAFSEKRAPTFDSW

SEQ ID NO: 15634 - protein, 847 aa, Brassica rapa
MRSHVPNYHHPYTFFFVFILFPASGVYANTLSPTESLTISNNKTIVSRNETFELGFFTPGSSSRWYLGIWYKKIPTRTYVWVANRDNPLSRPSGSLKISSDNNLVIYDHSDTPVWSTNLTVGASRSPVVAELLDNGNFVLNSNDPEGYLWQSFDFPTDTLLPDMKLGWDKKTGLDRVLRSWKSVEDPASGDYSTKLETRGFPEYYVFNKETIIYRSGPWIGNRFSCVPEMKPIEYMVYTFIASNEEVSYAYHMTKPDVYSTLSLSYTGTIQRRNWIEQAQDWKQLWYQPKDICDNYRQCGNYGYCDSNNLPNCNCIKGFGLENGQEWALRDDSAGCVRKTRLSCDGRDGFVAVKRMKLPDTAATVLDRGIGLKECKAKCLQDCNCTAYANTDIRDGGSGCVIWNGGLFDIRMYPNGGQDIYVKLAAADLDHFKITSHGTIIGSGIGVIILLLLSIIILGYWKRKQKRFITIQTPIVDQVRSQDLLINQVVLTSERYISRENKTDDLELPLMEFEALDMATNRFSVANMLGQGGFGIVYKGMLPDGKEIAVKRLSKMSLQGTDEFKNEVRLIARLQHINLVRLLGCCVDKGEKMLIYEYLENLSLDSHLFDKIRRSNLSWPKRFDITNGIARGLLYLHQDSRFRIIHRDLKASNVLLDKNMTPKISDFGMARIFGREETEANTRKVVGTYGYMAPEYAMDGIFSMKSDVFSFGVLLLEIITGKRSKGFYNSNRDNNLLGFVWRYWKEGKGIEIVDPIIMDSSLSALCTHEILRCIQIGLLCVQERAEDRPVMSTVMVMLGSETTAIPQPKPPGFCVGRSLFETESSSSTQRDDELSVNQITLSVIDAR

SEQ ID NO: 15635 - protein, 473 aa, Methanocaldococcus jannaschii
MTTVMKFGGTSVGSGERIRHVAKIVTKRKKEDDDVVVVVSAMSEVTNALVEISQQALDVRDIAKVGDFIKFIREKHYKAIEEAIKSEEIKEEVKKIIDSRIEELEKVLIGVAYLGELTPKSRDYILSFGERLSSPILSGAIRDLGEKSIALEGGEAGIITDNNFGSARVKRLEVKERLLPLLKEGIIPVVTGFIGTTEEGYITTLGRGGSDYSAALIGYGLDADIIEIWTDVSGVYTTDPRLVPTARRIPKLSYIEAMELAYFGAKVLHPRTIEPAMEKGIPILVKNTFEPESEGTLITNDMEMSDSIVKAISTIKNVALINIFGAGMVGVSGTAARIFKALGEEEVNVILISQGSSETNISLVVSEEDVDKALKALKREFGDFGKKSFLNNNLIRDVSVDKDVCVISVVGAGMRGAKGIAGKIFTAVSESGANIKMIAQGSSEVNISFVIDEKDLLNCVRKLHEKFIEKTNS

SEQ ID NO: 15636 - protein, 262 aa, Nocardia farcinica IFM 10152
MVDTDHIVLEKDGEVARVWLNRPHKKNAVTVELLHRLDEIIVEVDNDPELKVLVLRGRANTFCSGFDLDELRENYVGKTNAMDVAVLSAKVCDRLYSMNTPSVAVLEGYVTAGGFELMISCDFAVAADDAKIGDFHIRRALFGGAGPIYRLPRMIGIRKTKELMLTGKLLSGAEAAAFDLINASAPAAELDQLVADFIAPIVDKSPFIMKLTKMTIDRGLDADIQSLMVMEHLAVGNALQSEDAAEGVNAFLEKREPKWVGR

SEQ ID NO: 15637 - protein, 126 aa, Brassica napus
RTSLNIATQRAIITSENRPARLACPVLLNNPWNLGSRTTNRLVSFRPVKSAPEGVISDKVEKSIKDAEETCAGDPVSGECVAAWDEVEELSAAASHARDKKKAEGSDPLEEYCKDNPETNECRTYD

SEQ ID NO: 15638 - protein, 124 aa, Secale montanum subsp. montanum
DIEETLKRLVFDMKKSPAEVFDALKNQTVDLVLTAHPTQSVRRSLLQKHSRIRNCLVQLYSKDITPDDKQELDEALQREIQAAFRTDEIRRTQPTPQDEMRAGMSYFHETIWKGVPKFLRRVDT

SEQ ID NO: 15639 - protein, 121 aa, Taeniatherum caput-medusae
DIEETLKRLVFDMKKSPAEVFDALKNQTVDLVLTAHPTQSVRRSLLQKHSRIRNCLVQLYSKDITPDDKQELDEALQREIQAAFRTDEIRRTQPTPQDEMRAGMSYFHETIWKGVPKFLRR

SEQ ID NO: 15640 - protein, 335 aa, Bradyrhizobium sp. BTAi1
MAVRVGINGFGRIGRNVLRAIAESGRKDIEVVGINDLGPVETNAHLLRFDSVHGRFPHTVTVDGDSIDIGRGKIKVTAERDPSKLPWKDLGVDIALECTGIFTSKDKASAHLTAGAKRVLVSAPADGADATIVYGVNHTTLTKDHLVVSNGSCTTNCLAPIAKVLNDLVGIETGFMTTIHAYTGDQPTLDTMHKDLYRGRAAAMSMIPTSTGAAKAIGLVLPELKGKLDGVAIRVPTPNVSVVDLKIVAKRNTDPKEINEAMKRASEQELKGILGYTTAPNVSIDFNHDPHSSTFHQDQTKVMNGNLVRVMSWYDNEWGFSNRMADTAVAIGKLL

SEQ ID NO: 15641 - protein, 475 aa, Thermus thermophilus HB8
MEVKEAPTEALIGGAWRRLARRFPVVSPATGERVAEVADCGEEEAREALEEAVLAFPAWSRATAYERAQVLRRWYERILEHKEPLARLMALEMGKPLKEGRAEVAYAAGFVEWYAEEAKRVYGETVPSQFPHKRILVRYEPVGPVYGITPWNFPAAMVTRKVAPALAAGCTFVLKPAEESPLTALYLAKLFLEAGGPPGVFQVLPTSRPAEVSRPFLEDERVRKLTFTGSTEVGVRLYEEAAKTLKRVSLELGGGAPVLVFADADLDRAVEETLRAKFRNAGESCVAANRIFVQAEVAEAFAEAYARRVQALKVGDPLSEETDIGPLVNEAALRKVRTHVEDALAKGARLVAGGEAKGLFFAPTVLLDVKPESLLFREETFGPVAPLTVFREEEEAVRWANGFPVGLAAYVFTRDLSRAFRVAEALEYGIVGVNDGVPSTPQAPFGGVKRSGLGREGGKWGLLEYLEVKYVSFGL

SEQ ID NO: 15642 - protein, 581 aa, Cichorium intybus
MKKSLSSFIVLCFLVIILETGRVKATSRNLNDVIMLANQQIEQPYRTGYHFQPPSNWMNDPNGPMLYQGVYHFFYQYNPYAATFGDVIIWGHAVSYDLVNWIHLDPAIYPTQEADSKSCWSGSATILPGNIPAMLYTGSDSKSRQVQDLAWPKNLSDPFLREWVKHPKNPLITPPEGVKDDCFRDPSTAWLGPDGVWRIVVGGDRDNNGMAFLYQSTDFVNWKRYDQPLSSADATGTWECPDFYPVPLNSTNGLDTSVYGGSVRHVMKAGFEGHDWYTIGTYSPDRENFLPQNGLSLTGSTLDLRYDYGQFYASKSFFDDAKNRRVLWAWVPETDSQADDIEKGWAGLQSFPRALWIDRNGKQLIQWPVEEIEELRQNQVNLQNKNLKPGSVLEIHGIAASQADVTISFKLEGLKEAEVLDTTLVDPQALCNERGASSRGALGPFGLLAMASKDLKEQSAIFFRVFQNQLGRYSVLMCSDLSRSTVRSNIDTTSYGAFVDIDPRSEEISLRNLIDHSIIESFGAGGKTCITSRIYPKFVNNEEAHLFVFNNGTQNVKISEMSAWSMKNAKFVVDQSVKSAA

SEQ ID NO: 15643 - protein, 119 aa, Lophopyrum elongatum
TLKRLVFDMKKSPAEVFDALKNQTVDLVLTAHPTQSVRRSLLQKHSRIRNCLVQLYSKDITPDDKQELDEALQREIQAAFRTDEIRRTQPTPQDEMRAGMSYFHETIWKGVPKFCAVLI

SEQ ID NO: 15644 - protein, 183 aa, Amaranthus hypochondriacus
MASSMLSNAAMATTAATAGAQASMVAPFNGLKSFATFPITKKSSNDFSSLPSNGGRVQCMQVWPPVGKKKFETLSYLPPLSDAQLLAQVQYLLNKGWIPCIEFELEHPFVYRENHRSPGYQDGRYWTMWKLPMYGCTDPAQVLNEVEEAKKAYPSAFIRIIGFDNKRQVQCVSFIAYKPAGGL

SEQ ID NO: 15645 - protein, 214 aa, Haemophilus somnus 2336
MNQSLLSQFGTSEERVKRAIEAFKRGNGVLVLDDEDRENEGDLIFPAETITVEQMAKLIRYGSGIVCLCITDELCQQLDLPPMVQNNTSINQTAFTVSIEAAQGVSTGVSAQDRVTTIQVAIADNAKPQDLSRPGHVFPLRAKKGGVLARRGHTEAAVDLASWAGHKPAGVICEITNDDGSMARTLEIVEFGKKFNYPVVTIEDLVRYSSSKVV

SEQ ID NO: 15646 - protein, 340 aa, Bradyrhizobium sp. BTAi1
MNLSALNTVALAMVTPGKGILAADESTGTIKKRFDAIAVESTAQNRRDYREMLFRSDGMTFISGVILYDETIRQNAADGTPLVKLIEQAGSIPGIKVDEGTQPLPGCPGETVTVGLDRLADRLAAYYALGARFAKWRAVIDLDKDRIPSMTAVHVNAHALGRYAALCQAAGLVPIVEPEVLMDGDHDIGRCFDVTRRVMNEVFRELRIQRVALEGMILKPNMVVSGQKCPVQAGVTEVADRTVQLLKECVPAAVPGVAFLSGGQSDAVATAHLDAINRRGPLPWMLTFSYGRALQAAPQRVWAGRTANVPAAQRAFSHRARMNALASRGQWTTERENEAA

SEQ ID NO: 15647 - protein, 589 aa, Nocardioides sp. JS614
MIMRMSSLFVRTLREDPADAEVPSHRLLVRAGYIRRAAPGIYTWLPLGLRVLRKIENVIREEMDAIGAQEMLFPALLPREPYEATNRWTEYGDGIFRLQDRKGADYLLGPTHEEMFTLVVKDLYSSYKDLPLSIYQIQTKYRDEARPRAGLLRGREFVMKDSYSFDVDDAGLDVSYQKHRDAYVRIFDRLGFEYVIVEAMSGAMGGSKSEEFLAKASVGEDTYVRCTLCDYAANVEAVHSPPIPPVPYDDAPAAHAEQTPDTPTIETLVAHLNERFPREDRPWAASDTLKNVVFSVHHPDGATEALAVGLPGDREVDAKRLEAHLGEGVVFEPFGEADFAARPTLAKGYIGPGALGEKKPAGVRYLLDPRVVEGTRWVTGADAAGSHVIDLVAGRDFSGDGLIEVAEVRDGDPCPRGDGGTLETARGIEMGHIFQLGRKYADALDLKVLDEQGKLVTVTMGSYGIGPSRAVAAIAEGTHDELGLAWPREVAPADVHIVATGKDEHVFAAAERIAHELDKQGVEVLYDDRPKVSPGVKFKDAELIGVPTIVVVGKGLAAGTIEVKDRRTGQRQDVPADHLVDRVIAIVRA

SEQ ID NO: 15648 - protein, 86 aa, Triticum aestivum
GSIQMDGFDIDYGNQVLTLRLGDLGTYVVNKQTPNRQIWLSSPVSGPSRFDWDVATNGWIYKRTGANLVQLLEKEIGELCHTPVEL

SEQ ID NO: 15649 - protein, 115 aa, Blastopirellula marina DSM 3645
MKLIIALIQPTKLDSLRDALKEISVERFTVTDAEGYGRQRGHSATFRGVEYQTTLLRKISIELIVNDDFVEKALATIESVARTGQEGCIGDGKIFVLPVEQTIQIGGAARGPAAV

SEQ ID NO: 15650 - protein, 474 aa, Burkholderia sp. 383
MRTERNYVNGRFVAPESDTFIVVHNPATEAPFARVPAATPADALAAVDAAAAAQKAWRKLPSAERATYLHRFADALTARASEIGAALAQESGKSVEDASNEAVYAGQITRYHAEWARRIEGEIIPSDTPDENLFLQREPIGVVACLIPFNYPVYTLLRKVAPALIAGNTVVVRPSNHTPVSAFEIAKAAGDAGFPPGVINILTMDHATAEALCTHPAVGMITLTGSVNAGRKVLDYCKANIAKPSLELGGKTPAIIEPDADLERAAAALVASKTTHCGQLCTAIERVYVHDSVHDRFVALLKEKMAAVRIGDRAEDATRMGPLVSASARAHIHGMVERAIAAGATLETGGAIPAGPGFFYPATLLTGVRQDMEIVQEETFGPIMPVLRYSTIDEAIAQANDHQFGLSSVLYTEHYRTAMTVANAIEAGELYVNRTPADPYQGFHAGWKRSGLGGDDGKHGMLEFTQTRLVVMKY

SEQ ID NO: 15651 - protein, 280 aa, Arabidopsis thaliana
MTSSSPTQRTHVSIPPEPGGKSLTQEANEPPVPISVSSPCGKRTRDPEDEVYLDNLRSQKRYLSEIMACSLNGLTVGDSLPVNMLESPARSESFLYHRDDLSLQYSPMSEDSDEARFCEDPTATASTSSSQPESRPTSPVSPYRYQRPLTSTNSPQPSPTILHHSHTCPASMISNAATTTTPQSRQRGSDTEGRFPSSPSDICHSGDLRRTALLRSVQMRTQPCGYSSSSGPSNIDGEERMCSKSMEEDRGYNKGEDIPYAEVSSKSKSCKALDMRLCEK

SEQ ID NO: 15652 - protein, 142 aa, Brassica napus
  misc_feature (139)..(139): Xaa can be any naturally occurring amino acid
MENHSTGFWAAWILLLIGASNASIHDYKTEKFIPQANSRFFHGGSEGLYASNSQDLNTSSSSSDISLKGKSFVRFADVTFVRTMESASKQNPMQSTAGLVEAILLEVKDRDRIGGSFLKSNAICCTPDLADAGSCTLGXVII

SEQ ID NO: 15653 - protein, 145 aa, Medicago sativa
MGFTDKQEALVNSSWESFKQNPGNSVLFYTIILEKAPAAKGMFSFLDSAGVQDSPKLQSHAEKVFGMVRDSAAQLRATGGVVLGDATLGAIHIQKGVVDPHFAVVKEALLKTIKEVSGDKWSEELNTAWEVAYDALATAIKKAMV

SEQ ID NO: 15654 - protein, 412 aa, Corynebacterium diphtheriae
MTLDSIERAIADIANGKPVVVVDSEDRENEGDLIFAADKATPELVAFMVRYSSGYICASLTSEECDRLQLPPMTSHNEDARGTAYAVTVDANTGTTGISATSRADTLRKLADSQFGPQDFTRPGHVVPLRAKAGGVLERAGHTEAAVDLARMAGLNPAGVLCEVVSEDDPTDMARAPELRRFADRHDLALISIEQLIEWRRRYELLVERAVSTQLPTEFGRFTAVGYRGIVDGVEHIALVAGDITSDEGKDVLLRVHSECLTGDVLGSRRCDCGPQLQASLRAISERGRGVVVYLRGHEGRGIGLLHKLQAYHLQDEGADTVDANKALGLPVDARNYSVAAHILRDLGVQSVCLLTNNPEKSLELERYGVKVTGREPVKVEVHEDNIRYLTTKRDRMNHDLPWIAEYKKEQS

SEQ ID NO: 15655 - protein, 662 aa, Chromobacterium violaceum ATCC 12472
MCGIAGALLDRHAHDGDVAEARRMILRQTHRGPDGLAARRVGPALLASSRLAIVDVANGSQPFSDESRAIHAVFNGEIYNHLELRENLSRRGHSLSGGSDGEVIVHLYEEYGTDCFQWLDGQFAIAIFDSRDDSLHLARDRMGICPLHWARLDGALYFSSEIKGLLAVAGMPRRAEPRAMLQLAYFGAVCAPLTPFGGIHQLPAAHRLSFRAGRLEIGRYWSLDFPLAGEHARLSEAQAAEGLAARLERAVASHAQGEFEPTCFLSGGIDSAVIAALLQRRSQASIAAFCAASEHGRMDEGGAAARTAEWLGVDLKRVRIDEAGIADAFPRLIWHGETPVISTEASALMRLAGEAGKRSKIVLTGEGADEAFAGYLAFRQYRQLGALTGRGLSPLRTMVRPWLRGHYGSECLLPGEDRLGVLAEHFGCVPAQAYEWEFYREALTPLFSPELRAMAAAGGCWDGFEFDRGAVRGRHWLDRSLYVSYQVMLPNYLLGAHGDRIYAAHSVEGRYPFLDRALVEYAAALDPALKLRRGREKHILRVAAARWLPDEVAWRPKTRFVMPFGTPFVGPRAAPLYAELLSPGKLAEYGYFDPERVRSLFRALASPPSAGGKARRYLERLALGLGATFVVSAQLWHHLHLADGGSAVSGEAARRSAPATIA

SEQ ID NO: 15656 - protein, 323 aa, Nostoc punctiforme PCC 73102
MTSVVSSPPRTIRIGSRKSQLALVQTYWVQEQLQKSFPDITFEVHTMSTQGDKILDVALAKIGDKGLFTKELEVGMLNQEIDFAVHSLKDLPTNLPEGLTLAAITERENPADALVVHEKHKDKQIDTLPEGAVIGTSSLRRLAQLRHHFPHFTFKDVRGNLITRLAKLDAGEYDALILAAAGLERLGMSDRVHQIIPKEISLHAVGQGALGIECRADDSELLTLLKAIEHPATRDRCLAERSFLRSLEGGCQVPIGVNTEISGENLTLTGIVASIDGQKLVKDTVTGIANNAEALGTELAELLRQQGAQEILSEIFAVIQRGS

SEQ ID NO: 15657 - protein, 181 aa, Arabidopsis thaliana
  misc_feature (130)..(130): Xaa can be any naturally occurring amino acid
MASSMLSSAAVVTSPAQATMVAPFTGLKSSASFPVTRKANNDITSITSNGGRVSCMKVWPPIGKKKFETLSYLPDLTDVELAKEVDYLLRNKWIPCVEFELEHGFVYREHGNTPGYYDGRYWTMWKLPLXGCTDSAQVLKEVEECKKEYPGAFIRIIGFDNTRQVQCISFICYKPPSFNDA

SEQ ID NO: 15658 - protein, 112 aa, Geobacter metallireducens GS-15
MKKVEAIIKPFKLDEVKEALNEIGIQGITVAEVKGFGRQKGHTELYRGAEYVVDFIPKIKMEIIVGDDIVGKVVETIEQAAKTGRIGDGKIFVTPVEEVIRIRTGERGEDAL

SEQ ID NO: 15659 - protein, 129 aa, Thermoplasma volcanium GSS1
MSWQEAEVRELKVGRYILIDDVPCKIVEITMSKPGKHGEAKGRIVAIGVFDNQKRSVVYPVKHKVKIPIIEKKNAQVLSVMNNEAQLMDSETFETFVLPLDPEIADKVKPGMEVPYWEAMGVRKIMLQN

SEQ ID NO: 15660 - protein, 311 aa, Streptomyces coelicolor A3(2)
MTTVNHWTPGDIPDQAGRTALITGGNSGIGLETARALARHGARVILAGRSRTRLDQAAEAVRAATPEARTDTLVLDLSDLSSVRDAATRIAETETVDLLFNNGGVMNLPERRTTHDGLEMTVGTNHLGHFAFNAQVWPAVRRSPAPRVVTVSAIAARWPMGRLEDLMSEKSYRAMGAYAKSKRANIVYTLELARRTASSPVEALVVHPGAAMTNLQQHGTGPLSRMVTPIAARLLMGSAEGAAWPSLYAATSPHVQSGWFIGPAGRDQTSGTPRPAKLPTGADDPAEGRRLWAASEQLTGVPFDIEAEAAV

SEQ ID NO: 15661 - protein, 801 aa, Staphylococcus aureus subsp. aureus NCTC 8325
MAKQKLVMIGNGMAGIRTIEEILERANDLYDITVIGKEPYPNYNRIMLSNILQNKMTVEETIMNPYEWYEEHGIELITNDPVIEVDRANQSVTTANGIEVSYDKLIFATGSKAFVIPVPGSTLPSVIGWRTIDDTEQMMNIAKTKKKAIVIGGGLLGLECARGLLDQGMEVTVLHLAEWLMEMQLDRKAGNMLKADLEKQGMKFEMQANTTEILGEDDVEGVKLADGREIPADLVVMAVGIRPYTEVAKESGLDVNRGIVVNDVMQTSDSNVYAVGECAEHNGKVYGLVAPLYEQGKVLADHLTNKETNGYKGSTTFTSLKVSGCDLYSAGQIVENAEIKGIEIFNSVDNNYKKIFLKDGNVVGAVLYGDIDDGSRFYNMMKKGESTEDYTLVSLLTKGGEEASLSIADMADDETICGCNGVDKGTIVNAITENGFTTVEEVTAKTKAGNSCGKCKPQIAQILQHTLGDDFVAAKPAGICGCTDLTRDQIVTQIRAKGLKTSKEVRHVLNFKNKGGCPKCRPAINYYLNMVYPHDHEDERESRFANERYHANIQNDGTFSVIPQMRGGVTDADQLIRLGEVAKKYHVPLVKVTGSQRVGLYGVKKEELPNIWEDLGMRSASAYGKKTRSVKSCVGKEFCRFGTQYTTRLGIRLEKTFEYIDTPHKFKMGVSGCPRSCVESGVKDFGIISVENGFQIYIGGNGGTEVEKAEFLTTVETEDEVIKLCGALMQYYRETGIYAERTAPWLRRLGFENVKEVLLDPERQNELFERIMDAKKAVEAEPWEAITSNAQARRIFEVEKV

SEQ ID NO: 15662 - protein, 451 aa, Pseudomonas aeruginosa PAO1
MAGGEKAGKRGMGFWTCSALVIGNMVGSGVFLLPSSLAAFGGLSLFGWLVSSTGAVLLALTFARLARVNPGAGGPYAYTRDGFGSFAGYLCAWTYWKAAWIGNAAIAVTLVGYLRVFIPALADPLLMVSVAIAAIWLCTLINLRGIGTFSVVQNLLTILKLLPLLLVGILGWFHFNPEHLAIPARSELPNMGYAQAIATTAALTLWSFIGLESATVPADDVEDPRRTIPRATLFGTLAAAALYILSITAVQGLMPPEVLARSTSPFADAARILMGDWGYYLVAAGAVIACLGALNGWVLLQGQIPVAPARDGLFPESLGQLNKNGAPAHGLLASGLLVTALVMVDGHGDLVDVFNVIILLGTMTGVVPYAFCTAALLQLLAVRPDEFSPRSRRQLLVIGSLGFAYSLWALYGTGQQAIFWGFLVLMAGIPMYTWRQWRNQVNGVPTLKAND

SEQ ID NO: 15663 - protein, 970 aa, Brassica juncea
MPDSVRSMKMNMKSFLKKLHITPNQPDEAADGSSIPTNKSSDVSSSPHHQSPEVKPFSGLSNWLSSVGHRKSPSPPNSLNATNGGDDEQQQDSKEDPEVEEEYQIQLALELSAREDPEAAQIEAMKQFSLGSCAPDNSPAELVAYRYWNYNCLGYDDKILDGFYDLYGVLNASSAEKIPPLLDLQGTPVSDGVTWEAVLVNRSGDYNLLRVEQMGIDIAAKTESVSSSSFVNSELVRKLAVLVGDYMGGPVVDPDSMLRAWRSLSYSLKATLGSMVLPLGSLTIGLARHRALLFKVLCDSVGVPCRIVKGQQYTGSEDVAMNYIKTDDGREYIVDLMGDPGTLIPADAAGLQIDYDEPVCSTSPGDNDSFHDASSTNGIESSFQENIEFPPGEHSSSTKSSKEDVAKVEKAPPVQNLSSRPIHSFTHMRSPSWTEGVSSPAARRMKVKDVSQYMIDAAKENPRLAQKLHDVLLESGVVAPPNLFSEVYPQQLDATVEIKNLTEAKKEKETAQQGRHQNDLGPVRFLPPLPRLHSKADTHDQQHDHGKVVSQSDSSHSEASSTEYARTVPAAVAAAAVVASSMVAAAAAKTANTESSTLELPAAAAATATAAAVVATAAAVSRHLELGSNSDGDAGSGGHEPQGSGDSPHGPNSGGDRVSDRSTGDESSKSDGTLDDVSDCEILWEEITLGERIGLGSYGEVYRGDWHGTEVAAKKFLDQDLTGEALEEFRSEVQIMKKLRHPNIVLFMGAVTRPPNLSIITEFLPRGSLYRLIHRPNNQLDERRRLRMALDAARGMNYLHSCSPMIVHRDLKSPNLLVDKNWVVKVCDFGLSRMKNSTYLSSKSTAGTAEWMAPEVLRNEPADEKCDVYSYGVILWELFTLQQPWGRMNAMQVVGAVGFQHRRLDIPDFVDPAIAELISKCWQTDSKLRPSFAEIMVTLKKLQRPATGSNIPRPVPSSSSLSTEQEQKDC

SEQ ID NO: 15664 - protein, 463 aa, Debaryomyces hansenii CBS767
MSDQPSTEPVKHTEAAEQPTVEPQAQESEEQEVSESPVPVSEEEHSASEEQPNEQPNEQQQQQQPHAGQQAQQQKANEQAVDTNPASAVEGGREVSNKILYVGGLHKSVSDEMLKDLFAVAGAIQSVKILNDKNRPGFNYAFIEFENTQSADMALHTLNGRIINNSEIKINWAYQSSTISSLNPDEPTFNIFVGDLSPEVDDETLNKSFSKFPSLKQAHVMWDMQTSRSRGYGFVSFGQQADAELALQTMNGEWISGRAIRCNWASHKQLNNNNNYRNNNRHHQNNRQFRPFNNAIPQQLQNQNNGMPIGNGQFNPNQQGNMPPSQQQLHNVPQANNSNNGNQANIPVMSPQSYDIVLRQTPSWQTTVYLGNIAHFTQQTDLIPLLQNFGFIVDFKFHPERGCAFVKYDSHERAALAIVQLAGFTINGRPLKCGWGKDRPPMGQFQNFGRGVPPPPMYNQGRP

SEQ ID NO: 15665 - protein, 362 aa, Candida albicans
SPRQVSFNVSDHYQILEIVGEGAYGIVCSAIHKPSQQKVAIKKIEPFERSMLCLRTLRELKLLKHFNHENIISILAIQRPINYESFNEIYLIQELMETDLHRVIRTQNLSDDHIQYFIYQTLRALKAMHSANVLHRDLKPLNLLLNSNCDLKICDFGLARSIASQEDNYGFMTEYVATRWYRAPEIMLTFQEYTTAIDVWSVGCILAEMLSGRPLFPGRDYHNQLWLIMEVLGTPNMEDYYNIKSKRAREYIRSLPFCKKIPFSELFANTNNNTSTSNTGGRTNINPLALDLLEKLLIFNPAKRITVEDALKHPYLQLYHDPNDEPISDKIPEDFFDFDKMKDQLTIEDLKKLLYEEIMKPL

SEQ ID NO: 15666 - protein, 479 aa, Nostoc punctiforme PCC 73102
MSATVKTLVNQPYKYGFVTDIEADTIPRGLDEDVIRLISSKKNEPQFMLDFRLRAYRQWQKMTEPTWPNVKYPPINYQDIIYYSAPKRKKEKLNSLDEVDPTLLETFEKLGISLSEQKRLANVAVDAIFDSVSVATTFKEKLAEDGVIFCSFSEALQEHPELIKKYLGSVVPIADNYFAALNAAVFSDGSFVYIPKGVKCPMELSTYFRINSGDTGQFERTLIVAEEGSYVSYLEGCTAPMYDSNQLHAAVVELVALDNAEIKYSTVQNWYAGDANGKGGIYNFVTKRGLCQGVNSKISWTQVETGSAITWKYPSCVLVGDNSVGEFYSVALTNHQQQADTGSKMIHVGKNTRSTIISKGISAGNSSNSYRGLVKVNPTANGARNYSQCDSMLIGDNAHANTFPYIQVQNNGAKVEHEASTSKIGEDQLFYFAQRGISSEDAISMMISGFCKDVFNQLPMEFAVEADKLLSLKLEGSVG

SEQ ID NO: 15667 - protein, 426 aa, Rickettsia typhi str. Wilmington
MSNQNINKRVVITGLGLVTPVGLNVNSSWKNIVDGVSGIKTITEFDTSKLACKIAGVIDISEHDGFKLENFTQADDINRLSKMDKFIHYGIAAATEAVEDSGWLPEDEKSRDRTGLILGSGIGGLKMIEDTSIKLYKENNGKVSPFFIPASLINLLSGLVSIKYGFSGPNQAAVTACSTGAHAIGDAMRMIKHGYADVMIAGGAEAPVTPVGVAGFVAARALCTKYNDNPEKASRPWDKGRSGFVMGEGAGIVVLEEYEHAVNRGAKIYCEVIGYGSTGDAYHMTAPHPQGRGAYRAMSEALQDAGINPSMIDYINAHGTSTTLGDMIELEATQKLFLESNPKILMSSTKSSIGHLLGAAGSVEFIFSVLTIRDQIAPPTLNLENPMDDVKIDLVKLKARETVVDYVLSNSFGFGGTNASLVIKRI

SEQ ID NO: 15668 - protein, 355 aa, Candidatus Kuenenia stuttgartiensis
MSLGEIKKKLEEDGVDGFLVTNEINIRYITNFKGSDSALLITPGSDYLFTDSRYIEQAHQDNPEIKIVERKISLTNSICGKIKQLKIKKLLVESLYISVDQFNEIKQRINNICMLTVKGIVENYRKQKTKDELEKIQKAIGIAEKAYTNVQSKIKYGITEKDIADILEYELRKQGAEKSSFDIICAVGKHASKPHARPSTTMIQRGDTVLIDWGARFQDYNSDLTRLKTMDRISPKFRRIYQIVLDAQYLAIGSIRPGVIAKKIDAVARGYIEKKGFGKYFGHGLGHGVGLEVHEAPFINRKSNEILKEGMVFTVEPGIYIPQWGGVRIEDLVLVTSTGCEVLSKLPKKLSDIDE

SEQ ID NO: 15669 - protein, 337 aa, Oryza sativa (japonica cultivar-group)
MHLSPWQWRSTNSPRIESLLRTQIKSYTYSEVRKMTKSFAHTLGKGGYGTVYKGSLSDGSEIAVKMLEDTKDDAEDFINEVVSIGRTSHINVVTLLGLCLHRSKRALVYEYMPNGSLDKYAVGVVDTVQGEKSLSWEKLYEILVGIAQGLDYLHRWCNHRVVHLDIKPQNILLDQDFRPKISDFGLAKLCKPKESKISIGGARGTIGYMAPEVFWRHHGAVTTKSDVYSYGMLILQMVGARENTNASMQTVSKYFPEWLYDNLNQFCGAATEGIDSRNTCISEVARKLVTIGFWCIQCTPEDRPSMSEVIDMFDRSMHELQLPPRMSCCGIDNPSIV

SEQ ID NO: 15670 - protein, 257 aa, Allium cepa
GVFHIATPMDFESKDPENEMIKPTINGMLDILKSCVKAKVRRVVFTSSGGTVNVEATQKPVYDETCWSDLDFIRSVKMTGWMYFMSKILAEQAAWKYAAENNLDFISIIPPLVVGPFIMPSMPPSLITALSPITRTESHYTIIKQGQYVHLDDLCMSHIFLYENPKANGRYIASACAATIYDIAKMLREEYPEYNVPTKFKDYKEDMGQVQFSSKKLTDLGFEFKYGLKDMYTEAVETCRAKGLLPLSLEHHENGSA

SEQ ID NO: 15671 - protein, 351 aa, Triticum aestivum
MATLRCTNHTLLGSPTCLARPRRAVVRAAVAVQAEAQPKVSLIRIGTRGSPLALAQARQTRDELKAAHTELAEDGAIEIIIIKTTGDMILDKPLADIGGKGLFTKEIDDALLEGSIDIAVHSMKDVPTYLPEGMILPCNLPREDVRDAFICLTAKTLGELPAGSVIGSASLRRQSQILYKYPSLKVVNFRGNVQTRLRKLKEGDVHATLLALAGLKRLGMPETATSVLSVDEMLPAVAQGAIGITCRSNDDKMMEYLSSLNHEDTRLAVACEREFLSVLDGNCRTPIAAYAYRDKDGNCSFRGLLASPDGSIVYETSRSGTYSFDDMVAIGQDAGHELKSKAGPGFFDGLQ

SEQ ID NO: 15672 - protein, 432 aa, Candida glabrata CBS 138
MGLSKILGSNDNIVNKNGSSNTGGSKKSSFFSLNSKRNTDAAGIVPDFTSIKAPRTIYKNANFSISGKYEIIQVLGKGSYGVVCSAKHKLDNEDQEQFTVAIKKITNIFYRKILLKRAIREIKFMNYFKGHKHIVNLIDIEIVQDKPYDGLYCYQELIDYDLARVIHSSVQLSEFHIQHFIYQILCGVKYIHSADVIHRDLKPGNILCTVNGCLKICDFGLARGVAKQFVNKNSKPNEITNYVATRWYRAPELILSNNEYTKSVDMWSVGCILAEFYGRRPIFMGKDSIHQVYEIKKILGTPSRSLLVKYGTLKAWNLFGHNSNHNLDNLKSGMPWSTVYPMASATALDLIDKLLQWEPESRLNVLQSLEHQFVQSVRKPNDEPICSKGPFNFSYEYNLNSMDDLRQCLNEEVAQFYIERQLGEEYSKYIEE

SEQ ID NO: 15673 - protein, 534 aa, Mesembryanthemum crystallinum
MGICASKNKATQPEDNGYTPANGVGSNNQSKPPAQQNYHQQPPQQPVAPPQPASHPPVRMPSPKPAPKVEPNTILGKPFEDVKVYYTLGRELGRGQFGVTYLCTDKKTGQQYACKSISKKKLVTKADKDDMRREIQIMQHMSGQPNIVEFKGAYEDKTSVNLVMELCAGGELFDRIIAKGHYSEKAAATMLRQIVNVVHVCHFMGVMHRDLKPENFLLSSKDENSLLKATDFGLSVFIEEGKVYRDIVGSAYYVAPEVLRRRYGKEIDVWSAGVMLYILLSGVPPFWAETEKGIFDAILQGHIDFESKPWPSISNGAKDLVRKMLTQDPKKRITAAQVLEHPWLRDGEASDKPIDSAVLLRMKQFRVMNKLKKLALKVIAENLPDEEIQGLKQMFANMDTDGSGSITYEELREGLARLGSKLTETEVKALMEAADQDGSGSIDYYEFITATMHRYRLERDEHLYKAFQYFDKDNSGFITTDELETAMKEYGIADENCIAEILLEVDTDNDGRINYDEFSAMMRSGTQNPVTKLI

SEQ ID NO: 15674 - protein, 403 aa, Actinobacillus pleuropneumoniae serovar 1 str. 4074
MFEPIYETTQDAVIKVVGVGGGGGNALNHMVDGNLNNEGVGGVEFFSVNTDAQVLRTSSVRQTIQIGANITKGLGAGANPNVGRQAAEEDREALSNMLAGADMVFISAGMGGGTGTGAAPVIADIAKSQGSLTVAIVTKPFRFEGNKRMNYAEQGIQELSKHVDSLIIIPNDKLLKVLPKNTKMMDAFKAANDILRNAVLGITDMITSPGLINVDFADVKTVMSEMGRAMMGTGIAEGEDRAEHAAHDAVASPLLEDVDLSGAKGILVSISSGLDIELNEVDVIMDYIHSFAAPDATIVFGTSVYPEMEGKLRVTLVATGIGQAEELTLPRATVVPQPMQQPMQQQGYQQQAQQPQQPAFAQQGYAQPAQFAQPQQAAPKPQQVDSSQVWSPNSIPGFMRNGQ

SEQ ID NO: 15675 - protein, 500 aa, Leifsonia xyli subsp. xyli str. CTCB07
MSEQNREPAETSEESALQPTAAMRRKVTGLALAAAVGGFLFGFDSSVINGAVDSIQRNFALNAFVTGFIVAIAFFGCAVGAFVAGRLADRWGRLRVMLLGAVLFLISSVGAGLAFSVWDLGLWRIVGGLGIGIASVVAPAYIAEISPRQSRGRLGSLQQLAITLGIFVALLSDALLAGIAGSASSQLWLGLEAWRWMFLVGVIPSVVYGVLALTLPESPRYLLTTGRHKDARAIFSTMVPEGDVDRQVRDIERVIEEDKEGRRGTLAGNRFGLKPIVWIGVILSVFQQFVGINVIFYYSTTLWRAVGFTESNSLLITVITSVTNVVVTIVAILLVDRVGRRPILLTGSVGMALALGVMALSFTFAVKQDGAVSLPSPWGPLALVAANVFVVCFGASWGPLVWVLLGEIFPSRIRGKALGVAAAAQWIANFLVTVSFPPMSDFSLPFTYGMYAVFAALSWFFVFFKIPETNGMALEHAETLFQEAGGRRRGIQVRSSGDSV

SEQ ID NO: 15676 - protein, 315 aa, Bacteroides fragilis NCTC 9343
METERIKCLIIGSGPAGYTAAIYAGRANLSPVLYEGIQPGGQLTTTTDVENFPGYPQGISGPQLMEDLRTQAERFGADIRFGIATASDLGQAPYKITIDGEKVIEADSLIIATGATAKYLGLDDEKKYAGMGVSACATCDGFFYRKKVVAVVGGGDTACEEAIYLAGLASKVYLVVRKPYLRASKIMQERVRKHDKIEVLFEHNVVGLFGENGVEGMNLVKRWEEPDEERYSLPIDGFFLAIGHKPNSDIFKPYLDTDEVGYITTDGDSPRTKVPGVFAAGDVADPHYRQAITAAGSGCKAAIEAERYLSEKGLI

SEQ ID NO: 15677 - protein, 175 aa, Triticum aestivum
MAPTVMASSATSVAPFQGLKSTAGLPVSRRSNGASLGSVSNGGRIRCMQVWPIEGIKKFETLSYLPPLSTEALLKQVDYLIRSKWVPCLEFSKVGFIFREHNTSPGYYDGRYWTMWKLPMFGCTDATQVINEVEEVKKEYPDAYVRIIGFDNMRQVQCVSFIAFKPPGCEESGKA

SEQ ID NO: 15678 - protein, 359 aa, Coccidioides immitis RS
MAASRTLRIGLIPGDGIGREVIPAGRRILEALPASLGLKFSFVDLDAGFETFKRTKTALPDKTVDTLKKECDGALFGAVSSPTTKVAGYSSPIVALRKRLDLYANVRPVKTTPGANVPAPIDLVIVRENTEDLYVKDEKSYDTPEGKVAEAIKRISERASSRIATIAGEIALRRQKIRETGQAAPRSGPMVTITHKSNVLSQTDGLFRETARKALAAEKFSSVEIEEQIVDSMVYKLFRQPSYYDVIVAPNLYGDILSDGAAALVGSLGLVPSANVGDGFAIGEPCHGSAPDIEGKGIANPIATLRSAGLMLEFLGEEEAAAKIYAAVDANLDEGKFLSPDLGGKATTEEVLQDVLRRL

SEQ ID NO: 15679 - protein, 391 aa, Kluyveromyces lactis NRRL Y-1140
MMISSALRNRNSAFCSPVLRNYVHRFHSQAKKGPTGIVFMNMGGPSKVSETYDFLYQLFSDYDLIPISAKYQPIIAKYIARFRTPKIEKQYEEIGGGSPIKKWSEYQCARVCELLDEIHPQTAPHKPYVAFRYARPLTHETYEQMLKDGVSRAVAFSQYPQFSYSTTGSSINELWRQIKNLDPERQISWSVIDRWPTQPGLIKAFAENITRKLEEFPAEIRDNAVILFSAHSLPMDVVNTGDAYPAEVAATVYHVMKELNFRNPYRLVWQSQVGPKPWLGAQTSDITEFLAPTQPGLVLVPIAFTSDHIETLHEVDLGIIAESKYKDKIKRCDSLNGSETYIKGMVDLVKNHLDNGPRFSNQLSLDFTLGKSSDPIISAAEVFAENPTKLN

SEQ ID NO: 15680 - protein, 144 aa, Klebsiella pneumoniae
ESNGKYVDRNGHAVDYQTGPIIWGEPGTNGQHAFYQLIHQGTKMVPCDFIAPAITHNPLSDHHQKLLSNFFAQTEALAFGKSREVVEQEYRDQGKDPATLEHVVPFKVFEGNRPTNSILLREITPFSLGALIALYEHKIFTQGA

SEQ ID NO: 15681 - protein, 450 aa, Streptococcus agalactiae NEM316
MKVVKFGGSSLASSQQLYKVLNIIKSDYTRRFVVVSAPGKRYEEDLKMTDALIQYYQNYINGKDIVKDQTWIINRYQEIISDLSLGSTIAEEITRSIEQLASLPIENNQFLYDCFLAAGEDNNAKLVATFFNQNDIPARYVHPNEAGIIVTKEPCNARIIPGSYDKIENLCLYNEVLVIPGFFGVTEDNQICTFSRGGSDITGSLIAAGIKADLYENFTDVDGIFAAHPGVVKNPHAIPELTYKEMRELAYAGFSVLHDEALLPAYRDRIPLVIKNTNNPQQPGTKIVLKHTRSNIAVTGIASDSRFASINVSKYLMNREVGFGRKVLQILEDLNISFEHMPTGIDDLSIVLREKELTPIKEQEILNYLTRKLEVDYVDIQHNLSTIVIVGENMKSQIGVTATATQALSREKINITMISQGSSEVSIMFVINSKDEKRAIKALYETFFQK

SEQ ID NO: 15682 - protein, 99 aa, Brassica napus
MAAAAKLSFKDSLKALEADIQHANTLALDYPREKDGARVQMRLSYSPAAQFFLFLVQWTDCHLAGSLGLLRVLIYMTYADGKTTMSVYERKASIREFYA

SEQ ID NO: 15683 - protein, 88 aa, Paenibacillus polymyxa
AIIKPFKLDEVREALSEIGISGLTVTEVKGFGRQKGHTELYRGAEYVVDFLPKIKIEIVVNEEQVDPAIDAIIKAARTGKIGDGKIFV

SEQ ID NO: 15684 - protein, 504 aa, Pericallis cruenta
MSILTLICTFITGLMFYGLVNLLSRRASRLPPGPTPWPIIGNLMHLGKLPHHSLADLAKKYGPLIHVRLGSVDVVVASSASVAGQFLKVHDANFANRPPNSGAKHMAYNYHDMVFAPYGPRWRMLRKMCSMHLFSAKALTDFRQVRQEEVTILTRVLARTGQSAVKLDQQLNVCFANTLSRMMLDRRVFGDGDPKADDYKDMVVELMTLAGQFNIGDYIPWLDLLDLQGIVKRMKKVHSQFDSFLDTIIDEHTIGTGRHVDMLSTMISLKDNADGEGGKLSFIEIKALLLNLFSAGTDTSSSTVEWGIAELIRHPQLMKQAQEEMDIVVGKNRLVTEMDISQLTFLQAIVKETFRLHPATPLSLPRIASESCEVKGYHVPKGSILFVNVWAIARQSELWTDPLEFRPGRFLIPGEKPNVEVKPNDFEIVPFGGGRRICAGMSLGLRMVNLLIATLVQAFDWELANGLEPEKLNMEEVFGISLQRVQPLLVHPRPRLARHVYGTG

SEQ ID NO: 15685 - protein, 520 aa, Yersinia pestis KIM
MSQQVIIFDTTLRDGEQALQASLSVKEKLQIALALERMGVDIMEVGFPVSSPGDFESVRTIAQQVKNSRVCALARCVDKDIDVAAEALRIAEAFRIHVFLATSTLHIESKLKRSFDDVLAMAVHSVKRARNYTDDVEFSCEDAGRTPIDNLCRVVEAAITAGATTINIPDTVGYTPPYQFGGIITDLYERVPNIDKAIISVHCHDDLGMSVANSITAVQAGARQVEGTINGLGERAGNCSLEEVIMAIKVRHEMLGVHTNINHQEIYRTSQLVSKICNMPIPGNKAIVGSNAFAHSSGIHQDGVLKNRENYEIMTPESIGLKEVQLNLTSRSGRAAVKHRMEEMGYQDKDYNLDSLYDAFLKLADKKGQVFDYDLEALAFINKQQEEPEYYRLDYFSVQSGSSVMATASVKLVCGEEIKSEAATGNGPVDAVYQAINRITDYPIELVKYQLSAKGQGKDALGQVDIVVDHKGRRFHGVGLATDIVESSAKALVHVLNNIWRAHQVEKEKQRLQQNNQEMV

SEQ ID NO: 15686 - protein, 321 aa, Shigella flexneri 2a str. 301
MGTTKHSKLLILGSGPAGYTAAVYAARANLQPVLITGMEKGGQLTTTTEVENWPGDPNDLTGPLLMARMHEHATKFETEIIFDHINKVDLQNRPFRLNGDNGEYTCDALIIATGASARYLGLPSEEAFKGRGVSACATCDGFFYRNQKVAVIGGGNTAVEEALYLSNIASEVHLIHRRDGFRAEKILIKRLMDKVENGNIILHTNRTLEEVTGDQMGVTGVRLRDTQNSDNIESLDVAGLFVAIGHSPNTAIFEGQLELENGYIKVQSGIHGNATQTSIPGVFAAGDVMDHIYRQAITSAGTGCMAALDAERYLDGLADAK

SEQ ID NO: 15687 - protein, 419 aa, Salinibacter ruber DSM 13855
MAGTSRRVVVTGMGALTPLGLSVEEYWRGLVEGESGAATIESFDPEGLRVTFACELDGFDPEDHLPAKQARRVDPFSQYALVTADQAVADAGLDPDGMSQDEKDRIGVVYGTGIGGIKTFRDQAEEFIEGGEKRTSPFFIPTLIPDIAAGQIAMAHGFRGPNHAMVSACATGNHNIGDAYRMIQRGDMDAALCGGTDACVTRLGIAGFASMRALSTRNDDPARASRPFDAHRDGFVMGEGAGALFIEDLERARARGATIYAEIEGIGMSADAHHLTAPDPEGGGVCLALNRVLDNAGLEPTDVDYINAHGTSTPLGDEAETKALKKVFDDHAYDLNVSSTKSMTGHLLGAAGAIEAIAAIQALRHDVVPPTINFDEADPACDLDYTFNEAEERPVSVALSNAFGFGGHNTSLALRAYDE

SEQ ID NO: 15688 - protein, 306 aa, Dehalococcoides sp. CBDB1
MSTLLYDVIIIGGGPAGLTAALYTGRSKLKTLVIERAFVGGQITRSEKVDNYPGFPEGITGFDLTQQMQIQAEKYGVEITSAEVNAIHKTKDHFEVVTETGGLSGRCIIICGGTERNKLEVPGEEEFSGRGVSYCATCDAPFYNDKVVAVVGGGNMAFYEALHLSEFAKKVYLIHRRQGFRADAVLMDKAKNKSNIELVLDTVVTSINGQDSIQSLSLNNLKTLKTSTLPIDGLFVAVGLQPNTTYLKGVVDMDKNGSILVNDQMETSVSGILSAGDIRSGSIRQVISAAGDGAVAALSAKRYLDL

SEQ ID NO: 15689 - protein, 290 aa, Pseudomonas putida KT2440
MTQDTPYIFDATDTNFQQLVIENSFHKPVLVDFWAEWCAPCKALMPLLAKIAEGYQGELLLAKINCDVEQQVVAQFGIRSLPTVVLFKDGQPVDGFAGAQPESAIRAMLEPHVQMPAAPTAAPLEQAKALFAESRFAETETLLQALLGEDNSNAEALILYARCLAERGELGEAQVVLDAVKTDEHKAALAGAKAQLTFLRQAASLPEVADLKSRLAQNPQDDEAAYQLSIQQLARQQYEAALEGLLKLFQRNRGYENGLPQKALLQVFELLGGDHPLVGVYRRKLSAAMF

SEQ ID NO: 15690 - protein, 357 aa, Leptospira interrogans serovar Lai str. 56601
MKKLLYTLNLSEQFLWEFPHFKNRWIRNKSQRFRFYSKGAFSQEFPQKDQKTFYLQKYDFMDCRNNLAPRLSKFRTSFLIVNRWIEILFFWSFVLFCTFFSFPISAEIQWEKSVQIAFEKARSSGKPIFIDVYADWCSYCKTLKKEIYPKKEVQLELSKFVALSLDGDKFPNLKRKYGIKGYPSILFLDRNGSLIDKITGMPDSKMILKSLKNAYVRRNLENEYLENLAKDPQGIQTNFQAGVYYFEAKEYSKAIQFFQKAIDSNDSKNLEKKHDALFNLGISYLEIGNFKLAISTFNSYLSKYPNGDLVSVLFFRANAYEELNLKEEAKADYKKVLELTLDPDEKQDLQMRIDSLN

SEQ ID NO: 15691 - protein, 570 aa, Geobacter metallireducens GS-15
MRYSQYFIPTVKETPSDAEVVSHKLMLRAGMIRKLAAGIYNYLPLGLRSIRKVEQIVREEMNRAGAIELLMPSVQPAELWQESKRWEQYGKELLRFKDRKDAEFCLGPTHEEVITDLVRREVKSYRQLPLNLYQVQSKFRDEIRPRFGLMRGREFIMKDAYSFDVSSEAADTSYDKMYQAYRRIFQRCGLKFRAVEADTGSIGGSSSHEFMVLADSGEDAIVSCTACEYAANVEKAEARLFPSEHAEPRELEKVETPQKRSVEEVTTFLGIPASSLVKTLLCVADGEPVAALVRGDHDLNEIKLKHLLGCEELEMASEEIVERVTGAPVGFAGPVGLKIKIVADLTIQGMKNFVTGGNARDLHFKNVNIGRDFTPALIADIRNVVHGDPCPRCEAGHLEMWRGIEVGHVFKLGTKYSESLRATFLDADGKEQVIFMGCYGIGISRTVAACIEQNHDADGIIFPIPIAPFHCIISAVSTKDAEVVAACDELYRALTAVGVEVLFDDRDERPGSKFKDADLIGIPLRIVVGSKNLAEGKVELKSRKGGEVSLLPLAEAVETVKGLVVAALNQ

SEQ ID NO: 15692 - protein, 414 aa, Mycosphaerella graminicola
MGDLQGRKVFKVFNQDFIVDERYTVTKELGQGAYGIVCAATNNQTGEGVAIKKVTNVFSKKILAKRALREIKLLQHFRGHRNITCLYDMDIPRPDNFNETYLYEELMECDLAAIIRSGQPLTDAHFQSFIYQILCGLKYIHSANVLHRDLKPGNLLVNADCELKICDFGLARGFSVDPEENAGYMTEYVATRWYRAPEIMLSFQSYTKAIDVWSVGCILAELLGSKPFFKGRDYVDQLNQILHYLGTPSESTLARIGSPRAQEYVRNLPYMQKIPFHTLFRNANPDALDLLDRMLAFDPSQRIDVDEALEHRYLSIWHDASDEPNCPTTFDFGFEVVEEVPEMRQMILQEVRQFRQSVRAPQQQQYSQGHQQGQQVPIPDGYDRTHEDPRPQEMGSTDPYGLERELHDGLDAMR

SEQ ID NO: 15693 - protein, 564 aa, Xanthomonas campestris pv. vesicatoria str. 85-10
MCSIFGIFGLQPGDDLQALRRQALECSQRQRHRGPDWSGVYVDTGAILVHERLAIVDPAGGSQPLLSDDGQLALAVNGEIYNHRELKAELLQPYAFQTGSDCEVINALYREDTPASYLNRLNGIFAFALWDKTEGRVIIARDPIGVVPLYWGHDREGRLRVASELKSLVDDCADAAQFPPGHWYDSATGALSRYYERAWRHYDAVEGVQVQLQELREAFERAVHRQLMTDVPYGVLLSGGLDSSLVAAVAARYARHRIEENDTTEAWWPRLHSFAIGLKGSPDLAAAEVAAAALGTVHHGFEYTFDEGLDALPDVIRHIETYDVTTIRASTPMFLLARRIKAMGVKMVLSGEGSDEIFGGYLYFHKAPNAREFHEELVRKLDALNNYDCLRANKSMMAWGVEPRVPFLDREFLDVAMRMDARFKMIDKTSGGAARMEKGVLREAFAGYLPESILWRQKEQFSDGVGYGWIDGLKAHAQAQVSDRELAAADRRYPVNPPQTKEAYFYRSLFEQFFPGQAAAETVPGGKSIACSSPTAIAWDASFAAMADPSGRAIAGVHAQALAS

SEQ ID NO: 15694 - protein, 162 aa, Paracoccus haeundaensis
MTNFLIVVATVLVMELTAYSVHRWIMHGPLGWGWHKSHHEEHDHALEKNDLYGLVFAVIATVLFTVGWIWAPVLWWIALGMTVYGLIYFVLHDGLVHQRWPFRYIPRKGYARRLYQAHRLHHAVEGRDHCVSFGFIYAPPVDKLKQDLKTSGVLRAEAQERT

SEQ ID NO: 15695 - protein, 567 aa, Arabidopsis thaliana
MVKKNKTLIFFNSLPSDIEIEVDDITFHLHKFPLMSKSKKLHQLITEQEQSKVYSHIKLENFPGGSEIFEMVIKISYGFKVDISVSTAVPLRCAAEYLEMTEEYSPENLISKTEKFLSEFVFTNVQESIKALKACESVSSLAESLCITEQCIDSIVFQASSTDPSSFYGWPINNGGIFTVDRKKQSKDSKTELWFEDLTELSFPIFRRVILSMKSSVLSPEIVERSLLTYAKKHIPGISRSSSASSSSSSSSTTIASENQQRELLETITSDLPLTATTTRSLFGLLRAAIILNASENCRKFLEKKIGSNLEKATLDDLLIPSYSYLNETLYDIDLVERLLRRFLENVAVSSSSLTVVGRLIDGVLGEIASDANLKPEQFYNLAVLLPVQARVYDDGLYRAVDIYFKTHSWILEEEKEKICSVMDCRKLTVEGCTHAAQNERLPLRAVVQVLFLEQLQLRQVITGTLLTEEDGDKTVVDLGRWKEAVKENQVLRLDMDTMRTRVNQLEKECLYLKKVIAKIDKESLLKAKHGAGKWSIGKKFGCKFSAQVCDSQEATMVDRRSRRFLS

SEQ ID NO: 15696 - protein, 143 aa, Zea mays
MPVPLAPYPAPPAPFTPPNGAQSQLVCTGCRNLLMYPAGATSVCCAVCSTVTAVPAPGTEMAQLVCGGCHTLLMYIRGATSVQCSCCHTVNLAMEANQVAHVNCGNCRMLLMYQYGARSVKCAVCSFVTSVGTSPGAEQKPSS

SEQ ID NO: 15697 - protein, 157 aa, Wolbachia endosymbiont of Brugia timori
DVGKGAAEESIDEIMEHIKDSHMLFITAGMGGGTGTGAAPVIAKATREARAGVKDKASKEKKILTVGVVTKPFGFEGVRRMRIAELGLEELQKYVDTLIVIPNQNLFRVTNEKTTFSDAFKLADNVLHIGIRGVTDLMVMPGLINLDFADIETVMSE

SEQ ID NO: 15698 - protein, 200 aa, Pyrus communis
WQRTAFHFQPEKNWINDPNGPLFHKGWYHLFYQYNPDSAVWGNITWGHAVSTDMIHWLYLPLAMVPDRWFDANGVWTGSATLLPDGQIIMLYTGSTNESVQVQNLAYPANLSDPLLLDWVKYEGNPILTPPSGIGSTDFRDPTTAWIGPDGKWRTTIGSKFNTTGISMVYTTTDFINYELHDGVLHEVPGTGMWECVDFY

SEQ ID NO: 15699 - protein, 656 aa, Geobacter metallireducens GS-15
MSQGIFGIIDFRNAIADRDVLGNAMAAYLKMSGSGEFSVSTGLGHLIGMRRSAADSPSRQTRIEHDPDAGLAAVIHGEVNNYRELLSQHPPSGRPCCGDLDLVLRMYRRSGASFARSINGLFTIGILDEREKTFRLMNDRFGLAHQLYWTVADGRLIFATHLKTLLACPGVRRELDHEGLNLFLKYAYITSPWSILKGINKLPPGHMLTFRDGKAEVAPYWQFDAVTRPGMTMEEAIPAYRDLLRGAIARRMGSDGSTGVMLSGGLDSSANAALAASCSSTPVKTFAIGFEDPRFDERPFARIVAKHFGTDHHEYTITGREIDDLPSLVWHLEEPYFEFGLFLTYMGLKSASGHVQAVIGGEGADQMYGTGGFAGGRPAAVHYLFRKSGMIGPARTVSSLLRGPLFYDRDNLGFQLRLFWNRAADLNDWYFYGYDGHELSQLYRNGNLARVPRIFGEPAGSPESFAQVYLETQIEQDMRHYVNENVMVKSGRMADMLGLVLRESFLDADVADFLVSLPMPVKRGGGLVDHLRGRFKSKLLHRKAMEGILPPEIMSKPKQGGFVPVMIFLNDPALRKRIYEKLLRSEVMGEYFRTDYLRTLFEKYESFQQGAVGWPNFLNSKANRILFLLTFDIWHHCYLANDPLGVTPPSLNEYLG

SEQ ID NO: 15700 - protein, 473 aa, Parvularcula bermudensis HTCC2503
MTEEMTRELTFRQNVNMMFDRATTYLDIDEGLKHKIKICNSVYTVRFGVKLRGSIHTFTGYRAVHSEHMEPVKGGIRYALSVNQDEVEALAALMTYKCALVRVPFGGSKGGLCIDPTQWDADELERITRRFTYELAKRDLIHPSQNVPAPDMGTGEREMAWMADAYKRMHPTDIDAMACVTGKPPHAGGIRGRVEATGRGCQYALQSFFSFPEDVAACGLDGGIEGKRVIVQGLGNVGYHAAKFLSEEDGAKIVGVIERDGAILHDDGIDIEEIKHFLTRNGGIKGYPHGKYIEDGLSALTADCDILVPAAIEGVINGANAADIKARIILEAANGPVTANADTILREKRVEVIPDLYTNAGGVTVSYFEWVKNLSHMRFGRMQRRAEEKRAMALITELERATGQPLNDQFKARFAQGDQEIDLVRSGLDDTMRTAYARMRQTRVTTKGIEDMRTAAYATALTDIAKSYESLGL

SEQ ID NO: 15701 - protein, 103 aa, Triticum aestivum
GRVLVVDRGGSLRRALLGGNIAMLAQNNGWAGIMINGCVRDVDEINECDIGVRLLGSHPMKSDKRGVGEKHAPVTVAGARICDGECLYANADGILVSKTELSV

SEQ ID NO: 15702 - protein, 200 aa, Pyrus communis
WQRTAYHFQPEKNWMNDPNGPLFYKGWYHFFYQWNPNGAVWGDIVWGHAVSKDLIHWLHLPLAMVADQWYDINGVWTGSATILPDGKIVMLYTGSTNESVQVQNLAYPADHNDPLLTKWVKYSGNPILVPPPGIGYKDFRDPTTAWYTSQGKWRITIGSKLNKTGISLVYDTKDFKTYEQLNGVLHAVPGTGMWECVDFY

SEQ ID NO: 15703 - protein, 113 aa, Frankia sp. CcI3
MTKLVTAVIKPFKVDDVKAALETLGVHGLTISEVQGYGRQKGHTEVYRGAEYKVDFVPKIKIEVVVADGAVDDLVAAITSSAQTGKIGDGKIWVVPVESVVRVRTGERGADAL

SEQ ID NO: 15704 - protein, 496 aa, Yarrowia lipolytica CLIB122
MSLFSKLTLANGLEVDQPTGLFINGEFVAAKSGKTFETINPTTEEVICSVSEADEEDVNAAVDAAAAAFKTWGFKTAPSARGAALFKLADLIERDLDIIAAIETTDNGKVYAHAKGDVALVVKVIRFYAGYADKIYGDVIHGNDGHFSYTRKEPIGVCGQIIPWNFPLVMWSWKIAPALATGNTVVLKSAESTPLSALYAAKLAQEAGIPAGVLNIVSGYGKVGALMTNHPKIRKVAFTGSTATGKQVLKGAALSNLKKISLELGGKSPNIIFDDANLPNAISWAALGIFFNSGEVCAAASRLYVQEGVYHEVVAALKQRAEALVVGDPFDQQTFQGAQTSKIQFDRVMSFIEAGKAEGATLLTGGCRAKDKGYFIRPTVFTDVKKDMKIVQEEIFGPVVVVTKFKTLEEVIELANDSEYGLAAGVHTQDISRAHYLAENLHAGTVWVNTYNSFHISLPFGGFNQSGFGKEMGKDGLDSYIQTKAVRIMFDQAKLQ

SEQ ID NO: 15705 - protein, 262 aa, Burkholderia xenovorans LB400
MSEPSVVAVSRAGTVGVIELARPEKFNCLSLAVFAAISAAVDAFETPESGVRSIMICAQGKNFCTGADLDEVLSLRQEIGDMRRFISTAHQTMKRLSTSSLPVVAACQGLSLAGGFELMLACDIAIAARDARFGDQHAQYGLLPGFGASQRIPRLIGLRRSMDLFFSARWLDAQTAQQWGLVNRVVEAGELRQAALDYCEELATRSRIGLATMKRLAREGLEGSLEAGLKLEEAVVPGGLLEDDVSEGLAAFQERRSPRFRS

SEQ ID NO: 15706 - protein, 441 aa, Salmonella typhimurium LT2
MYHGQLKNILLLSLRFIMDKLSYASDSSTSAWNTYLQQIERVAPYLGELSPWVDTLRHPKRALIVDIPVQMDDGTIRHFEGYRVQHNLSRGPGKGGVRYHPDVDLNEVMALSAWMTIKCAALNLPYGGAKGGIRVDPFSLSEGELERLTRRYTSEIGIIIGPQKDIPAPDVGTNGKVMAWMMDTYSMNHGTTVTGVVTGKPIHLGGSLGREKATGRGVFVSGLEAARRANIAVEGARVAVQGFGNVGSEAARLFAGAGARVVAIQDHTATLFNATGIDMKALTAWQTEHKQIAGFPGAETIASDAFWRLEMDILIPAALEGQITRQRAEALTCKLVLEGANGPTYPDADDVLASRGILVVPDVVCNAGGVTVSYFEWVQDMASFFWSEEEINARMDKIMTDAIVHVWEKAAEKSCSLRTAAYIVACERILLARKDRGIYPG

SEQ ID NO: 15707 - protein, 440 aa, Tropheryma whipplei str. Twist
MPEVTFLLTDPGEGLVEAEIVSLRVTEGDAVDVNQIVVEVETAKSLVELPSPFKGVVRKLLVAVGELVKVGSPIMLIDTDETPPAGLPKTGKMPVSDVRDGGHDTAKNTHPRDTGSSKDIHDAFGKEDGREIDFGRNVLVGYGPCEDNARVRGDDITGRPSLDETLERPVAKPSVRKFAKELGVDLYGVKPTGIGGTITRRDVLNATSTQEEATTRVPVKGLRRQTAQNVTLSAFSVPHVSVFVDVDVTRTIELVDRLKRDPLYEQVRISPLLILSRAVTWAVKRSPIVNSTWSEQEILLHKSVNLGIAVATDRGLVVPNIKNAQCLSMLDLAKAIESLVDDARSSRIRPEDTLNGTITITNIGVFGVDSGTPILNVGESSIVFIGAIKPRPWVVNGEISVRRVATIGGSFDHRVMDGDTASRFLVNVASILEEPALLVE

SEQ ID NO: 15708 - protein, 215 aa, Ashbya gossypii ATCC 10895
MIRIGSRLTPSLRHYTSSSQRITKFTMSGFYDLSPLDAKGEPFPFSQLKGKVVIIVNVASKCGFTPQYEELEELYKKYKDQGFEVIGFPCNQFAHQEPATNEEIVQFCKLNYGVTFPVLKKVDVNGADADPVYVYLKSQKSGLLGFKGIKWNFEKFLVDRKGQVKDRYSSITKPLSLEKTIETLLKEEGGPAPTATTEATATATADAAKPSGESL

SEQ ID NO: 15709 - protein, 92 aa, Triticum aestivum
  misc_feature (14)..(14): Xaa can be any naturally occurring amino acid
  misc_feature (73)..(73): Xaa can be any naturally occurring amino acid
MAFSMLSFGTMAAXSAAQATMVAHFNGLMSSAVFPATATANNDTTCMTSNGGRGNCMQVWPTIVKKKIETLSXLSDPTDSAWAYEVDYLIRN

SEQ ID NO: 15710 - protein, 346 aa, Cryptococcus neoformans var. neoformans JEC21
MSAITKGDLILVSGASGFIASHTVKEFLKEGFRVRGTVRSKEKGEYLKHLFQGLGEFEYVLVDDITKDGIFDEAVKGVNAVAHLASPFYVTNVKDPRELIDPAVKGTTGILKSVQKNNPKVKRVVITSSVAAIMCPISKKPPVTYTEADWNVDSIPHVEEKGVEADGMHSYLASKTLAEKALWSFIEDEKPSWDAVAIHPPYVLGEVIHQCDKPESLNTSVASFWSWPAGEKTEKDIPGPIGNWVDVKEIALGHVRALTVPEAGGQRFIISAGPFAGQDYADILHKRFPEVKNVPVGKPGTHDEVCKELDIFDGKKAEKVLGIKYHTLEETVVDMFESLRKRFNKF

SEQ ID NO: 15711 - protein, 489 aa, Acidobacteria bacterium Ellin345
MCHGSLPCNERMDYTQASASQTLTAANPASNKPEKPTLVRGMSFLDAVLLLVGGIIGSGLFLTSSDVAKTTYTPLIFMSAWIVGGIVSLLACLSVAELGSMFPEAGGQYVYLREAYGDFPAFLYGWMIFSVNVTGSNATIAAGFAAYAGAIIAPLNATRPIFSIGAWTFNMGHATAISAIVFLTWINVVGLRPAVILQNIATWAKFIAIAGFLVLGFLIGHGSWHNATQPIPGHVGFLSLASGFGVALIAVFWVYDGWVYATWVAGEIKDPQRNVPRSLIYGIAIVAAVILAVNVLYLYAMPMQQMAMQDTVGQAAAQILFFPAIGRWFSALVAIACFGAAACSILSGARVYYAMAADGLFFQKLAEVHPRWRTPAFSLIVQCIWSCALVLTGRYDQLFTFVMFISVIAYAAAASSIFVLRRKRPDMPRPYKCPGYPWVPLAYCVICGAWALNALWSKPFESLAGVGIMLIGAPAYIYWHRAKRKPAVL

SEQ ID NO: 15712 - protein, 396 aa, Polaromonas sp. JS666
MAKGKFERTKPHVNVGTIGHVDHGKTTLTAAITTVLASKFGGEAKGYDQIDAAPEEKARGITINTAHVEYETANRHYAHVDCPGHADYVKNMITGAAQMDGAILVCSAADGPMPQTREHILLARQVGVPYIIVFLNKCDMVDDAELLELVEMEVRELLDKYDFPGDKTPIIHGSAKLAMEGDKGPLGEQAIMKLADALDTYIPLPERAVDGAFLMPVEDVFSISGRGTVVTGRVERGVIKVGEEIEIVGIADTQKTTCTGVEMFRKLLDQGQAGDNVGILLRGTKREDVQRGQVLCKPGSIKPHTHFTGEIYVLSKDEGGRHTPFFNNYRPQFYFRTTDVTGAIELPEGKEMVMPGDNVSITVKLINPIAMEEGLRFAIREGGKTVGAGVVAKIIA

SEQ ID NO: 15713 - protein, 334 aa, Tropheryma whipplei str. Twist
MSTPSWNRDVDSRREADLTLVSALNLALDDELALDPKLLLMGEDLGALGGVFRVTDRLCKKYGKNRVIDTPLAESGIVGTAIGLAAKGFRLVLEIQFNGFIFPAFNQITTQLARQNFRNKIPMPVVIRVPHGGHIGAVEHHMEAPEAYFAHTPGLRVVNCSTPSDAYWMLRQAIRCPDPVIFFEPLSLYWNKGTVSFSSPDLDLHAASIVRKGNDVTLLGHGGITRTLIAAAEHTRDVSVEIIDLRSLSPVDYETILASVKKTGRLVIAQESPGFVSLGSEIAATVSEKAFYHLEAPVARVSGYDTPFPPAKLEKVYLPDVDRVLTAIKGVMSH

SEQ ID NO: 15714 - protein, 346 aa, Cryptococcus neoformans var. neoformans JEC21
MTAITKGDYILVTGASGYIASQTVKEFLKEGYRVRGTVRSQDKGEYLKQLFEGLGAFDYVIVEDITKDGIFDEAVKGIDAVAHLASPFYISNVKDPQELIGPAVKGTTGVLKSIQKENPKVKRVVITSSVASIMSVRSRKGPVVYTEEDWNVDSIPYVEENGVNSDGGESYRASKTLAEKALWKFIEDEKPSWDAVAINPPLVLGEIIHQCDDPTKLNTSVFHFWEWASGRKSEKDLPGGGANWVDVKDVALGHVRALTVPEAGGQRFIVGAGPFAAQDYCDVLHKRFPEIPNIPVGKPNSHDEIVKGANIFDGSKATKVLGIQYSSFEETVVEMAESLRKRFGQF

SEQ ID NO: 15715 - protein, 117 aa, Medicago truncatula
WMYNPFQGTPKYYEGIHGYSTASSLENLVGRIEPKEICACTCEVTINRWEGGPLKIPWSFEEEETMYILEGKVNVTVEESIGSFEIGGGNLVVFPKGMNITWDVTEPVKKHYSLKKE

SEQ ID NO: 15716 - protein, 121 aa, Brassica napus
MADRLTRIAIVSADRCKPKKCRQECKKSCPVVKTGKLCIEVTVGSKVAFISEELCIGCGICVKKCPFEAIQIINLPRDLEKDTTHRYGPNTFKLHRLPVPRPGQVLRLVGTNGIGKSTALK

SEQ ID NO: 15717 - protein, 380 aa, Chlamydomonas applanata
KTTLTAAITMTLAARGGGQGKKYDEIDSAPEEKARGITINTAHVEYETDNRHYAHVDCPGHADYVKNMITGAAQMDGAILVVSGADGPMPQTKEHILLAKQVGVPNIVVFLNKEDQVDDKELLELVELEVRETLDKYEFPGDEIPVVPGSALLALEALVANPKIQRGENEWVDKIYQLMDKVDSYIPTPQRETDKPFLLAVEDVLSITGRGTVATGRVERGTLKIGENVEVVGLKDTKTTVVTGLEMFKKTLDETLAGDNVGVLLRGIQKKDIERGMVLAKPGSITPHTKFDAQVYILTKEEGGRHSAFLVGYQPQFYVRTTDVTGKVTGFSHIQMRSSSAAAAAEEQSNKMAMPGDRISMTVELINPIAIEKGMRFAIR

SEQ ID NO: 15718 - protein, 412 aa, Bacillus halodurans C-125
MSIIVQKYGGTSVGSVQRIEHVANRIIATAASGKKVVVVVSAMGKTTDELVGLASEITDEPRKREMDMLLATGEQVTIALLAMALHKRGQEATSLTGWQAGMITESHHGNARILEVERARMDELLDKVHVVIVAGFQGIDQQGEIMTLGRGGSDTSAVAIAAALKAERCEIYTDVTGVFTTDPRVVKQARKLQTISYDEMLEMANLGASVLHPRAVEFAKNYEIPLLVASSMVDEPGTMIEEEGTMEQNLLVRGIAFENDVTKVTVHGLPNEIHTLPTLFAHLSAAGINVDIIIQNQTDSGMAISFSITQSSLKETLARLEELKGELSFQGIDYEEELAKVSIVGSGMVSNPGVAAKMFEILAANDIAIKMVSTSEIKVSAVIDEELMVLAVEMLHEQFKLHEEEPAVAVKV

SEQ ID NO: 15719 - protein, 338 aa, Anthoceros punctatus
SDSGKDAGRFTAAWELYKAQEDVVAVCKEYNIKITLFHGRGGSVGRGGGPMYLAIQSQPPGSVMGTLRVTEQGEMIQAKFGLNQTAIRQLEIYTTAVLLATVHPPVPPRSAAWRSVMDEISDAGRKYYRQIVFETKEFLQYFHEATPEAELGNLNIGSRPTRRKSSGGTTQLRAIPWIFAWTQTRSVLPAWLGVGKGLQAAMEKGHRDELRAMYKEWPFFQSTVDLIEMVLAKADMPITKHYEDVLVSQNVRELGKELRDEFHVTEKHVRDITGHHKLSENNKTLRRLIESRLPYLNPINMLQVEVLRRLRQDETNPKLRDALLITMKGIAAGMQNTG

SEQ ID NO: 15720 - protein, 351 aa, Polytoma obtusum
KTTLTAAITMTLAARGNSVGKKYEEIDSAPEEKARGITINTSHVEYETENRHYAHVDCPGHADYVKNMITGAAQMDGAILVVSGADGTMPQTKEHILLAKQVGVPNIVVFLNKQDQVDDEDLLELVEMEVRETLDKYEYPGDEIPVVSGSALLALEALIKNPKIQRGDNTWVDKIYQLMDQVDSYIPTPQRQTEKPFLLAVEDVLSITGRGTVATGRVERGTLKIGENVEIVGFKTTKTAVTTGLEMFKKTLDETLAGDNVGVLLRGIQKKEIERGMVLAKPGSITPHTKFEAQVYVLTKNEGGRHSAFLVGYQPQLFVRTADITAKITAFTHAQTDTQRDSETNKKGNSM

SEQ ID NO: 15721 - protein, 178 aa, Rosa hybrid cultivar
ECALWMPTRTALEQQLSYTLHQQNPVGHTVPIHLPVINQVFSSNHAVKISPNSPVARLRPRAGNHMPGEVVAVRVPLLHLSNFQINDWPELSTKRYALMVLMLPSDSARQWHMHELELVEVVADQVAVALSHAAILEESRRARDLLMEQNIALDLARREAETAICARNDFLAVMNHEM

SEQ ID NO: 15722 - protein, 111 aa, Glycine max
  misc_feature (23)..(23): Xaa can be any naturally occurring amino acid
DLFFFLDITLHGTYYQILSVKEXYDEIRNSYRSAILHSHPDKLNGCSSDEKFLKIQKAWQVLSDAELRVVYDNDLRSSRLDGVTADELIQNCLVQLWKFSGKLFDFCTHLC

SEQ ID NO: 15723 - protein, 476 aa, uncultured archaeon
MREVGREKRMRVVMKFGGTAVANGEKIKTAANLVMRSKEAAENMEIVVVTSAIYAVTDTIYEQANRIAEEGKVEKVKEFVEELQEKHNKIAYWAIDNVQVLEKVKGEIKERMAEMEKALVGICLLGELTLRSLDYIGSFGERLAAPILAGAIQSAGIDAVHFTGGDVGIITNAEYGSAKLMEGVEQEVRARIMPLLGDKIPVVCGFTGETKDEKITTLGRGGSDYTATIIGAAIDADEIWLWKDTEGIMSADPKRIKNARKIPYISYIEAMELSYFGAAVLHPRAIEPVMEKKIPIRVKNLLNPDDEGTLIGEEQEKTKKAAKAITLIENTSIVNIAGTGIGSISDVASRIFSVLAAKNVDIIMISHGSSERTLSLVIDSAQLERAIDAIQSIHAVDTVIRDISYNSNVCTVGVVGVGMAGTVGVAGKVFSALGNEGISVKMISQGSSEFNISFVVQKEEAYKAAQAIHDVFEMGS

SEQ ID NO: 15724 - protein, 381 aa, Polytoma oviforme
KTTLTAAITMTLAARGGAQGKKYDEIDSAPEEKARGITINTAHVEYETDHRHYAHVDCPGHADYVKNMITGAAQMDGAILVVSGADGPMPQTKEHILLAKQVGVPNIVVFLNKEDQVDDKELLELVELEVRETLDKYEYPGDEIPVVPGSALLALEALIDNPKIQRGENKWVDKIYELMDKVDSYIPTPQRETDKPFLLSVEDVLSITGRGTVATGRVERGVLKIGENVEVVGLKNTKTSVVTGLEMFKKTLDETMAGDNVGVLLRGIQKKDIERGMVLAKPGTITPHTKFEAQVYILTKEEGGRHSAFLAGYSPQFFVRTTDVTGKVVSFSHIQMRNPSSVAEEHSNKMAMPGDRISMVVELINPIAIEKGMRFAIREGG

SEQ ID NO: 15725 - protein, 179 aa, Rosa hybrid cultivar
ECALWMPCRSGMNLQLSHTLNYEAHIGSTVPFSLPIVSEVFKSSRAMRIPYTCPLVRIRPLVARYVQPEVVALRVPLLNLSNFQINDWPDVSAKSYAIMVLILPTDSTRKWRDHELELVDVVADQVAVALSHAAILEESMRASDQLVEQNGALDLARREAELAIHARNDFLAVMNHEMR

SEQ ID NO: 15726 - protein, 471 aa, Streptomyces avermitilis MA-4680
MAKAPVLTPRADDFPRWYQDLINKAELADNGPVRGTMVIRPYGYGLWERMQQEMDARIKETGTQNAYFPLLIPQSYLTKEADHVEGFAPELAVVTHGGGKELEEPAVVRPTSEMIINDYFSKWVQSYRDLPLLINQWANVVRWELRPRLFLRTTEFLWQEGHTAHATYEEARDFAAHIHRHVYADFMENVLAMDVVLGRKTAKERFAGAVNTLTLEGMMGDGKALQMGTSHELGQNFARAFHTQYLSKEGKQELVWQTSWGSTTRMIGALVMMHGDDNGLRVPPRLAQTQVVVLAIKGDEAVLAKVRETGDRLKAAGLRVQVDDRTDVPFGRRAVDWELKGVPVRVEVGPRDLENGTAMVARRIPGGKEPVALDALAALLPTALEEDQALLLRQARERRASRTSDVSTIEEAVEAAAGGGWARIPWATLGERGEAELAEHAASVRCLVAEDGSVPGADDAPGNVAVVARAY

SEQ ID NO: 15727 - protein, 369 aa, Pseudomonas putida KT2440
MRRGCRVALNSIEELVEDIRQGKMVILMDDEDRENEGDIIMAAECCQPEHINFMAKHARGLICMPMTRERCETLKLPLMAPRNGSGFGTKFTVSIEAAEGVTTGISAADRARTVQAAAAKDAKAEDIVSPGHIFPLMAQPGGTLARAGHTEAACDLARMAGFEPSGVICEVMNDDGTMSRRAELEVFAAEHGLKIGTIADLIHYRMIHERTVQRVSEQSVESELGEFNLVTYRDAVEGDVHMALTLGKICAEEPTLVRVHNMDPLRDLLLVKQPGRWSLRAAMAAVAEAGSGVVLLLGHPLDGDVLLAHIRESAGDAPAKAPTTYSTVGAGSQILRDLGVRKMRLMSSPMKFNAISGFDLEVVEYVPSE

SEQ ID NO: 15728 - protein, 287 aa, Propionibacterium acnes KPA171202
MTAQKLDGKATAAAIKSELAERVAALRDQGVVPGLGTVLVGEDPASHQYVAGKHRDCAQVGIESIRVDLPADVTEEELAQKIRGLNANPHCTGYIVQLPLPRHIDTNWALNLIDPNKDADGLTPASLGRLVLNEPAPLPCTPRGIVELLTRHGIELPGANVCVVGRGTTVGRPLGLLLTRRSENCTVTLCHTGTRNLAEHTRQADIIIGAAGSPGLINADMIREGAVLVDVGVSRTPEGKIQGDFTADVWEKAAWVSPNPGGVGPMTRAMLLSNVVDRAERLTADPS

SEQ ID NO: 15729 - protein, 108 aa, Dechloromonas aromatica RCB
MSEHIHYVTDDTFEAEVLQSQQPVLVDYWAEWCGPCKMIAPILDEVATEYAGKLKVAKVNIDDNQATPAKFGIRGIPTLMIFKNGNVEATKVGALSKSQLAAFIDSNL

SEQ ID NO: 15730 - protein, 92 aa, Arabidopsis thaliana
MASSMLSSATMVASPAQATMVAPFNGLKSSAAFPATRTANNDITSITINSGRVHCMHVWPPIGKKKFETLTHHPDLTDSDLAIEVNYIIRIN

SEQ ID NO: 15731 - protein, 198 aa, Triticum aestivum
MATLRCTNHTLLGSPTCLARPRRAVVRAAVAVQAEAQPKVSLIRIGTRGSPLALAQARQTRDELKAAHTELAEDGAIEIIIIKTTGDMILDKPLADIGGKGLFTKEIDDALLEGSIDIAVHSMKDVPTYLPEGMILPCNLPREDVRDAFICLTAKTLGELPAGSVIGSASLRRQSQILYKYPSLKVVNFRGNVQTRLR

SEQ ID NO: 15732 - protein, 300 aa, Archaeoglobus fulgidus DSM 4304
MYDVAIIGGGPAGLTAALYSARYGLKTVFFETVDPVSQLSLAAKIENYPGFEGSGMELLEKMKEQAVKAGAEWKLEKVERVERNGETFTVIAEGGEYEAKAIIVATGGKHKEAGIEGESAFIGRGVSYCATCDGNFFRGKKVIVYGSGKEAIEDAIYLHDIGCEVTIVSRTPSFRAEKALVEEVEKRGIPVHYSTTIRKIIGSGKVEKVVAYNREKKEEFEIEADGIFVAIGMRPATDVVAELGVERDSMGYIKVDKEQRTNVEGVFAAGDCCDNPLKQVVTACGDGAVAAYSAYKYLTS

SEQ ID NO: 15733 - protein, 479 aa, Mesorhizobium loti MAFF303099
MAQFRKNLIDGEWVGDAGSHNINPSDTGDVVGEYASAGVEQAKQAIAAAKAAFPSWSRSGPLARHAVLKKASDEIMARKDEIGRNLAREEGKTLAEGIGETIRAAQIFDFFAGETLRLTGEMVPSVRPGVGVEITREAVGVVGIITPWNFPIAIPAWKIAPALAHGNTIVFKPAELVPESAWSIVDILHRAGLPKGVLNLVMGKGSVVGQAMLDSPDINAITFTGSVGTGKRVAAASVEHMRKFQLEMGGKNPLVVLDDADLAVAVDCALNGAFFSTGQRCTASSRLIVTEDIHDRFVEALKERMGKLVIGDALDAQTQIGPVVDATQLKQDEDYIAIGVREGATLAFGGERLDRKTPGFYLSPALLTEATNAMRSSREEIFGPVASVIRVKNYDEALSVANDTPFGLTSGICTTSLKHATHFKRNSEAGMVMVNLPTAGVDFHVPFGGRKGSSYGPREQGRYATEFYTTVKTAYTFAG

SEQ ID NO: 15734 - protein, 200 aa, Pyrus communis
WQRTAYHFQPEKNWMNDPNGPLFYKGWYHFFYQWNPNGATWGDIVWGHAVSKDLIHWFHLPLAMVADQWYDINGVWTGSATILPDGKIVVLYTGSTNESVQVQNLAYPADHNDPLLTKWVKYSGNPVLVPPPGIGYKDFRDPTTAWHTSEGKWRIIIGSKLNKTGISLVYDTKDFKTYEQLNGVLHAVPGTGMWECVDFY

SEQ ID NO: 15735 - protein, 109 aa, Solibacter usitatus Ellin6076
MAGQNTLTFSDSTFDEDVLRSDVPVLVDFWAEWCGPCRQMSPTIDVVAGEYAGKVKVGKLDVDANGGTAMRYNVRGIPTLLLFKGGQVVEQRVGAIGKSDVLKMIDAHV

SEQ ID NO: 15736 - protein, 152 aa, Nicotiana tabacum
MSTPARKRLVRDFKRLQQDPPAGISGAPYDNNIMLWNAVIFGPDDTPWDGGTFKLTLQFSEDYPNKPPTVRFISRMFHPNIYADGSICLDILQNQWSPIYDVAAILTSIQSLLCDPNPNSPANSEAARMFSENKREYNRKVREIVEQSWTAD

SEQ ID NO: 15737 - protein, 1560 aa, Dechloromonas aromatica RCB
MHTMPSSTLGDIMTSDVRSLPPQATLEDAAKLMAAEHISSLLVIADGEALGIVTESNILRALHARQPRETRLDVIMSQPLITAPSDLNLISARRLVEERNIRHLVVKNPNGTVAGIVSDTDFRIRLGTAAFQHLRTLEGIMDRQIPKLPPDALLDQAIACMVNNAADYLIVSNDDTPLGILTERDIPRLLDKFLTPHDVRLGETMSSPLRSVNVEMSVTGALEAMNRFHLRHMVVLDNNGKILGVVSQRRLFEQLALERLENALHQMQQERDRLRLEAHLQLALDVAGAGSWEYQHDTDRHIVSDGVQALLGCTQDDTPRTLNEWMERIHPDDRHLLATAASADHGKTPSQVVEYRIRHQDGHWIWVENRSCVTERNADGSPMVTAGILNDITERELARQQITRQNRALRMMTAVAQILVRYTDEQQMLAEICTVAVEVGGYMMAWVGEARTDEKKSIVPTAESGLIGDYLKQLNISWADAPNGQGPTGRAIRTGVPSIIRDTETDPSFTPWREAAKTLGFRSSIALPLRVDGRIVSVLSLYSSSIDPFDDDEIALLCNLAGELGLGIGMQRSRQTLAHSEEMLLQAQRLARLGHFTFDAATDVLRGSPTHNELFGIEAGLEIDTDTWLSLIHPEDRQRMADYSRDHVFRGRQPFDTEYRVIRRNDGEVRWLHGAGQIEITANGRVARLFGTSQDITERKHFERRLSRNEKALKEAQAIANLGSWTLDILSDKLTWSDEVYRIFGVAKDQPLKLGDFLARIHPDDRDRVQADWNAALQGSPYNSEHRITVDQQVRWVRERAHIRIDDEGRAAFAVGTVQDVTERHEAEEQLRKLSLAIEQTPHSIVITNTAAKIEYVNEAFVRNTGYSRSEAIGSNPSVLHSGMTPGESYNELWQTLGRGEVWHGEFMNRRKDGSIYEEFAIISPVRQPDGKVTHYLAIKEDITEKKRIQSELNSYRQHLEQLVAERTEELNHAKDEAESASRAKTAFLANMSHEIRTPMNAIIGLTHLAQRSTSDPEQNKRLGKVADAAHHLMSIINDVLDISKIEANKLKLENTDFSLAQLCTAACELVTQRADAKRLPVTCIIDPALPPVLCGDPLRIQQILLNFLSNAIKFTERGKIDIRVQALQKSGDGILIRCAVSDTGIGIASDAQRKLFVPFEQGDASTTRRYGGTGLGLAISRRLAEAMHGEIGVDSKLGQGSTFWFTARLSVGAGEQDAGYDQPASTTHQLGAHILLAEDNAINAEVASDLLRGAGLKVDLAKDGAEALSLARRQHYDLILMDMQMPVMDGLEATRQIRTLPGWGKIPILAMTANAFDEDKDTCLAAGMNDHVAKPVAPDVLFAALARWLPTQTSIQIPSTAPQNTSSLLAHIGGLDSNFGLRAVRGRLDSYLRLLGKFSENHLDDFSRIRENLASGNLDEARRLAHSLKGVSATLGAEDIQQTAMALELAIKERHPTEAIEPLIEQSEKAYLSLHQQLAALKINEQASANVGDASATADLVEHVRRELQQGEISVQELVRQQAKTLQQVLGSAYPEFEGLVSSFDFEDALIFLDQYRIK

SEQ ID NO: 15738 - protein, 486 aa, Pasteurella multocida subsp. multocida str. Pm70
MIKHWINGKEVASEETFDNFNPATGEVICQVASGGEKEINAAVQAAKDAFPKWSKTPAKERARLMRKLGELIDQNVAKLAELETLDTGLPIHQTKNVLIPRASHNFDFFAEVCTRMNGHSYPVDDKMLNYTLYQPVGVCGLVSPWNVPFMTATWKTAPCLALGNTAVLKMSELSPLTANELGRLALEAGIPEGVFNVVQGLGSTAGHALVTHDDVRAISFTGGTATGKHILKHAGLKKYSMELGGKSPVLIFDDADLDRALDAALFTIFSLNGERCTAGSRIFIQETVYDEFVKQFAARAKRLIVGDPQDFNTQVGSMITRQHYDKVTGYIRIGLEEGATLLAGGLERPQNLPAHLQKGHFIQPTVFADVDNRMRIAQEEIFGPVVCLMKFKDEAEALRLANDVEYGLASYIWTKDIAKALRLSNGIEAGMVFVNSQNVRDLRQPFGGIKASGIGREGGEYSFEVFAELKNVCISMHDHPIPRWGL

SEQ ID NO: 15739 - protein, 306 aa, Glycine max
  misc_feature (102)..(102): Xaa can be any naturally occurring amino acid
MAGMSGCSCRWQWAEAKSMGVGCWFPSSTTKRSFRPVIVSVSAISDNNSHSYTSSSSNGRKLEEEGIKGSGTTARDRRLLRIRQEKRQREYDLLNNYPAWAXSKVLENACKDDAELRAVLGDSIGNPELMRKRVEDRVRKKGRDFQKSKTGSVLAFKVTFRDFNPLDSYIWFELFGSPSDRDVNLIGNVIQSWYVMGRLGAFNSSNLQLANSSVEYDPLYDADKGFKVMPSSFHDISDIEFQENWGRVWVDLGTSDYFAIDVLLNCLTVLSSEYHGIQQIVFGGRRMGDWEEGMTSPEYGYKYFKI

SEQ ID NO: 15740 - protein, 118 aa, Hordeum vulgare subsp. vulgare
MAAEEGAVIACHTKQEFDTHMANGKDTGKLVIIDFTASWCGPCRVIAPVFAEYAKKFPGAIFLKVDVDELKDVAEAYNVEAMPTFLFIKDGEKVDSVVGGRKDDIHTKIVALMGSAST

SEQ ID NO: 15741 - protein, 179 aa, Glycine max
YNKAFEEKKTELQTKVVEIYEASSTEIKSLVKEPKEAGLKKNSTEVQKFLEELVKIDFPGSKAASEASSKFGPALASGSVFFVFEKVSTFIVTEEKDVEAPPGVETKTEEETSSVVKEREIVVEEEKKKEKKEEEKPQVIETSDEKKVEEKPAETSAKGEEKPAEEAAAVVEQAEPPKP

SEQ ID NO: 15742 - protein, 360 aa, Thermoplasma volcanium GSS1
MIFDKIFEYAREADTVLIYNAGEQNRDPTFTYITQTTKGIFEGSALIVKKDKATIVTSQLEEEAARSTGMDVYIFKNGTEFQNILRDLLKDVNTVGLNYNSLSLSSYKMFLRIIPDKEFLDVSASILEARKVKNEEELKKLKEAAKIGSEILPDVLNDLKEGVTEYEVASKIVYYMMRNGASGPSFDTIVAFGQNASMPHYSPGKAKLKKGDFVLMDYGAKYEGYCSDITRTVVFGKASEEQKEMYYTVKKAQEAGMNAIRSGANGKDVDAAARNVIDSTKYKGRFIHSLGHGVGLEVHDHPALSPSLDLPLKESMVVTVEPGVYVPGVGGVRIEDDVVVKKDGFEKITSAPTYELIEVS

SEQ ID NO: 15743 - protein, 365 aa, Corynebacterium diphtheriae
MTMPLADTRFLQRRRALSAQLAAKRIDAMLVTHLTHIRYLSGFTGSNAALIINKDLSARISTDGRYITQIAEQVPDIESLMARNCAPALLSDINGPKRVGFEADYLSVSQCEELRKSAGSDVELIPVTGAIEKLRLIKDSLEIESLRSVAKIANTAFQELIDDGLIAAGRTERAIAADLEYRMRIKGAERPSFDTIVASGPNSAKPHHGAGDRVICEGDIVTIDFGAYADGYNSDTTRTVIVGQPTAFAREIYSIVLEAQRAGCAAAVPGTSLVDVDKACREVIENAGYGEYFVHSTGHGLGLDVHEQPAAAVTGSGVLEENMTLTIEPGIYVPGKGGVRIEDSLVIRSGSAENLTSLSKDLLIF

SEQ ID NO: 15744 - protein, 250 aa, Triticum aestivum
MKLNIANPTTGCQKKVEIDDDMKLRNLYDKRISQEVVGDLLGEEFEGYIFKIMGGCDKQGFPMKQGVLTPGRVRLLLHRGTSCFRGHGRRVGERRRKSVRGCIVSQDLSVINLVIVKKGKNDLPGLTDTEKPRMRGPKRASKIKKLFNLGKDDDVRQYVNTYRRSFTNKKGKTVSKAPKIQRLVTPLTLQRKRARIADKKKRIAKKKSEAAEYQKLLAQRLKEQRDRRSESMAKRRSKLSAATKAPAASA

SEQ ID NO: 15745 - protein, 199 aa, Glycine max
  misc_feature (22)..(22): Xaa can be any naturally occurring amino acid
  misc_feature (101)..(101): Xaa can be any naturally occurring amino acid
  misc_feature (140)..(141): Xaa can be any naturally occurring amino acid
  misc_feature (166)..(166): Xaa can be any naturally occurring amino acid
  misc_feature (168)..(168): Xaa can be any naturally occurring amino acid
  misc_feature (185)..(185): Xaa can be any naturally occurring amino acid
SSSYVGPPPHSLFLSLFLPFTXLLRRRNSSRAASSFSNIEAEPISLYEGTVWHQRRHPVNHSFQYRVRYALIDLDRAPREPHDHLSTDKARQITDTNGPIXLLTIPPSVGYEQNPLSVYYCYAVEGSTKWLKKCIAEYCXXFFQVTNTPWGERVSFLFNPHSDLVXKXLHVSPFMDMLGSWNIKXNDPGENLTISISVH

SEQ ID NO: 15746 - protein, 557 aa, Pseudomonas syringae pv. syringae B728a
MSELIRVPDIGNGEGEVIELMVKVGDRIEADQSVLTLESDKASMEIPAPKAGVIKTMKVKLGDRLKEGDELFELEVEGEAAAAAAPAAEPAPAPAPAPAPAAAEKPAEAAPAPAAAAEPAPAASASVQDIHVPDIGSSGKAKIIELMVKVGDSIQADQSLITLESDKASMEIPSPAAGVVESIEVKLDQEVGTGDLILKLKVEGAAPAAAPAPAASAPAAAPAKAEAAAPAAPAPKAEAAPAPAAPAAPAKDGAKVHAGPAVRQLAREFGVELNAVSATGPHGRVLKEDVQAYVKTMMQKAKEAPAGGASGGSGIPPIPEVDFSRFGEIEEVPMTRLMQLGASGLHRSWLNIPHVTQFDQADITDLEAFRVAQKGAAEKAGVKLTVLPLLLKSCAHLLKELPDFNASLAPSGKAVIRKKYVHIGFAVDTPDGLLVPVIRDVDQKSLLQLAAEAAALAEKARNKKLTANDMQGACFTISSLGHIGGTGFTPIVNAPEVAILGVSKATIQPVWDGKAFQPKLMLPLSLSYDHRVINGAAAARFTKRLSELLADIRTILL

SEQ ID NO: 15747 - protein, 782 aa, Cryptococcus neoformans var. neoformans JEC21
MPPLVRRSTTSSIPTLLSLTKLVQLVPRSAQQWSSFGAATPPIEPEDPPDSPKFWWKLGLSVVLVLAGGVFAGLTLALMGSDDLNLRVLSTSSCNPKERKAANKVLRLLARGRHWVLVVLLLGNVIVNESLPIFLDDVLGGGLSAIIVSTTMIVIFGEIIPQAICVRYGLSIGGVCAPVVWALMILFAPIAWPIAKLLDRILGKDEGHTYKKAELKSFLQFHREGEEPLRDDEIVILNSVLSLNDKHAKEIMTPIEDCLILPSNKILNHDTIDEILLSGFSRIPIHEPGQKDNFIGMLLVKKLISYNPDDEWPVSKFPLLPLPEAKPEINCFQALDYFQTGRAHLILISDTPGQRGGALGIVSLEDLIEEIIGEEIVDETDRYQDNHSKKAVKRSGTAAVMRGIIERRRVLNAFSRAPSRSDPQTPVGLSGPDGKGANSTNGILVQVSEGSLIAETVDLSNDGATAAADPSRRLVISAAEPMSPIQEISTSPEIMYEAIQNGNRENGVQEESKDVKDAKRSALDQEAKNGSNLESEAYPDHEIFEMACKALVDKYCLTKEGEVGPGRTNKGWEWREHKFVAHQGYLYRRIVRYAPSTLFSYPLGQTHSDQSFNQTNEDEEDLEDAEDSALLPQQQDVLRSTKVEIEQYIVYSRTYRVPMYCFRAWDEAGAPLSISLLLKLNILHPPSPPQPLGFGDFGAALDTLMLPPENLPGEDTSPFPLVQSTEHPTTGELVFSIHPCRIGGAVEEVLTTEGLGKGAQAGLEWLEVWMAMTSKIADLTYA

SEQ ID NO: 15748 - protein, 112 aa, Acinetobacter sp. ADP1
MEQTMSANIVNTTDANFQADVLDAETPVLVDFWAGWCAPCKAIAPVLEDLSREYEGKVKIVKVDVTACEDTAVKYNIRNIPALLLFKDGKVVAQQVGAAPRSKLAAFIDENV

SEQ ID NO: 15749 - protein, 104 aa, Bacillus halodurans C-125
MAIVNVTDQTFAQETSEGLVLADFWAPWCGPCKMIAPVLEELDGEMGDKVKIAKLDVDENQETASKFNVMSIPTLIVFKDGQVVDQVTGFQPKDALAELLNKHL

SEQ ID NO: 15750 - protein, 371 aa, Bartramia pomiformis
SDSGKDAGRLSAAWQMFKAQEDLVKVAKQYGVRLTMFHGRGGTVGRGGGPTHLAILSQPPDTINGSLRVTIQGEVIEQSFGEEHLCFRTLQRFTAATLEHGMHPPIAPKPEWREIMDTMAVASTKEYRSIVFQNPKFVEYFRAATPELEYGRMNIGSRPSKRKPSGGIESLRAIPWIFAWTQTRFHLPVWLGLGSALREVLQTDPRNIAILRRMYNQWPFFRVTIDLVEMVFAKGDPRIAALYDNLLVSNELKPFGEELRRKYNETREFLLKVAGHEDILQGNPTLKQRLRLREPYLTALNVQQALVLKKMRDQSSQFCALQNGQSNEVPKSPRRAAELVELNPTTEFPPGLEDTLILTMKGIAAGMQNTG

SEQ ID NO: 15751 - protein, 582 aa, Lycopersicon esculentum
MEILRKSSSLWALPILVLCFFINNGVFVDASHKVYMHLQSTTSHVDASKVHRTGYHFQPPKNWINDPNGPMYYNGVYHLFYQYNPKGATWGNIVWAHSVSKDLINWIPLEPAIYPSKVFDKYGTWSGSATILPGNKPVILYTGIVDANKTQVQNYAIPANMSDPYLRKWIKPDNNPLIVADKNINKIQFRDPTTAWMGRDGYWRVLVGSVRNHRGKVIMYKSNKNFMKWTKAKHPLHSAQGTGNWECPDFFPVSLKNENGLDTSYDGKDVKHVLKVSFDVTRFDHYTVGTYDTKKDKYFPDNTSIDGWKGLGLDYGNYYASKTFFDSGKNRRILLGWANESDTVDNDVKKGWAGVHPIPRKIWLDPSGKQLVQWPVQELETLRKKKVQLNNKKLNKGEKVEIKGITVAQADVEVIFSFASLDKAEPFDSSWADLYAQDVCAIKGSTVQGGLGPFGLLTLASKNLEEYTPVFFRVFKAHDNYKVLMCSDASRSSLKNETTMYKPSFAGYVDVDLADKKLSLRSLIDNSIVESFGAGGKTCITSRVYPTLAIFDKAHLFAFNNGAETITIETLNAWSMANAKLH

SEQ ID NO: 15752 - protein, 404 aa, Desulfitobacterium hafniense Y51
MNGKWWTKDWWVSEYNYHEEVVKDLHLPQKIEIHDATLRDGEQTPGVVFSKEDKVRIAELLAEVGVDRVEAGMPAVSKDDAQAIEEIAKRNLGPKIMVFCRAMREDVDRAVDCGANGIVLEAPSGYPKLKYQFASKWTEESLTEAVINTINYAKEKGLFVNYFPFDTTRAELPFLKRLLTNVTTQAKPDSVTVVDTTGSITPTAMRFLVRQVRETIALPLEVHTHNDFGLGTATTFAAVEEGVQVVHSCINGLGERTGNTALEEIALGLKLLYGIELPKFNFQKLSELSQEVQRMSGKTLAQNKPVVGLLPFTREIGLGMKVLEDYPTAVFPFMPDFVGQKMKIVMGKKSGKESVLMKLEGAGLKANEEQVQEIVARTKAAGIAKRNWLEDEEFLVIARQVLDR

SEQ ID NO: 15753 - protein, 994 aa, Burkholderia xenovorans LB400
MKAVRSDKTTQAATTAQAQKPAKAGSSKIKIVTAAPQAANASARQPASAQAPAPKANGRTREDKDHPLFQDIRYLGRLLGDVLREQEGDAVFDVVETIRQTAVRFRREDDSAAAQTLDKKLRSLSPEQTVSVVRAFSYFSHLANIAEDRHRNRRHRIHELAGSTSQPGTIAHSLERLVEAGAAATPVLQEFFNNALIVPVLTAHPTEVQRKSILDAQHDVARLLAERDQQLTDRERAHNEAMLRARVTSLWQTRMLRDSRLSVADEIENALSYYRATFLEEIPALYADIEEALAEHGLEARLPPFFQMGSWIGGDRDGNPNVTAETLENAITRQAAVIFEHYMEQVHKLGAELSVSNLLAGASDALKELAAVSPDQSPHRTDEPYRRALIGMYTRLAASARVRLGEGSVPVRSAGRGAAPVRAKPYADSAEFVRDLHVLIDSLAEHHGAPLAAPRLSPLARAAEVFGFHLASIDLRQSSDVHEAVITELLRRAGVEENYAELPEADKLNVLLSELAQPRPLRLPFAEYSDLVKSELGVLEEARVTREKFGARAVRNYIISHTETVSDLVEVMLLQKETGLLRGCLGNANDPAQAGLMVIPLFETIPDLRNAPHIMRDLIALPGVDALIEHQGNEQEVMLGYSDSNKDGGFLTSNWELYRAELALVSLFNERGVTLRLFHGRGGTVGRGGGPTYQAILSQPPGTVDGQIRLTEQGEVIASKFGNPEIGRRNLETVVAATLEASLLPHGIAPAQLPAFEETMQQLSDAAMASYRALVYETPGFKEYFFESTPISEIAELNIGSRPASRKLQDPKQRKIEDLRAIPWGFSWGQCRLLLTGWYGFGSAVAAHLDSAPSDAERTRRLALLKKMHKTWPFFANLLSNMDMVLAKTDLAVASRYAALVSDKKLRKHVFERIVAEWERTSKVLSEITGKSERLAENPLLARSIKNRFPYLDPLNHLQVELLKRHRAGDTNARVRRGIHLSINGIAAGLRNTG

SEQ ID NO: 15754 - protein, 112 aa, Synechococcus sp. WH 8102
MKKVEAIIRPFKLEDVKVALVEAGIIGMTVSEVRGFGRQKGQVERYRGSEFTVEFLQKLKIDVVVDDERVDDVVKAIADAARTGEIGDGKIFISSVDSVVRIRTGDRDSSAL

SEQ ID NO: 15755 - protein, 367 aa, Bucegia romanica
SDSGKDAGRLAAAWSMFKCQEDLVKIAKQYGIKLTIFHGRGGTVGRGGGPTHLAILSQPPDTIHGSLRVTVQGEVIEQSFGEEHLCFRTLQRFTAATLEHGMHPPISPKPEWRELMDEISKVSTEEYRSIVFKHPKFVHYFRAATPETEYGRMNIGSRPAKRKPSGGIESLRAIPWIFAWTQTRFHLPVWLGFGGAFKHAFEKSNQNVVLLRQMYNECPFFRVTIDLIEMVFAKGDPRIAALYDELLVDEDLKPLGEKLRTMYAETRDLLLKVAGHEDVLQGNPTLKQRLRLREPYITPLNVQQAFTLKKIRDQSFHVSPGTPKGENSGKQSSELAGLNTTTEYPPGLEDTLILTMKGIAAGMQNTG

SEQ ID NO: 15756 - protein, 473 aa, Pediococcus pentosaceus ATCC 25745
MHNFIKNFIKKENPAIYEDKDSHLTRTLVVKDFLALGVGTIVSTSIFTLPGVVAAQHAGPAVVLSFLAAAVVAGLVAFAYAEMASAMPFAGSAYSWINVILGKGFGWVAGWALLAEYFIAVAFVASGLSANFRGLLSSIGIQIPKQLANPLGTNGGIIDITALIVVIAVALLLAHGTTGAARIENALVVLKVVAILVFIIVGLSAIHIQNYLPFIPKYHTNPDGTSFGGWKGIYSGISMIFLSYIGFDSIAANAGEAKNPEKTMPRGILGSLIIAVILFIAVSLVLVGMFHYTNYANNAEPVGWALRHAGHGVIAGVIQAIAVIGMFTALIGMMMAGSRLLYSFGRDGMLPKWLGQVNPKGLPNHALSLLTIIGIIIGSMFPFAFLAQLISAGTLIAFMFVSLGIYVLRPREGKDIAIPSFKMPLYPVLPALAFLGSLAVFWGLDAQAKLYSLVWFIIGIIVYTFYGARHTTD

SEQ ID NO: 15757 - protein, 373 aa, Candida albicans SC5314
MSVKTKTITVLPGDHVGTEIVNEAIKVLKAIEAATPYQKIQFDFKHHLIGGAAIDATGVPLPDDALESAKSSDAVLLGAVGGPKWGTGTVRPEQGLLKIRKELNLYANIRPCNFASDSLLELSPLKAEVVKGTNLIIVRELVGGIYFGERQEQEESEDKKTAWDTEKYTVDEVTRITRMAAFMALQHNPPLPIWSLDKANVLASSRLWRKTVDKVISEEFPALSVQHQLIDSAAMILIQNPTKLNGIIITSNMFGDIISDEASVIPGSLGLLPSASLASLPDTNTAFGLYEPCHGSAPDLPANKVNPIATILSAASMLRLSLDCVKEAEALEEAVKQVLDSGIRTADLRGTSSTTEVGDAIAETVTKILKQNT

SEQ ID NO: 15758 - protein, 371 aa, Brachythecium salebrosum
SDSGKDAGRLSAAWQMFKAQEDLVKVAKQYGVRLTMFHGRGRTVGRGGGPTHLAILSQPPDTINGSLRVTIQGEVIEQSFGEEHLCFKTLQRFTAATLEHGMHPPIAPKPEWRELMDSMAITATEEYRSVVFQNPRFVEYFRTATPELEYGRMNIGSRPSKRKPSGGIESLRAIPWIFAWTQTRFHLPVWLGLGAGLKQALAAKPENMNILSRMYDQWPFFRVTIDLVEMVFAKGDPRIAELYDTLLVAPELRPFGDELRRLYNETKLHLLKIARHTDILQGNPTLKQRLRLREPYITALNVQQAFTLKKMREQNPHQVASTNISQPDSPKPMKAASELVTLNPTTEFAPGLEDTMILTMKGIAAGMQNTG

SEQ ID NO: 15759 - protein, 192 aa, Anabaena variabilis ATCC 29413
MTTDSPIKPETTAGERLRNFLVAMVAIALTVALVLGLRTETAAVSLDKLYAASTPLEVAISNGKPSMVEFYANWCTVCQKMAPDIAEFEQQYADKVNFVMLNVDNTKWLPEMLKYRVDGIPHFVFLNKEGESLAQAIGDQPHTIMASNLEALVTGSALPHAQTSGQVSQVSTPVAPIGSQDDPRSHGSQVVN

SEQ ID NO: 15760 - protein, 403 aa, Rhizobium leguminosarum bv. viciae
MDRRVVITGLGGLCGLGTDASSIWTEMREGRSAIGPISNSEIHELKGMIGTEIKVLPQHDIDRKQLISMDRFSLLAVLAAKQAMLQAGLSCNEGNAHRFGATVGVGFGGWDATEKAYRTLLLGGATRTELFTGVKAMPSAAACQVSMNLGLRGPVFGATSACASANHAIASAVDQIKLGRADVMLAGGSDAPLVWIVLKAWEAMRVLAPDTCRPFSADRKGLVLGEGAGMAVLESYEHAAARGATMLAEVAGIGLSADAYHIAAPAVHGPEAAMRACLVDASLNAEDVDYLNAHGTGTKANDQIETTAIKRVFGDHARSMSISSTKSTHAHCLGAASALEMIACVMAIQEGVVPPTANYREPDPDCDLDVTPNVPRERKVRVAMSNAFAMGGMNAVLAFKQVP

SEQ ID NO: 15761 - protein, 474 aa, Bacillus cereus ATCC 14579
MKKHLYINGSWKSVNTYKPLYAPYSEETLAEIAQGTEEDVKEAVTAAKNAMTKMNKLSAYDRATILEKVAQKMDERREEFAEIIAKEAAKPIRAARGEVDRTVQTYKFAAEEAKRIYGETLPLDAAPGADGRIAYTIRKPIGVIGAITPFNFPLNLVAHKVGPAIAAGNTVVLKPADQTPLSSYALVELFEEAGLPNGALNIISGPGPTVGEAIVKNDYVASITFTGSPKVGIGIKQKAGLKRVTLELGSNAAVIIDEDVELTDEIIERVKWGAFVNNGQVCISVQRVFVHETKIHEFLSKLKKAMESVVVGDPSLEETDVSALISKKDVERIDMWVQEAIKEGATVLCGGKKQDARIFEPTVLTNVPDHVSVQCQEVFGPLMTVNTFKEFDEAIEQVNNSRYGLQAGVFTNNLFKAMRAIDELEVGGVMINDIPTFRVDHMPYGGVKESGTGREGIKYAIEEMTEMKLVCIKK

SEQ ID NO: 15762 - protein, 499 aa, Medicago truncatula
MDGSAGPGGGNVNAFLRNYKMGKTLGIGSFGKVKIAEHVLTGHKVAIKILNRRKIKNMEMEEKVRREIKILRLFMHHHIIRLYEVVETPTDIYVVMEYVKSGELFDYIVEKGRLQEDEARSFFQQIISGVEYCHRNMVVHRDLKPENLLLDSKWSVKIADFGLSNIMRDGHFLKTSCGSPNYAAPEVISGKLYAGPEVDVWSCGVILYALLCGTLPFDDENIPNLFKKIKGGIYTLPSHLSPGARDLIPRLLVVDPMKRMTIPEIRQHPWFQLHLPRYLAVPPPDTLQQAKKIDEEILQEVVNRGFAREPLVDSLKNRVQNEGTVTYYLLLDNRYRVSTGYLGAEFQETMDSGLNRIHSGEVASPVVGHRFPGYIDYQGVGMRQQFPAERKWALGLQSRAQPREIMTEVLKALQELNVCWKKIGPYNMKCRWAVGIPGHHGGNDSIIENEAVPKTTVVKFELQLYKTQEKYLLDLQRLEGPQFLFLDLCAAFLAQLRVL

SEQ ID NO: 15763 - protein, 112 aa, Streptomyces avermitilis MA-4680
MKLITAVVKPHRLDEIKEALQAFGVHGLTVTEASGYGRQRGHTEVYRGAEYTVDLVPKIRIEVLAEDDDAEQLIDVVVKAARTGKIGDGKVWSIPVDTAVRVRTGERGPDAL

SEQ ID NO: 15764 - protein, 376 aa, Oryza sativa (japonica cultivar-group)
MCSFFMPCGSNSFSDIIASTSSLLGISVLVLAVFLVYKKHKCLLPWQRSTTAPRLHSLLRSQLKSYTYSEVRKMTKSFTHTLGKGGYGTVYKGSLSDGSTIAVKILEDSNNDGEDFINEVSSIGRISHINVVTLLGLCQHGSKRALIYEYMPNGSLDKFAVGGNDTMQQEKFLISWEKLYDILVGVAQGLDYLHHWCNHRVVHLDIKPQNILLDQDFCPKISDFGLAKLCKPKESKISIGCARGTIGYMAPEVFWGHRGAVTTKSDVYSYGMLILHMVGERENINASTESGSKYFPEWLYDNLNQFCGVPSGGIDGSNSTSEVAHKLVIIGFWCIQSAPTDRPSMSEVIDMFDRSLTELQLPPRISCCGNYNESFG

SEQ ID NO: 15765 - protein, 421 aa, Medicago truncatula
MDEHIKQTFYYLWILPISHCFLKLNYYQFLYTNPKYSFTLQILKMDGSNSIVGGSVDICLTNYKLVKTLYHWSSGKVRLAENVLTGEKVAIYLIDCRWKENTQMEEKVRREINTLKLLRHPHIIQVYEVIETLTNIYVIMEYMESGELFDYIVEKGRLHEDEARKFFQQIISGVQHCHNNMVAHRDLKPETILLDSKFNIKITDFGLSNTMQHGQLLKTRCGSLNYAAPEVISGKLYDGSKVDIWNCGTLLYALLCGALPFDDENIPTLYKKIKGGIYTIPSYISPGASDLITKLLEVDPTKRITILEIHQHPWFQISMPHYMAMPPLLDKVQQSKKLEEEEEKLRLDGLDCKNVLFYILSRLSLLLPQKLAKICSRYFDEKFYTSTRVFSREDTNLLKFEKIHNGDNDSNMVTKTLEEKI

SEQ ID NO: 15766 - protein, 369 aa, Calliergonella cuspidata
SDSGKDAGRLSAAWQMFKAQEDLVKVAKHYGVRLTMFHGRGGTVGRGGGPTHLAILSQPPDTINGSFRVTIQGEVIEQSFGEEHLCFKTLQRFTAATLEHGMHPPIAPKPEWRELMDLMAVTATEEYRSVVFQNPRFVEYFRTATPELEYGRMNIGSRPSKRKPSGGIESLRAIPWIFAWTQTRFHLPVWLGLGAALKQALAANPENVTILSRMYDQWPFFRVTIDLVEMVFAKGDPRIAELYDTLLVAPELRPFGDELRRLYNDTKLHLLKIARHTDILQGNPTLKQRLRLREPYITALNVQQAFTLKKMREQNTQHVANIPQPDSPKPMKAASELVTLNPTTEFAPGLEDTMILTMKGIAAGMQNTG

SEQ ID NO: 15767 - protein, 231 aa, Polaromonas sp. JS666
MSKTTPPTYRIAPSILSADFARLGAELETVIAAGADWIHFDVMDNHYVPNLTFGPMICQALKPHAKKADGSAVPIDVHLMVQPVDALAAAFADAGADLISFHPEASGHVHRSVQAIKARGCKAGLVFNPASSMDVLDWVIDDIDLILIMSVNPGFGGQSFIDSALRKIEQARKRIDASGRDIRLEVDGGIKTDNIARVAAAGADTFVAGSAIFGKPDYKAVIDAMRTALAS

SEQ ID NO: 15768 - protein, 573 aa, Burkholderia sp. 383
MAKQTMAEYLAKTLAAAGVERIWGVTGDSLNGLSFSLSQIGSIRWMHTRHEESAAFAAGADAASTGRLAVCAGSCGPGNLHLINGLYDCHRNHQPVLAIAAHIPSTEIGLGYFQETHPQELFRECSHFAELVTNASQFPRVLARAMRTAIDERGVAVIVLPGDIALGDGPDELPAWSDAAPPSILPADADLDRLAALLNASDAVTLLCGSGTQGAHDEVVALADTLGAPVVHALRGKQFVEWDNPFDVGMTGLIGFSSGYHAMESCDTLLMLGTDFPYRPFYPSNAKVAQIDWKGSQLGHRAPLALGLVGTVKETIAELLPRLTRKTQRRFLENALKHYAAARKGLDDLAVAEPPGRAIHPQYLTKIVDEVAAEDAIFTADVGTPTLWAARYLTMNGKRQLHGSFNHGSMANAMPQALGAQGAHPGRQVVSLSGDGGLSMLLGDLLTARQLKLPIKIVVYNNSLLGFVSMELKAAGYLDTNVDLSPTDFAAIAKGAGIFSVRVEHSENVEEALRMAFAHDGPAVVDVVTSKYELAMPPKIEIAHAKGFSLFMLRAILSGRGDEIVELARTNLR

SEQ ID NO: 15769 - protein, 438 aa, Propionibacterium acnes KPA171202
MLNTIEEVLAELRAGRPVLVTDDADRENEGDAILAAELADPRWVGWMVRHTSGYLCAPMTEERADQLDLPLMWPASQDPLRTRYTVAVDAAHGITTGIDAVQRARTARVLADPSSTPSDLVRPGHVLPLRARAGGVLERRGHTEAAVDLARLAGLEPVGLIGELVGDDGMCLRADAIADLARTEGLALTTIDQLAQWRQAHDPGPAVPTQRVTALASAHLPTRHGQFAITGYRDNCTGVEHVLLVGEKGIDADDGGPAWVRVHSECLTGDALGSLRCDCGDQLAAAQQHVCRHGGAIILLRDHEGRATGLLNKIAAYKAQDGGLDTVDAQTHLGLPVDAREYGAAVAILANIGITSVRLLTNNPAKAEALRDGGLEVTMSPLETSTRPEDERYLRTKRDRMGHALTLGVSPSEMSTQPLASSHTTSTTPALTIKGDRP

SEQ ID NO: 15770 - protein, 808 aa, Burkholderia sp. 383
MAKTTGGKKAAGKGSTEPTKKVTAAKSASSTRTTSSATSAPAGKKTVAGTAQAAPAPAARTRAAARPDSGPAKPAAKRASAKSARDTTAAADETAVRTTHAPTVQPAVVQQPRVDIAGTANSMTKKLNEVSVEDDANQSDEQPAAAPAAPGKSKVRDRRAKEKALLKEAFATSTPGTAEELEERRVKLRALIKLGKERGFLTYAEINDHLPDNFTETEALEGIIGTFNDMGVAVYEQAPDAETLLLNDNAPAASSDDEVEEEAEVALSTVDSEFGRTTDPVRMYMREMGTVELLTREGEIEIAKRIEDGLRHMVMAISACPTTIADILAMAERVANEEIRVDELVDGLLDPNASDSADTDGFSAKEAEAIENEDEEAEEEEEEEEEEEEEDDGAAQASANAAQLEALKRASLEKFSQISEWFDKMRRAFEKEGYKSKAYLKAQETIQTELMTIRFTARTVERLCDTLRAQVDEVRQVERQILHIVVDKCGMPRSEFIARFPGSETDLDWSEKIMAEGHSYSAVLSRNVPAIREQQQRLLDLQARVVLPLKDLKETNRQMAAGELKARQAKREMTEANLRLVISIAKKYTNRGLQFLDLIQEGNIGLMKAVDKFEYRRGYKFSTYATWWIRQAITRSIADQARTIRIPVHMIETINKMNRISRQILQETGLEPDPATLAEKMEMPEDKIRKIMKIAKEPISMETPIGDDDDSHLGDFIEDTNTVAPADAALHASMRDVVKDVLDSLTPREAKVLRMRFGIEMSTDHTLEEVGKQFDVTRERIRQIEAKALRKLRHPSRSDKLKSFLEGN

SEQ ID NO: 15771 - protein, 401 aa, Triticum aestivum
  misc_feature (226)..(226): Xaa can be any naturally occurring amino acid
  misc_feature (336)..(336): Xaa can be any naturally occurring amino acid
  misc_feature (385)..(385): Xaa can be any naturally occurring amino acid
VTLPEQVLYKKAGCYRSGIPGISSTHASAERGSNALLARAWSPGWQNADKAFTAFINGPLIDYSVNRKKADSANTSLLSPYLHFGELSVRKVFHQVRMKQLTWSNESNGDGEEGCSLFLRSIGLREYSRYLAFNHPCSHEKPLLAHLRFFPWVVNEVYFKVWRQGRTGYPLVDAGMRELWATGWLHDRIRVVVSSFFVKVLQLPWRWGMKYFWDTLLDADLESDAXLGWQYISGSLPDGRELDRIDNPQFEGYKFDPYGEYVRRWLPELARLPTEWIHHPWDAPESVLQAAGIELGSNYPLPIVELDEAKSRLQDALSEMWELEAASRAEIENGMXEEGLGDSSDEPPIAFPQELQHMEVDRATIHTPAMAGRRRADQMVPSITXSFFRAETETELSAAFE

SEQ ID NO: 15772 - protein, 116 aa, Triticum aestivum
  misc_feature (83)..(83): Xaa can be any naturally occurring amino acid
  misc_feature (92)..(92): Xaa can be any naturally occurring amino acid
MARSAVAQVVLVAVVAAMLLAVTEAAVSCGQVSSALSPCISYARGNGASPSAACCSGVRSLASSARSTADKQAACKCIKSAAXGLNAGKAAXGIPTKCGVSVPYAISSSVDCSKIR

SEQ ID NO: 15773 - protein, 470 aa, Streptomyces avermitilis MA-4680
MTSTAQAPGAREAHPEHLGHVIFIAAAAAMGGFLFGYDSAVINGAVEAIRSKYDIGSATLAQVIAIALIGCAVGAATAGRIADRIGRIRCMQIAAVLFTASAIGSALPFALWDLAFWRVIGGFAIGMASVIGPAYIAEVAPAAYRGRLGSFQQAAIVIGIAISQLVNWAILNAAGGDQRGKLLGLEAWQVMLGVMVVPAVLYGLLSFAIPESPRYLIEAGKDARAREVLEEVEGKEIDLDARVEEIRLAMYREEKPSFKDLLGGTFFFKPIVWVGIGLSVFQQFVGINVAFYYSATLWQSVGVDPTDSFLYSFTTSIINIIGTVIAMIFVDRVGRKPLAIIGSVGMVIGLALEAWAFSYDLVDGKLPATQGWVALIAAHVFVLFFALSWGVVVWVFLGEMFPNRIRAAALGVAASAQWIANWAITASFPSLADWSLSGTYIIYTVFAALSIPFVLKFVKETKGKALEEMG

SEQ ID NO: 15774 - protein, 216 aa, Pseudomonas putida KT2440
MFTQHHAQFPNVSAAIAAFQAGRPVLLLDDDDREDEADIIAAAENITLQTMAMMIRDCSGIVCLCLDEATVDELQLAPMVQNNQARHGTGFTVTIEAAEGITTGVSAQDRITTIDAALRSSAEQRHIVSPGHVFPLRARNGGVLTRRGHTEGSVDLARLAGLRPAAVLCELMNPDGSMARGEQVAVYARQYNLPVLTIEELARYREAMLEREAEPA

SEQ ID NO: 15775 - protein, 882 aa, Oryza sativa
MSDSELSQSTVVFGLHLWELVGIGVGAAFVLLLVLLSLLCLVASRRRRRRRGVAVATPVLHLATAVAPPKHPGKPPKDIQEVPSRAAAAAAAPKAQPAQVIQAPPPQPPPSESIQIETGKEHRITFREQQHQPPQPPPYHQRSGGPSSRGGSGESRGGGGGGGGGGAEPGVPEVSHLGWGHWYTLKELEDATAMFADEKVIGEGGYGIVYHGVLEDGTQVAVKNLLNNRGQAEREFKVEVEAIGRVRHKNLVRLLGYCAEGNQRMLVYEYVNNGNLEQWLHGDVGPVSPLTWDMRMKIILGTAKGLMYLHEGLEPKVVHRDVKSSNILLDKTWNAKLSDFGLAKLLGSERSYVTTRVMGTFGYVAPEYAGTGMLNETSDVYSFGILIMEIISGRVPVDYNRPPGEVNLVEWLKTMVSNRNSEGVLDPKMTEKPTSRALKKALLVALRCVDPEARKRPKIGHVIHMLEVDDFPYRDERRGGKAPGQVKSGEIPPVEAGGQRWAERRRSSTATGRAAVGKRVSGAAGGYGRARRLVEQRGASAAAVNYISKRGGGGGHRCRVVHGHPDRNPSLSWSSPSSTSLLKSRSISRSSPVLSHHHRPCPREWLMMLGAAPPAGEGEEAEEEMISWVLRFLPRAAASSSPSPPQAHPTLGARPIRSAPAMIIPKKNRNEICKYLFQGQWFLVPICTSSTRSHAKRLKLKVIVGAGFNLVYAVVAEGVLYAKKDYNLAKHPQIDVPNLQVIKLMQSFKSKEYVRETFSWQYYYWYLTNDGIEHLRNYLNLPSEIVPATLKKSARPPGRPFGSGPPGDRPRGPPRFEGDRPRFGDRDGYRGGPRGAPGDFGGEKGGAPAEFQPSFRSSGGRPGFGRGGGGGFGAGPTSSSME

SEQ ID NO: 15776 - protein, 645 aa, Xanthomonas campestris pv. vesicatoria str. 85-10
MKRGIQRSSVPGKRLQCSRAGVQGQSALRHGLAVIGAKRGFHPDTLRLSLDRASNIRGGAGYAAAVQRLAPWRCRPTWTTPITLGEVRQLRPLSSCVRHVRAGNGGRRAGAGTIGPVFSTTGLPLTTSISPGASAGARLPRQIPFIIGNEACERFSFYGMRNILVQFLITSLLLQEISGPGREAEAKHILHSFMIGVYFFPLLGGWLADRFFGKYNTILWFSLVYCAGHACLALFEGSRDGFFLGLGLIALGAGGIKPLVASFMGDQFDQSNKHLAKVVFDAFYWIINFGSLFASLLIPLALKNLGPAWAFGIPGILMFVATLVFWLGRKRYVLVPLPPKDPHGFGAVVRTALLTHAPGQGRPGLMLAVVSVLLALAGFALVEQLGIVVCLCIALVLLLAGIGGGTWWQLERARGTHPDVAVEGVRALLRVLVIFALVTPFFSLFDQKASTWVLQGREMTMPAWFTASQMQALNPLLVMLLIPFNNLVLYPLLRRGGWEPTPLRRMTSGIALSGVAWVAVGAIQMVMDGGEPMHIAWQILPYALLTFGEVLVSATGIEFAYSQAPTSMKGVVMSFWYLTTTVGNLWVLLSNVAVRNATVTAHIADTGLSEAAFLMFFFAAFAFLAALAFGLYARRYRMVDNYRTA

SEQ ID NO: 15777 - protein, 480 aa, Zymomonas mobilis subsp. mobilis ZM4
MNNNSEIENDTQTNVRNTVSDFIGSQLYLLGTVLVTAIAGFLYGYDTGIISGALMNIAHDFKLDAHQQEIITSILLFGAVIGSLVCGRLSAFVGRRHMIMIVTAIFGFSVIAAGYAPTAFWLGAARLVLGFAVGGSSQIVPVYIAELAPADQRGRMVTFYNISIGLGILAAGIVGAFLQEEWTWRTMFSVAAIPAAVLFCSMMMLPESPRWLVRQERVEEARDMLDTVRETDHEVTKELRSIKKISNRTKEAAQDGWKALAQPWVRPALIAGLGVAAFTQLSGIEMMIYYTPTFLRDSGFTEKMAYYSALGVALIYVIMTTIGKLLVDHVGRRKLALCMMPLAALSLFALGIAFNLPGGASEHRWLILACLFAFMVFNAGGIQVIGWLIGSEVYPLCIRARATSLHAATLWGSNLILTSTALTMTSLLGIGGSMWFYGGLNALGFVFVYFMVPETKGRSLEEIESSLKDGSFLPSKKASA

SEQ ID NO: 15778 - protein, 459 aa, Debaryomyces occidentalis
MIKNGLPHEPEFQQAYNELVSALEESTLFTEKPEYKKVIPVVSIPERIIQFRVAWENDNGDVEVNNGFRVQFNSSLGPYKGGLRFHPSVNLSILKFLGFEQIFKNALTGLSMGGGKGGCDFNPKGRSDGEIRRFCVAFMRQLARYIGADTDVPAGDIGVGGREIGYLFGAYKQMQNNWYGVLTGKGLTWGGSLIRPEATGYVSFTTLKKMIEKATNGKESFKGKRVELSGSGNVAQYAALKVIELGGIVVSLSDSKGSIVSKNGIVPEQVLEIAAAKLKFKSLEEITKESVKLFSGENSVEYLAGVRPWAKVGHFDVALPSATQKEVSGEEEAKALVEAGCKYIAEGSNMGSTKEAIDVFEANRSNNVWYAPGKAANCGGVAVSGLEMAQNSQRVQWSAEEVDAKLKNIMYTCFDNCYDPAIKYSAEKNADGLPSLLKGANIASFIKVADAMFDQGDVY

SEQ ID NO: 15779 - protein, 486 aa, Pasteurella multocida subsp. multocida str. Pm70
MGGISMQQFSLLKTKAYINGEYVQAKEHKTFAVTNPANQQIICELPDLSAEETEYAIACAAQAQKKWQKVTPKERANLLRRWYNLVIENQEELAQLLSLEQGKPINESRGEILYGASFIEWFAEEAKRIYGDVLPQDKENHRLLVIKQGIGVVAAITPWNFPNAMITRKAAPAFAAGCAMVLKPAQETPLSALALAELAHQAGLPAGLFNVITSTRSVEIGKVLTEHPTVRKVTFTGSTRVGKILMAQSASTVKKLSLELGGNAPSIVFDDADLENAIEGIIASKFRNSGQTCVCTNRIYVQAGIYDRFVELFSAKVAAFKVGSANEAGVNIGPLISQSAVNKIQEHIDDATAKGANLVIGGKLHTRGGTFFEPTVLRDVTQAMLVAKDETFAPLAPVFKFDTEAQVIEMANDTEFGLASYVYTQDISRIWRVSEALEYGIVGINEGLISNEMAPFGGVKESGLGREGSRYGIDEFLEIKYLCLKV

SEQ ID NO: 15780 - protein, 404 aa, Bordetella pertussis Tohama I
MAITDVLVPQLSESVSEATLLTWKKQAGAAVEADEILIEIETDKVVLEVPAPSSGVLSEIVMGDGSTVTSGEVIARIDTAAKAAAAPAAAAEAPAAAAAPAAAAPAAASSAASGVASPAAAKILAEKGVDAASVAGTGRDGRVTKGDALAAGNAPAAKAAAPVAPPTLSLDGRPEQRVPMSRLRARIAERLLQSQAENAILTTFNEVNMQAVMDLRARYKDKFEKEHGVKLGFMSFFVKAAVAALKKYPVLNASVDGKDIIYHGYFDIGIAVGTPRGLVVPILRNADQLTIAEIEKTIADFGKRAADGKLGIEEMTGGTFSISNGGVFGSMLSTPIINPPQAAILGIHATKERPVVENGQIVIRPINYLAMSYDHRIIDGREAVLGLVAMKEALEDPQRLLLDL

SEQ ID NO: 15781 - protein, 339 aa, Cleome spinosa
MKELGLCLGVESGSDQRRGDSSGHGLRVTAIDSNSDYEDGILDLNASDNRNEESESGRVVDGSGLPPIRDSFFGEEAVVADEELEWEEVHEAITWTYEPVQVRGFAIPEEEGELSSSSRDDHEHDLDWQVLLAVNNVVNYIEQAEGISLTADDVDANYYLYLANIDEYDENHGDHDAIFRQMFDNETGIGGNPPAAKRVVKDLPLVEFTVEKLGKGEVVCSVCKDKIAIEEKVRRLPCRHYYHGDCILPWLGIRNTCPVCRYELPTDDPDHERTRRQQRSDRLGKRVIDTDCYSHAPVNNSICNAWTGDHHHVKTFMSCDEDTKDMVGCYYKLFGMVPP

SEQ ID NO: 15782 - protein, 311 aa, Dechloromonas aromatica RCB
MSRPSKIVIASRESRLAMWQAVHVRDRLSSLNPGAEVVILGMTTKGDQILDRPLAEIGGKGLFIKELEVAMQEGKAHLAVHSMKDVPMVMPEGFVLAAISARENPRDAFVSNKYNGLDDLPAGAIVGTSSLRRESILRAKYPQLVIKSLRGNLDTRLKKLDAGEYDAIILAAAGLIRLGMENRIKSVLTAEQSLPAPGQGALGIELIDGAADMADVVAPLNDPETAHCVKAERAFSRALGGSCQVPLGGYAIIDNGQLWLRGFVATADGQEVVSAELRGNPADDEALGLQLAAELRAKGADAILEKLAHCK

SEQ ID NO: 15783 - protein, 324 aa, Parvularcula bermudensis HTCC2503
MSFKPLRIASRRSPLAVAQALWVRDRLAEALGIDEVDRDAAFPHETFVTTGDRMLNPTLADIGGKGLFTKEIEIALLDGQADIAVHSMKDMPAQMPPGLVLAAVPVREDPRDAFVTLDGRPLDQMPAGARIGTSSTRRRAQLARLRPDLALVPMRGNVGTRLQKLAAGEAEGTFLAEAGLRRLGMTDVKREALSPARMLPALGQGALCVQARSGDHETLSACAHINNRPTALAAAAERALISGLDGSCKTPIGGLARQTGDSLILEGQILTPDGRRVLRGERTVAIGGMTWEAVLDSARAAGADLAAYMRAEAGADLAAMLGDQ

SEQ ID NO: 15784 - protein, 285 aa, Burkholderia xenovorans LB400
MTTRGDQILDRTLSKVGGKGLFVKELEAALADGRADLAVHSLKDVPMALPEGFALSTIMEREDPRDALVSNTYDSLAALPEGAVVGTSSLRREAMLRMRYPHLEVRPLRGNLDTRLAKLDRGDYAAIILAAAGLKRLGLGERIRALLDPEDSLPAAGQGALGIEIRADRAELAAWLAPLHHEHTAAAVEAERMVSRALGGSCEVPLAAYATWHDGALHLRGIVATPDGQRVLSAQASAPATSVEQAIALGQEVAGALEQQGAMEIVRALGAANGAAAADSAVTGE

SEQ ID NO: 15785 - protein, 561 aa, Cryptococcus neoformans var. neoformans JEC21
MPIRSPTSLSLKRSSHFTTATRRLHTSTPTLIAAASLSKKLQRFSPQLTPRLLAPNGSRTMSNWPKVTSENPLGLDDPSLFIQKGFINGQYVGTQSGKTFEVNDPASGKTIGTCPEMTVEDTRHAIEVAEKAFATFRNTSPVQRSNWLSELYRLYQASIKDIARLIVWENGKSWNDAMAEATYAGTFFSWFAGEALRTYGDVIPCSVPGTRNFSIKQPIGVVALLCPWNFPAAMIARKMGPALAVGCTSVIKTPSETPFTTLAIIELARRAGIPDGVINVITTDANLQDVGKELCTNPAVHKVSFTGSTRVGKILASQCSSTLKKMSLELGGNAPLIVFEDADIPTAVAGTIASKFRGSGQTCVCANRIYVHEAIYDEFAKKLAEKVAEFKVGPGFGEGVTHGPLIHSRQADKVEEHVQDAIKKGAKVLVGGKRGNGTEYIPTVLTNVSDECLIATEETFGPVAALFRFSSEEEVVARANRAEVGLAGYFFSRDSDRIWRVAEALETGMVGANTGMISQAVIPFGGIKESGYGKEGGRQGTEEYTITKLVAVGTSLHNMPK

SEQ ID NO: 15786 - protein, 109 aa, Parvularcula bermudensis HTCC2503
MATKTVTDASFEQDVLKGTGLVLVDFWATWCGPCRQIAPALEEIADEMGDDLTVAKLDIDENPTTMMQYGVRGVPTLMLFKEGQLVSTKVGADAKGAILAWVKETASAA

SEQ ID NO: 15787 - protein, 959 aa, Pseudomonas aeruginosa PAO1
MTDNLNLGAIDLGTDDEFIARHIGPRAADTQAMLQRLGYDSLDTLIGNVIPDSIKGSSVLDLPAGMGEAEALASLKAIAARNRALRSFIGQGYYNCHTPAPILRNLLENPAWYTAYTPYQPEISQGRLEALLNFQTLVSDLSGLPIANASMLDEATAAAEAMTFCKRLSKNRTSQAFFASRHCHPQTLDVLRTRAEPLGIEVVVGDESTIEDFSAYFGALLQYPTCDGEIVDYRELVSRFHAVDALVAVAADLLALTLLTPPGEFGADVAIGSAQRFGVPLGFGGPHAAYFATRDAFKRDMPGRLVGVSIDRHGKPAYRLAMQTREQHIRREKATSNICTAQVLLANIASMFAVYHGPQGLLRIARRTHRLTAILAAGLERLGVAVEQKHFFDTLSLATGARTAAIHAKARAAGINLREIDAGRLGLSLDETVRQTDVETLWGLLAEEGQALPDFAALAASSGDRLPVELLRQSAILSHPIFNRHHSETELMRYLRKLADKDLALDRTMIPLGSCTMKLNAASEMIPVTWAEFGNLHPFAPAEQSEGYRQLTDELEAMLCSATGYDAVSLQPNAGSQGEYAGLLAIRAYHQSRGDSQRDICLIPSSAHGTNPATASMVGMRVVVVACDARGNVDVEDLRNKASEHKERLAALMITYPSTHGVFEEAIREICAIVHDCGGQVYIDGANMNAMVGLCAPGKFGGDVSHLNLHKTFCIPHGGGGPGVGPIGVRAHLAPFLPGHARGERKEGAVSAAPYGSASILPITWMYIRMMGGEGLKRASEMAILNANYIAHRLEEHYPVLYAGGNGLVAHECILDLRPLKDSSGISVDDVAKRLMDFGFHAPTMSFPVAGTLMIEPTESESKAELDRFCDAMIRIREEIRAVERGELDKEDNPLKNAPHTAAELLGEWNHAYSREQAAYPLASLVEAKYWPPVGRVDNVYGDRNLTCSCPPIEAYSEE

SEQ ID NO: 15788 - protein, 541 aa, Zea mays
  misc_feature (263)..(263): Xaa can be any naturally occurring amino acid
  misc_feature (279)..(279): Xaa can be any naturally occurring amino acid
  misc_feature (281)..(281): Xaa can be any naturally occurring amino acid
  misc_feature (301)..(301): Xaa can be any naturally occurring amino acid
  misc_feature (303)..(303): Xaa can be any naturally occurring amino acid
  misc_feature (426)..(426): Xaa can be any naturally occurring amino acid
METVTVVVAPAPVAVNQQPPQHKLAELKPSSFAGVAKSSPATKAKPAKTKKLAGGCGGYVLEDVPHLTDYLPELKSYPNPLQDHPAYSVVKQYFVNPDDTVAKKIVVHKSGARGTHFRRAGPRQRVYFQPDEVTAAIVTCGGLCPGLNTVIRELVCGLHDMYGVATVYGIEGGYKGFYARNTVELTPRSVNDIHKRGGTVLGTSRGGQDTAKIVDSIQDRGVNQVYIIGGDGTQKGAASIHEEVQRRGLKCAVVGVPKTIDNXDIAVIDKSFGFTPPWXEXAQRAINAAHVEAESAENGVXGXVKLMGRNSGFIAMYATLASRDVDCCLIPESPFYLDGRGGLLEFVEKRLRDNGHMVIVVAEGAGQDLIAKSMNFADTHDASGNKVLLDVGLWLSHKIKEHFKKKPSFPITLKYIDPTYMIRAVXSNASDNVYCTLLAHSALHGAMAGYTGFTVAPVNGRHAYIPFYRITEKQNKVVITDRMWARVLCSTNQPCFLTHQDVEGAGLDEEEPQMPLVEGENALVRNPSMCNGNGHLCSGAA

SEQ ID NO: 15789 - protein, 331 aa, Campylobacter lari RM2100
MAVKVAINGFGRIGRCVARIIMKRDDIELVAINDTTDIELTKYLFKYDTVHGVYDGSVENDGDDLIIDNKKIKVLKSRNVADLDFAKYGAQIVLECTGAHLTMEKCQGFLDHGVQKVIMSAPAKDKTPTYVLGVNAHEYKGENIISNASCTTNCLGPICRVLQDNFGIEKGLMTTIHAYTNGQSIIDAKARDKRRSRAAAQNIIPTSTGAAKAMKLVMPELDGKLHGQSMRVPVADVSSVDLTATLKKKVSKEEINEAFRKAAASNLKGILLVDDEERVSSDFITCPYGAIVASDLTQVICDDFVKVVAWYDNEWGYSSRLVDMAVFVAKA

SEQ ID NO: 15790 - protein, 293 aa, Desulfitobacterium hafniense Y51
MGLIINKDTHVIVQGGTGKQGSYHVKAMLEYGTKVVAGVTPGRGGNQVGGLPVYDTVREAKERHKIDASLIMVPAPFVLSAAIEAIDAGVPLIVIVTEHIPVKDTMKINALAQEKGCRLLGPNTIGVINCREKVKIGIMPGFLYGSGRIGLISRSGTLSHETASNLMFKGLGVSTVIGIGGDQIIGTDFVDALKDFKEDQDTEAVVMLGEIGGNREEKAAEYLQSCDYGKPVFCFIAGRNAPPGKKMGHAGAIIQGSAGTVQSKEDKLRQAGVRIAVSLEDLVESVAGWRQKD

SEQ ID NO: 15791 - protein, 471 aa, Blastopirellula marina DSM 3645
MATDITTDALESPVGEINKYDFRTETTGIFKARKGVDAEVVNQISDIKNEPDWMRKFRLDSLEIFNSKPMPKWGGDIAIDFQDIFYYLKPTDGQGHTWDDVPAEIKDTFERLGIPEAERKYLSGVKAQFESEVVYGSLQEDLAKKGVLFTDTDTAVREHPELLREYFGKVIAPDDNKFAALNSAVWSGGSFIYIPKGVKIDFPLQAYFRINAESMGQFERTLIIVDEGAQVHYVEGCTAPMYTTESLHSAVVEVICKKGSRCRYSTIQNWANNIYNLVTKRALAYRDATMEWVDGNLGSHLTMKYPAVYMMEPGARGEILSIAFSGKGQHQDTGAKLVHCAPNTTGQIVSKSISKDGGRGSYRGLVKVEEGATGSKSSVVCDALILDPQSRSDTYPYIEIAEPDVSIGHEASVSRIGEEQLFYLMSRGLSESEASTMIVNGFIEPLVKELPMEYAVELNRLIELQMEGSVG

SEQ ID NO: 15792 - protein, 441 aa, Blastopirellula marina DSM 3645
MPMGVTAVTDTAKFNASALDELIAKRQEPAWLVDLRRAAFETFCEKAMPSRKEEEWMRTDIRTFHLDKFDLPAELTEIPADLPSGLLTEGVDLGGRLVSYNSRTVSSELSEELKAQGVIFGSFSEVLASHPEIVRKHFAHAVDPHFDKFSAMHAAFFTTGQVLYVPRGVVVKKPLHALSLLGAGGVDLGHTLVILDEGAEATMLNETASIDESAPGLHCGAIELFVHPRARLRYINLQNWGHGVWHFAHQKGIVERDAHIQWTIGALGSKLSKVNQHVALAGVGAESEVNGVMFTEGRQHLSYHTLQHHEAPNCRSNFLYKTALQDRSRTVWRGMIKVDKDAQKTDGYQRNDNLLLTEHCRADSIPGLEIEADDVRCTHGATIGRVDEEQIFYAQCRGFTRKEAIRAIVIGFFQQVFDRIPVESVREALGKAIAVRVRDYE

SEQ ID NO: 15793 - protein, 1032 aa, Candida glabrata CBS 138
MLKGTAIKRSWTGLRRLYATDVSSTKFKQIYHADPLDSKNDRLDTFQRRHLGPNPKDVDEMLKTVNSNYNDLSDFVNDMVPSKILGMKDGLKFKSSPKGVFNETAMLNHLAQIAEKNNYKVKNYIGKGYYDTILPPVIQRNVLECPEWYTSYTPYQPEISQGRLESLLNFQTVVSDLTGLPVANSSLLDEGTAAGEAMLLSYHSLKSKKIKKSSPNQKLNFIIDKNLHPQTKSVLKTRAKPFNIELLEIDFNELSNKEIEDKLSKELLDNSFGGLVQYPDTNGNIPTTDKLNTISGLLHSSNCLFSVATDLLALTLLEPPSTFGADICLGSSQRFGVPLAYGGPHAAFFSVTEKLNRKIPGRIVGVSKDRLGNTALRLALQTREQHIKRDKATSNICTAQALLANVSANYCVYHGPEGLKNIAKRVYGMTTVLANAISEHSEHKLLNNSWFDTLTIELKEGTTADQFLELALSEFNTNVFAVNNRTVSISFDEKKTIDDLEDMIRLFCNLKKNSSISSSIKDSGILPEFPKELQRKSQFLQNPVFNRYHTETAMLRYLHHLQSRDLSLANSMIPLGSCTMKLNSTFEMMPITWPQFANIHPFQPVDQVQGYKELITAIEEDFSSITGFHSVSLQPNSGAQGEYTGLRVIRSYLEDIGEGHRNLCLIPISAHGTNPASAAMCGLKVIPINCLQNGALDLADLKEKAEKYKDDIAAVMITYPSTYGLYEPDIKEAFDIVHSCGGQVYLDGANMNAQVGLTSPGDLGADVCHLNLHKTFAIPHGGGGPAGAPICVKEHLAPFLPRHDVTDMITEIGSNKSIDSVSSAPYGNALVLPISYAYVNMMGEEGLPFSTVIATLNSNYMMARLKEHYKIMFVNGEDVKHCAHEFIIDLREFKAKGIEAIDVAKRLQDYGFHAPTLAFPVPGTLMVEPTESENREELDRFVDSMISIRKEIDDYIAGKPEGMVIKNAPHPLSDLISSTDWETRGYTREQAAFPLAFLKTSKFWPTVARVDDKFGDTHLICTCPSVEEMAEE

SEQ ID NO: 15794 - protein, 801 aa, Staphylococcus aureus subsp. aureus MSSA476
MAKQKLVMIGNGMAGIRTIEEILERANDLYDITVIGKEPYPNYNRIMLSNILQNKMTVEETIMNPYEWYEEHGIELITNDPVIEVDRANQSVTTANGIEVSYDKLIFATGSKAFVIPVPGSTLPSVIGWRTIDDTEQMMNIAKTKKKAIVIGGGLLGLECARGLLDQGMEVTVLHLAEWLMEMQLDRKAGNMLKADLEKQGMKFEMQANTTEILGEDDVEGVKLADGREIPADLVVMAVGIRPYTEVAKESGLDVNRGIVVNDVMQTSDSNVYAVGECAEHNGKVYGLVAPLYEQGKVLADHLTNKETNGYKGSTTFTSLKVSGCDLYSAGQIVENAEIKGIEIFNSVDNNYKKIFLKDGNVVGAVLYGDIDDGSRFYNMMKKGESTEDYTLVSLLTKGGEEASLSIADMADDETICGCNGVDKGTIVNAITENGFTTVEEVTAKTKAGNSCGKCKPQIAQILQHTLGDDFVAAKPAGICGCTDLTRDQIVTQIRAKGLKTSKEVRHVLNFKNKGGCPKCRPAINYYLNMVYPHDHEDERESRFANERYHANIQNDGTFSVIPQMRGGVTDADQLIRLGEVAKKYHVPLVKVTGSQRVGLYGVKKEELPNIWEDLGMRSASAYGKKTRSVKSCVGKEFCRFGTQYTTRLGIRLEKTFEYIDTPHKFKMGVSGCPRSCVESGVKDFGIISVENGFQIYIGGNGGTEVEKAEFLTTVETEDEVIKLCGALMQYYRETGIYAERTAPWLRRLGFENVKEVLLDPERQNELFERIMDAKKAVEAEPWEAITSNAQARKIFEVEKV

SEQ ID NO: 15795 - protein, 904 aa, Xanthomonas campestris pv. vesicatoria str. 85-10
MNEYRSSLVFATPDLPLRDDVRRLGALVGDLLAEQVSAEFLDEIERVRTTAISRRESDAPPSTLSEQLTGRQPRDAEALVRAFSTYFQVVNIAERVHRIRRRREYQRSGTDTPQPDGLHDALRRLKAQGVTLDELSQWLPRIDVEPVFTAHPTEAVRRALLEKEQLMVASLVDNLDGMRTPNERASDAARFRMALTASWQTADSSPVRPTVDDEREHVGFYLTQVLYRVIPVMYETLEHAIEETYGSVPALPRLLRFGTWVGGDMDGNPNVDAKTIAGTLDAQRRAVLDRYQKELWQLASLLSQSTTLVQVSAELTAQLERYRALLPDAAARSRPRHGDMPYRLLNDLMRARLQATLDDAEGAYSAPSELEHDLQLILDSLQANKGLHAGWFAVRRLLWRVRSFGFHLARLDVRQESSVHARAVADALGQTDWDAQDATQRAAVLGPYAAGQEPLPRVDDEGNARLDAVFAALADARTRHGADALGSYIISMAHNRADVLTVLALARRGGLVDDAGAVPLDIVPLFETVDDLRGGTGTVQDLLADPVYRQHLAARGDTQMVMLGYSDSGKDGGIAASRWGLQRAQVELLEAAAELGVRLTFFHGRGGSIARGGGKTSRALDAAPRGSVDGRLRVTEQGEVIHRKYGIRALALRSLEQMTGAVLLSSLRPRAPEPREAHWRPVMDLVAERSTVAYRAFVGAPEFMQYFRLATPIDVIERMTLGSRPSRRLGQDAALSNLRAIPWVFAWSQARAVIPGWYGVGSGLQAAVDAGHEDTLREMAQDWPFFRTFLDDIAMVLSKGDLNIAELFSRLSGDLHTRFFPLIRDELALTKAWVKALLQQQSLLQHDPRLALSIRLRNPYIDPISVLQVDLLQRWRATDGEDEALLRALVACVNGVSQGVQNTG

SEQ ID NO: 15796 - protein, 161 aa, Xanthomonas campestris pv. vesicatoria str. 85-10
MSDISTFAFTDLEGRTQSMRDYAGNVLLVVNVASKCGFTPQYAGLQALWQRYRERGLVVIGFPCDQFGHQEPGDAAQIRQFCSLDYAVDFPLAAKIEVNGNGAHPLWQWLKHEQRGVLGSEAIKWNFTKFLVGRDGRVLERYAPTTKPEALAADIERALGA

SEQ ID NO: 15797 - protein, 186 aa, Coxiella burnetii
MISAWMFVSAIACGNTFVLKPSEKDPSAALFLAELMQEAGLPAGVLNIINGNGATVDRLITHPKVAAVSAVGSTAAAEHIYQTAIAHGKRAHTFGGAKNHCVITPDADIDEAVDAILGAAYGAAGERCMAVSVVVAITDTVGDALVQRLKEKIPQLQIAAGTESRADFGPLVTKEHLAKSLTPIFI

SEQ ID NO: 15798 - protein, 639 aa, Mesorhizobium loti MAFF303099
MSGVAGILLRQEAPADAATDIQRMLARMRHRGPDGNSWWLDSGIALGHAWLNTTDEAGPGPLTMAGGKLAITADCRLDNRDELMARLGIRDRSVADAVLLMRAYLRWGESCPVHLQGDFAFAIWDAERQLLFCARDHFGVKPFYYHAADRRFAFASEIGPMLGLDGVGARISEHRISGFLAGLPDDPQSTPYSDIFTLPARHSLTVTAQQVVLRRYWQIEPSVRPARSDAAEEFAHLFSQSVRNRMRGSRSVGAMLSGGLDSSSIACVAGLQNAAERKPKLPTFSLVFEKGSSMDERAFIDAVLDQHKTDPTLIPVGNYAPFAEFERVLEEQEGTFLAPGLTLTRGIYRTAGAKGIKVLLDGHGGDEVVSQGHGHLHELANGGRWLDLWREVRSASNTYGDSTLGLYFQFLTLYGPAWRIAKARQLANRALNRIRKPTQMQRGRSWRDLINPDLARRTELIDRFHRAGYMPPGVQASDALSHRWILSNGYVPHSFEVLDKAAANFGVEPRYPFWDKPLVEFCLALPGEEKLSHGFGRYVLRRAMEGILPAAVQWRRDKIDFTANLVNGMVRNHRDLLEQLLVSDAGRIAPYVNLPQVSAAYARLLSQPDQVASLDVQYVWRSASLSLWLRQVQHGGSPA

SEQ ID NO: 15799 - protein, 318 aa, Zymomonas mobilis subsp. mobilis ZM4
MLVNLGTPDAPNAKALRRYLGQFLSDQRVIELPAVFWQIILRGIILPFRAPRSARAYQKIWTNEGSPLAAITKKQAQGLQKRMPNITVDYAMRYGTPSISSRLEKLIASGCRRILLAPLYPQYSAASTATVQDEAYRYLQKIRWQPNLRSLEPYYTHPAYIQTLKKNIEDQIKALDFKPDSLLLSYHGMPVKTRELGDPYYFQCQATSQALSSLLDIPVITSFQSRFGSQKWFTPATDMTLKELPSKNIRNLAVAMPGFSADCLETLEEIALQGKSTFLEAGGENFAALRCLNDSEESLAMLEILVNQGLSGWLKSGE

SEQ ID NO: 15800 - protein, 208 aa, Phanerochaete chrysosporium
GAGGETTAGTLTFVVYFLTQHPNVLQRLRQEILDVVGPSNLPTYDDIKQMKYLRAVLNETLRLYPPVPWNMRYAVKDGILPNSEPDGKPWFIPAGASVSYSVHCMHRRKDYWGPDAEEFDPDRFLDERLHKYLTPNPFIFLPFNAGPRICLGQQFAYNEMSFFLVKLLQTFEDISFERDAFEPNALPPAEWAKFPGRKGKEKFWPRHI

SEQ ID NO: 15801 - protein, 594 aa, Kineococcus radiotolerans SRS30216
MCGLCGEVRFDGRAADVAAVQRMSETMAARGPDGEGVWAQGRVAFGHRRLSVIDLSACGAQPMQDPELGLTAVFNGCIYNYPELRAELAGHGYRFTSTSDTEVIVKGYHRWGVDVVDHLVGMFAVVLHERDSGRVVLMRDRLGIKPLYLAETPGRLRFASTLPALLAGGDVDTTIDPVALHHYLSWHAVVPAPRTVLQGVRKLPPATVRVLEADGTSREHRYWAPDHVRREEFAGFSERDWEDAVLESLRTAVRRRTVSDVPVGVLLSGGLDSSLITALLAEQGQTDLATYSIGFESVGGRGGDEFEYSDVIAERFATDHHRIRVSGDELVGALGHAVGAMSEPMVSHDVAAFDLLSQQVSQSIKVVQSGQGADEVFGGYHWYPPLAGLTPQQGVDVYARAFFDRDHAGMAQVLDPRWLTATDVSREFLAEHFARPGADTAVDAALRLDTEVMLVDDPVKRVDNTTMAWGLEARVPFLDHELVELAAAVPPELQLSGGGKGILKRVGYRVIPREVIDRPKGYFPVPAITHLEGKVLGTVKDALTSRAAQDRGLFRPEYVQGLLRDPNGELTPLRGNKLWQLGLLEMWLQQHGIG

SEQ ID NO: 15802 - protein, 89 aa, Glycine max
MKKRQVVVKSVANTSSSVMRNIRYGECQKNHAANIGGYAVDGCREFMASTGEGAGGALTCAACGCHRNFHRREVNTEVVCEYSPPNSGR

SEQ ID NO: 15803 - protein, 637 aa, Arabidopsis thaliana
MMMMSNLPNDLVEEILSRVTVTFMRTVRSICKKWNALTKDRSFTNKYIRNIAALGEREFLMIKEFSIYLVGVNLHGIQNNNFDLSIELKGLWFGTRIVRNQDGSNPVIIIGQLTEEKLAMLLKRWDTCEVEIWVTDKIEPDVSWSKFLKVGIKPRFDFANFVVIDVVKKVALVFDKNKAEKFQYSYNIAYIIGEKASPEELSSHRERKKRVESCLKHEKASPQGFVIGFLPKRPHTSCRDCIQSQPYGQASKAHACGNLRSCQDRLYPTISPSNQRPRTWASFLRHILISNLPDELVEEILCRAPVTSLKAMRSTCKKWYVLTKDQRFAKKRGKEFLMIMNRRVYLIGVNLHNNIDLSIKCRGRLISRDETAQGFYVSQVFHCNGLLLSVSGKTIDDTRLVVCNPYGVKPKWINPKDNYGRLDIFSLGFDKLCGSYKILRIYDFDNKLQIYDLSSNSWMIPRDTLGRDIEYMQNGVSSKENTYWCARDKQSQYCFLFCFDFTRERFGPRLPLPFNGAYVSLSAVKEEQLAVLFQPSDKSEIEIWVTNKIEPEEVSWSVFLKVEMKLRVLSWNFLIDKEKKFAVVFDKDKAKGFKTNYDIAYVIGENGYYRRVDLRESPNKPLCRIVSCYVPSCVQIE

SEQ ID NO: 15804 - protein, 620 aa, Dechloromonas aromatica RCB
MKFRTKTILGVALIEGVLLAILGIGILSLFRDANEQQITRRAAVSARLLAASARDAMVAYDLATIDGIASDVLETGEISYVRFLDGQGRVMVERGALPSQPEFAAGVSQTEDGVLDRAVPITVSGESFGQIQFGIDIAPFTLALNRTQRWFMALSALEMGLVAFFSLILGTYLTRQLTALRNASREIAEGRFDRPLKIDGNDELAETAQAFNHMVEKVAGSISSLRESKAKLRQAKEEAESANAAKSQFLANMSHELRTPMTGIIGMSFLMMRTELDEQQRDFADTIQRSANALLIIINDILDLSAIEAEKLRLAHANYSARKVIGEVLALISPSADAKNISLISQIADDLPEILVGDAIRLRQVLLNLLGNAIKFTEQGSVTLEVAHQPTDDGRQRLNFVVRDTGIGMTPGVVNALFTPFFQADLSNTRRFGGTGLGLSISRRLIELMHGEISAESEPDVGSTFRFHIVADLPETSVAEEQPQKADGERHFDARRILVVDDRQINRKVVGAMLERLGCHVLMAEHGEEALARLATEVVDLVLMDCQMPVMDGFEATRRIREGEDSRIDPATKIIAMTANAMEGDKQRCLAAGMNDYISKPIFAAELERILTTWLPATPA

SEQ ID NO: 15805 - protein, 112 aa, Chromobacterium violaceum ATCC 12472
MKLVTAVIKPFKLDEVREALSAIGVQGITVSEVKGFGRQKGHTELYRGAEYVVDFLPKVKLEIAIDDALLDQVVEAIEKSARTGKIGDGKIFVYDLEQVIRIRTGETGADAV

SEQ ID NO: 15806 - protein, 181 aa, Nostoc punctiforme PCC 73102
MSDSRLVKISKYLSKYLRHTPDAIGIKLAPGGWVAVDELITACAKNKFPITRQELEAVVESSEKQRFSFDSTGTLIRANQGHSVEVDLQLEPVVPPDELYHGTGHKSVDSIMETGLCKMSRHHVHLSKDIATAQTVGARHGKPVVFAISAAAMHQAGYIFYCSDNGVWLVDRVPPEYLQKI

SEQ ID NO: 15807 - protein, 338 aa, Phaffia rhodozyma
MAVKVGINGFGRIGRIVLRNAIIHGDIDVVAINDPFIDLEYMVYMFKYDSTHGVFKGSVEIKDGKLVIEGKPIVVYGERDPANIQWGAAGADYVVESTGVFTTQEKAELHLKGGAKKVVISAPSADAPMFVCGVNLDKYDPKYTVVSNASCTTNCLAPLAKVIHDNYTIVEGLMTTVHATTATQKTVDGPSNKDWRGGRGAGANIIPSSTGAAKAVGKVIPSLNGKLTGMAFRVPTPDVSVVDLVVRIEKAASYEEIKETIKKASQTPELKGILNYTDDQVVSTDFTGDSASSTFDAQAGISLNGNFVKLVSWYDNEWGYSARVCDLVSYIAAQDAKA

SEQ ID NO: 15808 - protein, 675 aa, Pisum sativum
MEEHSVGPLVPAVVKPEPSKNFSTDTTAAGDVSPVPTMSDLDKDFLCPICMQIIKDAFLTACGHSFCYMCIITHLRNKSDCPCCGHYLTNSNLFPNFLLDKLLKKTSDRQISKTASPVEHFRQAVQKLKQGCEVTMKELDTLLLLLTEKKRKMEQEEAERNMQILLDFLHCLRKQKVDELKKVQTDLQFIKEDIGAVEKHRMDLYRARDRYSVKLRMLDDSGGRKSRHSSMDLNSSGLASSPLNLRGGLSSGSHTKKNDGKSQISSHGHGIQRRDPITGSDSQYINQSGLALVRKKRVHTQFNDLQECYLQKRRQAADKPHGQQERDTNFISREGYSCGLDDFQSVLTTFTRYSRLRVIAEIRHGDIFHSANIVSSIEFDRDDDLFATAGVSRRIKVFDFSAVVNEPTDAHCPVVEMTTRSKLSCLSWNKYAKNQIASSDYEGIVTVWDVTTRKSLMEYEEHEKRAWSVDFSRTDPSMLVSGSDDCKVKVWCTNQEASVLNIDMKANICCVKYNPGSGNYIAVGSADHHIHYYDLRNISRPVHVFTGHKKAVSYVKFLSNDELASASTDSTLRLWDVKQNLPVRTFRGHANEKNFVGLTVSSEYIACGSETNEVFVYHKEISKPLTWHRFGTLDMEDAEDEAGSYFISAVCWKSDRPTILTANSQGTIKVLVLAA

SEQ ID NO: 15809 - protein, 496 aa, Burkholderia xenovorans LB400
MAGVKELQAFPMVIGGERVPSASGVWLESIDPYTGEPWAKVPRGDATDAEAAVSAARKALTTGAWHQLSATQRGALLRRLADLISRDWERLAEIEIRDNGKVISEVGPQIRYLAQYFHYYAGLADKIEGAVIPVDRPGMLNYTRHEPVGVVVAITPWNSPLMLASWKIAPALAAGCTVILKPSEHTSVSSLVFSDLFDEAGFPPGVVNVVTGFGAEIGNALVSHPDVAKVAFTGGDVAGQAVYERAAAGLKRVTLELGGKSPHIVFDDADLDGALAAAMDGVFSSSGQMCVAGSRLMLHDRIHDEFVARLLDRVRTLKLGAPMNPATSIGPVTTQAQFERILSYIDVAKQEGARCLVGGVASPEAEGGSGWFVAPTVFGDVKNDMRIAREEVFGPVLSIIRFSTDDEAVHLANDSRYGLASGIWTRDVGRAISVADRIQAGTVWVNTYRAVSAASPFGGMKRSGIGRENGQEAIMGFLQTKSIWISTTSRPVAAWS

SEQ ID NO: 15810 - protein, 606 aa, Beta vulgaris
MAPNNGSWLVLSISMMLLSHGMIIIAKDQAIHHHDDDHDDMLINDHQMINDDDPYRTAYHFQSPKNWMNDPNGPMIYKGIYHLFYQYYPYDPVWHTEIVWGHSTSTDLINWTQQPIALSPSEPYDINGCWSGSITILPQNKPVILYTGINNKNYQVQNLALPKNLSDPYLKEWIKLPQNPLMAGTPTNNNNINASSFRDPSTAWQLSDGKWRVIVGTQQGKRGLAVLFTSDDFVKWNNTGNPLHSTEGNGIWECPDFFPVYVGKSLGADTSIIGDDVKHVLKLSLFDTQYEYYTIGRYDIEKDIYVPDEGSIESDLGLRYDYGKFYASKSFFDDETNRRILWGWVNESSIQADDIKKGWSGVQAIPRTVVLDKSGKQLVQWPLAEVDMLRENDVELPSQVIKGGSLVEISQITASQADVEISFKIPESNYVEELDSTCTNPQILCSQKGASIKGRFGPFGLLTLASMGLEEYTAVFFRIFKGPNKYVVLMCSDQTRSSLNPTTDKLSFGIFVDVDPINEDLSLRILIDHSIVESFSAKGKSCITARVYPTMAINDKAKLYVFNNGTEDVKITKLSAWSMKKAQINLSTDNTSNMSYNSNKVEKEEF

SEQ ID NO: 15811 - protein, 968 aa, Pisum sativum
MEEHSVGPLVPAVVKPEPSKNFSTDTTAAGDVSPVPTMSDLDKDFLCPICMQIIKDAFLTACGHSFCYMCIITHLRNKSDCPCCGHYLTNSNLFPNFLLDKLLKKTSDRQISKTASPVEHFRQAVQKGCEVTMKELDTLLLLLTEKKRKMEQEEAERNMQILLDFLHCLRKQKVDELKEVQTDLQFIKEDIGAVEKHRMDLYRARDRYSVKLRMLDDSGGRKSRHSSMDLNSSGLASSPLNLRGGLSSGSHTKKNDGKSQISSHGHGIQRRDPITGSDSQYINQSGLALVRKKRVHTQFNDLQECYLQKRRQAADKPHGQQERDTNFISREGYSCGLDDFQSVLTTFTRYSRLRVIAEIRHGDIFHSANIVSSIEFDRDDDLFATAGVSRRIKVFDFSALLKKTSDRQISKTASPVEHFRQAVQKGCEVTMKELDTLLLLLTEKKRKMEQEEAERNMQILLDFLHCLRKQKVDELKEVQTDLQFIKEDIGAVEKHRMDLYRARDRYSVKLRMLDDSGGRKSRHSSMDLNSSGLASSPLNLRGGLSSGSHTKKNDGKSQISSHGHGIQRRDPITGSDSQYINQSGLALVRKKRVHTQFNDLQECYLQKRRQAADKPHGQQERDTNFISREGYSCGLDDFQSVLTTFTRYSRLRVIAEIRHGDIFHSANIVSSIEFDRDDDLFATAGVSRRIKVFDFSAVVNEPTDAHCPVVEMTTRSKLSCLSWNKYAKNQIASSDYEGIVTVWDVTTRKSLMEYEEHEKRAWSVDFSRTDPSMLVSGSDDCKQVKVWCTNQEASVLNIDMKANICCVKYNPGSGNYIAVGSADHHIHYYDLRNISRPVHVFTGHKKAVSYVKFLSNDELASASTDSTLRLWDVKQNLPVRTFRGHANEKNFVGLTVSSEYIACGSETNEVFVYHKEPLTWHRFGTLDMEDAEDEAGSYFISAVCWKSDRPTILTANSQGTIKVLVLAA

SEQ ID NO: 15812 - protein, 112 aa, Burkholderia xenovorans LB400
MKRITAVIKPFKLDEVREALAEVGLTGLTVTEVKGFGRQKGHTELYRGAEYVVDFLPKVKIEVVVADIQCDQVIDAIIGAARTGKIGDGKIFVADVERVIRIRTGEENEAAV

SEQ ID NO: 15813 - protein, 626 aa, Pediococcus pentosaceus ATCC 25745
MCGFAGYINQANVNKDTIKSMADRIKHRGPDDEAFFQDENASMGFRRLSIIDLAHGRQPMMNSAETKVLTFNGEIYNYKQVREELKELGYEFRTDVDSEVLIHGYDAWGPELLKKLRGMFAFVIYDKEKQEVFGARDHFGIKPLYYYDDDKTFLWGSEIKSFLEHPNFVKEFNEELLPIHLSFEFIPSKETMFKNVYKLLPGTYFIHKNGKTETHTYFKFNYDHIDESQTIEEDSKKIRKIVSDSVDAHMIADVEVGSFLSSGIDSSYVLAEAAKLKPIQSFSLGFRNSKYSELSYSTEFAKEINQKNTPLYMDGDDYFDILPTIMYYMDEPLSNPSAMQLFYLSKGTRKNVKVALSGEGADEFFGGYNTYLEAFTFERYQKMVPSFIRKGLAKAVSGLPRFHGRRFLMRGAQPLSERYYRVNYVFNQQERDQILRNPALNVDSGAYTQHIFDEVKGKDEMTQMQYFDINTWLPFDILHKADRMSMANSLEVRTPLVDREVAKFAATMPIKTRIHKEETKVSLRRAAEAELPERVAKKEKLGFPSPIANWIKEDKYRKRIEAAFNSDIAKKFFKPEALMHILDEHVNGKSSMQKIFTIYTFILWYGVFFPEDTNTNTIDLVKRTQV

SEQ ID NO: 15814 - protein, 398 aa, Bacillus anthracis str. 'Ames Ancestor'
MAVEVVMPKLGMAMKEGIITSWNIKAGDNVAKGELIASINSEKIETEIEAPADGTILDIAVSEDEGVPPGTVICYIGKPNEKVEVHESTKVEEELTASEVPQNVQHPEPLGKEVTNKQRIKISPVAKKIAKTENLDIRALLGTGPGGRITKVDVLKALEERVAIPEVLEESKVLPVTGMRKAIANRMHASLQNSAQLTLTMKVDVTDLVALHKEIAEVVQKRYDNKLTITDFVSRAVVLALGEHKEMNSAYIDDAIHQFEHVHLGMAVALEKGLVVPAIRFANNLSLVELSKEIKNAAQKARAGNLNSDDMQGTTFTISNLGSFGIEYFTPVLNTPETGILGVGAIEHVPVYKGKKLKKGSMLPLSLTFDHRVLDGAPAAAFLRTIKRYLEEPVTILL

SEQ ID NO: 15815 - protein, 344 aa, Bacillus anthracis str. 'Ames Ancestor'
MTRTVSMSTAINEAMKISMRRDENVILIGEDVAGGAQVDHLQDDEAWGGVLGVTKGLVQEFGRNRILDTPISEAGYMGAAMAAAATGLRPIAELMFNDFIGSCLDQVLNQGAKFRYMFGGKAKVPVTVRTMHGAGFSAAAQHSQSLYALFTSIPGIKVVVPSTPYDAKGLLLAAIEDDDPVIFFEDKTLYNMKGEVPEGYYTIPLGKADIKREGSDVTIVAIGKQVHTALAAAEQLAKKGLEVEVIDPRSLSPLDEDTILSSVEKTNRLIVIDEANPRCSIATDIAAIVADRGFDLLDAPIKRITAPHTPVPFSPPLEKLYLPTPEKVIETVSEMIGDQSLLHV

SEQ ID NO: 15816 - protein, 1688 aa, Oryza sativa
MAARRLTSRVAVVDEDRCKPNKCGQECRRSCPVVKIDLTFRVVGSIALISEELCIGCGICVKKCPFGAITIINLPKELDKDTTHRFGQNSFKLHRLPVPIPGQVLGLVGINGIGKSTALNILAGQIKPNLGRYDKIRGGGSLLSDKRSVSLHFLGDGILGPYPCAGIASCSSISTVTPIASQPWILDSGASFHMSFDDSWLTSCRLVKNGATVHTANGTLCKVTHQGSISSPQFTVPNVSLVPKLSMNLISVGQLTDTNCFVGFDDTSCFVQDRHTGAVIGTGHRQKRSCGLYILDSLSLPSSSTNTPSVYSPMCSTACKSFPQWHHRLGHLCGSRLATLINQGVLGSVPVDTTFVCKGCKLGKQVQLPYPSSTSRSSRPFDLVHSDVWGKSPFPSKGGHNYYVIFVDDYSRYTWIYFMKHRSQLISIYQSFAQMIHTQFSSAIRIFRSDSGGEYMSNAFREFLVSQGTLPQLSCPGAHAQNGVAERKHRHIIETARTLLIASFVPAHFWAEAISTAVYLINMQPSSSLQGRSPGEVLFGSPPRYDHLRVFGCTCYVLLAPRERTKLTAQSVECVFLGYSLEHKGYRCYDPSARRIRISRDVTFDENKPFFYSSTNQPSSPENSISFLYLPPIPSPESLPSSPITPSPSPIPPSVPSPTYVPPPPPSPSPSPVSPPPSHIPASSSPPHVPSTITLDTFPFHYSRRPKIPNESQPSQPTLEDPTCSVDDSSPAPRYNLRARDALRAPNRDDFVVGVVFEPSTYQEAIVLPHWKLAMSEELAALERTNTWDVVPLPSHAVPITCKWVYKVKTKSDGQVERYKARLVARGFQQAHGRDYDETFAPVAHMTTVRTLIAVAATRSWTISQMDVKNAFLHGDLHEEVYMHPPPGVEAPPGHVFRLRRALYGLKQAPRAWFARFSSVVLAAGFSPSDHDPALFIHTSSRGRTLLLLYVDDMLITGDDLEYIAFVKGKLSEQFMMSDLGPLSYFLGIEVTSTVDGYYLSQHRYIEDLLAQSGLTDSRTTTTPMELHVRLRSTDGTPLDDPSRYRHLVGSLVYLTVTRPDIAYAVHILSQFVSAPISVHYGHLLRVLRYLRGTTTQCLFYAASSPLQLRAFSDSTWASDPIDRRSVTGYCIFLGTSLLTWKSKKQTAVSRSSTEAELRALATTTSEIVWLRWLLADFGVSCDVPTPLLCDNTGAIQIANDPIKHELTKHIGVDASFTRSHCQQSTIALHYVPSELQVADFFTKAQTREHHRLHLLKLNVDPPDWHEILAYFHGSELQNYFKRMVEDNLKPIMKPQVEIMHKNRNSFQVSVGQLLDRKDERGMKDQLCNGLQLNEVIDRKVAKLSGGELQRVGIAAAALQSADVYMFDEPSSYLDVKQRLNAARVIKSLLRTNSFKKFTIICLPNFVFSYVIVIADAQEDAEIKTYQRYKYPTMSKTIGNFKLTVMEGEFTDSQIFVMLGENGTGKTTFIKMLAGVEKPDTVDGIDIEVPEFCVSYKPQKLASTYQGTVRQFLHEKIRDSYTHPQFVSDVMKPLKMQQLMDQEVQHLSCGQLQRVALCICLGKPADIYLIDEPSASLDSEQRLVASKVIKRFIMHAKKTAFIVEHDFIMATYLADRVIVYEGQPAVDCTANAPQSLLSGMNKFLSLREQERVRKMGRSGTGRKPCLDHFMEQVFRLKELQNDQRSPAF

SEQ ID NO: 15817 - protein, 319 aa, Erwinia carotovora subsp. atroseptica SCRI1043
MGTVKHHKLLILGSGPAGYTAAVYAARANLQPVLITGMEKGGQLTTTTEVENWPGDADDLTGPLLMERMHAHATKFNTEVIFDHIERVDLQNRPFRLFGDSAEYTCDALIIATGASARYLGLPSEDAFKGKGVSACATCDGFFYRNQKVAVVGGGNTAVEEALYLSNIAAEVHLIHRRETFRSEKILIDRLMEKVKNGNIILHTNRTLDDVLGDDMGVTGVRIRDTQSDAAEELELAGVFIAIGHSPNTAVFGGQLALKNGYIKVQSGIHGNATQTSIPGVFAAGDVMDHIYRQAITSAGTGCMAALDAERYLDGLTVK

SEQ ID NO: 15818 - protein, 482 aa, Pseudomonas putida KT2440
MPSEHSAGSPAGSSVDFEKVGSDYFQQRELKKGAAGWVLLVGLGVAYVISGDYAGWNFGLAQGGWGGMFLATLLMATMYLCMCFSLAELSSMIPTAGGGYGFARSAFGPWGGFLTGTAILIEYAIAPAAIAVFIGAYCQSLFGIGGWMIYLAFYIVFISIHIFGVGEALKLMFIITAIAAIALAVFLIGMVPHFDAANLFDIAKTDAVGASSFLPFGYVGVWAAIPYAIWFFLAVEGVPLAAEETKNPKRDLPRGLIGAMLVLLAFALLILVVGPGGAGSEALKASGNPLVEALSKAYGGSTWMGGFVNLVGLAGLIASFFSIIYAYSRQIFALSRAGYLPRKLSETNKSKAPVLALVIPGIIGFALSLTGQGDLLILVAVFGATLSYVLMMAAHITLRIRRPKMERPYRTPGGIFTSGLALVLACIAVVAGFLVDPRVVIGAAVIYAVLIAYFAFYSRHHLVAGTPEEEFAAIQKAEEALH

SEQ ID NO: 15819 - protein, 306 aa, Glycine max
  misc_feature (115)..(115): Xaa can be any naturally occurring amino acid
MPMSLSLSTVPAFNSLTMAESCLLSLPSLFYAKNKTLSLSIPTNPLNLQFPCSNSSLFPLTTKTTRHSSLLTFVAQTSGWAKEGEEEEAAWENQGDTAWGTEEGGDDIEDGGEGXSLEEEAEEVKIFVGNLPFDFDSEKLASLFEQAGTVEVAEVIYNRATDRSRGFGFVTMSTIEELEKAVKMFSGYELNGRVLTVNKAAPKGAQPERPPRPPRSFSSGLRVYVGNLPWEVDDARLEQIFSEHGKVEDARVVYDRETGRSRGFGFVTMSSETDMNDAIAALDGQSLDGRAIRVNVAQDRPSRSSF

SEQ ID NO: 15820 - protein, 244 aa, Brassica napus
  misc_feature (153)..(153): Xaa can be any naturally occurring amino acid
  misc_feature (195)..(195): Xaa can be any naturally occurring amino acid
MSAVYCGSKRSYFDDTPSPPPSSKRFRCYSPSNSPSWSSSSPSSSLDQLRAAFPHLELTVLVEALEEHGSDLSAAMKSLYALVSSAEEEKRAQESAADKETGTFTASGDDWVALLVREVTQSSGQDDAKFRAERVLEALEKTLRARAHEEAGXNSQEESVAVQQQVEALMKDNTVLKRAVAIQHERQKALEDANXQLEFFKQLIPQYQEKVRNLEVNNYALKLQLEQMEHGSSMMPQRFNPDVF

SEQ ID NO: 15821 - protein, 245 aa, Oryza sativa (japonica cultivar-group)
MKFNIANPTTGCQKKLEIDDDQKLRAFYDKRISQEVSGDALGEEFKGYVFKIMGGCDKQGFPMKQGVLTSGRVRLLLHRGTPCFRGYGRRDGERRRKSVRGCIVSQDLSVINLVIVKKGDNDLPGLTDTEKPRMRGPKRASKIRKLFNLAKDDDVRKYVNTYRRTFTTKNGKKVSKAPKIQRLVTPLTLQRKRARIAQKKQRIAKKKSEAAEYQKLLAQRLKEQRERRSESLAKRRSKLSAATTA

SEQ ID NO: 15822 - protein, 421 aa, Symbiodinium muscatinei
MPSAVENVALLFGGAVATTALSSAFVASGPVAQEAKTGLRAAGYAKSSQSSSQSMGAMAGVGAVAGLAVAGVAGRRAGKNRTSMEAVGVGINGFGRIGRQVARIAMKDPETELKLINASYDSDYLAYMMKYDTIHGKYDGTVEADGDSLIVDGEKIALSHTRDPAEIPFGEHGAEYVCESTGVFLTTEKVQGHLKAGAKKVIFSAPAKDDSHTIVMGVNEDTYDPSMECVSCASCTTNGLAPAVRVLQEKWGIKRGLMTTCHAMTASQPTVDGTSKKDWRGGRAGPGNIIPSSTGAAKAVAKVIPDVKGKLTGMALRVPTIDVSVVDLTVELEKETTYEEICAEMKKRSEGDMKGFLGYTDEALVSTDFETCPISCTFDAKAGIMLDPTFVKVVCWYDNEWGYSSRVVDLIKHMAAEDAKA

SEQ ID NO: 15823 - protein, 477 aa, Zea mays
MGLLGCSSLSLSTTTCTKYLLDSGSSSLEAGGGTIKSPRPHQIPSPHRVAVSPSPPTSRPTFRQRRERVAMASSAAAASSASALFRLPGSGHLRAPPRSGWRDHRRSRRATVRCSFAPVETARIKVVGVGGGGNNAVNRMIGSGLQGIEFYAINTDSQALINSQAQYPLQIGEQLTRGLGTGGNPNLGEQAAEESRETIATALRDSDLVFITAGMGGGTGSGAAPVVAQISKEAGYLTVGVVTYPFSFEGRKRSVQASTLEALEKLEKSVDTLIVIPNDKLLDVADENMPLQDAFLLADDVLRQGVQGISDIITIPGLVNVDFADVKAVMKNSGTAMLGVGVSSSKNRAQEAAEQATLAPLIGSSIEAATGVVYNITGGKDITLQEVNKVSQIVTSLADPSANIIFGAVVDDRYTGEIHVTIIATGFPQSFQKSLLADPKGARIVESKEKAATLAHKAAAAAVQPVPASAWSRRLFS

SEQ ID NO: 15824 - protein, 347 aa, Symbiodinium muscatinei
MATKIGINGFGRIGRMVFQAICDQNLLGTKLDVVGVVDMSTDAEYFAYQMKYDTVHGRFKHEVKIGEKDELIVNGHKIKCIQASREGPKALPWKDMGVEYVIESTGLFVEAEKAAGHIEAGAKKVIISAPGKGDLKTLVCGVNHTEYDKANHNVVSNASCTTNCLAPIVHVLLKEGVGIEKGLMTTIHSFTATQKTVDGVSAKDWRGGRGAACNIIPSATGAAKAVGEVLPTTKGKLTGMAFRVPTPDVSVVDLTFTAEKDTSIEEIDALFKKASETYMKGVLSFTDEELVSSDFIHNVNSSIYDSKATLQNNLKGEKRFFKIVSWYDNEWGYSNRVVDLLMHMISA

SEQ ID NO: 15825 - protein, 120 aa, Brassica oleracea var. italica
MAGLMKLACLVLACMIVAGPITSKAALSCGTVNTNVAACIGYLTVGALPRACCTGVSKLNSIARTTPDRQQACRCLKTAASALGSGLNAGRAAGLPKACGVNVPFPISLLTRCINCNSVK

SEQ ID NO: 15826 - protein, 290 aa, Oceanobacillus iheyensis HTE831
MQNKTIIVTGANTGMGLATTIELAKKGIHVIMACRDTKRGNEAKEKAMEESNSTNISLYQCDLGSMESISKFADQIKEDFDKIDGLINNAGVVSLKHTKTEDGFESMTGVNHLGHFLLTHLLLDVLKKSEQARIINVASGAYKAGTLDYNDMHFNNRSFNVIKGYGQSKLCNILFTLELNKHLEGTNVSTFALHPGAVSTSLGVDRQTGFGEKVHLLLRPFFLTSEEGAETAIYLATEPKIDHLSGRYFYKKKLQPTKYNKVNEDEAKKLWDWSIKELGMEHKAIEEVAP

SEQ ID NO: 15827 - protein, 121 aa, Brassica napus
WCGYHQFTSMAAMIGFHLSGYKPISFSSSISNSLHSKLSLLSLNPSPQPRKSTVIRMGGGPRTFPGGVSKWQWKRMQAKKQKQLLKARLGLRLRGCLCCGRRGLARRWLCLWLMGERSIVG

SEQ ID NO: 15828 - protein, 646 aa, Xanthomonas campestris pv. vesicatoria str. 85-10
MCGLAGMLLASPRLHGEQLDALVRPMGAALRHRGPDDAGTWCDAQAGVALAHQRLSILDLSPLGHQPMRSADGRYVLAYNGEVYNFAQLRAALSALGHRFRGHSDTEVLLAAVVEWGLDETLTRCNGMFAIALWDERDNCLFLARDRVGKKPLYYGWAGDTLVFGSELKALWQHPDFDNGVDRDALTLLLRLGYIPAPACIHEHTFKLMPGRVLRMDAQAVAAGAAAHRPDQAQQPFWNAREAMQRALATPFTGTDAQAEEQLDSVLRDAVALRMVADVPVGVFLSGGTDSSIVTAMMQAQSAQPVHTFSIGFEGSHHDEAPLAREVATHLRTDHTELYVSGADALAVVPGLPDMFDEPFADASQVPTALVARLARGGVTVALSGDGGDELFFGYGRYQRALRNWRMHGLVPGPLRRLMAVAARRNGESSRTGGLAALVAEAGARGIGDIYRNRISRWRDPAAVVLGATEPDSFYSLADPLHGSGTPADAMMLADFAAYLPDDLLCKVDRTTMAVGLEARAPLLDWRVAEFAWSLPLSLKYRDGVSKYLLKRVLCRYLPDAMVYRGKRGFGAPVSAWLRGDLHGWADDLLAHGALQREGVFAADSVARLWRDFNGGERKWHTHLWTVLMFQAWQAHWREQRAAVVR

SEQ ID NO: 15829 - protein, 465 aa, Oceanobacillus iheyensis HTE831
MAKNMPEIDEYKYGFHDKDVSIFRTEKGLTPRVVEEISKMKEEPEWMLEYRLKSLEHFYNRPMPQWGGDLSGLDFDEIVYYVKPSEKQGRTWDEVPEEIKQTFDKLGIPEAEQKYLAGVSAQYESEVVYHSLKEDLQDLGIIFKDTDTALKENEELFKEYFGKVIPYSDNKFSALNSAVWSGGSFIYVPKGVEATTPLQAYFRINSENMGQFERTLIIVDEGASVHYVEGCTAPVYTTNSLHSAVVEIIVKKDAYCRYTTIQNWANNVYNLVTKRATCDANATMEWIDGNIGSKLTMKYPAILLKGEGARGNTLSIALAGKGQLQDAGAKMHHLAPNTSSTIVSKSISKQGGKVSYRGLVHFGRKADGARANIECDTLIMDNESTSDTIPYNEILNDNISLEHEAKVSKVSEEQLFYLMSRGLSEEEATEMIVMGFIEPFTKELPMEYAVEMNRLIKFEMEGSIG

SEQ ID NO: 15830 - protein, 340 aa, Crocosphaera watsonii WH 8501
MLLLSAFFSGSETAITAFDNFKLRGLIDKEGDTSGVYRLVLENRRRFITSLLIGNNLVNNFSAILTSNLFAMWLGSAGLGVATAVVTIVVLIFGEITPKTLAILNTRAFFRWCIRPIFWLSKVLSFLKVVQIFERITQKTIQVFQGKSDKNLQAGESLTDLQLMIEILGGKGKLDLYKHQLLNKALRLDQLIAKDVVKPRLEMITISHESSLQEFIDLSLETGYSRIPVQGESKDHIVGIVNLKKALQTLQSVPKERRSQIKVTEAMDNPIYIPETKRAPSLLKEMLQQRLHIAIVVDEYGGTVGLLTLEDILEELVGEIYDESDSPYVRQNLSISDRLV

SEQ ID NO: 15831 - protein, 291 aa, Vibrio cholerae O1 biovar eltor str. N16961
MNEDNSQNSEGPSRKSFFERLSQLFQGEPKDRQELVDVIRDSEVNDLIDHDTRDMLEGVMEIAEMRVRDIMIPRSQMVTIDRTHNLDALVAIMTDAQHSRYPVISEDKDHVEGILLAKDLLKYLGSNCAPFNIQEVIRPAVVVPESKRVDRLLKEFREERYHMAIVVDEFGGVSGLVTIEDILEEIVGDIEDEFDDEEQKDIRQLSKHTFSVKALTTIEDFNHTFGTKFSDEEVDTVGGLVMTAFGHLPARGEVVDIAGYNFKVTAADSRRVVALQVTVPDLEALSHVAEE

SEQ ID NO: 15832 - protein, 320 aa, Symbiobacterium thermophilum IAM 14863
MEKTAVLLVNLGTPSAPEPDAVRPYLAEFLGDWWVIDKPRWQWLPILHGIILRVRPPRVAKIYQKIWLPEGSPLLHYSRLQQAALQQRLEPEGIRVALGMTYGQPSVKSALEELRGWGVRRLLVLPLFPQYSSTTTAAVWSKVQKALDGWRDLPEQIFIRDFPTHPKYLAFLTERISGYIAEKGRPDALVLSYHSIPQAYTASGDDYAAQCESTTDAVRDRFPDLKIVMGYQSKFGNDPWLEPATDEVLRELVRTGHRHVAVMAPGFAADCIETLHELEVEYAEEFVKAGGERYDYLPAANDHPLFIDCLEDLVRRHLPR

SEQ ID NO: 15833 - protein, 291 aa, Glycine max
  misc_feature (79)..(79): Xaa can be any naturally occurring amino acid
  misc_feature (183)..(183): Xaa can be any naturally occurring amino acid
  misc_feature (232)..(232): Xaa can be any naturally occurring amino acid
SSQLRRPPPTQCYHLRTPVKPTPSNARSPSYLKKKTNHDATALVHILFIRLAKVLGRDYCDHKEKTRQGSDREFLYQIXEEVIKAGATTLGIGDTVGITMPFEIRQLIADIKANVPGAENVIISMHCHNDLGHATAIAFEAAQAGAMQLEVTINGIGERAGNASLEEVVMALKCRGDQVLGGXYTGINTRHLLKTSKMVVEEFSGMYLQPHKAVVGDNAFLHESGVHQAGLXSIGSTYEIMSSEDIGLDANETGEGIWLFWHEHIRRQLSASTKLPKEDLKGVFGILGQVL

SEQ ID NO: 15834 - protein, 436 aa, Oceanobacillus iheyensis HTE831
MTVETKLPFNQDYINQFSEDRNEPEWMTKLRSSALGMVDSLDMPKPDKTKITNWNFTEFKHEYKEEKTISSLSELPEELKDYFDNENKPNNLLIQRNQSVAYSTLQDDLASKGVIFTDIFTAMRDYSDLVEKYYMKDAVAVDQNKLTALHAALVNGGIFVYVPKNVQIEEPLQAVFWQEDADNALFNHVLVVAEEGSSVTYVENYLSHNDEQASVANIITEVFAHDNAQVAYGAVDNFAAGTTTYVNRRGVGHRDAQINWALGQMNDGNTVSENITYLLGDNATSEAKAVSVGRGKQTQNFTSSIRQYGKQTDAYILQRGVMKGAASTIFNAIGKIEHGGTKSNSEQESRVLMLSEKARGDANPILLIDEDDVTAGHAASVGRVDPIQMFYLMSRGLKQEEAERLVIHGFLAPVVSQIPIESVRKQLTQVIERKVY

SEQ ID NO: 15835 - protein, 636 aa, Oryza sativa
MGGFLAAAIVVFSLRLNLDTTASAWEDKDFFKSFQLESNNTTPSSCGLPCMKLSCSGQDTILLDTNKYYLGRPYKVTAIDYKQGLLTVIPLADEENSSSSPCPLLKSIRPSVITGNPYYDIGFENPCRLYDAPYYAALVSCSTEFALASVPGPATDNDCIAGPISCLSNQTHFSYLVAVYVTMSFLPLDCEVISDGLIPIPRFYYSDYSSSTFRKSAERILNFSDTTIWWFNDDCSHPAQCEEQGGRCAFSSQRNQTFCMRPGSHAKVIAATSSVAAFVVLLLMVATALYLSLKTKYNEEIHLKVEMFLKTYGTSKPTRYTFSEVKKISRRFKVKVGQGGFGSVYRGELPNGVPVAVKMLENSEGEGDEFINEVATIGRIHHANIVRLLGFCSEGTRRALIYEYMPNDSLEKYIFSQDSDTSQELLVPSKMLDIALGIARGMEYLHQGCNQRILHFDIKPNNILLDYNFSPKISDFGLAKLCARDQSIITLTAARGTMGYIAPELYSRNFGEISYKSDVYSFGMLVLEMVSGRRNSDPSVESQNVVYFPEWIYEQVTIGQDLELGREMTEEEKAIMRQLAIVALWCIQWNPKNRPSMTKVVNMLTGRLQNLQVPPKPFFSADSHPVLQDSGHAGII

SEQ ID NO: 15836 - protein, 134 aa, Triticum aestivum
  misc_feature (41)..(41): Xaa can be any naturally occurring amino acid
  misc_feature (47)..(47): Xaa can be any naturally occurring amino acid
  misc_feature (75)..(75): Xaa can be any naturally occurring amino acid
GPGNSRVRPNAVPVYSCKPRLGIGLAVASFFRFVLVATVAXMLLVAXDAGIFCGQVTSAFSPFIFFSRGNGANPXLAFCNGVKSLAGATPSTAYKQAACKCIKNAAGGLNACKGAGIPFKCGGSGPYSINAYGD

SEQ ID NO: 15837 - protein, 674 aa, Synechococcus sp. WH 7805
MCGIGGVFLADRRQTLDRQLLVNMAAIQSHRGPDGFGVECIDAAGVGFCHARLSIIDLNESRARQPFLSDDRQVLMAHNGEFYDFQRIRADLTAQGVRFSTKSDSEILLRLYQRQGLESTLPLLRGEFAFALFDAVDDCLYLVRDRFGIKPQYWTMTPEGVVFGSELKVLFAHPLVERRFTSEGLFHQLMQTMVPGTTAFAGVHQVQPGHVLKVQRRGDRLEVSESTYWDVDFPRLDQRDSTLTEADHIANVRAALLEAVEMRMVADVPVGCYLSGGIDSCSILGLASAVSQGPVKAFTIGFDDARYDETPIAAEMAEATGAEQDVMRLSGRELYGHMEQTLWHTERTIYNTLAVAKYLMSRHVNNVDYKVVMTGEGSDELFGGYPAFRRDMFLHGLDDLPQSDRQDWESLLQTNNSLVQGAMLAADQVDDPDLDAVVGFTPSCLQPWLACAPLVPDLLAEEHRQALAEYSPGKAIAEQLNPQQLEGRHALDKAQYVWIKTMLEGQILTWGGDRVDMANSMEARPAFLDHHLAAAAVQVPPELRIKGKTEKYVLREAMAGLLPEVLYKREKFAFMAPPAHTEPEKWAQMKQLADDYLSDEAIDAAGLLSKEGVRTLFARHDDPVTTDAERVQMDAVINHLLGVQMLHRMFVAADVPAQAREQADHLGWRVLMPV

SEQ ID NO: 15838 - protein, 493 aa, Aspergillus oryzae
MVYIGIPKNYTQSPSSFMATPSLTINHEVTQDLDSTNAFEGPEKLLEVWFAPSANELGSSQPTGLKAVPEEVWKDMLDLVNCQVLSIVSSEDVDAYLLSESSMFVWPHKLILKTCGTTTLLSGLPRILEIAALFAGFPKSAAPSGGVGIAAAPYRVFYSRKNFLFPDRQRGPHRSWRDEVRTMDRLFLNGSAYMIGKMNGEHWYLYLTEPNTLLTPPASPKGDEEVTETKFLQIPEGGLPQGDDANDETLEVLMTDLDEENAKQFYLENATAVAEKRYRNFDKDNSDHVDVFSNNSDMDLEDTDGTRILPPELTTEGHALGTVVSESCGLSDVYSKEKFPDSRIDAYLFTPCGFSANGVIPTPDPKANTHYFTVHVTPEPHCSYASFETNVPHSQNGQTTAGIVKQVVNIFKPGRFTVTLFENKPSDAELSGIGEAKYIERQAARRKSQVEHIEGYRRVDRIVHDLDGYDLVFRYYERLDWKGGAPRLGEERI

SEQ ID NO: 15839 - protein, 358 aa, Leifsonia xyli subsp. xyli str. CTCB07
MLRGGDKAGGDEKRSSMKIGILTSGGDCPGLNAVIRGAVLKGDRVLDAEFAGFRYGWRGVVEGDIMPLDRHSVRGLSRQGGTILGSSRTNPFEGEKGGPENIQRMMDENGIDAIIAIGGEGTLTAARRLTDAGLRIVGVPKTIDNDLAATDYSFGFDTAVEIATEAIDRLRTTAESHQRCMVLEVMGRHVGWIALHSGMAGGAHAILIPELPQSVDRICEWVESVRDRGRAPVIVVSEGFHLDTMEEAHSHKGLDAFNRPRLGGIGEMLAPLIQERTGIESRATVLGHMQRGGVPSAYDRVLATRLGMAAVDAAYEGRWGSMVALRGTDVVNVSIADATGGLKTVPQARYDEAALLFG

SEQ ID NO: 15840 - protein, 768 aa, Acinetobacter sp. ADP1
MVTVREQLPERLSELAEETTVEHAEKTQLDLASWFKRVSEILDGAELKQLEKVAQLTLKKVLETTVNHPSNTFTTGIGMADILAHLHVDEDTLSAAVLYRSVREGIIPIEEVRDKFGEQVHSLVTGTLAMGKLSEMIEKNKRLEDHFNNNQREHLSGIYKMLIAVTEDVRVVLIKLAERTFTLRELAKSSRERQERVAREILTIYAPLAHRLGIAQLKWELEDLAFRYLAPERYKEIATLLNEKRLEREQYIQSVILKLKTELSEYGINAEITGRVKHIYSIYRKMKSKNLSFDQLYDIRALRVLVQNIPECYHSLGIVHQIWRHIPHQFDDYITNPKANGYRSLHTAVIAENKSLEVQIRTHEMHEEAELGVCSHFNYKEGSKTTDRSFNHRLHSLRSVLEHYQERNETTVHKNDDEAENFEELQNFEDFEKIYVFSRDGDIKELPRGSTVLDFAYHVHTEVGNKCYAARVNQRYVPLTYTLKTGEQVEILTKKDREPNRDWLVNSLGYIRTARARDKLRHWFRQQDRSKNLEIGKEILNKELSRLAIHPKSIDLSDYCAHFNVKSGDDVLIALVSGDVSLHSLINQINRQMHLDQDEPELVLKPTLNPRASHTLSAHGILIDGLDNVELHIAQCCQPVHGESIGGYITLNRGVSIHKVGCPDYQRMIKNEPERAVEADWEMQPTRGQSVQIVIDAYDRRGLLKDLTQVIFSDQINIRQVNTISEADGIANMKLLIEVKGLAQLSRLLARLEQQPGIISARRLIQGN

SEQ ID NO: 15841 - protein, 394 aa, Azoarcus sp. EbN1
MLIEVKVPQLSESVSEATLVSWHKKEGDAVSRDENLIDIETDKVVLETPAPADGVLVKIVKADGENVTSGDLIAQIDTEAKAPAGAKPAEAVQAVAAPAPAVAAATTGGAPSPAARKILEEKGVAAGDVSGTGRGGRVTKEDAVAAQPRAAAPVAAAVRGGDRAEERVPMTRLRARIAERLIQSKNENAILTTFNEVNMAPVMALRKQYGEKFEKAHGVRLGFMGFFVKAAVAALKKYPIINASVDGNDIVYHGYIDIGIAVGSPRGLVVPIIRDADQMSIADIEKKIAEYGQKAKDGKLSLEELTGGTFSISNGGVFGSMLSTPIINPPQSAILGIHATKDRPVVENGQIVIRPINYLALSYDHRIIDGREAVLGLVAMKEALEDPARLILDV

SEQ ID NO: 15842 - protein, 948 aa, Mycobacterium sp. JLS
MLDSHQPRFADRHIGPDSDAVAVMLDTIGVATLDDLAAKALPANILDALSADGVAPGLELLPAPASETEALAELRALAESNTVAVSMIGQGYFDTLTPPVLRRNILENPAWYTAYTPYQPEISQGRLEALLNFQTMVSDLTGLEVANASMLDEATAAAEAMTLMQRAGRSKSNRLAVDADLYRQTAAVLATRARPLGIEIVTADLRQGLPEGDFFGVIVQLPGASGALVDWAPLVADAHDRGALVAVGADLLALTLVTPPGEFGADVSFGSTQRFGVPMGFGGPHAGYLAVHTKHARQLPGRLVGVSVDADGSPAYRLALQTREQHIRRDKATSNICTAQVLLAVIAAMYASYHGAEGLTSIARRVHGHARAVATGLAEAGVDVVHDAFFDTVLVNVPGRAAEIRDAAKSHGINIWLVDADHVSVSCDEATTADHVAAVLSAFGATRGGKPFAGPEIATRTSEFLTHPAFTRYRTETEMMRYLRSLADKDIALDRSMIPLGSCTMKLNAAAEMEPITWPEFARQHPFGPESDAPGLRRLIADLQTWLTGITGYDEISLQPNAGSQGEYAGLLAIKAFHDANGAPERDVCLIPSSAHGTNAASAALAGMRVVVVGCRPNGDVDLDDLRAKVTENAERLAALMITYPSTHGVYEHDVAEICAAVHDAGGQVYVDGANLNALVGLARPGRFGGDVSHLNLHKTFCIPHGGGGPGVGPVAVRAHLAPYLPGHPLADELGDDYTVSAAPYGSASILPITWMYIRMMGAPGLRAASLTAIASANYVARRLDEYYPVLYTGENGMVAHECILDLRTITKQTGVTVDDVAKRLADFGFHAPTMSFPVAGTLMVEPTESESLSEVDAFCEAMIAIRAEIDQVGSGAWPVDDNPLRGAPHTAESLLVTEWEHPYTREQAAYPLGKGFRPKVWPPVRRIDGAYGDRNLMCSCPPVEAFA

SEQ ID NO: 15843 - protein, 556 aa, Pyrobaculum aerophilum str. IM2
MGIPGGQIMPLFDALYGQDIETILFRHEQGAIHAAEGYARVSGRPAVVAVTSGPGATNLVTGITDAYMDSTPVVAITGQVVTSVFGRDGFQETDILGVVTPVTKFTYQVKKPSEATSAFKTAYEISIIGRPGPTLIDLPRDIQLAPAPDYEEKIIVNREKFIPPPPDEDKLRLAAKYLIEAKRPVILVGGGVLWSGATPEVLEVSRLLNAPIVSTLPGKTAVPHDYPLYMGPAGMHGRVEADAALANADVILAVGTRFSDRTWGRFKELIENVTSGKLKLIHIDIDKSEIGKNVKPTVGIVGDAKIALRKLIDYIQSGAIQNNRFISWLLNIRKMYDEAMSKIANSTPGFHPWKALKVIRNAAPRNTITVTGVGSHQMWAEIAWDVYEPGSFITSAGLGTMGFCVPAALGAKLADRSRPVLCIDGDGSFQMTMNNLALVRDYNLPIVVTIFDNRALQLVKQWQVYLYKRRIIATEFSPRPDFLKIAEAYDIEGVRPESYEELERVVSRALKNDEPLIVDLIIDSEYDIVLPWVKPGDWLTSVIMPEGMHVQLTYED

SEQ ID NO: 15844 - protein, 357 aa, Aster yellows phytoplasma
GKTTLTAAITQVLSTRGLAKSRAYDQIDNAPEEGGRGITIKTSHVEYETEKRHYAHVDCPGHADYVKNMITGAAQMDAAILVVSGADSVMPQTREHILLARQVGVPKIVVFLNKCDLSPDEQILELVEMEVRELLSQYDFPGDDIPVIRGSALKALEGDAHYVAQVNELIETLDTYIEDPVREVDKPFLMPVEDVFTITGRGTVVTGRVERGQVKAGDEVEIVGLKETRKTIVTAVEMFKKDLDFAQAGDNVGALLRGINREDVQRGQVLAKPGSVKPHSKFVAQVYVLTKEEGGRHTAFFSQYRPQFYFRTTDITGVVELQGDVKMVMPGDNAELVVTLNNPIAIEEGTKFSIREG

SEQ ID NO: 15845 - protein, 423 aa, Actinomadura verrucosospora
MTRRAVAITGMGVVAPGGTGRKAFWNLLTDGRTATRTISLFDPGGFRSRIAAECDFVPVAVGLSPREVRRMDRAAQLATVSAREAIDDSGLEIDELDPARTAVSLGSAVGCTMGLEAEYVVVSDQGRDWLVDHTYGAPHLYRHLVPSSLAAEVAWVCGAEGPVALISTGCTSGLDAVGHGARVSREGGADVALAGATDAPISPITVACFDASGATSPNNDDPEHASRPFDREGKGFVLGEGAAVFVLEELEHARRRGAHVYCEVAGYATRGNAYHMTGLKPDGREMAEAIRVAMEAARIGPDDIDYINAHGSGTRQNDRHETAAFKRSLGHRAYEVPVSSIKSMVGHSLGAIGSIEVAACALAIEHGVVPPTANLHTPDPECDLDYVPLAARERPVGTVLSVGSGFGGFQTATVLTAPGRRAS

SEQ ID NO: 15846 - protein, 147 aa, Ashbya gossypii ATCC 10895
MSLKRITKELNDLGRDPPTSCSAGPVGDDLYHWQASIMGPPDSPYAGGVFFLSIHFPTDYPFKPPKISFTTKIYHPNINANGNICLDILKDQWSPALTISKVLLSICSLLTDANPDDPLVPEIAHIYKTDRAKYEATAKEWTKKYAV

SEQ ID NO: 15847 - protein, 329 aa, Burkholderia mallei ATCC 23344
MNSETLPAELPATLTIASRESRLAMWQAEHVRDALRKLYPACDVKILGMTTRGDQILDRTLSKVGGKGLFVKELESALADGRADLAVHSLKDVPMALPEGFALAAVMSREDPRDAFVSNDYASLDALPAGAVVGTSSLRREAMLRARHPRLDVRPLRGNLDTRLAKLDRGDYAAIILAAAGLKRLGLAARIRALLDVDDSLPAAGQGALGIEIAARRADVAAWLAPLHDHASALAVEAERAVSRALGGSCEVPLAAHAVWRGGELHLTGSVSTTDGARVLAAHAHARAATAADALALGRRVSDALERQGARAIVDALVAASAQAQKGGA

SEQ ID NO: 15848 - protein, 228 aa, Staphylococcus aureus subsp. aureus MSSA476
MPKLILCRHGQSEWNAKNLFTGWEDVNLSEQGINEATRAGEKVRENNIAIDVAFTSLLTRALDTTHYILTESKQQWIPVYKSWRLNERHYGGLQGLNKDDARKEFGEEQVHIWRRSYDVKPPAETEEQREAYLADRRYNHLDKRMMPYSESLKDTLVRVIPFWTDHISQYLLDGQTVLVSAHGNSIRALIKYLEDVSDEDIINYEIKTGAPLVYELTDDLEVIDKYYL

SEQ ID NO: 15849 - protein, 343 aa, Sporidiobolus salmonicolor
MAKIDNAVLPEGSLVLVTGANGFVASHVVEQLLEHGYKVRGTARSASKLANLQKRWDAKYPGRFETAVVEDMLKQGAYDEVIKGAAGVAHIASVVSFSNKYDEVVTPAIGGTLNALRAAAATPSVKRFVLTSSTVSALIPKPNVEGIYLDEKSWNLESIDKAKTLPESDPQKSLWVYAASKTEAELAAWKFMDENKPHFTLNAVLPNYTIGTIFDPETQSGSTSGWMMSLFNGEVSPALALMPPQYYVSAVDIGLLHLGCLVLPQIERRRVYGTAGTFDWNTVLATFRKLYPSKTFPADFPDQGQDLSKFDTAPSLEILKSLGRPGWRSIEESIKDLVGSETA

SEQ ID NO: 15850 - protein, 994 aa, Burkholderia mallei ATCC 23344
MKSSGSARATRRNAVSSSSAPAHAEPPARRAAKPARKLDGAAARPLAPTNAASAKPQGRTREDKDRPLFEDIRYLGRLLGDVVREQEGDAVFDVVETIRQTAVKFRREDDKAAAQTLEKMLRKLTPEQTVSVVRAFSYFSHLANIAEDRHHNRRRRIHALAGSAAQAGTVAYALDKLKQAGDASSKTIKQFFEGALIVPVLTAHPTEVQRKSILDAQHDIARLLAERDQPLTARELAHNEALLRARVTTLWQTRMLRDARLTVADEIENALSYYRATFLDELPALYADIEEALAEHGLRARVPAFFQMGSWIGGDRDGNPNVTAATLDEAISRQAAVIFEHYLEQVHKLGAELSVSNLLVGASDALKALAAASPDQSPHRVDEPYRRALIGVYTRLAASARVRLGEGTVPVRSAGRGAAPVRATPYADAEEFAADLRVLTDSLALHHGESLATPRLAPLMRAAEVFGFHLASIDLRQSSDIHEAVVAELLARGGVEADYAALPEADKLRVLLAALADPRPLRSPYLDYSDLAKSELGVLERAHAIRAQFGARAVRNYIISHTETVSDLVEVLLLQKETGLFEGTLGTPHANARNGLMVIPLFETIADLRNASDIMRAFFALPGVGELLAHQGHEQEVMLGYSDSNKDGGFLTSNWELYRAELALVDLFDERGIKLRLFHGRGGTVGRGGGPTYQAILSQPPGTVNGQIRLTEQGEVIASKFANPEIGRRNLETVVAATLEATLAPHSNAPKQLPAFEAAMQTLSDAAMASYRALVYETPGFTDYFFSSTPITEIAELNIGSRPASRKLQDPKNRKIEDLRAIPWGFSWGQCRLLLTGWYGFGSAVAAYLDGAPDAAERGKRVALLKKMNKTWPFFANLLSNMDMVLAKTDLAVASRYAQLVADKKLRKHVFERIVAEWHRTADALAEITGAHARLAANPLLARSIKNRFPYLDPLNHLQVELIKRHRAGDTNARLRRGIHLTINGIAAGLRNTG

SEQ ID NO: 15851 - protein, 340 aa, Pseudomonas putida KT2440
MARKISYQQAINEALAQEMRRDSTVFIIGEDVAGGAGAPGEDDAWGGVLGVTKGLYHQFPGRVLDAPLSEIGYVGAAVGAATQGLRPVCELMFVDFAGCCLDQILNQAAKFRYMFGGKAVTPLVMRTMYGAGLRAAAQHSQMLTSLWTHIPGLKVVCPSSPYDAKGLLIQAIRDNDPVIFCEHKLLYSMQGEVPEEVYTVPFGEANFLRDGDDVTLVTYGRMVHVALEAANNLARQGIDCEVLDLRTTSPLDEDSILESVEKTGRLVVIDEANPRCSMATDISALVAQKAFGALKGPIEMVTAPHTPVPFSDALEDLYIPDAAKIEAAVRKVIEAARSAA

SEQ ID NO: 15852 - protein, 167 aa, Nicotiana tabacum
VPLEDFGHGHPDPNLTYAKDLVNILYGENGPDFGAASDGDGDRNMILGRRFFVTPSDSVAIIAANAQDAIPYFQSGPKGLARSMPTSGSLDRVAQKLNLPFYEVPTGWKFFGNLMDAGKLSICGEESFGTGSDHIREKDGIWAVLAWLSILAYRNKDKRSGEILVSV

SEQ ID NO: 15853 - protein, 319 aa, Candida glabrata CBS 138
MSYPHKIAAAHDDPTLMFNHTCLRIKDPAKSIPFYQKHFGMELLNKLDFPEMKFSLFFLSFPKDNVAKNSEGKNDVFSTSGILELTHNWGSENDADFKICNGNEEPHRGFGHICFSYADINAACSKLEAEGVSFKKRLTDGRMKDIAFALDPDGYWIELIRYDRENSPKKDVGSRFNHTMVRVKDPKASLEFYQNVLGMKLLRTSEHEAAKFTLYFLGYKVSSEDNEFSHEGVLELTHNWGTENEADFKYHNGNDKPQGYGHICVSCKDPAKLCNEIEQTYGDKIQWAPKFNQGKLKNIAFLKDPDGYSIEVVPHGLIV

SEQ ID NO: 15854 - protein, 172 aa, Triticum aestivum
MAARAVTMLAAAALVVVAAVLAGGASAQSTSGCTQTLIGMSPCLNYITGNETAPSKSCCSQLATVVSSKPECLCVALNADPAALGLGTVNKTRALGLPDQCGVKTPPLSNCASAPTTSPSSGAPAGQTPTSSGAGSKSTPTADVGSGGASLQSSAGIIAGFIVAAVYAVSAM

SEQ ID NO: 15855 - protein, 974 aa, Trichodesmium erythraeum IMS101
MVATYKSNIQSSYQIQLANQNQGQRPIDFSQRHIGLTSSEIQQMLEVLGISSLEDLIDKTVPEKIRFQKPLNLPKSLSENAALAQIKEIISKNQIFRSFIGMGYYDCITPPVILRNILENPGWYTAYTPYQAEIAQGRMEALLNFQTMITDLTGLEIANASLLDEATAAAEAMSMTYGLCKTKAEVFFVDSACHPQNIEVVKTRAQPLGIEVIVGDFRTFTFDKPIFGALLQYPATNGAIYDYREFVEKVHKVGGLVTVAAELLSLTLLTPPGEFGADIAVGNTQRFGVSLGYGGPHAAYFATKEAYKRQTPGRIVGVSQDANGNPALRLALQTREQHIRREKATSNICTAQVLLAVIAGMYAVYHGPGGLKQIAENIHNLTFKLATGLKQLGYQIGAELFFDTIEIKLGADSPVKSAKEIIDAAENLGINLRTFDEQTVGISLDETTTEVDVQNLWQIFASGEKFPNIENENISTLSQSYYARTSNYLTHPVFKSYHSETNLLRYIHRLQSKDLSLTTSMIPLGSCTMKLNATAEMIPVTWPEFANIHPFSPISQTQGYQIIFQQLEEWLAEITGFAEISLQPNAGSQGEYTGLLVIREYHAHRGEAHRDICLIPESAHGTNPASAVMSGLKVVVVKCDAQGNIDIADLQTKAEKHKDNLAAIMITYPSTHGVFEEEILDICEIIHAHGGQVYMDGANMNAQVGLCRPAEIGADVCHLNLHKTFCIPHGGGGPGMGPIGVKSHLAPFLPGHSVINLGGENSSGAVSAAPWGSASILPISWMYIAMMGTDGLTEATKIAILNANYIAQRLGSYYSVLYKGKYGFIAHECILDLRPLKKLAGIEVEDIAKRLMDYGFHAPTVSWPVAGTIMVEPTESESKDELDRFCDAMISIRQEIEEIETGKADKNDNLLKNAPHTAESLMVDEWKHGYSRQRAAYPAPWTREHKFWPAVGRVDNAFGDRNFVCSCLPIEAYS

SEQ ID NO: 15856 - protein, 954 aa, Pseudomonas syringae pv. tomato str. DC3000
MTDRIELTTANEFIARHIGPRAADELAMLHTLGFDSIEALSDSVIPESIKGTSVLNLPAGQSEADALASIKAIASKNQLFKTYIGQGYYNTHTPAPILRNLLENPAWYTAYTPYQPEISQGRLESLLNFQTLISDLTGLPIANASLLDEATAAAEAMTFCKRLSKNKGSQQFFASSHCHPQTLDVLRTRAEPLGITVVVADETELGDVSDYFGALLQYPASNGDVFDYRELAERFHGANALVAVAADLLALTLLTPPGEFGADVAIGSAQRFGVPLGFGGPHAAYFSTRDAFKRDMPGRLVGVSVDRHGKQALRLAMQTREQHIRREKATSNICTAQVLLANIASMYAVYHGPRGLTQIANRVHHLTAILAEGLSQLGLNAEQAYFFDSLTLHTGGRTAALHAAARARHINLREIDDQRLGLSLDETTSQSAVEVLWDIFASTGQTLPDFTALAASVKSRLPAALLRQSAILSHPVFNRYHSETELMRYLRKLADKDLALDRTMIPLGSCTMKLNAASEMIPVTWAEFGNLHPFAPAEQSAGYQQLTDELEAMLCAATGYDAISLQPNAGSQGEYAGLLAIRAYHQSRGDEHRDICLIPSSAHGTNPATANMAGMRVVVTACDARGNVDIEDLRAKALQHREQLAAIMITYPSTHGVFEEGIREICGIVHDNGGQVYIDGANMNAMVGLCAPGKFGGDVSHLNLHKTFCIPHGGGGPGVGPIGVKSHLAPFMPGHARMQRKEGAVCAAPFGSASILPITWMYIRMMGGEGLKRASQLAILNANYISRRLEEHYPVLYTGTNGLVAHECILDLRPIKDSSGISVDDVAKRLIDFGFHAPTMSFPVAGTLMIEPTESESREELDRFCDAMIKIREEIRAVEDGTLDKDDNPLKNAPHTAAEIVGQWSHPYSREQAVYPVDSLIENKYWPPVGRVDNVFGDRNLVCACPSIESYQEA

SEQ ID NO: 15857 - protein, 82 aa, Nicotiana tabacum
SRVETTPFEGQKPGTSGLPKKVKVFIQPHYLQNFVQATFNALGAERVKGATLVVSGDGRYYSKDAIQIITKMAAANGVRRVW

SEQ ID NO: 15858 - protein, 500 aa, Xanthomonas campestris pv. vesicatoria str. 85-10
MVIHRPASRHRCARWLMLRSLTVCCRARMSYAIVWFRRDLRLEDNPALRAALDAGHHPIPLYIDAPHEEGEWTPGAASRTWRHRSLAALDGALRALGSGLVIRSGDSAQVLDEVIAQTGAVAVYWNRKYEPATQPRDAQIKRDLRERGIEVQSCNAALLFEPWQLSTQQGGPYKVFTPFWRNALTQLQLPAAMDAPRRLPPLPASLKTDALDTLQLVPGLQWDQGFWEHWQPGEAGAHEMLEIFIDGALSGYRENRDRPDRVGTSQLSPHLHFGEIAPWRIASTLEAHRTARNGAEIDGYIRQLGWRDFAYHLLHHFPDTTNQNLNPRFAGFDWATVDPVALQAWQRGRTGIPIVDAGMRQLWHTGWMHNRVRMIVASFLCKHLRIHWIEGARWFWDTLVDADLANNTLGWQWVAGTGADAAPYFRVFNPVTQAEKFDPHATYITRWVPELGKLAVKERFAPWLHPLALARFAPEYPRNPIIGLAEGRDAALAAYAKSRA

SEQ ID NO: 15859 - protein, 222 aa, Prochlorococcus marinus str. MIT 9312
MSIFVGNLPFRAEREDVLQLFAPFGEVLNCSLPLERDTGRKRGFAFVEMADEAIESAAIDGLQGTELMGRPLRINKAEPRGSGGSRRGGRGGGNNGGGYGGGGYGGGNNGGGYGGGGGGGGGGYGGGNNGGGYGGGGGGYGGGNNGGGYGGGGGGYGGGNNGGGYGGGNPEPKTSYTNNSSGAEGWEDRSYGNSSENSEYESGRSRRKRGVSNESNLSNEEN

SEQ ID NO: 15860 - protein, 139 aa, Nicotiana tabacum
AETPKTDIDFWKALFPVAVAHTIGHVAATVSMSKVAVSFTHIIKSGEPAFSVLVSSLLLGETSPLPAYLSLLPIIGGCALAAVTELNFNLIGFMGAMVSNLAFVFRNIFSKKGMKGKSVGGMNYYACLSIMSLLILTPF

SEQ ID NO: 15861 - protein, 440 aa, uncultured bacterium 580
MSSEQILIPDIGDFDSVDVIEVLVNVGDSIEYDTPLITVESDKASMDIPAPKDGVIKDIKIKVGDKVKEGSLIGMIEVSEPKLDVKSEIKSSPKDDKKEDIEKVTNTPSRPAPEPPQKKVAKETPIPIGESVLNDENKKAHASPSVRKFARNLGVNLSFVNGSGNKNRILIEDIERFVKGELTKPRSENMGASFAPIPMPNIDFSEFGKVETKSLSKIKKLSGANLHRNWVTAPHVTQFDNADITDLEIFRKSMQKEAEKRGAKLTLLAFLIKASVNALKAYPMFNSSLSPDGNNLIMKSYYNIGFACDTPDGLVVPVVKDVQKKDVIDIAEDLGNLSEKARARKLKMDEMQGGCFTISSLGGIGGTKFTPIINCPEVAILGVSRASMQPVFNKSSEDFEARLMLPLSLSYDHRVVDGADGARFTSHLCMMLSDVRRLLL

SEQ ID NO: 15862 - protein, 187 aa, Cryptococcus neoformans var. neoformans B-3501A
MLAAKNCLNKSLRALRPLTERSASPVIARSARASPLLRSRATSARTFVTSLPRQSQPLPPPPTSTLSHDEYEHVSERDMETLNESLEIFCEDFGNGNWEIEYSSGVLNLTLPPYGTYVLNKQPPNLQIWMSSPVSGPSRFEYINGSWVHHRKEGVKLGELLSGELKEILEKSGNEAAAGVWDGVGLP

SEQ ID NO: 15863 - protein, 186 aa, Beta vulgaris subsp. vulgaris
KQIQQMVRFIRQEAEEKANEISVAAEEEFNIEKLQLVEAEKKKIRQEYERKEKQVDIRRKIEYSMQLNASRIKVLQAQDDLVNSMKEEASKELLRVSGDHHHYKKLLKELVVQSLLRLKEPAVLLRCRKDDVHLVEHVLHSAKEEYAEKASVHSPEIVVDDIHLPPGPSHHHTHGLSCAGGVVLAS

SEQ ID NO: 15864 - protein, 333 aa, Frankia sp. CcI3
MGTGTGENQADTRPPGAVASPDGPPPLRAAAERPGVVQFRMNSCRAAGFLSCRRVTTGRRHDRPRAGESQATTGNAGRAGRRAGRISGMPTLVLLRHGESIWNRENLFTGWVDVDLSEKGAKEATRGGELLRESGVLPDVVHTSLLTRAIRTAWLALDAAGRTWVPVRRTWRLNERHYGGLQGLNKAETLEKFGAEQFQLWRRSYDTPPPEIGPEQVSGVDERYDDLAPDVIPRTECLADVVARMLPYWYDAIVPDLRTGRTVLVAAHGNSLRALVKHLDHISDTDIAGLNIPTGIPLRYELDDQLGVVSSGYLDPDAAALAAAAVAAQGTKK

SEQ ID NO: 15865 - protein, 118 aa, Sorghum bicolor
MARLAVAIAVVAAVVVVLAATTSEAAISCGQVSSAIALCLSYARGQGFAPSAGCCSGVRSLNSAARTTADRRAACNCLKNAARGISGLNAGNAASIPSKCGVSVPYTISTSTDCSRVS

SEQ ID NO: 15866 - protein, 422 aa, Streptomyces antibioticus
MRRRVVITGVGVMAPGGIGVKNFWSLLSEGRTATRGITFFDPAPFRSRVAAEIDFFPEKHGLGPQKIRRMDRAAQLAVIATREAVADSGLDLDATDPHRRGVTVGSAVGATTGLDQEYRVVSDDGRLGLVDHRYAPPHLYGHFVPSSFAAEVAWASGSEGPSTVVSTGCTSGLDSLGHAVELIREGSADVMIAGATDAPISPITMACFDAIKATTPRNDDPAHASRPFDRSRNGFVLGEGHAVLVLEELGAAQRRGARIYAEIGGYASRCNAFHMTGLRPDGREMAEAIRVALDEARLNPEDIDYINAHGSGTKQNDRHETAAFKRSLGDHAYRTPVSSIKSMVGHSLGAIGSIEIAACVLAMAESVIPPTANLHDPEPECDLDYVPITAREARLDRVLSVGSGFGGFQSAMVLTRPERNTA

SEQ ID NO: 15867 - protein, 122 aa, Sorghum bicolor
MARSMKLAVAIAVVAAAAAVVLAATTSEAAVTCGQVSSAIGPCLSYARGQGSGPSAGCCSGVRSLNSAARTTADRRAACNCLKNAARGIRGLNVGKAASIPSKCGVSIPYTISTSTDCSRVS

SEQ ID NO: 15868 - protein, 765 aa, Stenotrophomonas rhizophila
MTVSTPSLSTPTRTPPATPAPQLILATDLDGTFLAGDAAARHRLYRLVDQHPGIALIFITGRGLEAVMPLLSDPAIPRPDYVVCDVGATVVDGHTLQPLQPLQSMIDAHWPGEHVVAAAMRPFTALQRQDVPQERRCSYFCDPQTLAPLRAQIQAAAQALGCDVLYSADRYLDILPPDTDKGRTLAALARLLDLPRERILVAGDTLNDLSMYTAGFRGVCVGDSEPALTEATATLATTFHAQAPGCGGILEAIEHFALLADDDRYLYPPKQARAAGADLVMVYHRLPFDEVMENGVLVQRPPRSPNGIIPSLLSFFEGGQKGSWVAWGIDDPKRGPFQTHLAVDAERYPTLTAARVPLSRQEVDIFYKRFSKEAYWPMLHVFWERARFREDDWQVFLKVNRKFAEATAAEAAHGATVWIHDYNLWMVPATLRELRPDLKIAFFHHTYFPSADVFNVVPWRREIIGSLLSCDYIGFHIPRQVENFVDVVRGAVPAERLAWESCAPRFLTYGCAVGLDTMTTRLRVGDREIALGAHPVGTDLRRIHNVLARSDVRNDIFKLRREIGARKLVLSVERLDYTKGTLAKLEAFERLLEQHPERQGKVTLLMVCVPAAREMTVYRTLQNQIEQAVGRINGRFSRLDWTPVRFFAQALPFEEVVAHYAAAQVMWITPLRDGMNLVAKEFVATHGIEGSSGVLVLSEFAGAAAELKGAVLTNPHDPADLTAGLLQALSMPEEEATGRMRQLFGSVEYYDVDRWGREFLEAVRG

SEQ ID NO: 15869 - protein, 358 aa, Aster yellows phytoplasma
GKTTLTAAITQVLSTRGLAKSRAYDQIDNAPEERERGITIKTSHVEYETEKRHYAHVDCPGHADYVKNMITGAAQMDAAILVVSGADSVMPQTREHILLARQVGVPKIVVFLNKRDLSPDEQILELVEMEVRELLSQYDFPGDDIPVIRGSALKALEGDAHYVAQVNELIETLDTYIEDPVREVDKPFLMPVEDVFTITGRGTVVTGRVERGQVKAGDEVEIVGLKETRKTIVTAVEMFKKDLDFAQAGDNVGALLRGINREDVQRGQVLAKPGSVKPHSKFVAQVYVLTKEEGGRHTAFFSQYRPQFYFRTTDITGVVELQGDVKMVMPGDNAELVVTLNNPIAIEEGTKFSIREGG

SEQ ID NO: 15870 - protein, 545 aa, Staphylococcus aureus subsp. aureus NCTC 8325
MNKDKQLHNDKINLSQLVLLGLGSLIGSGWLFGAWEASSIAGPAAIISWVLGFLVIGTIAYNYIEIGTMFPQSGGMSNYAQYTHGSLLGFIAAWANWVSLVTIIPIEAVSAVQYMSSWPWHWAKPMRYLMENGSISTYGLLAVYLIIVIFSLLNYWSVKLLTSFTSLISVFKLGVPMLTIIMLMLSGFDTSNYGHSASTFMPYGSAPIFAATTASGIIFSFNSFQTIINMGSEIKNPEKNIARGIAISLSISAVLYIILQSTFITSMPQSMLQHSGWNGINFNSPFADLAILLGINWLAILLYIEAFVSPFGTGVSFVAVTGRVLRAMEKNGHIPKFLGKMNEKYHIPRVAIIFNAIISMIMVTLFRDWGTLAAVISTATLVAYLTGPTTVIALRKMGPTMTRPFRAKILKVMAPLSFVLASLAIYWAMWPTTAEVILIIILGLPIYFFYEYRMNWRNTKKQIGGSLWIIVYLIVLSILSFIGSKEFKGLNMIHYPFDFIVIIIVALIFYYIGTTSSFESVYFRRATRINTKMRESLNNESKSSH

SEQ ID NO: 15871 - protein, 335 aa, Schizosaccharomyces pombe
MPSCTSFPIGTRKSKLAVIHQNYREELEKHNPHLEFPIISRDTIGDEILSKAWLEFKRQLAKSLWTRELEALLVTNQCRILVHSLKDLPSENARWYGIACIPKRSCPLDAIVFKAGSHYKTVADLPPGSVVGTSSIRRRALLARNFPHLRFVDIRGNVGTRLAKLDAPDSQFDCLVLAAAGLFRLGLKDRIAQMLTAPFVYYAVGQGALAVEVRADDKEMIEMLKPLQHQETLYACLAERALMKRLQGGCAIPIGVQTDVLAISNSSYRISLLGTVLSADGLRAAFGNAEAVVSSEEEAEELGITVALALLKNGAGPILEEHQRSSDSEESLKNY

SEQ ID NO: 15872 - protein, 337 aa, Streptococcus mutans UA159
MKRIAVLTSGGDAPGMNAAVRAVVRKAISEGMEVCGINRGYAGMVEGDIFPLDAKGVSNILSRGGTFLQSARYPEFAKLEGQLKGIEQLKKHGIEGVVVIGGDGSYHGAMRLTEHGFPAVGLPGTIDNDIVGTDYTIGFDTAVNTATDALDKIRDTSFSHGRTFVVEVMGRNAGDIALWSGIAAGADQIIIPEEPYDIKEVVANVKNGYLSKSKNHHLIVLAEGVMHGEEFAAQMKEAGDNSDLRVTNLGHILRGGAPTPRDRVIASWMGAHAVELLREGKGGLAIGIQNEELVEHPILGSAEDGALFSLTEQGEIVVNNPHKARLDFAALNRDLSN

SEQ ID NO: 15873 - protein, 565 aa, Shewanella sp. MR-4
MQPTPLRCQIGRDNRPLQGSRLAPSRFSLFSIFYTDFGVIMLDANLKNQLQTYLQNLKRPVELVVSADESRKSQELTSLANDIVSLSTLVSLKEAQGPRTPAMTVVNPELNTQISFAGLPMGHEFTSLVLALLHTGGHPIKLSDEIIEQIRNLPGKYEFETYVSLTCQNCPDVIQALNMMAAINPNITNVMIDGALFQDEVASRNIMAVPSVYLNGEVFAAGRISIGEILNKLDTGAASRKAEELSQKAPYEVLVVGGGPAGAAAAIYAARKGLRTGVVADKFGGQVAETVGIENFISVKATEGPKLVANLEAHVRDYEVDIMDNQKAVKLASDGLFELELASGAKLRSRTILLATGARWREMNVPGEKEYRGKGVAYCPHCDGPLFKGKRVAVIGGGNSGIEAAIDLANIVEHVTVLEFDSKLRADDVLQRKAASMGNIKIITQAMTTEVTGDGTRVDGLNYTDRATGESHHIALAGIFVQIGLVPNAEWLKGTVDLTPRGEIIVDERGQTSVPGVFAAGDVTNSPYKQIIIAMGSGANASLGAFDYLIRHSDDSTETTATKAA

SEQ ID NO: 15874 - protein, 965 aa, Ashbya gossypii ATCC 10895
MLRTFTEWSILRSNTQLGAFSCPVRRHYHLISGKSIAKTIRDNALREVKEIRQQVPDFNPKLKILQVGSRPDSSAYVRMKLKASTESGVECDVEKLPEDITQLELLRKIEKINSDAEVHGILIQLPLPKHLDEVTVTNAVDHEKDVDGFHRYNVGELAKRGGKPYFLPCTPNACIQLLKECGVEIRGKQAVVIGRSDIVGTPVATMLKNLDATVTVAHRHTTNLPQVLSTADIVVAACGVPNYIKGEWLKDGAVVIDVGINYVQDSTKKSGQRLVGDVDFESAKEKASHITPVPGGVGPMTVAMLVQNVLTAAKRSLQKDAEVPVITPLPVNFEMPVPSDIDISRKQNPKHISQVAAELGIRDHELELFGHYKAKISPKLLQRLHANQNANYVLVAGITPTPLGEGKSTTTMGLVQALSAHLGKRAIANVRQPSMGPTFGVKGGAAGGGYAQVIPMDEFNLHLTGDIHAISAANNLLAAAIDTRMFHEHTQKNDATFYNRLVPKKGGSRKFTKSMLKRLQKLGINKTDPDSLSPKEIKRFARLNIDTDTITIKRVVDVNDRLLRQITIGQAHTEKGFTRTTGFDITVASELMAILALSKDFADMRERVGRMVVAANLDGEPITAEDVGCAGAVAALLKDAIKPTLMQSLEGTPVLVHAGPFANISIGASSVIADRIALKLVGTSPHSPEGTDAGYVVTEAGFDFTMGGERFLNIKCRSSGLKPNTIVIVATVRALKLHGGGPEVKPGQPLTPHYTEENLELVTRGAANLQKQIRNAKLFGVPVVVAVNRFESDTDAEIEIIQKAAKEAGAHDAIAANHWAEGGKGAVTLAEAVINSCKQPSSFKFLYDVDQPVTEKLSTIVRKMYGGSAIDLSPTAQKKIALYTAQGFDKLPICIAKTQYSLSHDATLKNVPSDFVFPIRDIRASIGAGYLYALAAEIQTIPGLSTNAGYMNVEVSDDGEIEGLF

SEQ ID NO: 15875 - protein, 217 aa, Shewanella sp. ANA-3
MNQSLLAPFGTAIERVEAGLEALRQGQGVLVVDDEDRENEGDLIFAAESLTNAQMAMLIRECSGIVCLCLPDEKVKALELPPMVENNSSQYGTAFTVSIEAKVGVTTGVSAADRVTTIKTAIADNAKPSDLARPGHVYPLRAQPGGVLTRRGHTEGTIDLMQLAGLKPAGVLCEVTNPDGTMARLPEIIAFGAEHNMPVLTIEDIVIYRKSLLANVG

SEQ ID NO: 15876 - protein, 362 aa, Clostridium thermocellum ATCC 27405
MGKYKIAVLPGDGIGPEVIEQAVKVIEAVGEIYNHSFELKEGLLGGCAIDATGEPFPKETLELCKSSDAVLLGAVGGPKWDNLPGDKRPEAGLLGIRGALGLYANLRPAVIYQALKGASPLRSDIVKDGIDIMVVRELTGGMYFGERGRVQTENMGQAAFDTEKYSEFEVERIARLAFETAMKRNKKLTSVDKANVLESSRLWREVVNRVASDYPEVELNHMYVDNAAMQLVRNPAQFDVIVTSNMFGDILSDEASMITGSIGMLPSASLGEGSLGLYEPIHGSAPDIAGQDKANPIATILSVAMMMKYSFGLEDAFRAIENAVVNVLGMGYRTADIASPDTPRENIVGTKEMGRLIISKLK

SEQ ID NO: 15877 - protein, 503 aa, Acidobacteria bacterium Ellin345
MDLLATKPLDVLMSEASETGEHSLKRALGPVNLMMLGVGAIIGAGIFVLTGAAAAQFAGPAIVFSYILAGIACVFAGLCYAEFASLIPIAGSAYTYGYATLGEIFAWIIGWDLVLEYAFGAATVASGWSSTLVAFLQDYGVSLPPRICDVHGSIWVQYQGRWSPLATVQSVLDTAHIDYHTLPNVVCIFNLIAFLAILAVTTLLVIGIKESANFNTGVVFVKLFAVLVFIGVAGAFVIKNPTVAQANWHPFLAFGWAGVIRAAGVVFFAYIGFDAVSTAAQEAKNPQRDMPIGILGSLIICTVLYILVSGLLTGVVHYDRLNIGAPVSLAIRETGRKWGSYIVNAGALAGLSTVMLVMLLGQSRVFYSMAHDGLLWKWAGEIHPKLRTPWKSTIVVGICVAFFGATIPIGDLGTLVSIGTLLAFVIVCAGIMILRKRRPDLPRPFKTPLVPLVPILGILTSLLMMVFLPLVTWIRLVVWLLIGFIIYFTYGRKHSKVQAMQKK

SEQ ID NO: 15878 - protein, 332 aa, Rhizobium sp. NGR234
MNTHHARVLIIGAGPAGYTAAIYAARANLKPLLVTGLQAGGQLTITTDVENYPGFAEPVQGPWLMEQMRQQAENVGTEVVYDIITSVDLSERPFRLKGDSGDTYIADALIIATGAQARWLGLPSEKTFNGFGVSACATCDGFFYRNKEVVVVGGGNTAVQEALYLSNLASKVTVVHRRDRFRAESILQDRLLAKPNVEVVWNHVIDEVIGEHEPRKSVTGVRIRDVKTGDVKELSAHGLFVAIGHDPATALFRGLLDMDEAGYIKVGSWSTKTTVPGVLAAGDVIDPVFRQAISAAGMGCMAALEAEKFLAEHSPDPVARAVEAREAEMVGA

SEQ ID NO: 15879 - protein, 522 aa, Acidobacteria bacterium Ellin345
MPDRSEAPDLSTQAQVRSTAAKDEGFIQGLGLTSATTLVMGSMIGSGVYIVAADITRLVQSPALLIGAWLVTGFMTITAALAYGELAAMMPKAGGQYVYLREALGPLTGFLYGWTLFMVIQTGTIAAVGVAFGKFLGIFFPSISSSHWIWHIAHVPPIHIGPMVLGNMDVGLNTQNLMGILTIIFLSVLNVYGVKLGALVQNVFTFAKTAALLGLVVLGITIGRTAEAMAANFHGHFFEGAGWTSVHPVQVGVGGPMALVITVTVLAVAQVGSLFSADAWNNVTFTAGEVKNPQRNLPLSLAIGTGAVILLYCLANFVYLLVLPMVGDPNGTTVLARGIQHATEDRVATAVMQQIFGAAGAAIMAVLILISTFGCNNGLILSGARVYYAMAKDGLFFKSAGKLHPEHKTPAASLFVQCIWCCILCVSGSYGQLLDYIVFAVLIFYILTIVALFVLRLKKPDVPRPYRAIGYPILPAIYILMALFIDIVLLLYKPQYTWPGLIIVLLGIPVYFIWSRVNRATA

SEQ ID NO: 15880 - protein, 177 aa, Medicago truncatula
MALISSAAVTTVNRVSANLVAPFTGLKSSAGFPVTKKTNNDITSITSNGGRVNCMQVWPPIGKKKFETLSYLPPLTEDQLAKEVEYLIRKGWVPCLEFELEKGFVYRENHSSPGYYDGRYWTMWKLPLFGATDSSQVLKELAEAKAAYPESFIRIIGFDNVRQVQCISFIAHTPATY

SEQ ID NO: 15881 - protein, 109 aa, Streptomyces coelicolor A3(2)
KLAGLKLRNVKTGELSDLPVTALFIAIGHDPRTELFKGQLDLDPEYLKVDAPSTRTNLTGVFGAGDVVDHTYRQAITAAGTGCSAAVDAEPFLAALSDEDKAEPEKTAV

SEQ ID NO: 15882 - protein, 504 aa, Cucumis sativus
MDMNVPNYKLGKTLGIGSFGKVKIAEHALTGHKVAIKILNRRKIKNLDMEEKVRREIKILRLFMHPHIIRLYEVIETPSDIYVVMEYVKSGELFDYIVEKGRLQEDEARNFFQQIISGVEYCHRNMVVHRDLKPENLLLDSKCNVKIADFGLSNIMRDGHFLKTSCGSPNYAAPEVISGKLYAGPEVDVWSCGVILYALLCGTLPFDDENIPNLFKKIKGGIYTLPSHLSSGARELIPSMLVVDPMKRITIPEIRQHPWFQAHLPRYLAVPPPDTMQQAKKIDEDILQEVVKMGFDRNQLVESLRNRIQNEATVAYYLLLDNRFRVSSGYLGAEFQETMETGFNRMHPSDPTNPAVGHRLPGYMDYQGMGLRAQFPVERKWALGLQSRAHPREIMTEVLKALRELNVAWKKIGHYNMKCRWLPGIPGHHEGMINNPVHSNHYFGDKSTIIENDGVVKSPNVIKFEVQLYKTREEKYLLDLQRVQGPQFLFLDLCAAFLAQLRVL

SEQ ID NO: 15883 - protein, 180 aa, Medicago truncatula
MALISSAAVTTVSRASSTQANLVAPFTGLKSSAAFPVTKKTNNDITSIASNGGRVNCMQVWPPIGKKKFETLSYLPPLTEEQLAKEVEYLIRKGWVPCLEFELEKGFVYRENHSSPGYYDGRYWTMWKLPLFGATDSSQVLKELAEAKAAYPESFIRIIGFDNVRQVQCISFIAHTPATY

SEQ ID NO: 15884 - protein, 155 aa, Zea mays
MAMETCFRAWALHAPAGSKDRLLVGNLQVLPSKRALAPLSVGRVATRRPRHVCQSKNAVDEVVVADEKNWDGLVMACETPVLVEFWAPWCGPCRMIAPVIDELAKDDSPNVASTYGIRSIPTVLIFKGGEKKESVIGAVPKSTLTTLIDKYIGSS

SEQ ID NO: 15885 - protein, 367 aa, Acidobacteria bacterium Ellin345
MRKRPRSSEPDYAPRVQKLDHALCGLKLDSILITHLPNIRYLCGFTGSNGLLLSIRGKRTFFTDGRYTEQAEQEVTGTRVVVPKGSLIAEAAKLIAASKITRLGFEADRTTVTREQAIKKALPKSVKLTPTASVVDRIRMVKDEHELALIKEAVIMGADLLTPAIETIRPGVKESEVTAEIEYAARRWGAEAMSFETIVAAGVRSALPHGRASNALIPKRGFVILDLGVILHGYCSDMTRTVHVGSVPRRSREIFQAVLDAQLAATAAVKPGATAGDVDFAARSVLKRAKLDRYFIHSTGHGVGLEIHEQPRIARDQKEVLEPGMVITIEPGVYLPGEGGVRIEDMVVVTERGHQVLTPATKELLEL

SEQ ID NO: 15886 - protein, 359 aa, Ashbya gossypii ATCC 10895
MGKKIVFNISSEFQLKALLGEGAYGIVCSAVHKPSGEVVAIKKIEPFERTLFSLRTLREIKILKHFQHENIISIYDIQKPASFDTFNEVYIIQELMQTDLHRVIATQPLSDDHIQYFIYQTLRGLKALHGSGIIHRDLKPSNLLLNANCDLKICDFGLARIEHGGAADLEHPQAGMTEYVATRWYRAPEVMLTAAQYTKAIDIWSSGCILAELFMKRPLFAGKDYKHQLMLIFELLGTPQGDDLAAVKSRRAREYIATLPRYRRASLRAVIPHANPLGLDLLQRMLVFDPRRRITAADALRHPYLATYHDPRDEPDGTPIPASFFDFDHHKDKLTTRDLKRMLWDEVFRDTHAPVRPDA

SEQ ID NO: 15887 - protein, 203 aa, Physcomitrella patens
MAARFALVMLATMAMVYAAQAGDPELTTDFFVPMGTNKADLNGDYFTSMVFRGEPAVPEGAKIGVKRITSDSFPVLTGLGVSSAQIKYLPGGINPPHTHPRGTELLIVQKGILTVGLVDTTNKFYTKELQAGDVFVFPRGLVHYQINLSHKPVIAYVGFSSSNPGTVSLPATLFGSGIPDNVHMAAFRVNQHVVEKLQAPFKM

SEQ ID NO: 15888 - protein, 588 aa, Methanosarcina barkeri str. fusaro
MRIAILNKDKCQPRQCSKECEKYCPRVRTGDETIVFEEDGKPVISEELCVGCGICVHKCPFKAIMIIGLPETLTEPTHRYGVNGFALFGLPVPRVGKVTGILGPNGIGKSTSVQILSGTLIPNFGQEKGDWDTVLEHYAGTALYDYFKDVVDGKVKVSQKPQYVDLIPKAFKGKTSELLENTDERGVLDELIDYLDLNSIVDRKISELSGGELQRVAIAACAAKDAQFYFFDEISPYLDIYQRINVARLIQEISKDRTVLVVEHDLALLDMLADVIHIAYGEPAGFGVVTLPKSVRVGINQYLKGYLPEENIRIRPEAIKFEVHPPREDHHLRSMVTFNGFSKKFGDGFSLKAAGGSLREGEVLGVVGPNGIGKSTFVKVLAGEIKPDEGDPGIDVKISYKPQYIKADIPVRVQDFLRGISKHFGTSYYEVEIANPLQLDKIYDNMLTDLSGGELQRVAIAACLSQEADLYILDEPSAHLDVEQRSMVTKVLNRFAENNNKTALVVDHDIYMIDMLSQRLVVFEGKPSVYGEAHGPFSMEDGMNRFLKNLGITFRRDEETRRPRVNNLGSRLDREQKESGNYYYSAGD

SEQ ID NO: 15889 - protein, 580 aa, Nocardioides sp. JS614
MRRPRTDPSEDIMTIPQQQPSGMPFRRYRPFPPIDLPDRSWPQRTITQAPRWLSTDLRDGNQALIDPMSPARKLKMFDLLVRMGYKEIEVGFPSASETDFSFVRQLIESDHIPDDVTISVLTQAREDLIERSVQSLIGVPRANIHLYNALAPLFRRVVFRASKDEVKDIAVRGTQLVMKHVENNLDTTVIGYEYSPEIFTSTELPFSVEVCEAVSDVWQPDDGREIILNLPATVEVATPNVYADQIEWFSRQLTRRANTVISLHPHNDRGTAVAATELAVMAGADRVEGCLFGHGERTGNVDLVTLGLNLFSQGVDPQVDFSDIDEIRRTVEYCTQLPVHPRHPYAGDLVYTAFSGSHQDAIKKGLEDLDRQAAEQGVPVGELPWEAPYLPIDPKDVGRTYEAVIRVNSQSGKGGVAYILKAEHKLDLPRRAQIEFSRVVQERTDAEGGEMSPDEIWSVFSAEYLDRRTPLELNSVHTSSAAGEKDALDVNVYVHGELMSLHGVGNGPIAAFVSAINELPNDWDVRVLDYAEHALSAGGDALAAAYVECLVRDQVYWGVGVDANIVTASLKAVISAVNRA

SEQ ID NO: 15890 - protein, 426 aa, Sinorhizobium meliloti
MGEFIIKMPDVGEGVAEAELVEWHVKPGDPVREDMVLAAVMTDKATVEIPSPVTGKVLWLGAEVGDTVAVKAPLVRIETAGEAGEAAPDSIPEALAEQVLDEPVAVSSRLEAKAPPQPEKPAPKPAPAPREAPDLSAKPLASPAVRLRARESGIDLRQVAGTGPAGRITHEDLDLFISRGAEPLPAQTGLVRKTAVEEVRMIGLRRRIAEKMSLSTSRIPHITYVEEVDMTALEDLRATMNRDRKPEQAKLTILPFLMRALVKTVAEQPGVNATFDDHAGVIHRHAAVHIGIATQTPAGLTVPVVRHAEARGIWDCAAELNRLADAARTGTATRDELTGSTITISSLGAIGGIASTPVINHPEVAIVGVNKIAVRPVWDGAQFVPRKIMNLSSSFDHRVIDGWDAAVFVQRLKTLLETPALIFVEG

SEQ ID NO: 15891 - protein, 503 aa, Bartonella henselae str. Houston-1
MPAVQETIRQVREIDVDQYKYGFETKIKTDKAPKGLNEDIIRFISAKKCEPEWMLKWRLQAFRRWLTMQEPDWARIEYPKIDFQELHYYAAPKNHTGPKSLEEVDPELLATYEKLGIPLKEQEILAGVRKQSDPSTFDESVYASGQVAVDAVFDSVSVVTTFKKELARAGVIFCSISEAIIEHPALINQYLGTVVPVGDNYYAALNAAVFTDGSFVYIPKGVRCPMELSTYFRINERNTGQFERTLIIADEDSYVSYLEGCTAPQRDENQLHAAVVELVALKNAEIKYSTVQNWYPGDKEGNGGIYNFVTKRGDCRGDNSKISWTQIETGSAITWKYPSCLLRGDNSRGEFYSIAVANGHQQIDSGTKMIHLGKNTSSRIVSKGISAGFSNNTYRGQVTAHRKAHNARNFTQCDSLLIGNDCGAHTVPYIEAKNATAQFEHEATTSKISDDQLFYVMQRGIPEEEAIALIVNGFVKEVIQKLPMEFAVEAQKLIGISLEGSVG

SEQ ID NO: 15892 - protein, 328 aa, Trichodesmium erythraeum IMS101
MANYAPAIETMTANYLEKWVEMGTLTWYPEIRNYTFDIASLLFMGSDESSQTKLVSLFEEWVKGLFSIPLSLPWTRFGKSLRCRQKLLQHIEEIILQRQQQQNLGEDALGILLQAQDKEVNGLSLDELKDQILLLLFAGHETLTSAIASFCLLTSQHLDVLTRLRQEQKQFSAIEPLTLENLKRMTYLDMVLKEVLRLIPPVGGGFRQVTQDCEFCGYSIPKGWLVQYQIAKTHQDETLYPDDKNFDPERFAPENAVDKQKVFGYVPFGGGMRECLGKEFARLEMKIFAVMLLRGYEWELLPEQDLSVVAAPTPYPRDGLKVKFRKVE

SEQ ID NO: 15893 - protein, 656 aa, Crocosphaera watsonii WH 8501
MAIADFVRNSGKVIALEPENDEHYFERQNLYFLNGQYKLALEDVRQAIKLNPKEAEYYQQSGILRNSLADTQGALEDYNKAIKFNPNYAQAYYTRGSLYSTAFSDYGKAMADFTKAIELNPKFGEAYISRGLLQAVLSDFQGALEDFNQAILLSKDPDPKMNLLWNGTPVEDYESLGMYRRIADNLLEGVEENDQNSRTAGIHKYRGDIRLQLKDTEGALQDYNEAIKLAPKQADAYVARGDYYTQMQQAEKAKADYNKAITIYSESIENPTIKASLFIHYSDRAEVYSKIKNYQATIADYTQVIDIGGPNLFLSYESRAVIYQQVKDYEAAIKDFSKAIAIQPEFIRIYGRRAIVYLEMKNYEAALTDLSKIIELGKNSQETEEFVVVFAYLQRGKLYQQAKNYQGAIEDFSSLIKLQPNSPESVEVYGRRGLSYAQLKNYPAAIEDFSSLIKSQPKNHQGYTYRCRVYIELKDYNQAMKDCNQAVAIAPNNPEVYFARAGVHSGLKNYSAAIKDADKIIEIAPDFPVGYWVRGAMYFAQNNPSKALSDYELALSKNDKFAPAISSIAYVKYKQGDKQKAIELWQKALTIQDDLTGTKLALAVALYQEGQPEKALSLAKEAIKIDERFKDINHLQDNLWGKQLIQDTKPLLNKVK

SEQ ID NO: 15894 - protein, 226 aa, Glycine max
MGSDSNLGGSPSASSPSAKRTRDPEEEVYLDNLRSHKRYLSEIMASSLNGLTVGDSLPDNLMDSPARSESMFSFRDDMSFLQYSPMSEDSDDLRFCETPVHSCSSQLDSLPSSPVSPHRYQRPQNASSSAPSSSSNASHVSTVTCPQPRQRGSDSEGRFPSSPSDICHSADLRRAALLRSVQMRTQPPSPASLDLPFVSNPESAPNIDPEERSCPYMKSLVDEREY

SEQ ID NO: 15895 - protein, 140 aa, Helicobacter pylori
  misc_feature (6)..(6): Xaa can be any naturally occurring amino acid
EEPNLXAILIRRSALKLKLLVVDDSSTMRRIIKNTLSRLGYEDVLEAEHGVEAWEKLDANADTKVLITDWNMPEMNGLDLVKKVRSDSRFKEIPIIMITTEGGKAEVITALKAGVNNYIVKPFTPQVLKEKLEVVLGAND

SEQ ID NO: 15896 - protein, 333 aa, Pseudomonas syringae pv. tomato str. DC3000
MTLRIAINGFGRIGRNVLRALYTQGYRQDLQVVAINDLGDSEMNAHLLRFDTVHGPFSGTVECDKESLTVNGDRISVSAIRNPAELPWKAQDIDVVFECTGLFTSRDKAAAHLTAGARKVIISAPASGADATIVYGVNHDTLRQSHQIISSASCTTNCLAPVAQVLHRELGIESGLMTTIHAYTNDQNLIDVYHTDPYRARSATQSMIPSKTGAAEAVGLVLPELAGKLTGMAVRVPVINVSLVDLTVTLKRETTAEEVNALMKEASQHSKVLGYNTLPLVSHDFNHNPLSSIFDANHTKVSGKLLKVLSWYDNEWAFSNRMLDNCLALHNAE

SEQ ID NO: 15897 - protein, 142 aa, Brassica napus
RGGPRRPEKEEKLLLVNFFFSSAVVVTARVKATMGVPLTAWKSSFAFPVTRRATTAIPSIVGTGGGVNCLQVWPPIGKKKFGTFFYFPDLTEVEWGKEVDYFFRTRWIPGVEFKLEHGFVARGHGSTPGYYDGRYWPMWKLP

SEQ ID NO: 15898 - protein, 112 aa, Kineococcus radiotolerans SRS30216
MKLLTAIIKPHKLDDVKSALESYGIQGLTISEASGYGRQRGHTEVYRGAEYTVDLVPKVRVEVLVDDVDIADVVEVVVKSAQTGRIGDGKVWTQHVEDVVRVRTGEHGPDAL

SEQ ID NO: 15899 - protein, 394 aa, Fusobacterium nucleatum subsp. vincentii ATCC 49256
MAKEKYERSKPHVNIGTIGHVDHGKTTTTAAISKVLSDKGLASKVDFDQIDAAPEEKERGITINTAHIEYETANRHYAHVDCPGHADYVKNMITGAAQMDGAILVVSAADGPMPQTREHILLSRQVGVPYIIVYLNKADMVDDEELLELVEMEVRELLTEYGFPGDEIPVIRGSSLGALNGEEKWIEKIMELMDAVDSYIPTPERAIDQPFLMPIEDVFTITGRGTVVTGRVERGVIKVGEEIEIVGIKPTTKTTCTGVEMFRKLLDQGQAGDNIGVLLRGTKKEEVERGQVLAKPGSIHPHTNFKGEVYVLTKDEGGRHTPFFTGYRPQFYFRTTDITGAVTLPDGVEMVMPGDNITMTVELIHPIAMEQGLRFAIREGGRTVASGVVSEIIK

SEQ ID NO: 15900 - protein, 547 aa, Erwinia carotovora subsp. atroseptica SCRI1043
MANHPRAGQPARQSDLINVAQLTSQYYVLRPEIGNTAHAVKFGTSGHRGSAGRHSFNEPHILAIAQAIAEERKKQGISGPCYVGKDTHALSEPAFISVLEVLAANGVDVIVQLDNGFTPTPAVSNAILVHNRQGGALADGIVITPSHNPPEDGGIKYNPPNGGPADTNLTSVIETRANALLADELRDVKRITLDQALQSGHVHEQDLVQAYVEGLTSVVDMAAIQRAGLKLGVDPLGGSGIAYWQRIAEHYKLDLTLVNDAVDQTFRFMSLDHDGVIRMDCSSEFAMAGLLALRDKFDLAFANDPDYDRHGIVTPAGLMNPNHYLAVAINYLFQHRPQWGQSVAVGKTLVSSAMIDRVVADLGRKLVEVPVGFKWFVDGLYDGSFGFGGEESAGASFLRFDGTPWSTDKDGIIMCLLAAEITAVTGKNPQQHYDELAQRFGAPSYNRIQASATHAQKAALSKLSPEQVSASTLAGDPITARLTAAPGNGASIGGLKVMTENGWFAARPSGTEEAYKIYCESFLGVEHRERIEKEAVEIVSAVLASAK

SEQ ID NO: 15901 - protein, 119 aa, Triticum aestivum
  misc_feature (73)..(73): Xaa can be any naturally occurring amino acid
MAGLVKLACLVLACMIVAGPITSKAALSCGTVNTNVAACIGYLTQGGPLPRACCTGVSKLNSIARTTPDRQQXACRCLKTAASALGSGLNAGRAAGLPKACGVNVPFPISTSINCNGVK

SEQ ID NO: 15902 - protein, 282 aa, Pyrobaculum aerophilum str. IM2
MVFPRDYLRSLVDYYAEGEEVPHMREYAGGKIRLEQVEEGIYQLLINYPERLNIITLEMRRAIGEALGDLLKTEARVLIVASAGDRAFSAGGDMGEFLKTTTTDLLDWGKTLVELEELPIPTIAELKGYVLGGGLELALSCDIRIASTNAVIGLPEVRLGMVPASGGLTRFVKALGPLRAKYYILLGKRMTAEEALKLGLVDEVVPPEGLRGRVLEIARELRELPPLALKEAKKLVSMIADAPREVGFDLERKTFGVLRYSRDFEEGIKAFFEKRRPNYTGA

SEQ ID NO: 15903 - protein, 180 aa, Lycopersicon esculentum
MASSIVSSAAVATRGNGAQASMVAPFTGLKSTASFPVSRKQNLDITSIASNGGRVSCMQVWPPINMKKYETLSYLPDLSDEQLLSEIEYLLKNGWVPCLEFETEHGFVYRENHKSPGYYDGRYWTMWKLPMFGCTDATQVLAEVQEAKKAYPQAWVRIIGFDNVRQVQCISFIAYKPEGY

SEQ ID NO: 15904 - protein, 478 aa, Pyrobaculum aerophilum str. IM2
MIIVKNYINGEFIEVEERRPKHSPIDGSVIAETPVSKREDAKAAIDAAYDALKAWSQLPAIKRAEYLYKLYEIIKSREEELINILMVEGGGIYKKAWGEVVFTERLVRNAAELARHYGGKTLQSDAEGVVSMVFKRPKGVVGVITPWNYPLSISMKKIAHALATGNTIVYKPASETPVTGFKIAEMIHQAGFPKGVFNLVVGPGSTVGDEIVVNKKVSHVTFTGESATGREIASKAGGALKTVTLELGGSDPLIILDDADLNLAVRIAVFGAFFHQGQICTSSKRIIVHERVYDVFVKKFVERVSQLKVGDPRDRTVEQGPLISPRQADEMERFYQDAVSRGGRALTGGKRAGAYFWPTVFVDVDRNFRIMREEVFGPIRPVVPVKNDDEAVEVANDTEYGLSAAVVTTNINRAFKIAEAIESGMVHINDVTMLEESHVPFGGIKASGFGREGGEWSFHETTYDRWLTITLRERKYPI

SEQ ID NO: 15905 - protein, 436 aa, Arabidopsis thaliana
MGKGPLSFRRLSSIRHRKKGSAVKDDSAQTSTPSSPPPPLPIHAGGSAVGATGKAKKKTGGARLWMRFDRTGAMEVVECDKSTIIKRASVPARDLRILGPVFSHSSNILAREKAIVVNLEVIKAIVTAEEVLLLDPLRPEVLPFVERLKQQFPQRNGNENALQASANVQSPLDPEAAEGLQSELPFEFQVLEIALEVVCSFVDKSVAALETEAWPVLDELTKNVSTENLEYVRSLKSNLTRLLARVQKVRDELEHLLDDNEDMADLYLTRKWIQNQQTEAILAGTASNSIALPAHNTSNLHRLTSNRSASMVTSNTEEDDVEDLEMLLEAYFMQLDGMRNKILTVREYIDDTEDYVNIQLDNQRNELIQLQLTLTIASFAIAAETLLASLFGMNIPCPLYSIHGVFGYFVWSVTALCIVLFMVTLGYARWKKLLGS

SEQ ID NO: 15906 - protein, 166 aa, Glycine max
MAFVTTAEVCDANPQLILSGELRALQPVFQIYGRRQVFSGPIVTLKVFEDNVLVREFLEEKGNGRVLVVDGGASLRCAILGGNPVVQAQNNGWAGIVVNGCIRDVDEINGCDIGVRALASHPMKANKKGMGEKHVPVNIAGTRISDGDWLYADTDGILISRTELSV

SEQ ID NO: 15907 - protein, 180 aa, Lycopersicon esculentum
MASSVMSSAAVATRGNGAQASMVAPFTGLKSTASFPVSRKQNLDITSIASNGGRVSCMQVWPPINMKKYETLSYLPDLSDEQLLSEIEYLLKNGWVPCLEFETEHGFVYRENHKSPGYYDGRYWTMWKLPMFGCTDATQVLAEVQEAKKAYPQAWVRIIGFDNVRQVQCISFIAYKPEGY

SEQ ID NO: 15908 - protein, 174 aa, Ammopiptanthus mongolicus
MISSPAVTTVKASMGAPFTGLKSMASFPVPRKVNSDITTIANNGGRVQCMLVWPPLGRKKFETLSYLPPLSIESLTKEVEYLLRKGWVPCLEFELEHGFVYRENNRSPGYYDGRYWTMWKLPMFGCSDASQVMKELEECKKEYPTAFVRIIGFDNKRQVQCISFIAYKPPGFEN

SEQ ID NO: 15909 - protein, 367 aa, Silicibacter sp. TM1040
MSNPSILILPGDGIGPEVMAEVRKVISWFGAKRDIQFDVSEDLVGGSAYDAHGTPLHDDTMAKAQEVDAVLLGAVGGPKYDALDFSVKPERGLLRLRKEMDLYSNLRPAQCFDALADFSSLKKDVVAGLDIMIVRELTSGIYFGEPRGIIEEGNERVGINTQRYTESEIERVARSAFELAMRRGKKLCSMEKANVMESGILWREVVTEVSKDYPEVELSHMYADAGAMQLCRWPKQFDVIVTDNLFGDLLSDAAAMLTGSLGMLPSASLGAPMANGRPKALYEPVHGSAPDIAGQGKANPIACILSFAMALRYSFDMGTEADRLEAAVEKVLADGVRTADLLGEEGVTPVSTSEMGDAVVEALNASL

SEQ ID NO: 15910 - protein, 152 aa, Casuarina glauca
MALTEKQEALLKQSWEVLKQNIPAHSLRLFALIIEAAPESKYVFSFLKDSNEIPENNPKLKAHAAVIFKTICESATELRQKGHAVWDNNTLKRLGSIHLKNKITDPHFEVMKGALLGTIKEAIKENWSDEMGQAWTEAYNQLVATIKAEMKE

SEQ ID NO: 15911 - protein, 408 aa, Thermus thermophilus HB8
MRRVVVTGLGALTPIGVGQEAFHKAQLAGKSGVRPITRFDASALPVRIAAEVDVDPGAYLDRKELRRLDRFVQYALIAAQLALEDAGLKPEDLDPERVGTLVGTGIGGMETWEAQSRVFLERGPNRISPFFIPMMIANMASAHIAMRYGFTGPSSTVVTACATGADALGSALRMIQLGEADLVLAGGTEAAITPMAIGAFAVMRALSTRNEEPEKASRPFTLSRDGFVMGEGAGVLVLEAYEHAKKRGARIYAELVGFGRSADAHHITEPHPEGKGAALAMARALKDAGIAPEQVGYINAHGTSTPVGDRAEVLAIKRVFGDHAKRLMVSSTKSMIGHLLGAAGAVEAIATVQALYHGVIPPTINLEDPDPELDLDFVPEPREAKVDYALSNSFAFGGHNAVLAFKRV

SEQ ID NO: 15912 - protein, 344 aa, Bacillus halodurans C-125
MKVKVAINGFGRIGRMVFRKAVENKQFDVVAINASYPAETLAHLIKYDSVHGPFQGTVEIKNDALVVNGKEIKLVNSRDPRVLPWKDLEVDIVVEATGKFKTKETAGYHLEAGAKKVIITAPGKNEDVTVVVGVNENDYKPEEHHVLSNASCTTNCLAPVAKVLDEAFTIQSGMMTTVHAYTNDQKNIDNPHKDLRRARACGQSIIPTSTGAAKAISKVLPQLEGKLTGMALRVPTPNVSLVDLVVQVKEDVTPEKVNHVLKQAAAGSMKGILGFTEEPLVSIDFNGNEHSAIVDGLSTMVMEDTNQVKVLAWYDNEWGYSTRVVDLVELVAKELKKPAKVIAS

SEQ ID NO: 15913 - protein, 358 aa, Aster yellows phytoplasma
GKTTLTAAITQVLSTRGLAKSRAYDQIDNAPEERERGITIKTSHVEYETEKRHYAHVDCPGHADYVKNMITGAAQMDAAILVVSGAHSVMPQTREHILLARQVGVPKIVVFLNKCDLSPDEQILELVEMEVRELLSQYDFPGDDIPVIRGSALKALEGDAHYVDKVNELIETLDTYIEDPVREVDKPFLMPVEDVFTITGRGTVVTGRVERGQVKAGDEVEIVGLKETKKTIVTAVEMFKKDLDFAQAGDNVGALLRGINREDVQRGQVLAKPGSVKPHSKFAAQVYVLTKEEGGRHTAFFSQYRPQFYFRTTDITGVVELQGDVKMVMPGDNAELVVTLNNPIAIEEGTKFSIREGG

SEQ ID NO: 15914 - protein, 358 aa, Aster yellows phytoplasma
GKTTLTAAITQVLSARGLAKSRAYDQIDNAPEERERGITIKTSHVEYETEKRHYAHVDCPGHADYVKNMITGAAQMDAAILVVSGADSVMPQAREHILLARQVGVPKIVVFLNKCDLSPDEQILELVEMEVRELLSQYDFPGDDIPVIRGSALKALEGDAHYVAQVNKLIETLDTYIEDPVREVDKPFLMPVEDVFTITGRGTVVTGRVERGQVKAGDEVEIVGPKETRKTIVTAVEMFKKDLEFAQAGDNVGALLRGINREDVQRGQVLAKPGSVKPHSKFIAQVYVLTKEEGGRHTAFFSQYRPQFYFRTTDITGVVELQGDVKMVMPGDNAELVVTLNNPIAIEEGTKFSIREGG

SEQ ID NO: 15915 - protein, 134 aa, Euphorbia lagascae
MKLKTHIHQSHITRNIIYNMAGIKVAVLVVALMVVASGMYANAITCGQVSSSLAPCVNFLKSGGAPSPQCCNGLGGMVNQAKSTADKQAACNCLKTAAKNMPGLNPANAESLPSKCKVNIPYKISFSTNCNSIK

SEQ ID NO: 15916 - protein, 486 aa, Bacillus cereus ATCC 14579
MITTEIKRVKNHINGEWVESTGTEVEAVPNPATGKIIAYVPLSPKEDVEKAVEAAKAAFETWSKVPVPNRSRNLYKYLQLLQENKDELAKIITLENGKTLTDATGEVQRGIEAVELATSTPNLMMGQALPNIASGIDGSIWRYPIGVVAGITPFNFPMMIPLWMFPLAIACGNTFVLKTSERTPLLAERLVELFYEAGFPKGVLNLVQGGKDVVNSILENKDIQAVSFVGSEPVARYVYETGTKHGKRVQALAGAKNHAIVMPDCNLEKTVQGVIGSAFASSGERCMACSVVAVVDEIADEFIDVLVAETKKLKVGDGFNEDNYVGPLIRESHKERVLGYINSGVADGATLLVDGRKINEEVGEGYFVGATIFDGVNQEMKIWQDEIFAPVLSIVRVKDLEEGIKLTNQSKFANGAVIYTSNGKHAQTFRDNIDAGMIGVNVNVPAPMAFFAFAGNKASFFGDLSTNGTDGVQFYTRKKVVTERWF

SEQ ID NO: 15917 - protein, 116 aa, Euphorbia lagascae
MEGKMVISVVVIVAIIQLMAMQGEAVDCKDVNSNLATCIPYLTGKDTAPPTTCCDGVKNLPKIAQTTADRRAACECVKAAASHYTINEKAASSLPKDCGAVINIPISKTTNCQQIN

SEQ ID NO: 15918 - protein, 183 aa, Triticum aestivum
  misc_feature (5)..(5): Xaa can be any naturally occurring amino acid
  misc_feature (19)..(19): Xaa can be any naturally occurring amino acid
  misc_feature (178)..(178): Xaa can be any naturally occurring amino acid
LSPSXQSFPPAEAIRSSQXDSHVRFPGQIAGGARGLPFRRAPSFRNAADCGNATGNVCDPSLVHIAITLDEGYLRGSVAAVHSVVQHAMCPESVFFHFLVSDPSLGDLVRAVFPQLRFKVYYFDPARVRGLISSSVRQALEDPLNYARNYLAHLLEPCVRRVIYLDSDLVLVDDVRQXLAHRL

SEQ ID NO: 15919 - protein, 86 aa, Glycine max
MSQRIGTKLFVHRLSFYTTQEQLKKLFSPFGLVTQADLALDPITKRPKGFGFVSFKSEIEAEKACKAMNGRIVNGRLILVEPANEK

SEQ ID NO: 15920 - protein, 670 aa, Glycine max
MGSHNTTTSSSSDSELPCSNYIPLPDGTHFPAEEAPRELLVIFCGLLVLVSLVAFNGYRAHPNDHHHVSSSLPTTLLTVTPNELELSPDTVPCSTSETTVSRGLSAGVSEKSSWQLNSNNGSGESYPWNNSVLSWQRTAYHFQPEKNWMNDPNGPMFYKEWYHFFYQYNPKGAVWGDIVWGHAVSRDMIHWLHLPLAMMADQWYDKNGVWTGSATILPDGQIIMLYTGSTNESVQVQNLAYPADPSDPLLVDWIKYPANPVLFPPPGIDAKDFRDPTTAWLTSEGKWRISIGSKLNKTGIALVYDTIDFKTFEHVEGVLHAVPGTGMWECVDFFPVSSKGENGLNTSINGENVKHVVKVSLDDDRHDYYALGTYDEKNVKFTPDDFKNDVGIGLRYDYGIFYASKTFYDQSKGRRVLWGWIGESDSEYADVAKGWASVQGIPRTVTLDKKTGSNLLQWPVAEVESLRLRSEEFQNLKVTPGSVVPLEIGTAAQLDIVAEFEIDKEALEKTGQSNKEYKCSTSGGATERGAIGPFGLLVLADDDLSEYTPTYFYVVRGSDGQLKTSFCSDQSRSSLATDVSKKILGSLVPVLKDEKLSVRILVDHSIVESFAQGGRTCVTSRVYPTKAIYGAARLFLFNNATEASVTASVKVWQMNSAFIHPLHPDQRNSI

SEQ ID NO: 15921 - protein, 177 aa, Triticum aestivum
  misc_feature (105)..(105): Xaa can be any naturally occurring amino acid
  misc_feature (123)..(123): Xaa can be any naturally occurring amino acid
MAPTVMASSATSVAPFQGLKSTAGLPVSRRSSSAGLSSVSNGGRIRCMQVWPIEGIKKFETLSYLPPLSTEALLKQVDYLIRSKWVPCLEFSKVGFVFREHNSSXPGYYDGRYWTMWKLPMFXGCTDATQVLNEVEEVKKEYPDAYVRVIGFDNLRQVQCVSFIAFRPPGCEESGKA

SEQ ID NO: 15922 - protein, 438 aa, Mesorhizobium loti MAFF303099
MGEHIIKLPDVGEGVAEAELVEWHVKVGDMVREDTVLAAVMTDKATVEIPSPVDGEILWLGAEIGDTVAIGSPIVRLKVAGEGNVKPKGDAKAEAVAAEPPAKLPTPKPETAGPVAKASPKAGAPEAKPAPAVAKSTGQRSISGAPRPEGERPLASPAVRLRAKEAGIDLRQVAGSGPAGRIGHEDIEAFLARGPQVAKTSGLTRNDAVEDIKVVGLRRKIAEKMTLSKSRIPHITYVEEIDVTALEELRAALNKEKRADRPKLTLLPFLMRAMVKAIAEQPQLNSLFDDEAGIIHQHGGIHIGIAAQTPSGLVVPVVKHAEARDIWDCGAEVNRLAEAAKSGTATRDELSGSTITITSLGAMGGIATTPVINHPEVAIIGVNKMMVRPVWDGTQFIPRKMMNLSSSFDHRVIDGWDAAVFVQRIKALLETPALIFVD

SEQ ID NO: 15923 - protein, 134 aa, Oryza sativa
LIDMQHQQRMKQAAAAAQQQQMMQQIEPIVSGNLPPGFDSSTCRSVYVGNIHLQVTDSLLHEVFQSIGPVEGCKLIRKEKSSFGFVDYYDRRSAAIAIVSLNGRQLFGQPIKVNWAYASTQREDTSGHFNIFVG

SEQ ID NO: 15924 - protein, 661 aa, Daucus carota
MDTYHFLPSRDLEHASSYTPLPDSPETRHEPDPDRSKTNRRPIKIVSSVLLATLIFSFVIFLLVNPNVQQVVRKKVSKNSNGEDHNKASKSPEMLGPPSRGVSQGVSEKSFRQATAEPSYPWTNDMLSWQRTSFHFQPQENWMNDPNGPLFHMGWYHLFYQYNPDSAIWGNITWGHAISRDLINWLHLPFAMQPDQWYDINGVWTGSATILPDGKIVMLYTGDTDDLVQVQNLAYPANLSDPLLLDWIKYPDNPVMFPPPGIGSTDFRDPTTAWIGPDGKWRITIGSKVNKTGISLMYKTTDFITYELLDNLLHAVPGTGMWECVDFYPVSVTGSNGLDTSVNGPGVKHVLKSSLDDDRHDYYALGTYDPINDKWTPDNPELDVGIGLRLDYGKYYASKTFYDQDKERRLLWGWIGESDNESTDLLKGWASVQSIPRTVVFDKKTGTNILQWPVKEVESLRSRSYEINDVELKPGSLVPLKISSAAQLDIVASFEVDEEAFKGTYEADASYNCTASEGAAGRGILGPFGILVLADDPLSELTPVYFYIAKGVDGNAKTYFCADQSRSSTASDVDKEVYGSDVPVLPGESLSMRLLVDHSIVESFAQGGRTVITSRVYPTRAIYSAARVFLFNNATGVSVTASVKAWQMASATLKPFPFDQL

SEQ ID NO: 15925 - protein, 304 aa, Oryza sativa
MAGCLWPCVTGGGAAADGAGTLFRSKARGPVEVVRHARELLAFLAGEPRRMVDLAKSIGEMKSILYGNGEADPVDEACSQLTKEFFKENTNSLHLLVVCLPYMDLETQKDVTQVTANLLRQKVDYRMVASDYLEENQDLLDVLMSGYMIFILYIYTTCVQELLTRHRSSAAEFFSNNYDWFFPEFNSKLLSSSNYIIRRQATQLLGDILLDKSNTTAMVRYVSSKDNLIILMNLLREQSRAIQVEAFRVFKLFTCNPKKPPEIVGILVTNKSKILRFLADFTIEKEDQQFEADKAQVVTEISAM

SEQ ID NO: 15926 - protein, 82 aa, Oryza sativa
MAAEKGSPLPKFGEWDVNDPASAEGFPVIFNKAKAEKKTGGNSQGQDLAPKNEQPFGQGLYPAKPNSSKKWFCCMQPTAAEF

SEQ ID NO: 15927 - protein, 324 aa, Vibrio cholerae O1 biovar eltor str. N16961
MKEAMNNHKKLGILLANLGTPQAPTSQAVKAFLSQFLHDQRVVDMSRWLWCPLLHGIILPTRSPKVAKLYQSIWMDEGSPLMVYSRRQRDKLAELSQRPVELGMTYGEPSLLEGVRKLQQQGVEQIVVLPLYPQYSATTTAAVFDGLAKALRQLPVVPELHFIRDYHDHPLYIQALAKSVRASWQQHGQGDLLLCSYHGIPKRYAQNGDIYPEHCLKTTELLAQALGLPQDKVMMTYQSQFGKEEWLQPYTDKTMEALPRQGIKKLDVICPAFSVDCLETLEEIAEQNQEIFLHSGGEAFHYVPCLNDSQSHIELMAALVKVDC

SEQ ID NO: 15928 - protein, 365 aa, Cleome spinosa
MALPVSAIGFEGYEKRLEISFFEPSLFLDPKGMGFRALAKSQLDEILQPAECTIVSSLSNDQVDSYVLSESSLFVYPYKVIIKTCGTTKLLFSIPPLLELAGELSLVVKSVRYTRGSFICPGAQPFPHRSFSEEVAVLDAHFAKLGLSSSAYVMGNDGADETRKWHVYAASAKGTSRSDYNNVYTLEMCMTGLDRKKAAVFYKTESSSALSMTEESGIRKILPNSAICDFEFEPCGYSMNSIEGEAISTIHVTPEDGFSYASFEAVGYDFKAMDVSGMVRRVIDCFEPKQFSVAIHADTVEEEDMMMMMITGIEEDGDYGCRERTVQKLGEEERGAVLYYGFDRTNGSPRSILKCGWSSEDEKDM

SEQ ID NO: 15929 - protein, 497 aa, Erwinia carotovora subsp. atroseptica SCRI1043
MTTHVVTHHAVTHVVWLRNDLRITDNLALYAACQDPSATVLAVFIATPAQWEKHDMAPRQAAFLLENLTLVQHVLAEKGIPLHYHECADFAASVDWLMQFCAEQQATDLFYNHQYEINERLRDKQVKDRLADSVVCHGYHDSLLLPPGSVLTGNGEMYKVFTPFRQAFIKRLLEADTTCVPAPDARGEPINNTAELVPFSYPQCEVDSEDFPCGERAALQQLRRFCREQVQDYDQQRDFPALPGTSKLSPYLALGIVSPRQCFNRLRAECPDMLERREGGAFTWFNELVWREFYRHLIVSWPQLCKHRPFTAWTQWVKWRESPEDLTAWQQGKTGYPIVDAAMHQLNETGWMHNRLRMICASFLVKDLLIDWREGERYFMSQLLDGDLAANNGGWQWAASTGTDAAPYFRIFNPTTQGERFDPDGRFIRHWLPELAAVPDKDIHQPHRWADKQHVKLNYPLPIVDHKTARLDTLAAFEAAKNIGMANNDREEKSKYA

SEQ ID NO: 15930 - protein, 117 aa, Triticum aestivum
MARVALLAVFTVLAALAVAEMASGAVTCSDVTSAIAPCMSYATGQASSPSAGCCSGVRTLNGKASTSADRQAACRCLKNLAGSFNGISMGNAANIPGKCGVSVSFPINNSVNCNNLH

SEQ ID NO: 15931 - protein, 354 aa, Glycine max
MGSSSASESVCVTGASGFIGSWLVMRLIERGYTVRATVRDPANMKKVKHLVELPGAKTKLSLWKADLAQEGSFDEAIKGCTGVFHVATPMDFDSKDPENEVIKPTINGLLDIMKACVKAKTVRRLVFTSSAGTVDVTEHPNPVIDENCWSDVDFCTRVKMTGWMYFVSKTLAEQEAWKYAKEHNIDFISVIPPLVVGPFLMPTMPPSLITALSLITGNESHYHIIKQGQFVHLDDLCLGHIFVFENPKAEGRYICCSHEATIHDIAKLLNQKYPEYNVLTKFKNIPDELDIIKFSSKKITDLGFKFKYSLEDMFTGAVETCREKGLLPKPEETTVNNELLPKPAETTVNDTMQK

SEQ ID NO: 15932 - protein, 402 aa, uncultured marine gamma proteobacterium EBAC20E09
MKNVVITGMGIKSCIGNEYNSVLKNLQEGKSGIIFNETYDEMNFRSCVSGSIKIDLSEYIDRKLLRFMGESAGYAYLATLDALKMAGVDNNYLDNPRIGIVAGSGGASTRIMVESSDIARNRGPKRIGPYGVTKSMSSSISAIVATALKLKGINYSISSACATSAHCIGHAADLIKNGQQDIVIAGGSDDEHWSSSCLFDAMGALSSNFNADPTIASRPYDANRDGFVISGGAGMLILEEEEHAKKRGANILAKLSGYFANSDGYDMVAPSGEGAIRCMDGAIKEMKSEIDYINTHGTSTPVGDVAELNAIKELFGSNAPMISSTKSMTGHSLGATGAHEAIYSVMMINENFIAPSINIDNLCDEAQGLDIVRETREANIKNILSNSFGFGGTNASLVISKY

SEQ ID NO: 15933 - protein, 305 aa, Crocus sativus
MSAKISPSATTLAASFRRPPSGARIILLSSLPVRRPVERRIRPPLLHRRRRTATVFFVLAEEKTTPFLDDVEEEKSIAPSNRAAERSARKRSERTTYLITAVMSSFGITSMAAAAVYYRFAWQMEGGDVPVTEMAGTFALSVGAAVGMEFWARWAHRALWHASLWHMHESHHRPREGPFELNDVFAIINAVPAIALLNFGFFHRGLLPGLCFGAGLGITLFGIAYMFVHDGLVHRRFPVGPIADVPYFQRVAAAHQIHHSEKFEGVPYGLFMGPKELEEIGGLKELEKEVSRRIKAYNNSAEIKT

SEQ ID NO: 15934 - protein, 132 aa, Pyrobaculum aerophilum str. IM2
MSTKYVEAGELKEGSYVVIDGEPCRVVEIEKSKTGKHGSAKARIVAVGVFDGGKRTLSLPVDAQVEVPIIEKFTAQILSVSGDVIQLMDMRDYKTIEVPMKYVEEEAKGRLAPGAEVEVWQILDRYKIIRVK

SEQ ID NO: 15935 - protein, 319 aa, Bacillus halodurans C-125
MKRIGVLTSGGDSPGMNAAIRAVVRKAIYHGVEVYGIYQGYAGLISGDIRKMELGSVGDIIHRGGTILYTARCEEFKTLEGQKKGIEQLKKFGIEGLVVIGGDGSFAGAQKLTEHGFPTVGVPGTIDNDIPGTDFTIGFDTALNTVIDAIDKIRDTATSHDRTYVIEVMGRNAGDLALWSGLADGAETIVIPEADHDIDQIISRLQRGQERGKKHSIIVVAEGVGSGMDFGREISERTGAETRVTVLGHIQRGGSPTGFDRVLASRLGAKAVDLLLEGQAGVTVGIENNKLVHHDITEVLQRKHSIDLDMYRLSQELSI

SEQ ID NO: 15936 - protein, 326 aa, Medicago sativa
MAEGKGRVCVTGGTGFLGSWIIKSLLENGYSVNTTIRADPERKRDVSFLTNLPGASEKLHFFNADLSNPDSFAAAIEGCVGIFHTASPIDFAVSEPEEIVTKRTVDGALGILKACVNSKTVKRFIYTSSGSAVSFNGKDKDVLDESDWSDVDLLRSVKPFGWNYAVSKTLAEKAVLEFGEQNGIDVVTLILPFIVGRFVCPKLPDSIEKALVLVLGKKEQIGVTRFHMVHVDDVARAHIYLLENSVPGGRYNCSPFIVPIEEMSQLLSAKYPEYQILTVDELKEIKGARLPDLNTKKLVDAGFDFKYTIEDMFDDAIQCCKEKGYL

SEQ ID NO: 15937 - protein, 152 aa, Glycine max
  misc_feature (72)..(73): Xaa can be any naturally occurring amino acid
GLITKTWERCKSIGRSRKEASSNSLNTNTNTMRSKSWPNRNRAENKNKNKNSTIVAPEGCFSVYVGPQMQRXXIKTEYANHPLFKMLLEEAESEYGYNSQGPLALPCHVDVFYKVLMEMDSDETHGSCACVKRSPSAYQLLRTSPMLSINHF

SEQ ID NO: 15938 - protein, 429 aa, Archaeoglobus fulgidus DSM 4304
MKYDYVIIGNSAGGIGCVEAIRELDVDSSILVISAEKYHAYSRALIPYYLDGKIEFEKMYYRPPDFYEKMDVETKLGVRAVGVDVEAKKVLLESGEEVEYGKLLIATGGKPFIPPMEGLGGQSNVFTFLKMDDVLAVEKAIKEAKKAVVLGGGIIGLMASEVLAKKGLDVKVVELADRVLAPVVDETTSRIVERKFEENGVEIILNNTISKVVGEERVEKVILRDGRELEADMLLVAVGVVPNVDIVKNTPIKVNRGIVVNRKMETSVKDVYACGDCAEIYDFVFGANRVLPLWPTAYTGGRIAGFNMVGIEREYNLATSMNAMHFFDYYIINAGLNVPNDSEEFEVIYRLEGDSYRKFALKDGRIAGFIIAGKMERAGIFLKLMEEGIDVSSFKEKLLKDNFGFLDIPEPTRWKLIEDKIKLGVVREI

SEQ ID NO: 15939 - protein, 440 aa, Leptospira interrogans serovar Lai str. 56601
MGAPLKTPDGFNIGTLCVFDSQPKHLNPKQRVILKALSNQIIYNFELNKKNIELLLIQKKEEELQKSKSLFFANMSHEIRTPVHGILGVSGLLSETELQQEQKEYVDTIQRSGKLLLNLLNDILDFSKLESFNMKIEIIAFDLIDLLKDVFHLFEADAKRKNIEFKLVGKQPSHSIVSTDPHRFKQILVNLISNAIKFTEKGSVLIEFDFKSDLKHCDIQIRIKDTGVGIPEQKLKELFQAYRQVDTSVSRKYGGTGLGLSISKNLSEMMNLKLTARSIINQGSVFEISGQIPLAEKSEVNFEPKKATQNIEIQNLNILVAEDNETNQMLIKKILEKLGYKPVIVSNGIEALHHIKMYKTDVLFLDIQMPELNGIEAAKILTQQNDSSIRPYIIAMTANASQTDKEDCMASGIDQYLSKPFHKEEIADLLNQFISHKTTN

SEQ ID NO: 15940 - protein, 845 aa, Yersinia pestis KIM
MRAFFFNQIFAKKVCDKKRESGRESEMRVLKFGGTSVANAERFMRVADIIESNARQGQVATVLSAPAKITNHLVAMIDKMVAGQDISPNISDAERIFAELLRGLADTQPGFDYDRLKALVGHEFAQLKHLLHGISLLGQCPDSINASIICRGEKLSIAIMEALFQAKGYHVTVINPVEKLLAQGHYLESTVDITESTRRIGASGIPSDHIILMAGFTAGNDKGELVVLGRNGSDYSAAVLAACLRADCCEIWTDVDGVYTCDPRTVPDARLLKSMSYQEAMELSYFGAKVLHPRTIAPIARFQIPCLIKNTSNPQAPGTLIGGESIDEDSPVKGITNLNNMAMINVSGPGMKGMVGMAARVFAVMSRSGISVVLITQSSSEYSISFCVPQGELLRARRALEDEFYLELKDGVLDPLDVMEHLAIISVVGDGMRTLRGISARFFSALARANINIIAIAQGSSERSISVVVNNDAVTTGVRVCHQMLFNTDQVIEVFVIGVGGVGGALIEQIYRQQPWLKQRHIDLRVCGIANSKAMLTNVHGIALDNWRQELAEVQEPFNLSRLIRLVKEYHLLNPVIVDCTSSQAVADQYADFLTDGFHVVTPNKKANTSSMNYYRQMRAAATKSCRKFLYDTNVGAGLPVIENLQNLLNAGDELMRFTGILSGSLSFIFGKLDEGMSLSEATRQAKALGYTEPDPRDDLSGMDVARKLLILAREAGYKLELADIEVESVLPASFDASGDVDTFLARLPSLDAEFTRLVANAAEQGKVLRYVGVIEDGRCKVRMEAVDGNDPLYKVKNGENALAFYTRYYQPIPLVLRGYGAGNDVTAAGVFADLLRTLSWKLGV

SEQ ID NO: 15941 - protein, 545 aa, Staphylococcus aureus subsp. aureus MSSA476
MNKDKQLHNDKINLSQLVLLGLGSLIGSGWLFGAWEASSIAGPAAIISWVLGFLVIGTIAYNYIEIGTMFPQSGGMSNYAQYTHGSLLGFIAAWANWVSLVTIIPIEAVSAVQYMSSWPWHWAKPMRYLMENGSISTYGLLAVYLIIVIFSLLNYWSVKLLTSFTSLISVFKLGVPMLTIIMLMLSGFDTSNYGHSASTFMPYGSAPIFAATTASGIIFSFNSFQTIINMGSEIKNPEKNIARGIAISLSISAVLYIILQSTFITSMPQSMLQHSGWNGINFNSPFADLAILLGINWLAILLYIEAFVSPFGTGVSFVAVTGRVLRAMEKNGHIPKFLGKMNEKYHIPRVAIIFNAIISMIMVTLFRDWGTLAAVISTATLVAYLTGPTTVIALRKMGPTMTRPFRAKILKVMAPLSFVLASLAIYWAMWPTTAEVILIIILGLPIYFFYEYRMNWRNTKKQIGGSLWIIVYLIVLSILSFIGSKEFKGLNMIHYPFDFIVIIVVALIFYYIGTTSSFESVYFRRATRINTKMRESLNNESKSSH

SEQ ID NO: 15942 - protein, 226 aa, Bordetella pertussis Tohama I
MSSIGFRILPLPEPPAADEVLAGFAQIGTAQISDCMGRLYGVQGLRPLHAGAARIVGRAITVKTRPGDNLMIHKAISLAGPGDVIVVDGAGETANALVGELMMMDAQSRGVAAFVIDGAVRDLDVFQQGAFGCFARAVSHKGPYKDGPGEINVPVSIGGQVVAAGDVIVGDADGVVAIPLAQAGAVLAAARRKEDAELAAKEKLRAGTYAKPWVDRIIAEKTGDAQ

SEQ ID NO: 15943 - protein, 554 aa, Vibrio cholerae O1 biovar eltor str. N16961
MCSIFGILDIKTDAATLRPIALEMSKKLRHRGPDWSGIYASDKAILAHERLAIVGLNSGAQPLYSPDRKLILAVNGEIYNHKEIRERYKGQYEFQTDSDCEVILALYRDKGADLLEELNGIFAFVLYDEEKDEYLIGRDHIGIIPLYQGHDEHGNFYVASEMKALVPVCKTLSEFPPGSYLSSKDQAVTRYYVRDWNSFDEVKDNVSSKEELTQALEAAVKRQLMTDVPYGVLLSGGLDSSITSAIAKRFAAMRIEDDEKSAAWWPQLHSFAIGLEGAPDLKAAREVAEKIGTVHHEMTYTIQEGLDAIRDVIYHIETYDVTTIRASTPMFLMGRKIKAMGIKMVLSGEGADEIFGGYLYFHKAPNAKEFHEETVRKLLALNLFDCARANKSLAAWGVEGRVPFLDKEFIDVAMRLNPADKMCGNGKMEKHILRECFEHYLPESIAWRQKEQFSDGVGYGWIDTLKATAEAKISDQQMETAKFRFPYNTPTTKEGYVYREIFEELFPLESAARCVPGGPSVACSSAKAIEWDESFKNCIDPSGRAVKAVHKQAY

SEQ ID NO: 15944 - protein, 513 aa, Dechloromonas aromatica RCB
MKQHLVIFDTTLRDGEQSPGASMTKEEKIRVARQLEKMRVDVIEAGFAAASPGDFDAIHSIAQTIKDSTVCSLARANENDIRRAGEAIKPAQSGRIHTFIATSPIHMEKKLRMTPDQVVEQAVKAIGWAREYTDDIEFSAEDAGRSDLDFLCRIFEEVIKAGATTINVPDTVGYNIPSQYAETMRQLIERVPNSDKVVWSVHCHNDLGLAVSNSLAAVLCGARQVECTINGLGERAGNAALEEIVMAVRTRADVFPVETRIDTTQIVPASKLVSQITGYPVQPNKAVVGANAFAHESGIHQDGVLKHRETYEIMRAQDVGWTQNKLVLGKHSGRNAFKNRLQELGIELESDEALNAAFARFKELADKKHEIFDEDLHALVSDDLVTPDQEYYKLVYSRVCSETGEMPRASVILNIGGVEHKAEADGGGPVDATFKAIESIAGSGAELLLYSVNAITTGTDAQGEVTTRLSKGDRIVNGNGADTDIVIASARSYLNALNKLHSTLDKVKAQGGV

SEQ ID NO: 15945 - protein, 140 aa, Brassica napus
MPRVISNETLGCPPIRTLTFDSLGLIKVTEARGKERGTPTVVNTWGEMNASRCVLAASMDDRLNNPLLAVARKDGNVEVLNPCNGDLHFAYSVFGDNEISGLHLFRKQKEDQTEKSCTLLTCTKKGDVSLRTVQFPDARA

SEQ ID NO: 15946 - protein, 342 aa, Vaccinium macrocarpon
MKDVNSGLGTTVCVTGAAGFIGSWLIMRLLERGYVVRATVRDPGNLKKVKHLLELPKADTNLTLWKADLNEEGSFDEAIEGCVGVFHVATPMDFESKDPENEVIKPTINGVLSIIKSCTKAKTVKRLVFTSSAGAVVDQEHQPLVFDENNWSDVDFLYDKKMTGWTYFVSKTLAERAAMEAAKEISIDFISIIPTLVVGPFISPTFPPSLITVLSPITGNEAHYSIIKQCQYVHLDDLCKYLMFLLEHPEAEGRYICSSHDATIYDLAKMMRRNGPGTMSPNEFKGIDKELPIMSFSSKKLLVIGFKFKYNLEDMFRGAIDTWQETKGLLPYSNATPNIGKN

SEQ ID NO: 15947 - protein, 424 aa, Brachyspira murdochii
HAGTWAAKTLKATDPNCQVVTYDRNDNISFLACGIALWVGGVVKDPKGLFYASPESLKAEGIDVYMGHDVTKIDWANKKLHVKELKTGKEFDDNYDKLILATGSWPVTPPIEGLMQEGTEYGLKKGIFFSKLFQQGQEIIDEIAKPEVKKVMVVGAGYIGVELIEAFKNHGKEVILMEAMPRVMANYFDKEITDEAEKRIKEAGIEMHLGETVKKFEGDDRVKRVVTDKGSYDVDMVVMSVGFRPNSELYKDYLETLPNGAIKVDTTMKTTKDPNVFAIGDCATVYSRASGKEEYIALATNAVRMGIVAANNALGKHVEYCGTQGSNAICVFGYNMASTGWSEETAKKKGLKVKSNFFKDAERPEFMPSYEDVLVKIIYEEDTRRMVGAQIASKHNHAEAIHAFSLAIQNGMTVDQFALSDFFF

SEQ ID NO: 15948 - protein, 354 aa, Vaccinium macrocarpon
MKDVNSGLGTTVCVTGAAGFIGSWLIMRLLERGYVVRATVRDPGNLKKVKHLLELPKADTNLTLWKADLNEEGSFDEAIEGCVGVFHVATPMDFESKDPENEVIKPTINGVLSIIKSCTKAKTVKRLVFTSSAGAVVDQEHQPLVFDENNWSDVDFLYDKKMTGWTYFVSKTLAERAAMEAAKEISIDFISIIPTLVVGPFISPTFPPSLITVLSPITGNDPHYSIIKQGQFVHLDDLCESHIYLFEHPEAEGRYICSSHDATIYDLAKIMRRNAPSTMSPTEFKGIPKDLPNVSFPSKKLIGMGFQFKYSLEDMFRGAIDTCQETKGLLPYSNETTANGNGNGNGNGNGNGTI

SEQ ID NO: 15949 - protein, 421 aa, Brachyspira alvinipulli
  misc_feature (14)..(14): Xaa can be any naturally occurring amino acid
AGTWAAKTLAASKXKCEVVTYDRNDNISFLACGIALWVGGVVKDPKGLFYASPESLKSEGIDVHMGHEVMKIDWANKKLHIKELKTGKEFDDNYDKLILATGSWPVTPPIEGLMQEGTTYGLKKGIFFSKLYQQGQEIIDEIAKPDVKRVMVVGAGYIGVELIEAFKNHGKEVILMESMPRVMANYFDKEITDEAEKRIKEAGIEMHLGETVKKFEGDDRVKKVVTDKGSYDVDMVVMSVGFRPNSELYKDYLETLPNGAIVVDTTMKTSKDENVYAIGDCSTVYSRASEKQEYIALATNAVRMGIVAANNIVGNKVEYCGTQGSNAICVFGYNMASTGWSEDTAKKKGLKVKSNFFKDAERPEFMPTHEDVLVKIVYEEGTGRLLGAQIASKNNHAEAIHAFSLAIQRGMTVQEFALSDF

SEQ ID NO: 15950 - protein, 115 aa, Glycine max
ADLEVAFLAVLLCMVAVTAPLALAGFPCGRVTSSLIIFVGFLRHGGTPPFACCHGSNSLIASVKTTADRRTACICLLSGVDRIYCLRANLAASLPGVCVVYIRYKISISINCAPI

SEQ ID NO: 15951 - protein, 420 aa, Serpulina sp. P280/1
WAAKTLKATDPNCKVVTYDRNDNISFLACGIALWVGGVVKDPKGLFYATPESLKGEGIDVYMGHEVMKIDWANKKLHVKELKTGKEFEDTYDKLILATGSWPVTPPIEGLKQEGTEYGLKKGIFFSKLFQQGQDIINEIAKPEVKKVMVVGAGYIGVELIEAFKNHGKEVILMEAMPRVMANYFDKEITDEAEKRIKEAGIEMHLGETVKKFEGDDRVKKVVTDKGSYDVDMVVMSVGFRPNSELYKDYLETLPNGAIVVDTTMKSSKDPDVYAIGDCATVYSRASEKQEYIALATNAVRMGIVAANNALGKHVEYCGTQGSNAICVFGYNMASTGWSEETAKKKGLKAKSNFFKDSERPEFMPGNEDVLVKIVYEEGTGRLLSAQIASEHNHAEAIHAFSLAIQRSMTVQEFALSDFFF

SEQ ID NO: 15952 - protein, 413 aa, Salmonella typhimurium LT2
MSKRRVVVTGLGMLSPVGNTVESTWKALLAGQSGISLIDHFDTSAYATKFAGLVKDFNCDDIISRKEQRKMDAFIQYGIVAGVQAMQDSGLEVTEENASRIGAAIGSGIGGLGLIEENHSSLVKGGPRKISPFFVPSTIVNMVAGHLTIMYGLRGPSISIATACTSGVHNIGHAARIIAYGDADAMVAGGAEKASTPLGVGGFGAARALSTRNDNPQAASRPWDKERDGFVLGDGAGMLVLEEYEHAKARGAKIYAEIVGFGMSSDAYHMTSPPENGAGAALAMVNALRDAAIEPAQIGYVNAHGTSTPAGDKAETQAVKSVFGDAASRVMVSSTKSMTGHLLGAAGAVESIFSILALRDQAIPPTINLDNPDEGCDLDFVPHEARQVSDLEYALCNSFGFGGTNGSLIFKKI

SEQ ID NO: 15953 - protein, 506 aa, Bacillus cereus ATCC 10987
MKQILFMDTTLRDGEQSPGVNLNEQEKLQIARQLERLGIHVMEAGFAAASEGDFQSVKRIANTIQNATVMSLARAKESDIRRAYEAVKGAVSPRLHVFLATSDIHMKYKLCMSKEDVLDSIHRSVTLGKSLFPTVQFSAEDATRTARDFLAEAVEVAIRAGANVINIPDTVGYTNPEEYYSLFKYLQESVPSYEKAIFSCHCHDDLGMAVANSLAAVEGGALQVEGTINGIGERAGNAALEEVAVALHIRKDFYQAEPSMTLKEIKATSTLVSRLTGMVVPKNKAIVGANAFAHESGIHQDGVLKEVTTYEIIEPELVGESQNLFVLGKHSGRHAFTEKMKELGYEFTTEERDAVFEAFKKLADRKKEITEEDLRALMLGEAAFAAQQYNITQLQVHFVSNSTQCATVVLKDEEGNVFEDAATGSGSIEAIYNAIQRILGLECELADYRIQSITQGQDALAHVHVELKEGTHQVSGFGVAQDVLEASARAYVHAAGKLKSFIQLVK

SEQ ID NO: 15954 - protein, 354 aa, Bacillus cereus ATCC 10987
MEKRIVCLAGDGVGPEVMESAKEVLHMVERLYGHHFHLQDEYFGGSAIDLNGQPLPQRTLAACLASDAVLLGAVGGPRWDSAKERPEKGLLALRKGLGVFANVRPVTVESATAHLSPLKKADEIDFVVVRELTGGIYFSYPKERTDEVATDTLTYHRHEIERIVSYAFQLASKRKKKVTSIDKANVLESSKLWRTVTEEVALRYPDVELEHILVDAAAMELIRNPGRFDVIVTENLFGDILSDEASVLAGSLGMLPSASHAEKGPSLYEPIHGSAPDIAGKNKANPIAMMRSVAMMLGQSFGLTREGCAIEEAISAVLKLGKCTADIGGTETTTSFTKAVMQEMEEQALVGRGR

SEQ ID NO: 15955 - protein, 334 aa, Zymomonas mobilis
MTESNNPLPISEKIGVLLVNLGTPDAPNAKALRRYLGQFLSDQRVIELPAVFWQIILRGIILPFRAPRSARAYQKIWTNEGSPLAAITKKQAQGLQKRMPNITVDYAMRYGTPSISSRLEKLIASGCRRILLAPLYPQYSAASTATVQDEAYRYLQKIRWQPNLRSLEPYYTHPAYIQTLKKNIEDQIKALDFKPDSLLLSYHGMPVKTRELGDPYYFQCQATSQALSSLLDIPVITSFQSRFGSQKWFTPATDMTLKELPSKNIRNLAVAMPGFSADCLETLEEIALQGKSTFLEAGGENFAALRCLNDSEESLAMLEILVNQGLSGWLKSGE

SEQ ID NO: 15956 - protein, 379 aa, Cucumis melo
MPSLTAPHGLPLFLFLLLFLFSSVSAQFQPAPDPRSDPYQYRLSGSMAVIIVILIAALFFMAFFSVYIRHCNDSPSNTVRPITAAAGRSRRATRGLDPAVIETFPTLIYSDVKEHKIGKSALECAVCLNEFEDDETLRLIPKCDHVFHPECIDAWLASHSTCPVCRANLSPQPTDSVHRADDSNAVVNSDTDGGDIEAQSNDVVSETTAPPTVQIQTESELSTTTSNKALNRTRTRGSRSNRLRWLFPRSHSTGHSLVQPGEDTERFTLRLPVEIRKQVVNRKLHRATSMVVLARQSSSMRGYRFGSGEGSSRGKYYRRLERLDRTSKSDRWVLSMTPPFFTRMSSMKTPRGGSNRAEPGSGRELGQGNTAVDSSRLPV

SEQ ID NO: 15957 - protein, 418 aa, Brachyspira aalborgi
HHAGTWAAKTLKAVDSSTTVVTYDRNDNISFLACGIALWVGGVVKDPKGLFYANPEGLKSEGIDVHMGHEVVKIDWANRKLTVRELITGKEFEDNYDKLILATGSWPVTPPIEGLMQPGTKYGLKEGIFFSKLFQQGQEIIDEIKRPEVKRVMVVGAGYIGVELVEAFKNHGKEVILMEAMPRVMANYFDKEITDEAEKRIKEAGIELHLGETVKKFEGSVRVQKVVTDKGSYDVDMVVMSVGFRPNSELYKDYLETLPNGAIVVDTTMKTTKDPNVFAIGDCSTVYSRASEKQDYIALATNAVRMGIVAANNALGRHVEYCGTQGSNAICVFGYNMASTGWSEETAKKKGLNVKSNFFKDAERPEFMPTYEDVLVKIIYEEGSRRMIGAQIASKHNHAEAIHAFSLAIQNGMTVDHL

SEQ ID NO: 15958 - protein, 128 aa, Burkholderia xenovorans LB400
MRLLHTMLRVGDLDRSIAFYTELLGMKLLRRDDYPDGKFTLAFVGYEDERDGTVLELTHNWDTPSYDLGTGFGHLAVEVDDAYAACDRIKAQGGTVVREAGPMKHGTTVIAFVTDPDGYKIEFIQKKK

SEQ ID NO: 15959 - protein, 408 aa, Erwinia carotovora subsp. atroseptica SCRI1043
MSSVDILVPDLPESVADATVATWHKKPGDSVQRDEVLVEIETDKVVLEVPASEAGILDAVLEEEGATVMSRQLLGRIRRGDSSGKETGEKSQSKESTPAQRHTAGLEEEHSDALSPAIRRLIAEHNLDASAIKGSGVGGRITREDVDKHLAAQKKDSAKAAKPEAPAASPAPALGARSEKRVPMTRLRKRVAERLLEAKNSTAMLTTFNEINMQPIMDLRKQYGEAFEKRHGVRLGFMSFYIKAVVEALKRYPEVNASIDGEDVVYHNYFDVSIAVSTPRGLVTPVLRDVDALGMADIEKRIKELAVKGRDGKLTVEELLGGNFTITNGGVFGSLMSTPIINPPQSAILGMHAIKDRPMAVDGQVVILPMMYLALSYDHRLVDGRESVGFLVTVKEMLEDPARLLLDV

SEQ ID NO: 15960 - protein, 290 aa, Erwinia carotovora subsp. atroseptica SCRI1043
MSILINKNTKVICQGFTGSQGTFHSEQALAYGTQMVGGVTPGKGGTEHLGLPVFNTVREAVEATGATASVIYVPAPFCKDSILEAIDAGIELIICITEGIPTLDMLTVKVKLDQSGVRMIGPNCPGVITPGECKIGIMPGHIHLPGKVGIVSRSGTLTYEAVKQTTDAGLGQSSCVGIGGDPIPGSNFIDILKLFEQDPQTEAIVMIGEIGGTAEEEAAEYIKEHVTKPVVGYIAGVTAPKGKRMGHAGAIIAGGKGTADDKFAALEAAGVKTVRSLADIGDAVKAILAR

SEQ ID NO: 15961 - protein, 442 aa, Colwellia psychrerythraea 34H
MKEDKLQLTKSLSLFGLVLFGLAYMTPMIVFGTYGVLYEESGGNVASSYLFALIAMLFTAGSYALMAHKYPSAGSSYTYVTKVFGDRIGFLVGWTILLDYLFLPMVIWLIGGIYLEAMAPGIPEWFWILSFIVVTSVLNLIGVNVAKKVNLVLMLLQIVVIVAFCALAVMYINASGGVIAAPSTDSFTGGNFSLIFSGAAIACYSFLGFDAVSTMAEETENPKKNVPKAIMLVTLIGGIIFVASSYILNSAFPDISVFAAESAAADIAKQVGGVIFSSIFVATLIIAQFTSGVSAQASASRLMYVMGRDGVLPKGIFGKLHATFKTPYMTILMVGFIGLLALKMDVATSTSFINFGAFIAFIFVNMSAFSEFFKLEKNERTLGATLIHIVFPSIGTIAVMKLLISLDSNAVMLGCIWLAIGLCYLAYLITKGQKLKMDIKES

SEQ ID NO: 15962 - protein, 423 aa, Zea mays
MDKLSGSARLMIVSDLDHTMVDHHDEENLSLLRFGALWESVYCEDSLLVFSTGRSPTLYKELRKEKPMLTPDITIMSVGTEITYGEAMVPDDGWEEYLNNKWDRNIVVAETVSFSELKLQPETEQRPHKVSFFVDKKNAQEVIKSVAERLDKCGLDAKIIYSGGQDLDILPQGAGKGQALAYLLEKLSSCGKPPNNTLVCGDSGNDAELFSIPGVHGVMVSNAQEELLQWYTENAKDNPKIIHSNERCAAGIIQAIGHFKLGPNISPRDLQFPYAKEASFKPTDAVVKFYVLYEKWRRAEVPKSDSVIKYFKNITHANGVTIHPAGLELSLHASIDALGSCYGDKQGRKYRAWVDRLFITQTGSDSWVGRFDLWESEGDVRVCSLSSLALILKAESPEGFVLTHIQKTWLNGYSSGVEQAFKL

SEQ ID NO: 15963 - protein, 318 aa, Gibberella zeae PH-1
MSKQYLTTHTVDNAHITDIFSIATTPKAVISGSGSSTLHIHDTTDPSFPLKQSISDAHKLGCHHVCASRNGNVAASAGFGGEVKTWKVNNDTGEWSLSGEIAGASTKPGEAWALALSEDGSYLATTTNDGRINVWDIVDEKKPKIREYETGSAGSGSFGMSVDLSRDGKFTASGHQNGSVYIFNNDTGRVLYSLSGLAKPVRSVAFSPGNTRLAAAGDAGIIAIYDMKHGEHIANLTGHSSWITSLDWSDTGEYLLSGSMDGKVKVWSIERTTCVATHSETDKALWSVKWLPKTVRSEMFCTAGANRSLSFYREATGG

SEQ ID NO: 15964 - protein, 428 aa, Deinococcus radiodurans R1
MWAFNVQFGTSKGDDMISGLKRVVITGLGPVTPIGVGAKAYAEAQRAGKNGIGPITRFDAKDTASKIAGEVHDSLDDFVDPREARKLDRYTLLALSAAELAVRDSGLSAEDLRGERTGTLVGSGIGGMKTFEDQARVYVERGAGRISPMFIPMQIANMATGHIAMRYGAMGPSSTVVTACATGTGAIGEAARYIQLGLADVMLAGGAEASITAMAVGGFSNMKALSTRNDDPEHASRPFSATRDGFVLSEGAGVVVLEEYEHAKARGATIYAEVAGFGVSADAYHITMPAPQGAGAQLAMKMALHTAGVNPEQVGYINAHGTSTHFNDLHETQAIQHVFGDHAAQLAVSSTKSMTGHLLGAAGAIEAIAVAQALADGLLPPTINLTDPDPELPLDFIPEGARERQVDYALSNSFAFGGQNAALLLGRV

SEQ ID NO: 15965 - protein, 309 aa, Xanthomonas campestris pv. vesicatoria str. 85-10
MSGWTLADLPSQRGRVAIVTGASPGGLGYETALALAGAGAHVVLTARNPDRGEAARWALLARHSEAEVRVEALDLASLASVRAFAKRLTTRHAAVDLLINNAGVMAPPQRQTTADGMELQLGSNYLGHFALTAQVLPLLRAASAPRVVNLSSLAHRQARIDFDDLQSERPYRPWKAYGQSKLAMLMFSLELQRRSNTHGWGVRAIAAHPGIARTALIANGPDGAGRRSASGVATGLFTRCIGHSASAGARPTLYAATSPQAQAGGYYGPNGLFELKGDPAPAKIAHQAHDQQVAARLWDTACALTGVAF

SEQ ID NO: 15966 - protein, 134 aa, Triticum aestivum
SSSQLLPSSTVSSKQAEALDPRCLAWHWSPCSPCSRHWAVAEMASGAVTCGDVTSAVAPCMSYATGKASAPSGACCSGVRTLNAKASTPADRKAACNCLKNLAGSGISMGNAANIPGKCGVSVSFPISNKNQLQ

SEQ ID NO: 15967 - protein, 483 aa, Burkholderia sp. RP007
MDTQLIIDNADVPATAAATFERRSPTTGELVTRAAAASVADAIAAADSAAAAYRSWSTTGPTERRRILLKAADLLEARTPEFSRVMALEVGASDLWAGVNVMLAANLFREAAALTTQIQGETIPTDKAGVLSMTVRQPVGVILSIAPWNGPVVLAARAIAYPLVCGNTVVFRASELSPKTHMLIVDVLRDAGLPPGVLNAVTNAPQDAPEVVDALIAHPAVRRINFTGSTRVGRVIAEKAARHLKRCLLELGGKAPLVVLDDADIDEAVKAAVFGAFLYQGQICMSTERIVVDEKIADTFVARFAARARELPVGDPATCGGCVVGPMIVRESGDRINAMINDAVNQGANVVAGGFADGAVMPATIVDRVTPAMRIYDEETFGPITTVVRAKDADDAVRIANDTAYGLSSAVFGRDVTRALSVAMRIEAGSCHINGSTVQNEAQAPYGGTKASGYGRFDGRAVIDEFTELKWITIEPTPQSYPF

SEQ ID NO: 15968 - protein, 259 aa, Archaeoglobus fulgidus DSM 4304
MAAVEYREEDGVLWVKFNRPEALNAINKDFVKGLREVVDYARNNKTVRVIVLTGEGKAFCAGADIKMFSESSHFVARSTIEELGKVLEEMEDLEVPVIAAINGFALGGGCEIAMACDIIIASERASFGQPEINLGIIPGAGGTQRLARIVGWKKAMELCLTGERISAEEAYRLGLVNKVVEHDKLMDEAKKMAEVIKSKSPYAVMLVKQAVNRGFKMGLRDGIMYERDLFALSFSSPDAEEGIKAFVEKRKADFRRERE

SEQ ID NO: 15969 - protein, 211 aa, Triticum aestivum
  misc_feature (54)..(54): Xaa can be any naturally occurring amino acid
  misc_feature (76)..(76): Xaa can be any naturally occurring amino acid
  misc_feature (91)..(91): Xaa can be any naturally occurring amino acid
  misc_feature (100)..(100): Xaa can be any naturally occurring amino acid
  misc_feature (111)..(111): Xaa can be any naturally occurring amino acid
  misc_feature (142)..(142): Xaa can be any naturally occurring amino acid
  misc_feature (162)..(162): Xaa can be any naturally occurring amino acid
  misc_feature (192)..(192): Xaa can be any naturally occurring amino acid
KLYGVKLTMFHGRGGTVGRGGGPTHLAILSQPPETIHGSLRVTVQGEVIEQSFXGEEHLCFRTLQRFTAATLEHGXMHPPNFARNQEWRAXDGWRWAIVXATKEYRSIVFXEPRFVEYFPPCNAKRWEYGRMNIRSKPPKRXPSAGINPCAQPLVLAWTQSXPTAGVPGPRASNILDKGIRISDLKNSTWPXRDKTVKWVRCLNRLQKLWI

SEQ ID NO: 15970 - protein, 327 aa, Trichodesmium erythraeum IMS101
MAQTLLFNALRAAIDEEMAHDPTVYVLGEDVGHYGGSYKVTKGLYEKYGELRILDTPIAENSFTGMAIGSALTGLRPIIEGMNMGFLLLAFNQIANNAGMLRYTSGGNFKIPLVIRGPGGVGRQLGAEHSQRLEAYFQAVPGLKIVACSTPYNAKGLLKSAIRDENPVLFFEHVLLYNLKEDLPEDEYLLPLDKAEVVQTGKDVTILTYSRMRHHVTQAVQTLKKQGYDPEVIDLISLKPLDFETIGASIKKTHRVIIVEECMKTGGIAAELIASINEKLFDELDAPILRLSSQDIPTPYNGLLERLTIVQPEQIVEAVQKMVAIKV

SEQ ID NO: 15971 - protein, 501 aa, Candida albicans
MDQQEAPIYYGRSVNKVYNQEFIIDSRFKIVKELGHGAYGIVCSAKYDNGSKKVPDSNNGNASSSANASFVAIKKITNIFSKNILCKRALRELKLLQFFRGHKNITCLYDLDIIPNPMTGEFNEIYLYEELMECDMHQIIRSGQPLSDQHYQSFIYQVLCGLNFIHSADVLHRDLKPGNLLVNADCELKICDFGLARGFSENPDENAGFMTEYVATRWYRAPEIMLSFTNYTKAIDIWSVGCILAELLGGKPLFRGKDYVDQLNQILMILGTPPESTLQRIGSHRAQNYVRSLPITRKASYEELFPDANPLALDLLERMLTLDPRERITVRDALNHKYLELWHDPKEEIECQVKFDFKSFETVDGLDEMKQLIMDEVQKFREFVRKPIEEQQRIQMQLHMQKREEQRQEEEEKELLEQQRQFPAQESMDISQTPYNNLETNIGTPQVEDDYPRPQELDEFTFSNLESSSSMNLFQDMAKPSGEEYIKLEEELGFGLDWCYV

SEQ ID NO: 15972 - protein, 345 aa, Kluyvera cryocrescens
MIRCIAWGSRVGATLMSQNTLKVHDLNEDAEFDENGAETFDEKVLNEEEPSDSELAEEELLSQGATQRVLDATQLYLGEIGYSPLLTAEEEVYFARRALRGDVASRRRMIESNLRLVVKIARRYGNRGLALLDLIEEGNLGLIRAVEKFDPERGFRFSTYATWWIRQTIERAIMNQTRTIRLPIHIVKELNVYLRTARELSHKLDHEPSAEEIAEQLDKPVDDVSRMLRLNERITSVDTPLGGDSEKALLDILADENENGPEDTTQDDDMKQSIVKWLFELNAKQREVLARRFGLLGYEAATLEDVGREIGLTRERVRQIQVEGLRRLREILQGQGLNIEALFRE

SEQ ID NO: 15973 - protein, 917 aa, Pseudomonas tolaasii
MLRRMGIKGRVLLLTLLPTSLMALLLGGYFTWMQLSELQTQLLQRGEMIAEQLAPLVAPALSTRNTDLLERIATQSLEQPDVRAVSFLAPDRSPLAHAGPTMLNQPPVGNSSHLLQRSGNDATRYLLPVFGRHRNLAGELIPDEADRLLGWVEVELSHNGMLLRGYRSLFASLLLIAIGLICTAALALRISRTINSPIGQIKQAVAQLKDGNLETRLPPLGSQELDQLASGINRMAETLQNAQEELQHSIDQATEDVRQNLETIEIQNIELDLTRKEALEASRIKSEFLANMSHEIRTPLNGILGFTHLLQKSELSPRQLDYLGTIEKSADNLLGIINEILDFSKIEAGKLVLDSVPFNLRDLLQDTLTILAPAAHAKQLELVSLVYRDTPLALVGDPLRLKQILTNLISNAIKFTREGTIVARAMVEDEEEDSVQLRISVQDTGIGLSNQDVRALFQAFSQADNSLSRQPGGTGLGLVISKRLIEQMGGEIGVDSTPGEGSEFWISLNLPKTRDDVDDLPSAPLLGRRVAVLENHELARQALQHQLEDCGLEVTPFNTLESLTNGITSTHQTEQAIDLAVLGVTANDIPPERLNQHLWDLEHLGCKVLVLCPTTEQMLFNQSVPNPNSQLQAKPACTRKLRRALADLISPRPLRSEPGEPLSSRAPRVLCVDDNPANLLLVQTLLEDMGAKVLAVESGYAAIDAVKQETFDLVLMDVQMPGMDGRQSTEAIRQWESERHGTPLPVVALTAHAMANEKRALLQSGMDDYLTKPISERQLAQVVLKWTGLALRNQGPERGNDNLGHGVQLLVLDHEEGLRLAANKADLAADMLAMLLASLEADRLAITVAREAKDNNALIERVHRLHGATRYCGVPQLRAACQRAETLLKQDDAKAMAALDELDMAIARLASEARVNA

SEQ ID NO: 15974 - protein, 346 aa, Crocosphaera watsonii WH 8501
MSRYAEELRTTAKAMVARGKGILAMDESNGTCNKRFDKLGIPTTEEYRQIYRSLILQTPELSNYISGPILYDETIRQTTPDGVPLLKIITDAGMIPGIKVDTGAKDLAGCPNEKVTEGLDGLRDRIAEYYSMGARFAKWRAVITIGNGIPSRGCIKANAHGLARYAALCQEGGLVPIVEPEVLIDGDHTLERCWNVTDETLHEVFNQLYTQNVAFDQMVLKPSMVISGKDCPQQASVEEVAKATISCLLKNVPATVAGIAFLSGGQSKEQSSAHLNAMNQMFGDQCPWPVTFSYARAIQQPALDYWAGDSSRISGAQTRLLKRAQCNGAASLGEYSSEMEKTLATV

SEQ ID NO: 15975 - protein, 828 aa, Pasteurella multocida subsp. multocida str. Pm70
MNLSRRDFMKTNAAVAAAAVAGLAIPVKNVEASPDKIIKWDKAPCRFCGTGCSVLVGTQNGRVVASQGDPDADVNRGLNCIKGYFLPKIMYGKDRLTSPMLRMTNGKFDKHGEFTPVSWDQAFTIMAEKFKKALKEKGPNGAGMFTSGQSTIFEGIAKSKLFKAGLRSNNIDPNARHCMASAAVAFMRTFGMDEPMGCYDDIEKADAFVLWGSNMAEMHPILWSRISDRRLSHPDVKVAVLSTFEHRSFELADLGVIFTPQSDLAIMNYIANYLIQHDAIDHDFIQKHTKFKRGETDIGYGLRETHELEKAAKNVKTAGKMHDSDFEEYKKLVAPYTLEKAHEISGVPKEQLEALAKMYADPKLNIVSFWTMGFNQHTRGVWANHLIYNIHLLTGKISKPGCGPFSLTGQPSACGTAREVGTFAHRLPADLVVTNPKHVEKAEKLWKLPKGVIQTQVGYHAVAQDRALKDKKMNVLWQMCTNNMQGGPNINQERFPGWRDEENFVIVSDPYPTVSALAADLILPTAMWVEKEGAYGNAERRTQFWYQQVKAPGESKSDVWQLVEFSKYFTTDEMWPAEVLAANPEYKGKTLYEVLFRNGQVDKFQVPTDKPGYMNDEAEHFGFYLQKGLFEEYAVFGRGHGHDLADFETYHKARGLRWPVVDGKETLWRYREGYDPYVKEGEGVAFYGYPDKKAIILAVPYEPPAEAPNAEYDLWLTTGRVLEHWHTGTMTRRVPELHRSFPNNLVWMHPLDAKKRGLRHGDKVKISSRRGEMISHLDTRGRNKVPQGLVYTTFFDAGQLANYLTLDATDPISKETDFKKCAVKVEKA

SEQ ID NO: 15976 - protein, 483 aa, Brucella melitensis 16M
MDMQEELMYPNLTLIVGGEERNKGSAGTLCLTDPADGRELTIAPRAGRAEALQAAAAEKGFAEWSALSALERSKIMRRAADIMRERADAAARIMSMEQGKPLSEARGEWLGSADLLDWFAEEGRRVYGRIVPSRAPNIQIQVLKHPIGPVAAFTPWNFPAWNTMQKVAPALGAGCSVVIKPASDTPGTAWLIGKCLLEAGLPPKAVSVIWGTTSELSDALIKAPEIRKVSLTGSTRVGRIVAAQAGEYLKKVTMELGGHGPVIVAADADLDHLIPLAVQWKFRNCGQVCVSPTRFIVEASIHDEFIRRFSEKARELKVGKGVEEGAQMGPLTSQNQLETVLSMVEDALTKGAKIETGGNRIGDTGNFYEPTILSGMTAEMLAMNEEPFGPLALVMRVHSLDEAIAESNRLPVGLGAYLFTSSMTTAHRVQNHLQAGMLGVNHFALALPETPFGGVRDSGFGSEGGLEGIEAYLTTMTVTTMMV

SEQ ID NO: 15977 - protein, 567 aa, Vibrio vulnificus YJ016
MTKIVIVGGVAGGASAAARARRLSEDAQIIMFERGPFVSFANCGLPYHIGGDIKERSKLLLQTPESFLARFNVDVRVMNEITAINRHEKTVTVKNLIDGSEYAESYDFLLLSPGAGPVVPPIPGIDNPLTHSLRNIPDMDRIIQTIQTNNVEHATVVGGGFIGLEMMEAFHQLGIKTTLLELADQVMTPVDREMAGFAHGEIRAKGIDLRLGTALSSVEYIANDHVASENAGEDIQHQHISGHLALSLSTGDTLNTDVLIMAIGVRPETKLAQQAGLQIGELGGIYTNDMMQTSDPSIYAVGDAVEEKDFVTGKQTLVPLAGPANRQGRMAADNMLGRSERYQGTQGTAICKIFDLAVASTGKNEKQLKRDGVEYEKVYVHTASHASYYPGAEIVSFKMLFDPKTGKIFGAQAVGKDGVDKRIDVMAVAQRAGMTVEQLQHLELTYAPPYGSAKDVINQAAFVANNLIKGDAKAIHFDEIEHLNDDQLLLDVRNPGELQAGGYLPGAINIPVDQLRQRMDELPKDKEIIIYCQVGLRGNVAYRQLVNNGYKARNLLGGYRTYMFSKC

SEQ ID NO: 15978 - protein, 171 aa, Poa secunda
MVKYSTDPANPTKSAKAMGRDLRVHFKNTRETAFALRKMPLNKAKRYLEDVLAHKQAIPFRRYCRGVGRTAQAKNRQPNGQGRWPAKSAQFVLDLLKNAESNAEVKGLDVDALYISHIQVNQAQKQRRRTYRAHGRINPYMSNPCHIELILSEKEEPVKKEAESQIAPRKA

SEQ ID NO: 15979 - protein, 486 aa, Vibrio angustum S14
MDMKSLYIDGNYVAASSDIQFTTINPANGQSIATIGQASQADLELAISAAKKGFAIWSAMTATERSRILLRAVALLRERNDELAVLEVTDTGKPLQEAIAVDIETGADVIEYFAGLAPGLQGEQQPLSENQFFYTRREPLGICAGIGAWNYPIQIAMWKSAPALAAGNAMIFKPSEETPLSVLKLAEIFTEAGLPDGVFNVVQGDYRVGQMLTVHPEIAKVSFTGETGTGKAVMADSAQTLKSVTMELGGKSPMIIFDDANVDHAVSAAMVANFYTQGEVCTHGTRVYVHEAIYDTFIEQLKRRTELLIVGDPMNMETQIGALISTSHLSKVLSAIDAAKQSGATLLTGGYQCTDNGLAHGNFVQPTVFIDCDESMSHVQNEIFGPVMSVIKFSDENDVIARANNTHYGLAAGVFTQNLAKAHRVIHQLQAGICWVNTWGDSPAQMPVGGYKQSGIGRENGIETLQHYTQTKSVLIELGDYQSPYA

SEQ ID NO: 15980 - protein, 254 aa, Triticum aestivum
  misc_feature (63)..(63): Xaa can be any naturally occurring amino acid
GCSRPRWAAGHSNSLLQNPNHLQLLERALEASGDDLDFAIRSLNDLRLESAEAIFSAAVGETXNGLSTALKLTAEGNGQLDAISGNPPATDNCQTNHHSSEWVELFVREMMSASDINDARARASRALEVIEKSIMERTGAEAVQNLHKENTMLKEQLAIALRENAVLKRGVAIQHERQKEFDDKTQEVHNLKQLILQYQEQLKTLEINNYALRMHLQQAQQNSSMPTCPGGRSKSLVRPPAGRPYGRAPNALDA

SEQ ID NO: 15981 - protein, 461 aa, Treponema pallidum subsp. pallidum str. Nichols
MAHLPKEYDFSIESLGESKIPSPIYLSHTLGDFIPNYVSDNEYISHELSARLGETVGPFTHKNLMERAGPRQKIFFNPHHVHAGIVTCGGLCPGLNDVIRAIVRCLWGRYGVKRISGIRFGYKGLLPDYNFDILPLTPEVIDNCHKTGGSLLGTSRGGGNRVVDIVDGIERLNLHILFIIGGDGSQKGAKEIADEIKHRNLKISIIGIPKTVDNDISFVQKSFGFDTAIVKATEAVAAAHMEARSQINGIGLVKLMGRESGFIATYTAIASHETNFVLIPEVSFDLDGPNGLLAHLEKRIALRKHAVLVVAEGAGQDLMVNADGVPSGDSQGGSLRVSSGTDASGNKRLADIGLFLKEKIGVYFKEKRIHINLKYIDPSYLIRSAVAAPIDSIYCERLGNNAVHAAMCGKTKMIIGLVHNKFVHLPIDVVVCQRKHVNPEGSLWRDALDATGQPIVMKNII

SEQ ID NO: 15982 - protein, 144 aa, Vibrio vulnificus YJ016
MSTFHSRCPSCGGMNRLPVERVSDNPSCGKCKSDLLDGAPIEGTNDNFAHLLQSDQPVVVDFWAPWCNPCVGFAPVFQDVAAERKGKVRFIKINTEIEQQLAAQFQIRSIPTVMVFKNGQRVDVINGALPKSQFDQWLNQALTK

SEQ ID NO: 15983 - protein, 545 aa, Cryptococcus neoformans var. neoformans JEC21
MPEGGNNQTSVNISKEDLKVETEHYENVAYIASTHDGLIDENLVRAENEDKVTPYFMFLISVAAIAGFLFGYDTGIVGAALPMVDTALGHTLSATESEIITAGTTIGAIFGASILGTMADKLGRKWAMVISDFAFTAGAIIIAASYSVPQIIVGRLVLGVGVGGAAVIAPLYIAELAPTAVRGRCVGVNAFCIPFGQVIASAIGAGFQAGVPYHIGWRVLFALGVVPSVVQLCLMHFLPESPRVLVLRGKEQEARVCLKKIYGAATDDIIDLKLRIVKQYVAATTAMQRDLSFTERAKKYWTHKPYRRAIISISGVQAFGQLTGFNTLLYYSGTIFGLLGIKNGSAAGLIPSCLNALFVFIGMSIVDKVGRRKLMVTFIPGMMIAFTWTIISFHYLTKPTGGLLLKDYQYSTPLVGSVLGSIVLFVIPYGLTYSHIIWYQSEFLPLEIRAAGSAISTTACWLANLVVSVAYLTQLEKLGATGTYGLYLGFITIGYVFVYFCYPETKGLSIDETAEIFIDGFGIEKAHQMLREKRAFAAELHANRA

SEQ ID NO: 15984 - protein, 306 aa, Synechococcus sp. WH 7805
MGWTIEDMPDQQGRVALVTGANSGLGLETTRALIGRGCTVLMGCRSARKGEAARALLLEAGGSGLDLFELDLSDLTSVARCARDVADRYGRLDLLINNAGLMAPPRMLSQQGHEMQFAVNHLGHFALTQALLPLMNNRPQARVVTVTSGAQYFGAMAWDDLQGEQRYDRWKAYSQSKLANVMFALELNQRLQASGSAVRSLAAHPGLARTNLQPVSVAATGAWQEALAYRLMDPLFQSAAQGALPQLYAATASAAGGGEHYGPGQLGGMRGAPKQQPVARAAKDQHQRQRLWTVSESLTEHHSAAV

SEQ ID NO: 15985 - protein, 630 aa, Burkholderia thailandensis E264
MRRPSARNAPMPRRASSSSSTRPVRDGRRSGFGSSFFVATFGQHAGSRVAADVFPGTALRRSPRAAHERDFSTHERPASPRFQAAPRPHPADKDTTRNRVSACALAASQIDAYHIQQLRLQTESSRAARCTSNRAEAASLLYTDSPMLNVDQPTPLARALEQSYRHGFVTDIESDSLPPGLDENVVREISRRKREPAFLLKWRLAAFERWLAMAPPDWGQLRIAPIDFQAQSYYSAPKSLKDRPKSLDDVDPKLLETYEKLNVPLHERARLAGVAVDAVFDSVSVGTTFREQLAEAGVIFCSFSHAVEHHPELIERYLGTVVPPADNFYAALNSAVFSDGSFVYVPQGVRCPMELSSYFRINAQNTGQFERTLIIAEPGSHVSYLEGCTAPQRDEHQLHAAVVELIAHDDAHIKYSTVQNWYPGDANGVGGIYNFVTKRGLCAGARSRIAWTQIETGSAITWKYPSVVLRGDESSGEFHSIAVSNHCQQADTGTKMIHLGRNTRSRIVSKGISAGRAQNSYRGLVRVARTAEGARNHTQCDSLLIGPQCGAHTFPYVESARDDAVVEHEATTTRISEDRLFYCQQRGIDPQEATALIVGGFCQAVLEALPMEFALEAKALLAVSLEGAVG

SEQ ID NO: 15986 - protein, 356 aa, Triticum aestivum
  misc_feature (168)..(168): Xaa can be any naturally occurring amino acid
  misc_feature (201)..(201): Xaa can be any naturally occurring amino acid
  misc_feature (240)..(240): Xaa can be any naturally occurring amino acid
MFADAGFSFSAYSSSPPGPAYSYSYSYSSSPTVLSHPHPDHSSFSSPPSSAAPAQPPPPPLPLPLPLLHQQHQHQHQHQAAAAVATASNDDDDDAMYHHLGDMGQPSLISEYDLGAEGDLFKAPEPIIEEPLLVIDPVPKRISMMPRQCGAAYDSIHRGVERVSVRCXRKAVMGEVADPRAPFSELLGVQHPPFPGSRDSXPGSSGPPSLLTSGRRHPASAPLQKSVSSGCLSSGDWITXSAVRPNFLDFQGLDFEAAFGLRRAYSEGDIQKLGANTPRPGIAANVQASGERLVTISDLKSEERKQKLNRYRKKKIQRNFGRKIKYACRKALADSQPRVRGRFAKMDDGDMLKPRK

SEQ ID NO: 15987 - protein, 347 aa, Vibrio vulnificus CMCP6
MFFEWQGNEPATLQCVDKFFETDDTVSIRLADLTESLLFQFKPGQFVNLGVEIDGKMEFRAYSISSLAGEEYLQFTIKRVEGGKVSNFIIDSLLIGDTVQALAPAGEFNCVDHPPRELDGQGKALLISAGCGVTPVFAMAKHWLNNEMNVDIEFLHIARSAQETIYFDHLSTCQSAYAHFHLKLLLKDAQGTTHPQGRFNAQWLQDLVPDFATRTIYLCGPNQFMQDTQDYLQALGFDMNHFYHESFTPEKVEAMEASDEEVCISVPDFAQTINAKKGQLLADVLENAGLPLIVACRSGICGSCKCKVANGQVRSISQETLTTEEIAQGYVLACSSHIESDLEVCLH

SEQ ID NO: 15988 - protein, 310 aa, Carica papaya
MENFPVINMEGLNGEERAATMKKIEDACENWGFFELVNHGIPIELLDTVERLTKGHYRKCMEQRFKEIMASKGLDGIQTEVTDMDWESTFFIRHLPEPNIAEIPDLDDEYRKVMKEFALKLEKIAEELLDLLCENLGLEKGYLKKAFYGSRGPTFGTKVSNYPPCPKPNLIKGLRAHTDAGGIILLFQDDKVSGLQLLKDGKWVDVPPMRHSIVVNLGDQLEVITNGKYKSVEHRVVAQTDGTRMSIASFYNPGSDAVIYPAPILVEKETEEKKTAYPKFVFEDYMKLYAGLKFQAKEPRFDAMKAAAKA

SEQ ID NO: 15989 - protein, 90 aa, Synechocystis sp. PCC 9413
  misc_feature (6)..(7): Xaa can be any naturally occurring amino acid
KKVEAXXRPFKLDEVKIALVNSGVVGMTVSEVRGFGRQKGQTERYRGSEYTVEFLQKLKVEIVVEDNQVDMVIDKIIAAARTGEIGDGKN

SEQ ID NO: 15990 - protein, 494 aa, Bacillus anthracis str. 'Ames Ancestor'
MLTTNIELKPKVKAFLDEEIKMFINGEFVPSISGKTFETYNPATEDVLAVVYEAQEEDIDVAVKAARSAFESGPWVEMTTAERAHLIYKLADLIEEHGEELAQLEALDNGKPYQVALDDDIAATVENYRYYAGWATKIIGQTIPISKDYLNYTRHEPVGVVGQIIPWNFPLVMSSWKMGAALATGCTIVLKPAEQTPLSLLYTAKLFKEAGFPNGVVNFVPGFGPEAGAAIVNHHDIDKVAFTGSTVTGKYIMRQSAETIKHVTLELGGKSPNIILEDADLEEAINGAFQGIMYNHGQNCSAGSRVFVHRKHYETVVNELVKMANNVKLGAGMEKDTEMGPLVSKKQQERVLHYIEQGKAEGATVAAGGERAFEKGYFVQPTVFTDVTDDMTIVKEEIFGPVVVVLPFDSTEEVIERANRSSYGLAAGVWTQNIKTGHQVANKLKAGTVWINDYNLENAAAPFGGFKQSGIGRELGSYALDNYTEVKSVWVNIK

SEQ ID NO: 15991 - protein, 403 aa, Listeria monocytogenes str. 1/2a F6854
MKIIVQKFGGTSVQNEKSRLMAFNHIKQVLKEGYKVVVVVSAIGRYGDPYATDTLLELIGAKNTKLTAREQDTLLSVGETISASVFTNMLKEANIKAEAFSGGQAGIITSDDHLNAKITEVDTARLKDALTNLDVAVVAGFQGITANGDISTLGRGGSDTSAAALGVSLQANYIDIFTDVDGMMTADPRIVEHARSLPRVSYNEVSNMAYQGAKVIHPRAVEIAMTAKIPMRIRSTYLESTGTLVTSLADDSGHFDVKERMVTGVAHVTNLTQISVQTDTVKAQQLAFKILADAGISLDFINISTNSVIFTVPEEKSHVVKQLLEDADLQTTVRQACAKVSIVGAGITGVPGVTAKIVGALSEKNIPILQSADSHTTIWVLVREKDLISAVNALHDVFCLEIK

SEQ ID NO: 15992 - protein, 315 aa, Candida glabrata CBS 138
MVSFPRQGPPEAHRDHMSVVGLKNAVAKLVSPGASKLPGTYGSMDSDATRVGDVNVNGSGSGSGTKYDNGNDIEASVDGGEREGLFSNVDPRVISDLIIGLSDGLTVPFALTAGLSSLGDAKLVITGGFAELISGAISMGLGGYLGAKSESDYYHAEVKSEKRKFYENMTLINHEIEDILLDINPDFSDETIVSFFKDLQRKPELMVDFIIRYGRGLDEPAENRQFVSAVTIGGGYLLGGLVPLVPYFFVKEVGTGLIYSIVVMAITLFWFGYIKTMVSMGESCTTNKKVSEGLQMVAVGGVAAGAAWFFVKLLG

SEQ ID NO: 15993 - protein, 304 aa, Candida albicans SC5314
MDISEVISITRPSTFNNIDNINNDDNNLDIEMSDEQDHTQSASATATAAANSIVTPGELITEDPTWMKGHGTYFINDKTYSSVAGSISRVNRLLSVIPLRGRYSPETGDHVIGRITDVGNKRWKVDIGAKQDAILMLGSVNLPGGVLRRKSESDELQMRNFLKEGDLLNCEVQTIFNNGIASLHTRSLKYGKLRNGIFLKIPSPLIVKTKNHAFDLPGNVSIVLGTNGYIWLYKTPKINKSLENNTPGITRLEEESSWEIYSDKNEFIDVQTRNNIAKYYNIIKSLAEKEQKINNDVLVEAFDY

SEQ ID NO: 15994 - protein, 198 aa, Wolbachia endosymbiont of Drosophila simulans
EFILLPLYPQYSTTTTLSSIENWQKNAKRYGLKCNTKMIHRYYDNQDFIEAHTNLIAKYYKLARKIGKPRVLFSAHSLPLSIIKKGDPYASQVERSVELIVEKLAINNLDWSICYQSKIGPVKWLEPSTESELLRAKADGVPVVLSPISFVSEHSETLVELDIEYKAIIKDGYYFRVPTLSTDPLFIKCLADLCINLP

SEQ ID NO: 15995 - protein, 489 aa, Gibberella zeae PH-1
MSAKSILEADGKAILNYHLTRAPVIKASPLPAPTTHNPPSRLASLHFPEDANVADILNQAEVTYPWLLQPDAKFVAKPDQLIKRRGKSGLLALNKSWPEAKAWVAERAGKEQQVEHTTGVLRQFLVEPFVPHPQDTEYYININSVRDGDWILFTHEGGVDVGDVDAKAEKLLIPVDLAEYPSNEEIAATLLKKVPQGVHNVLVDFITRLYAVYVDCQFTYLEINPLVVIPNEDKTSAEVHFLDLAAKLDQTADFECGVKWAIARSPAALGLTNIAPSADGKISIDAGPPMEFPAPFGRELTKEEAYIADLDAKTGASLKLTVLNAKGRIWTLVAGGGASVVYADAIASAGFADELANYGEYSGAPTESQTYHYARTVLDLLLRAPKTEEGKVLFIGGGIANFTNVASTFKGVIRALRDFAPKLIEHKTAIWVRRAGPNYQEGLKNMKAATQELGLDAKIFGPEMHVSGIVPLALVPGKWEESKAQEFQA

SEQ ID NO: 15996 - protein, 191 aa, Triticum aestivum
MGTDAPAPAPAAAAGDGDAARKRPGGQDAAAGADSKRRRAEHPSSGSRERHGQQPQPQPQRQQRPGRPGDGGKGKRETMRASHILIKHEGSRRKASWRDPDGVAISATTRDDAADLARALRDQIAAGELQFDAAARDNSDCNSAKRGGDLGPFEKGKMQKPFEKAVIALKVGDMSDVVDTESGVHIILRTG

SEQ ID NO: 15997 - protein, 479 aa, Vibrio cholerae O1 biovar eltor str. N16961
MLYKKHSLHNIGRWVTNNSFFRKSGRIAVSTFNVAKFGGTSVANFEAMSRCSAIIENNPQTRLVVSSACSGVTNLLVELANGVASTERRQAILQQLADIHYVIIDQLADPTRVEKEVKAVLDSVASAAEAASFQSSKKLTDHLVACGELISTYILTQLMRERGVDAVRFDIREVLRTDDHYGRAEPQLKEIAQLAKEKLVPLCEQYVVVTQGFIGSDAQGNTTTLGRGGSDYSAALIAEAVQASGLEIWTDVPGIYSTDPRIAPKAAPIPEISFSEASEMANFGAKILHPSTLLPAVRHGIPVFVGSSKEPEKGGTWIRKQVESAPLYRALALRCNQTMVTLRSAQMFHAYGFLAKVFEILAKHKISVDLITTSEISVSLTLDKTDTSGGAPELPEAVRAELEELCTVEVEYNLCLIALIGNKMKESRGYAKQVFSVLEDYNLRMICYGASAHNLCFLLHESVSKQAVQKLHKELFEQE

SEQ ID NO: 15998 - protein, 287 aa, Magnetospirillum magnetotacticum MS-1
  misc_feature (32)..(32): Xaa can be any naturally occurring amino acid
  misc_feature (34)..(34): Xaa can be any naturally occurring amino acid
MVASNDAPLGTAFTVTVDVRHGLTTGISAEQXAXNTVRALANGNMGAGDFVRPGHVFPLIARDGGVLMRSGHTEAAVDLCRLANLPPVGVICELANDDGTVMKGPQIDAFSEQHGLKRVSVADLIAYRQARDRLVERVGSFPVKTEFGAMTGYAYVTPFEPIQQFAFVHGAIGDGRNMPVRLHRSNVVADVIEGGGQIEAVMRRFAKEGRGILVYLRDGTAGVPLNRYADEGAEAQRVRQWREVGLGAQILRDLGVVSIRNLSSSSRSYVGLSGFGIELVGEEPLEG

SEQ ID NO: 15999 - protein, 541 aa, Triticum aestivum
MEVGTWAVVVSAVAAYMAWFWRMSRGLRGPRVWPVLGSLPGLVQHAEDMHEWIAGNLRRAGGTYQTCIFAVPGVARRGGLVTVTCDPRNLEHVLKARFDNYPKGPFWHGVFRDLLGDGIFNSDGDTWLAQRKTAALEFTTRTLRTAMSRWVSRSIHGRLLPILADAAKGKAQVDLQDLLLRLTFDNICGLAFGKDPETLAQGLPENEFASAFDRATEATLNRFIFPEFLWRCKKWLGLGMETTLTSSMAHVDQYLAAVIKKRKLELAAGNGKCDTAATHDDLLSRFMRKGSYSDESLQHVALNFILAGRDTSSVALSWFFWLVSTHPAVERKIVRELCSVLAASRGAHDPALWLAEPFTFEELDRLVYLKAALSETLRLYPSVPEDSKHVVADDYLPDGTFVPAGSSVTYSIYSAGRMKGVWGEDCLEFRPERWLSADGTKFEQHDSYKFVAFNAGPRVCLGKDLAYLQMKNIAGSVLLRHRLTVAPGHRVEQKMSLTLFMKGGLRMEVRPRDLAPVLDEPCGLDAGAATAAAASATAPCA

SEQ ID NO: 16000 - protein, 93 aa, Brassica rapa
MAKRTKKVGIVGKYGTRYGASIRKQIKKMEVSQHSKYFCEFCGKYGVKRKAVGIWGCKDCGKVKAGGAYTMNTASAVTVRSHTIRRLREQIEG

SEQ ID NO: 16001 - protein, 121 aa, Triticum aestivum
MQPRQPTNDNDINRHPQTLTRRASYPCENYETERKGLGKRTLGDPQVTMGTSMVVDGSFVSSVSSDNSVEESSFRQLQDAVSQLDVQTKLCIRDGLYRLARSAQHRQVFPNMMNNNGDSQD

SEQ ID NO: 16002 - protein, 421 aa, Ehrlichia ruminantium str. Welgevonden
MLPNITQLSNSFTIITDTMPYVESVSINIWVNVGSRHENTNIAGISHFLEHMAFKGTKTRTALDIAQIFDNIGGNFNAHTDREHTVYHVKILKRDIKIAIEVLADIILNSQFPQEEIDREKGVVLQEIYQTNDSPTSIIFDKYIEAAYPNQVFGKSILGTPESVSNLSKENLHTYMQEHYHAGNMLLSVAGNITHNEVIDLATQYFSQIKKSTPQETNKSVYISGEYREERDLEQVHIVIGFPSSSYKDDQFYVIQILDSILGNGMSSRLFQKIREQLGLVYSISSFNSSYSDNGIFSIYTATDKNNLPQLLDAIAAEVQGIYINLEENEVIRAKDKLTSEILMSRESTTARAESLGYYYSHYNRYITKEELLKKISEITMEDILNCISRLLRSNNKITLAAIGQIETLPSYNDICQMFHI

SEQ ID NO: 16003 - protein, 369 aa, Arabidopsis thaliana
MEMMKIDPLFDRASELKAFDETKTGVKGLVDSGVSQVPRIFHHPTVKLSTPKPLPSGLLHLKTIPTIDLGGRDFQDAIKRNNAIEEIKEAAAKWGFFQVINHGVSLELLEKMKKGVRDFHEQSQEVRKEFYSRDFSRRFLYLSNFDLFSSPAANWRDTFSCTMAPDTPKPQDLPEICRDIMMEYSKQVMNLGKFLFELLSEALGLEPNHLNDMDCSKGLLMLSHYYPPCPEPDLTLGTSQHSDNSFLTVLLPDQIEGLQVRREGHWFDVPHVSGALIINIGDLLQLITNDKFISLEHRVLANRATRARVSVACFFTTGVRPNPRMYGPIRELVSEENPPKYRETTIKDYATYFNAKGLDGTSALLHFKI

SEQ ID NO: 16004 - protein, 80 aa, Zea mays
  misc_feature (53)..(53): Xaa can be any naturally occurring amino acid
MADWGPVVIAVVLFVLLSPGLLFQLPGRSRVVEFGNMQTSAISILVHTIIFLXLITIFLIAIGVHIYTWLGLFYSFFGKV

SEQ ID NO: 16005 - protein, 158 aa, Escherichia coli
MHCHSAFSFSNFLTSCSLSRFSFLAHRLQYLLRVAEPLPNSDRRGSMKLVTVIIKPFKLEDVREALSSIGIQGLTVTEVKGFGRQKGHAELYRGAEYSVNFLPKVKIDVAIADDQLDEVIDIVSKAAYTGKIGDGKIFVAELQRVIRIRTGEADEAAL

SEQ ID NO: 16006 - protein, 661 aa, Daucus carota
MDTYHFLPSRDLEHASSYTPRPDSPETRHEPDPDRSKTNRRPIKIVSSVLLSTLILSFVIFLLVNPNVQQVVRKKVSKNSNGEDRNKASKSPEMLGPPSRGVSQGVSEKSFRQATAEPSYPWTNDMLSWQRTSFHFQPQENWMNDPNGPLFHMGWYHLFYQYNPDSAIWGNITWGHAISRDLINWLHLPFAMQPDQWYDINGVWTGSATILPDGKIVMLYTGDTDDLVQVQNLAYPANLSDPLLLDWIKYPDNPVMFPPPGIGSTDFRDPTTAWIGPDGKWRITIGSKVNKTGISLMYKTTDFITYELLDNLLHAVPGTGMWECVDFYPVSVTVSNGLDTSVNGPGVKHVLKSSLDDDRHDYYALGTYDPINDKWTPDNPELDVGIGLRLDYGKYYASKTFYDQDKERRLLWGWIGESDNESTDLLKGWASVQSIPRTVVFDKKTGTNILQWPVKEVESLRSRSYEINDVELKPGSLVPLKISSAAQLDIVASFEVDEEAFKRTYEADASYNCTASEGAAGRGILGPFGILVLADDPLSELTPVYFYIAKGVDGNAKTYFCADQSRSSTASDVDKEVYGSDVPVLPGESLSMRLLVDHSIVESFAQGGRTVITSRVYPTRAIYSAARVFLFNNATGVSVTASVKAWQMASATLKPFPFDQL

SEQ ID NO: 16007 - protein, 184 aa, Vibrio cholerae O1 biovar eltor str. N16961
MAVTPVSRANHVVAVALSKIFVNSKIKCTQKANFPKNRYPESKELLMSNHRILHTMLRVGDLDKSIEFYTQVMGMSLLRKNENTEYKYTLAFLGYGDESQGAVIELTYNWGVADYEKGNAYGHIAIGVDDIYATCDTIKAAGGIVTREPGPVKGGTTHIAFVKDPDGYMIELIQNKQAHAGLEG

SEQ ID NO: 16008 - protein, 355 aa, Glomerella cingulata
MSRANPPNASGSRKISFNVSEQYDIQDVVGEGAYGVVCSAIHKPSGQKVAIKKITPFDHSMFCLRTLREMKLLRYFNHENIISILDIQKPRSYETFNEVYLIQELMETDMHRVIRTQDLSDDHCQYFIYQTLRALKAMHSANVLHRDLKPSNLLLNANCDLKVCDFGLARSAASQEDNSGFMTEYVATRWYRAPEIMLTFKEYTKAIDVWSVGCILAEMLSGKPLFPGKDYHHQLTLILDVLGTPTMEDYYGIKSRRAREYIRSLPFKKKVPFRTLFPKTSDLALDLLEKLLAFNPVKRITVEDALKHPYLEPYHDPDDEPTAPPIPEEFFDFDKHKDNLSKEQLKQLIYQEIMR

SEQ ID NO: 16009 - protein, 396 aa, Methylobacillus flagellatus KT
MAKGKFERTKPHVNVGTIGHVDHGKTTLTAAITTVLTKKFGGEAKDYSQIDNAPEEKARGITINTSHVEYETETRHYAHVDCPGHADYVKNMITGAAQMDGAILVVSAADGPMPQTREHILLARQVGVPYIIVFLNKADMVDDAELLELVEMEVRELLSKYDFPGDDTPIIKGSAKLALEGDQSDIGEPAIFRLAEALDTYIPTPERAVDGTFLMPVEDVFSISGRGTVVTGRVERGIVKVGDEIEIVGLKPTIKTTCTGVEMFRKLLDQGQAGDNVGVLLRGTKREEVERGQVLAKVGSIKPHTKFTAEIYVLGKDEGGRHTPFFNGYRPQFYFRTTDVTGAVELPAGTEMVMPGDNVSISVSLIAPIAMEEGLRFAIREGGRTVGAGVVAKIIE

SEQ ID NO: 16010 - protein, 123 aa, Zea mays
MAAPKLATLALAVLLAATVVAPPAAVRAAMSCSTVYSTLMPCLPFVQMGGAMPPQPCCGGIRSLLQQANNTPDRRTICGCLKNVANGANGSGTYISRAAALPSKCGVALPYKISTNVNCNTYG

SEQ ID NO: 16011 - protein, 413 aa, Chromobacterium violaceum ATCC 12472
MSKRRVVVTGLGHVSPVGNDVATGWANLLAGKSGIAKITRFDASDMACQIAGEVKDFNIGDYISPKEARRNDLFIHYGIAAALQAVADAGLDDIPGLDKTRVGVNIGSGIGGLPLIEETGVALMEGGPRKIGPFFIPGSLINLIAGQVSILKGYQGPSYGIVSACTTGAHCIGDAARLIQYGDADIMVAGGAEGAVSRLGIGGFAAMKALSTRNDDPEAASRPWDKGRDGFVMGEGAGVLVLEEYEHAVKRGAKIYAELIGFGMSSDAHHITAPNAEGPARGVVNALRDAGINADAVQYVNAHGTSTPLGDANETNALKIAFGDHAKKLVVNSTKSMTGHLLGGAGGVEAIYTILAIHNQVSPPTINLVEQDLEAGCDLDYAANTAREMKIEVGISNSFGFGGTNGTLVFKRV

SEQ ID NO: 16012 - protein, 610 aa, Vibrio angustum S14
MSTPLETPQLSQLNVFPVKSIAGISQSKVWVEKQGISFDRRFMVATLSGDMITARKSPKMVKVKAALIADGIVLSYEDKACLVLKYAQFDMAEASSTVWGDTFIAYTTTEQANAWFSDVLGQPVQLLFTGEQSNRLRPKISQNVSFADGYPLLVISEASLQALNERSSEHHTMDQFRTNLVVSNTEAFAEDGWKRIRIGEVEFEAVKPCARCILTTVDPKSATFSESKEPLVTMAKFRADEKGNVYFGQNLVARNEGIISVGDTIEILETKPKEIYADNSEQKLQLTCVEREDIAQDFTTFWLESHQENQALPTYLPGQHLPIQLEVNGEYISRRYTLSSSPSRPGRYAISVKRVNDGRISNWLHEHFQVGDTLVSESPSGDFHLGVHTDKLLLLSGGSGVTPMMSMLRYLSDHDLVRDVVFYHQCRTEADIPYLEELRAIEEKHPSLDLRIVLTQPKRDWQGESGRLSIGHLAMMSDLDKRQVFVCGPDAFMSSAKKLLLNMGMAASRYHQEAFGPVRHALEEKKSVELSIDGQLFQGNNQATLLEQAETAGINMDYSCRAGFCGACKVTVKSGEVEQPEVPALSSQERAEGKVLACCCVPRSDLEIIK

SEQ ID NO: 16013 - protein, 239 aa, uncultured bacterium 581
MIRDGGLDVVSYEQRRQEIEHYFDRTAADTWAKLTSEAPVGRIRQTVREGRDTMRAQLLDWLPEDLSGKRVLDAGCGTGAFSVEASRRGADVVAVDLSPTLITLAQERVGSAEMRGTIDFRVGDMGHLDLGTFDHIVAMDSLIHYESEDGLRTLAAMAETVTTSIVFTFAPKTPLLAAMHSVGQLFPRGNRSPAIAPMALSQLQRAVASQPEFTEWEMARDFRVSRGFYISHAMELTRK

SEQ ID NO: 16014 - protein, 342 aa, Lycopersicon esculentum
MGVDYYKVLGVDKNATDDDLKKAYRKLAMKWHPDKNPQNKKEAEAKFKQISEAYDVLSDSQKKAVYDQYGEEGLKGGVPPPGAGGPGAGSTYFSTGDGPTSFRFNSRNADDIFAEFFGFSTPYGPGGGRGSRFGNMFTDDIFAASFGEGGGGGGVPMHSSVPRKEAPVQQNLPCNLEDLYKGTTKKMKISREIADSSGKRIVQEILTIEIKPGWKKGTKITFQEKGNEQPGVIPADLVFIIDEKPHKVFSRDGNDLIVTQKIPLAEALTGTTVQLTTLDGRNLTIPINNVIQPNYEHIAPGEGMPLPKDPSKKGNLRIKFDIKFPARPTVAQKSGIKKLLGS

SEQ ID NO: 16015 - protein, 556 aa, Cryptococcus neoformans var. neoformans JEC21
MDGKPATQYQAWKKLQSLHGSKADKLVLKDLFKADPKRFSNLSKTFSSSSPNVSLLLDYSKNLVDDEVLSTLFDLAREAKVETFRDEMFAGKHINTSEDRSVLHIALRNPPADKGGFKISEAGVDEVHAVLAHMKEFSDSVRSGAWKGYTGKAIDTIVNIGIGGSDLGPVMVCEALKHYSKRDLKTHFVSNIDGTDMAEVLKACNRETTLFIVASKTFTTQETITNAESAKEWFLEQAKEKAHVAKHFVALSTNTKGVTEFGIAESNMFQFWDWVGGRYSLWSAIGLSICLSIGFDNFQELLNGAHEMDKHFKTAKLEDNLPVILALVGIWYNDFYGAQTQALLPYDQYLKKFADYFQQGDMESNGKSVTKDGSRVDYETGPIIWGQSGTNGQHAFYQLIHQGTKLIPCDFLAPVETLNPISGGKHHEILLSNFFAQPEALAFGKTEEEVIKELGPEQSKNSALVKSKIFEGNKPTNSIMFQKLTPGTLGALIALYEHKIHVQGAIWGINSYDQMGVELGKVLAKAILKQLGSENDVQGHDSSTTGLIHFYQKNRK

SEQ ID NO: 16016 - protein, 634 aa, Rhodopirellula baltica SH 1
MCGFTGGLWQRDDQAINADLLSRMTNEIAHRGPDDSQIWMDPEHRDATGRPMGVGLGFRRLSIIDVEGARQPLSNEDGRVRMVFNGEIYNYEVLRKRLQGAGHQFATQGDGESIVHLYEDIGTDCFSSLNGMFAIAIWDARRNRIVLARDRIGQKPLYYSYKNGRLVFASELKALRLVPGVCEEVDPNAIDEFLTYQYIPHPGTIFKGVHKLPPGHFAVLDERGLRVERYWNFDPSIERPLGREEAIEKVRDLLADSVRLRMRSDVPLGSFLSGGIDSSLITALAGDHTDTPLRTFSIGFPVADFDETRYAAQVAEHLQTDHTRFEVQPSGIDILEKLVWHYDEPYGDSSAVPTWYLSKLTRESVKVALSGDGGDELFAGYERYRALWMSQKIARLFPLNKFPGIGLIQRLPDSNRRRSVVRRAKRFLEAIDQPVVRRYMNWLQIFPESMRASMYNDEFVQALPGHDPVDFLESVWARSEGRDVVTRASTSDIQSYLPCDLCTKVDIASMAHGLEVRQPMLDYRFVELAASMPVEHKFRGRRGKLILQDAFGDRIPSSIFTRPKMGFGIPIGQWFREDFKPLVHDTMLASDARINAYFRPEAIADLVRSHETGEQNHGYRLWNLLVLETWLRQL

SEQ ID NO: 16017 - protein, 130 aa, Lycopersicon esculentum
MAQYGNQDQMRKTDEYGNHVQETGVYQGTGTGGMMGGTGTGGMMGGTGGEYGTQGMGTGTHHHEGQQQLRRSDSSSSSEDDGEGGRRKKGLKEKIMEKMPGQHEGEYGQTTGEEKKGMMDKIKDKIPGMH

SEQ ID NO: 16018 - protein, 344 aa, Glycine max
QLRRPPPPPPRKAMQMERSKGRVCVTGGTGFIGSWIIKRLLQDGYSVNTTMRPHPGHRKDVSFLTSLPGASQRLQILSADLSNPESFIASIEGCMGVFHVATPVDFELKEPEEVVTKRSIDGALGILKACLGSKTVKRVVYTSSASAVTSSGIEEQVMDESSWSDVDSLRASKPFGWSYAVSKTLTEKAVLEFGEQNGLDVVTLIPTFVFGPFICPNLPGSVQASLSFAFGEKSAFGFMLQTPMVHVDDVARAHIFLLELPNPKGRYNCSQCLVTFERISELVSAKYPEFQLGTMDLSKQVEGIKLPDLSSKKLVDAGFVYKYGLEEMLDDAIQCCKRKGLPVR

SEQ ID NO: 16019 - protein, 628 aa, Haemophilus somnus 2336
MAKEIQIPDIGGDEVTVTEVMVKAGDTIIVDQSVINVEGDKASMEVPSPEAGVIKEVLVKVGDKVSTGTPMFVLENAELASTETASESMQTEKTQSAVASIIEIYVPDIGGDEVNVTDIMVSVGETVAEEQSILNVEGDKASMEVPAPTAGIVKEILIKVGDKVSTGSLVMKFEVAGVVSVAETAQVSSSAQVTGESAVQDVHVPDIGGDEVNVTEIMVAVGDSVTEEQSLITVEGDKASMEVPAPFAGVVKEILVKSGDKVSTGSLIMRFEVQGKAPTPKASSAVTEAKVAPSPAAQENQMTPVSQADVTASAVFAHATPVVRRLAREFGVNLDKVKGTGRKGRILKEDVQAYVKAAIKAVESGNVSPTSAGNGAVNGAGLGLLPWPKVDFSKFGDIEQVELGRIQKISGANLHRNWVMIPHVTQWDKADITELEKFRKEQNVLAEKQKLDVKITPLVFIMKAVAKALENYPRFNSSLSEDAQSLILKKYINIGVAVDTPNGLVVPVFKDVNKKGIIELSRELAEISKKARAGKLTASDMQGGCFTISSLGGIGGTHFTPIVNAPEVAILGVSKSEMTPVWNGKDFTPRLMLPLSLSYDHRVIDGADGARFITFINSVLSDLRRLVM

SEQ ID NO: 16020 - protein, 451 aa, Pseudomonas aeruginosa UCBPP-PA14
MAGGEKAGKRGMGFWTCSALVIGNMVGSGVFLLPSSLAAFGGLSLFGWLVSSTGAVLLALTFARLARVNPGAGGPYAYTRDGFGSFAGYLCAWTYWKAAWIGNAAIAVTLVGYLRVFIPALADPLLMVCVAIAAIWLCTLINLRGIGTFSVVQNLLTILKLLPLLLVGILGWFHFNPEHLAIPARSELPNMGYAQAIATTAALTLWSFIGLESATVPADDVEDPRRTIPRATLFGTLAAAALYILSITAVQGLMPPEVLARSTSPFADAARILMGDWGYYLVAAGAVIACLGALNGWVLLQGQIPVAPARDGLFPESLGQLNKNGAPAHGLLASGLLVTALVMVDGHGDLVDVFNVIILLGTMTGVVPYAFCTAALLQLLAVRPDEFSPRSRRQLLVIGSLGFAYSLWALYGTGQQAIFWGFLVLMAGIPMYTWRQWRNQVNGVPTLKAND

SEQ ID NO: 16021 - protein, 249 aa, Arabidopsis thaliana
EFYACKTIDKRVLIDALDRECIETEPRIMAMLPPHPNIIRIFDLYETEDSLAIVMELVDPPMTIYDRLISAGGRLSESESASYAKQILSALAHCHRCDVVHRDVKPDNVLVDLVSGGVKLCDFGSAVWLGGETAEGVVGTPYYVAPEVVMGRKYDEKVDIWSAGVVIYTMLAGEPPFNGETAEDIFESILRGNLRFPPKKFGSVSSEAKDLLRKMICRDVSRRFSAEDALHLVFTLTNTQVIRLDSNVY

SEQ ID NO: 16022 - protein, 378 aa, Zea mays
MRFSTPRPARFDDVPNRDVTSSMLTMVEATWSDNEYAPADLQSSCYSSASKANSKLNSLDEVDREQLKTFIPLTEQKRLSNVIVDAVIDSTSLTAEHRAERPLEARLHLSDLNQAHFNTTLWHAVKSICCFSKSMLRSMQLWGLGAAATVVHLGIPLRHIGDADFVFESYMAMQRFVNFHRRDFNFLDEREFNAASAFVAASSISIPEEAQLRLYSFYKFVTEPSAFKLKELVPIWNADEGIDSICDLNAAEVLAETNTVLNAKHIEGHWTLQYDVVCDGEDVAAWLIQHHIDLQIKDMVLNTLTNSAAPATMAATHAVGDTWLTAFKSDLYRGHLFTGVQLWYYGLNLWSRPAPSCQSFLGGHLIHATCAKLLAVAI

SEQ ID NO: 16023 - protein, 250 aa, Erwinia carotovora subsp. atroseptica SCRI1043
MAVTKLVLVRHGESQWNNENRFTGWYDVDLSEKGRSEAKAAGQLLKDEGFAFDFAYTSVLKRAIHTLWSVLDELDQAWLPVEKSWKLNERHYGALQGLNKAETAEKYGDEQVKQWRRGFAITPPELTRDDERFPGHDPRYASLSDKELPQTESLALTIERVVPYWTETILPRIKSGERVIVAAHGNSLRALVKYLDNMGEDEILELNIPTGVPLVYEFDENFKPIKRYYLGNADEIAAKAAAVANQGKAK

SEQ ID NO: 16024 - protein, 569 aa, Ashbya gossypii ATCC 10895
MSDAVERHTFKVFTQDFMVDKRFQLIKEIGYGAYGIVCSARFMESVEDTTVAIKKVTNVFSKALLCKRSLRELKLLRHFRGHKNITCLYDMDIVLLPDGSFNGLDLYEELMEWDMHQIIKSGQPLTDAHYQSFVYQILCGLKYIHSADVLHRDLKPGNLLVNADCQLKICDFGLARGYSENPIENDQFLTEYVATRWYRAPEIMLSYQGYTRAIDVWSCGCVLAELLGGRPIFKGKDYVDQLNRILQVLGTPPEETLKRIGSKNVQDYIHQLGYIPKVPFERLYPNANPDAADLLERMLALDPKTRITVDEALEHPYLSIWHDPSDEPVCCKKFDFSFESVNEMEELKRMVIEEVKDFRRFVRQPNIRDTSLQEQEEQQPQQPQQPQQPQPEQPQHQRQHQQAQAQAQAQAHEQQQQHHRTQYQRSGAVQRQPQTVEHGQHLQHRSGHHSEHLQRAHGQQEQYLPKKDDSRAFQSRPVGTSISDSRSSYEEHDYVQQMMFAHSPTLAHDSFIGIHSENLPEHNTDFPPRPQENMLASPMGFSDGTHSNAEFGDFLDLEKELEFGLDRKI

SEQ ID NO: 16025 - protein, 116 aa, Photobacterium profundum SS9
MTLEITGKNIDITPAIRERLEFKFKKLEKFQLPLVNKHVMISKEPSKTFKIEASAAIPGGKIVASAEHNDLFGAITELYQKLERQINKQAHKPAARRASHSDKPVIEEDEVEAVDA

SEQ ID NO: 16026 - protein, 446 aa, Candida albicans SC5314
MNQPNPNKQPIVQSTLEQTSNEEVDTVLGRFTLFVKDLSNGLNGSQEIPPSQESVSEEAEVISRKIIVLGQTFDNFDNANDYIESKLWLSYRCGFEPIPKSIDGPQPIQFFPSIIFNRSTIYSNFANLKSLFDKENFTSDAGWGCMIRTSQNLLANTLLKLYPKNEPEIVKLFQDGTSSPFSIHNFIRVASLSPLHVKPGEWFGPNAASLSIKRLTNELLQDQELDGIRIPRVFISENSDLFDDEIRDVFAKEKSASVLILFPIRLGIDKVNSYYYNSIFHLLASKYSCGIAGGKPSSSFYFLGYEDTDLIYFDPHLPQVVETPINMDSYHTTNYNRLNISLLDPSMMIGILVTNIDEYIDFKSSCIDNNNKIVHFHPHTLPVQQDSIINQSWEEVQDEEEEFINLNVSKIENEQQQEQGQSTDAPDEFIDIGNQSSSVVSVPSNV

SEQ ID NO: 16027 - protein, 120 aa, Archaeoglobus fulgidus DSM 4304
MRRLPTREVVEMKMVVAVIRPEKLECVKKALEERGFVGMTVTEVKGRGEQKGIRLQFRGREVEVDLLQKTKVEVVVSDDAVDEVVEAIVSSARTGKFGDGRIFVIPVEKSVKIRTGEEEV

SEQ ID NO: 16028 - protein, 379 aa, Kluyveromyces lactis NRRL Y-1140
MTESIDIHPIVFPPEVLARISPDISLQRHLSLETRPCSRGFEEFRDVAINDGNISRYSTNCQNATTNNIIGSSLLRSGKTFVITSITGGIIEETLPANNTEDVGEEELMKLSEDTDRLCENSTIYPVVEVQRGRVGGPTDEEMITSEKLYKTLLHSGILKKTALAVSCGIRRTEEDGSVTTIYSDELLDEEKKINEANNRKWSYVLYAKIQVFSRNGPIYDLCWNSLISALKTVQLPRAFLDERAADLKIAIRTRGRSMTIRETYDILCDPHKSLPLKLNEGELCYGSNYGIIDIEPLAQLAKNDDEMDVDKPTSVLLADIETEAEESSILSTLSLTTNKNGQFKAATIIGGDSKITPEMIKRCIFLSKQRSKDIESKV

SEQ ID NO: 16029 - protein, 631 aa, Vibrio sp. Ex25
MDEKERSQRRFSIGNQLMLAVLTLSLIFTVIISAVSLYRVFNEDLAHLHVELKQVESSYLSSFSASLWVEDRELLLTQAEGAMRMPSVDYLRIANEDEVIVELGTALSGDVVERSWPMQYRVGDKTYDLATLTVQADLSSIYEDLWQQFFFLLTTEAIKILLLIIGVLWVAFRLLVNPLQLLSGAVSDFSGGKVPSKVTLPKRWCFDEVSVLAEKYNRSVEKVREHQTELEEERDRAEVANRKKSEFLATMSHEIRTPMNGIIGVASLLGDTKLDPQQKEFVEIIDSSSHSLMTIIDDILDFSKVEAGKVELENVSYDLRRILDDVISLHTVKAKQKNLQLLSDIDPHLPAEVQGDAARLKQVLNNLLSNAIKFTDRGHVKLLVELTRQEHDVAMIRFRVVDSGIGIAKENQQAIFERFQQADGSTTRKYGGTGLGLAIGAQLVNLMGGEIQLTSELGLGSCFEFSIPVVVKARSTYSELPNVLTFPKVEDNETSLQHDNQPWVLIVEDTIVNQKVVRIMLEKLGVRVSVANHGEEALQLCEKQAFDLVFMDCQMPVMDGFITTERIRQMGEWGKHVPIIALSANVIKEDQQHCFDVGMNEFVAKPVTKDRLHQIFEQFLPKALKISAGPK

SEQ ID NO: 16030 - protein, 101 aa, Oryza sativa
MSSSRRSRTSSRLAAAPPPTDEQMAELISKLQAVLPTRGGEANAKQASSAEVLQEACRYIRRLHREADALSERLAELLLLQPSDLAINGADVPDLIRSLLM

SEQ ID NO: 16031 - protein, 324 aa, Ustilago maydis 521
MEPMVLCSVKSEDLFRDTIIFPSRSSHKMLASTVRTALRTSAPRIAALPSTRCLSTSLPRLSSATAKEYQNILVSSPAKGVTLITLNRPKALNALNSALFHELNEATEIADNDPEVGAIVLTGSEKAFAAGADIKEMKDKQYADAYKTNFLGHWTKLTTVRKPIIAAVSGFALGGGCELAMMCDIILASPTANFGQPEINLGVIPGAGGTQRLTKAVGKSTAMEMVLTGRNFSADDAERRGLISRVVREGSVVDEAVKVASTIAKKGQIAVQAAKEGVNASFELSLQEGTRFERRLFQSLFATKDQKEGMAAFAEKRKANFTHE

SEQ ID NO: 16032 - protein, 343 aa, Acidithiobacillus ferrooxidans
  misc_feature (163)..(163): Xaa can be any naturally occurring amino acid
MAEMMYWQGILRAHDEEMARDPLVFAMGEDIGVAGGTYKATSGLFAKYGEQRVIDTPISENSYTGIGVGAAMIGARPIVEIMSVNFAWLAMDQLMNNAAKIHYMSGGRIRCPFVMRVPGGTAHQLGAQHSARMEKVFMGISGLRVVTPATPRDAYGLLKSAVXLNDPVVIIEHESMYNLKGEIPDEEFFTPLEGVEVMRPGKDVSIFAYNISVHWALDAAQKLAQDYGIDAEVVDLRALKPMDRAGIAASVRKTHRAVVVEEDEAPVGVGSEVMAILNEECFFDLDAAPVRVHALDVPIPYKSRLEKAAIPNAGEVVALCGRCWAGKIPAIRPLLNLGLTQQW

SEQ ID NO: 16033 - protein, 274 aa, Bifidobacterium longum DJO10A
MDRMKEQAKRFGTTYIADDVSSIEACESDSVKPTYRVTLSDDSQLEASSLIIATGSSFRKLGVPGEQELSGHGVSYCATCDGFFFRNKPIVVVGGGDSAFEEALFLTRFGSSVTLIHRRDSFRASQIMVDRAKANPTITLMTNTVVTSITGTSSPTQNTGAPIAIPGLTLKRPAVAPASVSSIAVRNMVTGEESTLDTNAVFVAIGHTPATDFAAGVVDRDDDGYVVVQGASTVTSAPGIFAAGDCVDRTYRQAISAAGMGCRAALDTQAYLTD

SEQ ID NO: 16034 - protein, 341 aa, Pseudomonas fluorescens PfO-1
MTDHALLLVNLGSPASTSVADVRRYLNQFLMDPYVIDLPWPVRRLLVSLILIKRPEQSAHAYASIWWDEGSPLVVLSRRLQQQMKAQWTHGPVELAMRYGEPSIETNLLKLVAAGHKRITLAPLYPQFADSTTTTVIEEAKRVVREKKLDVQLSVLQPFYDQPEYLDALVASARPHLQQDYDHLLLSFHGLPERHLTKLDPTGNHCFKNEDCCKNASAAVLATCYRAQCLRTAALFAERMGLPDGKWSVSFQSRLGRAKWIEPYTEARLDELAKSGVKKILVMCPAFVADCIETLEEIGDRGKEQFREAGGEELVLVPCLNDDPQWAKALATLCERAPLAL

SEQ ID NO: 16035 - protein, 274 aa, Bordetella pertussis Tohama I
MAPALIVDDSLPGVRRLTLNRPERMNAFDGGLLMDLRRAIDACRDAQPEVRVIVIRGAGRAFCAGNDLKWLAQGVIGDLGAHLRHQDLMQSTFEALEAAPQAVIACINGYALAGGLELALSCDIVIADESAELGDEHIRRNLLPGGGGSQRLPRKLGLPRALLYLLTGRRMTGREAQQMGLVSMAVPAGELESVTMEFASELARVDPHALASMKFAVRRGMELPLKEALWLERWTQYRYRIASPALENGVAEFGRRPGATLPGDAPNQDERIPE

SEQ ID NO: 16036 - protein, 223 aa, Oryza sativa (japonica cultivar-group)
MYAAMYPETFGFSAYPQQQQPPPDAASCIYTTALPLIADPPDILGNMAQPSFLSEYDLGGEGDLFKAPEPIIEEPVLSLDPVAAAISMMSGSENVMDETIEVADISDIQNDSLLSEVLYECEKELMEKSAIEETISELLDVKIPMLQVEEFPRETQVQLPAMEKEKPSVPECCSLQKSVSSGCLNSADWINGPARPNFLDFQGLDFETAFGLRRAYSEGDIQV

SEQ ID NO: 16037 - protein, 404 aa, uncultured bacterium 440
MKRLILKFGGTSVGTIEKIKKVANVIKNRFSEDNEIIVVVSAMSGVTDELKAKSGLISKNFDSKELDVLLSSGEQVSCSLLSGALIDLGVKARSWLGWQIPIVTNDNYTSSQIMKIKTDEILNFISKKGVAVIAGFQGISKEIRITTLGRGGSDLSAVAVAKFFQTDSCEIYTDVDGVLTTDPSINKKAKKIDKISYEEMLEMSSLGAKVMQPNAVQASMIDNIPIHVRSTFSEKTGTKIIPESEIDYKKVVTGIAYSKGNAKVSVVGVVDKPGVAADVFEPIGKNNINIDMVIQNTSLDGKKANITFTIKREDLKKTLSLIEKNKKKLNYNKITHDDKLAKVSIIGAGMQANPGVTHKMFRSLADEKINILAISTSEIKISVLIREDLTKKAVKTLHKIFGLN

SEQ ID NO: 16038 - protein, 273 aa, Flavobacteria bacterium BBFL7
MQKSILITGSTDGIGKLTALKLAKEGHNIYIHGRSEDKVNLVVSDIKQASNNENIKGYVADFSNLKAVKQLADLINKEIPSLDILINNAGIFKTPVSKTDTGLDIRMSVNYLAPYLLTENILPVLEKGTHTRIVNLSSAAQSTVKKGILTGDVSINASDSYAQSKLALTMWSFHFAQQHSNITTIAVNPGSLLNTKMAKEAYGQHWSPAEKGVNILFDLATSDAYQDATGKYFDNDKGETIGHFATAHPDAYDRDKILMLEAMTNEVLSDLGE

SEQ ID NO: 16039 - protein, 341 aa, Xanthobacter autotrophicus Py2
MTAELDAIAQKMVADGKGILAADESSGTIKKRFDAIGVESTEENRRDYRELMFRSEAMTKYISGVILYEETIRQKAKDGTPLVSLIEQAGSIPGIKVDAGAKPQPAFPGETITEGLDGLAGRLKEFYDLGARFAKWRAVIDIDTAKGIPSYGSIRANAHALARYAALCQEAKIVPIVEPEVLMDGSHDIDTCYQVTEWVLKTTFEELYYQRVRLEGMVLKPNMIVPGKKAAKQASVAEVAEKTVRVLKSCVPSVVPGIAFLSGGQSDEDATAHLDAMVKLGGLPWKLTYSYGRALQAAPQKAWAGKAENVAKAQAAFTHRAHMNSLAALGQWSSEEERKAA

SEQ ID NO: 16040 - protein, 530 aa, Xanthomonas campestris pv. vesicatoria str. 85-10
MLDANLKTQLTAYLERVTRPIQINASIDDSAGSREMLDLLEELVLLSDKISLDIHRDDNQRKPSFALTTPGQDISLRFAGLPMGHEFTSLVLALLQVGGHPSKAAAELIEQVQHLEGDYQFETYFSLSCQNCPDVVQALNLAAVLNPRIKHVAIDGAWFQDEVEARQIMSVPTVYLNGELFDQGRMTLEQIVAKLDTNAAKRDAAKIAAKEAFDVLVVGGGPAGSAAAVYAARKGIRTGVAAERFGGQVLDTMSIENFISVPETEGPKMAAALEQHVRQYDVDIMNLQRAEQLIPAGADGLIEIKLANGASLKSKTVILSTGARWRQMNVPGEDQYKNKGVAYCPHCDGPLFKGKRVAVIGGGNSGVEAAIDLAGIVAHVTLVEFDDKLRADEVLQRKLRSLHNVRIITSAQTTEVLGDGQKVTGLVYKDRTGGDIQHIELEGVFVQIGLLPNTEFLRGTVALSPRGEIIVDDRGQTDVPGVFAAGDATTVPYKQIVIAMGEGSKAALSAFDHLIRTSAPATADSVAQAA

SEQ ID NO: 16041 - protein, 513 aa, Zea mays
  misc_feature (404)..(404): Xaa can be any naturally occurring amino acid
  misc_feature (422)..(422): Xaa can be any naturally occurring amino acid
MATCATDLAPLLGPAAANATGYLCSQFADTASAVDATYLLFSAYLVFAMQLGFAMLCAGSVRAKNTMNIMLTNVLDAAAGALFYYLFGFAFAFGTPSNGFIGRHFFGLQRLPRTGFDYDFFLYQWAFAIAAAGITSGSIAERTQFVAYLIYSAFLTGFVYPVASHWFWSADGWAAASRTSGPLLFGSGAIDFAGSGVVHMVGGIAGFWGALVEGPRIGRFDHAGRSVALRGHSASLVVLGTFLLWFGWYGFNPGSFTTILKSYGPAGTVHGQWSAVGRTAVTTTLAGSVAALTTLFGKRLQAGHWNVVDVCNGLLGGFAAITAGCSVVEPWAAVVCGFVSAWVLIGANALAARLRFDDPLEAAQLHGGCGAWGVLFTGLFARQEYVEEIYGAGRPYGLLMGGGXGKLLAAQIVQIVVIAGWXVSCTMGPLFYALKRLDLLRISADDEMSGMDLTRHGGFAYEDPGDNAGVGEFTLKSAQNRVEPPAEQQPGVKFRNEFKNRDEVTCLPKKKKK

SEQ ID NO: 16042 - protein, 113 aa, Xylella fastidiosa Ann-1
MSDYVLHVSDANFDAMVLLSDQPVLVDFWAKWCGPCKIISTLLDDLAQSYEGRLKIVKVDIDENRALAIKYHVCSIPMLLLFKDGQVQITQIGAVGKGRLTQMIDKVLANTDS

SEQ ID NO: 16043 - protein, 417 aa, Candida albicans
MMNIDQHHQLQQQHQQQMLQQQAQAQAQAQAQAQQQQQAAAAAAAANAAATTSSSSPRQVSFNVSDHYQILEIVGEGAYGIVCSAIHKPSQQKVAIKKIEPFERSMLCLRTLRELKLLKHFNHENIISILAIQRPINYESFNEIYLIQELMETDLHRVIRTQNLSDDHIQYFIYQTLRALKAMHSANVLHRDLKPSNLLLNSNCDLKICDFGLARSIASQEDNYGFMTEYVATRWYRAPEIMLTFQEYTTAIDVWSVGCILAEMLSGRPLFPGRDYHNQLWLIMEVLGTPNMEDYYNIKSKRAREYIRSLPFCKKIPFSELFANTNNNTSTSNTGGRTNINPLALDLLEKLLIFNPAKRITVEDALKHPYLQLYHDPNDEPISDKIPEDFFDFDKMKDQLTIEDLKKLLYEEIMKPL

SEQ ID NO: 16044 - protein, 397 aa, uncultured bacterium 581
MSNTDYDVVVIGGGPSGASAAEHLAKQNYRVLLLERAFRIKPCGGAIPPCLIDEFEIPEDLLVARIRSARMISPTEKKVDMPVGETFVGMVDRDVFDPWLRERAVTAGAELRIGAFKALHYDDDGVLHIDFQSKEAGLENVSVTTRSVIGADGARSNVARQAIPCSKNARWVLAYHEIVEAPAANDELYDGDRCDVWYQGDLSPDFYAWVFPHGRHASIGVGSETDGFSARNSVATLRAKTGLDTCQTVRREGAPIPMKPLKRWDDGKGVLLSGDAAGVVAPASGEGIYYAMLCGKIAAQTIDEFLQVGDARILGDARRQFMKLHGKTFWALGLLQRIWYRSDKRREKFVSMCQDKDVQELTWQAYTQKQLVKRRKTAHLRVALKDIGNLIGLTRAS

SEQ ID NO: 16045 - protein, 288 aa, Salmonella typhimurium LT2
MAAKIIDGKTIAQQVRSEVAQKVQARVAAGLRAPGLAVVLVGSNPASQIYVASKRKACDEVGFVSRSYDLPETTSEAELLALIDTLNADNTIDGILVQLPLPAGIDNVKVLERIAPDKDVDGFHPYNVGRLCQRAPRLRPCTPRGIVTLLERYNIDTYGLNAVVIGASNIVGRPMSMELLLAGCTTTVTHRFTKDLRHHVEHADLLIVAVGKPGFIPGEWIKEGAIVIDVGINRLENGKVVGDVVFDEAAARASYITPVPGGVGPMTVATLIENTLQACIEYHDPQGK

SEQ ID NO: 16046 - protein, 396 aa, Methylobacillus flagellatus KT
MAKGKFERTKPHVNVGTIGHVDHGKTTLTAAITTVLTKKFGGEAKDYSQIDNAPEERARGITINTSHVEYETETRHYAHVDCPGHADYVKNMITGAAQMDGAILVVSAADGPMPQTREHILLARQVGVPYIIVFLNKADMVDDAELLELVEMEVRELLSKYDFPGDDTPIIKGSAKLALEGDQSDIGEPAIFRLAEALDTYIPTPERAVDGTFLMPVEDVFSISGRGTVVTGRVERGIVKVGDEIEIVGLKPTIKTTCTGVEMFRKLLDQGQAGDNVGVLLRGTKREEVERGQVLAKVGSIKPHTKFTAEIYVLGKDEGGRHTPFFNGYRPQFYFRTTDVTGAVELPAGTEMVMPGDNVSISVSLIAPIAMEEGLRFAIREGGRTVGAGVVAKIIE

SEQ ID NO: 16047 - protein, 753 aa, Glycine max
MGFALAYTASGCCSNLQFQSLLFAAASLRSKPCLSLCNSTYRPKRILKRSPIVGAQSENGALVTSEKPDTNYGRQYFPLAAVVGQDSIKTALLLGAIDPGIGGIAISGKRGTAKTVMARGLHAILPPIEVVEGSIANADPTCPVNWCRWEDGLTECLEYDSTGNIKTRIIKSPFVQIPLGVTEDRLIGSVDVEESVKTGTTVFQPGLLAGALGPPPHVDEINLLDEGISNLLLNVLSEGVNTVEREGISFKHPCRPLLIATYNPEEGAVREHLLDRIAINLSADLPMSFENRVAAVGIATEFQENSSQVFEMVEEETDNAKTQIILAREYLKDVTLNREQLKYLVIEALRGGCQGHRAELFAARVAKCLAALEGREKVYVDDLKKAVELVILPRSIVTENPPDQQNQPPPPPPPPQNQESGEEQNEEEEQEDDKDEENEQQQEQLPEEFIFDAEGGLVDEKLLFFAQQAQRRRGRAGRAKNVIFSEDRGRYIKPMLPKGPVKRLAVDATLRAAAPYQKLRRAKDSGNNRKVFVEKTDMRAKRMARKAGALVIFVVDASGSMALNRMQNAKGAALKLLAESYTSRDQVSIIPFRGDAAEVLLPPSRSISMARKRLERLPCGGGSPLAHGLTTAVRVGLNAEKSGDVGRIMIVAITDGRANISLKRSTDPEAAAATDAPKPSAQELKDEILEVAGKIYKAGMSLLVIDTENKFVSTGFAKEIARVAQGKYYYLPNASDAVISSATKEALSALKSS

SEQ ID NO: 16048 - protein, 370 aa, Agrobacterium tumefaciens str. C58
MTVRSLFLLPGDGIGPEAMTEVRKLIEYMNSAHNAGFTVSEGLVGGSAYDAHGVAISDADMEKALAADAILFGAVGGPKWDGVPYEHRPEAGLLRLRKDLELFANLRPAICYPALAAASSLKPELVEGLDILIVRELTGGVYFGEPKQIIDLGNGQKRGIDTQIYDTFEIERIASVAFELARSRDNRVCSMEKRNVMKSGVLWNQVVTETHAAKYKDVQLEHMLADAGGMQLVRKPKQFDVIVTDNLFGDMLSDVAAMLTGSLGMLPSASLGAPDAKTGKRKAMYEPVHGSAPDIAGKSIANPIAMIASFAMCLRYSFNMVDEATKLEAAIANVLDKGIRTADIMADGCRQVGTSDMGDAVLAEFKALSA

SEQ ID NO: 16049 - protein, 322 aa, Mycoplasma penetrans HF-2
MKKIAILTSGGDASTMNKCLSTFITYASKYNCEVVFVKNGYKGIYDNEFVKPDYTETKSWWSLPGTKIYSSRFPEILDEQVRKQMVDNLHKNSIDTLVVIGGDGSYKGARLLSKSGIKVIGLPGTIDNDIASTSYSIGFDTSLNAIVNSIKEIKSCMDSHANVAMIEIMGRHCIDLTVFAGIATEADIIITPESFYTPQQLLAKINEKRKTNSRGIIILYVELLLGTENIPTVEEYIKYIQANSKESVKKNILGYLQRGGNPTAMDMIRASLMTEHALKMISENQYNKIIGVDEFKVVSYDLETAINMKNPSRKDLIDKFFN

SEQ ID NO: 16050 - protein, 578 aa, Triticum aestivum
MGGGNGIVDGFRRLFHRRTPSGSVLGSSNQSSAGEDSSDVEAAEGLDLVGLRSIRVPKRKMPLPVESHKKNIMEKEFFTEYGEASQYQIQEVVGKGSYGVVAAAIDTRTGERVAIKKINDVFEHVSDATRILREVKLLRLLRHPDVVEIKHIMLPPSRREFQDIYVVFELMESDLHQVIRANDDLTAEHYQFFLYQLLRALKYIHGANVFHRDLKPKNILANADCKLKICDFGLARVSFNDAPSAIFWTDYVATRWYRAPELCGSFFSKYTPAIDIWSIGCIFAELLTGRPLFPGKNVVHQLDIITDLLGTPSSETLSRIRNEKARRYLSCMRKKHPVPLTQKFPNADPLAVRLLGRLLAFDPKDRPSAEEALADPYFASLANVEREPSRHPISKLEFEFERRKVTKDDVRELIYREILEYHPQMLEEYMKGGDQISFLYPSGVDRFKRQFAHLEEHYSKGERGSPLQRKHASLPRQRVGASNDGNNEQHISDQEMSAEPDAHGTVSPQKSQDAAGVGQNGLSPTSLSSRTYLKSASISASKCVVVNPNKQPEYDDAISEETEGAVDGLSEKVSKMHA

SEQ ID NO: 16051 - protein, 392 aa, Ashbya gossypii ATCC 10895
MSKSTASKPRKGRTSTGSNPKNSAAAAKKGKPSSSKKQRDAATTGTEAPAESQQTVEAQPAALELRITQAVQELTKYVSSKTTPESVLIDDSELTGQLQLIATSVRAYSKPGNLKPTLLAVKHSLFKPWKKASATAVKDFKVLLIMRDQDMDKVSDDALYESIEQAHGICIDKVISGHDLKTTYKAFEKRRALLSEFSLVLADDAIVSALPKLLGSKAYEKIQTTPVPIRTGKAGVFSMTTLANSVRRIFNERLPVLLPSGVTLNVHIGHLDWFTPEELTANVASLASQLIAAHPIRSLYLKSNNSSALPLYYSPAALQDATAAAAAAHVAGSSGTVSIDGVDLPLSSFDRALAQIANPDELPVVFAKQIARAKRSQENLPELGSANKRSKQ

SEQ ID NO: 16052 - protein, 354 aa, Streptococcus mutans UA159
MKNRLITFEEKLSQSPAEAILVTGQKNVYYLTGFWGTAGTVFISKNRRLFLTDARYSLLARQTITDFDIIETRSALAEIVKIIKADKLSVIGFDSAITYSYYQELAATFADYRLLALTNFVEELRMIKDTDEIEAIRRACQISDRAFADVLDFIKPGQTSELDVANFLDFRMRKYGASGLSFETIVASGYRSAIPHGVAGDKVIQLGEMLTMDFGCYYNHYVSDMTRTIHIGVPTDEERTIYDIVLNSNRALIDILRPKMTRRDYDKAARDVIAAAGYGQAFTHGIGHGIGLDIHEIPYFGNVEGRIESGMVITDEPGIYLDGKYGVRIEDDLLVTKDGCEVLTLAPKELIILK

SEQ ID NO: 16053 - protein, 591 aa, Streptococcus pneumoniae TIGR4
MTQGKITASAAMLNVLKTWGVDTIYGIPSGTLSSLMDALAEDKDIRFLQVRHEETGALAAVMQAKFGGSIGVAVGSGGPGATHLINGVYDAAMDNTPFLAILGSRPVNELNMDAFQELNQNPMYNGIAVYNKRVAYAEQLPKVIDEACRAAVSKKGPAVVEIPVNFGFQEIDENSYYGSGSYERSFIAPALNEVEIDKAVEILNNAERPVIYAGFGGVKAGEVITELSRKIKAPIITTGKNFEAFEWNYEGLTGSAYRVGWKPANEVVFEADTVLFLGSNFPFAEVYEAFKNTEKFIQVDIDPYKLGKRHALDASILGDAGQAAKAILDKVNPVESTPWWRANVKNNQNWRDYMNKLEGKTEGELQLYQVYNAINKHADQDAIYSIDVGNTTQTSTRHLHMTPKNMWRTSPLFATMGIALPGGIAAKKDNPDRQVWNIMGDGAFNMCYPDVITNVQYDLPVINLVFSNAEYGFIKNKYEDTNKHLFGVDFTNADYAKIAEAQGAVGFTVDRIEDIDAVVAEAVKLNKEGKTVVIDARITQHRPLPVEVLELDPKLHSEEAIKAFKEKYEAEELVPFRLFLEEEGLQSRAIK

SEQ ID NO: 16054 - protein, 510 aa, Ustilago maydis 521
MPATIERQTVAPPSDEATASELSKAFLMPLGSRSYSKQYAQLYDYRLAYLKKRVLARAKSRWIDNFDSFFQSQSQPLSQLDSSDAGPSSNTVRMDEPPKFVDRILDVRQGDICYVVGNLYCAMPLKPDVLEDLTREQWLAPQPVRSKYVDYAKDELFIEDQSGRVKLVGEAIRGGTALRSMLITGVVAAVLGTETRAGDFDVVDAVFASLPNQPSTKKSLQDPSRTKHADASQDQWVVLMSGLAIGGEAALESQLSMQLLVEYLTGELGVDADRSNASKIVAAVIAGNSLAPPTRIEEEEKPKRYGQDQPNYSSAPTLALDQLLTDLCSVMPVHLLPGERDPASVAVPQQPIHFALLPRSGRFDSLHRHTNPAWISLGDRNLLGTSGQNIDDIFKYVDESDDARIEMALRTLEWGHLAPTAPDTLWCYPFKSTDPFVLKNRPDVLIVGNQPAYASAVYRFDSDDDEQSQAPELQNGCRVVLVPEFAKTGQVVWLNLGSLETKLVCIETPF

SEQ ID NO: 16055 - protein, 201 aa, Glycine max
NPWSPYDSYNDCSQGVCNIYCPQWCYLIFPPPPPSFLDDEDSSSPSSFSPLLIALIVTLLTAFILVGYYTLVSKYCRRPRRETSSSELSGGVSSSSALAGGDGLNDALIKSITVYKYRKGDGHVDGSDCSVCLSEFEENESLRLLPKCNHAFHLPCIDTWLRSHSNCPLCRAFVTEINPTNQSNAVHPIATKSVNRGGGGQ

SEQ ID NO: 16056 - protein, 338 aa, Glycine max
MAAGVYNQPIVAFQSHSHINNFNHQQKFNNLVRLVTKDFIGSNFLSRRDCRVIQSLASQTSVVDTVSSPSKSKTSDRDTHKKSNEASLILIRHGESLWNEKNLFTGCVDVPLSKRGIDEAIEAGKRISSIPVDLIFTSALIRAQMTAMLAMTQHRRRKVPIIMHNESEQARGWSQVFSEDTEKQSIPVIAAWQLNERMYGELQGLNKQETADRYGKEQVHEWRRSYDIPPPNGESLEMCAERAVSYFRDQIEPQLLSGKNVMISAHGNSLRSIIMYLDKLTSQEVISLELSTGIPMLYIFKEGRFVRRGSPIGPTEAGVYAYTRRLALYRQRLDDMFQ

SEQ ID NO: 16057 - protein, 340 aa, Bacillus licheniformis ATCC 14580
MKVKVAINGFGRIGRMVFRKAMLDEQIDIAAINASYPPETLAHLIKYDTNHGRYELDVKAGEDCLFVNGKKVMLTNQRDPKLLPWAQYGIDIAVEATGKFNSKEKAEAHIEAGAKKVILTAPGKNEDITIVMGVNERDFDAERHTIISNASCTTNCLAPVAKVLDDAFGIENGLVTTVHAFTNDQKNIDNPHKDLRSARACGSSIIPTTTGAAKALSLVMPHLKGRMHGLALRVPVSNVSLVDLVADLKSDVTAEDINEAFRMAAAGSMSGIIDVCDEPLVSSDFNTNPYSAVIDSLSTMVLENRKVKVLAWYDNEWGYSCRVVDLIRYAASRMKHPSAV

SEQ ID NO: 16058 - protein, 354 aa, Colwellia psychrerythraea 34H
MKSRFSARQQNSDNTADENKSTTTAVLLTNLGSPDEPTTSAVRRYLREFLSDTRVVEIPRLIWLLILHGIILRIRPAKSAKLYQTVWQDDGAPLISITAAQKEKMATKIKSQYGDNVIVDFAMRYGNPSIASVLQKFQQQGVDKLVVLPLYPQYAGPTTASTFDAVSKELQKWRYIPSIHFLNTYHNNPFYIQALAETVKEHVASHGKPERLVLSYHGMPELFHKWGDPYYDFCQETTSLLKRLLLESDLGFTDDEIIMTFQSRFGKAEWLKPYTDETLENLPKQGIKHVAIMSPAFSADCLETLEELIHENSEVFLEAGGESYHYIAALNDRDDHIDALFDVLAPTLGAPNLN

SEQ ID NO: 16059 - protein, 488 aa, Pseudomonas fluorescens PfO-1
MIQTETDMQLIWLRSDLRQHDNTALAAAAERGPSVAVYLLSPQQWQEHDDAPCKIDFWLRNLHKLSKSLGDLNIPLLIRTAPHWDQAPAVLLELCRQLKIEAVHVNEEYGINESRRDAAVAKALQAEGITFHSYLDQLLFKPGSVLTRTGTYFQVFSQFRKVCYEHLHRSMPSLKQAPGKQSALNIASDPVPEAIEGFPTPGASLRALWPAGETEARRRLDTFADAQIDYYKSERDFPAKPGTSQLSAYLAAGVISPRQCLHAALQSNQGEFESGKVGAVTWINELLWREFYKHILVGYPRVSRHRAFRPETEDLAWRNAPEDLAAWQEARTGLPIIDAAMRQLLETGWMHNRLRMVVAMFLTKNLLIDWREGERFFMRHLIDGDLAANNGGWQWSASTGTDSAPYFRIFNPVSQSEKFDSEGLFIKHWLPELAGLNKKEIHNPASVGGLFGVADYPAPIVNLSASRERALAAFKNLPSRSSQGESDE

SEQ ID NO: 16060 - protein, 1176 aa, Neurospora crassa
MANTSLDMASSTSPSPSPESTTTPRKRIVVVGLGMVGIAFIEKLIKLDTQRQYEIVVIGEEPHVAYNRVGLTSFFSHREVEQLYLNPLEWYKQHLQTSSLTHHLSTAALSLSPATKSLTISPPPSTPSLTTLPYDHLILATGSSALLPTSTPGHDASGVFVYRNIADLQSLITWSSDTQIKGSTGVVVGGGLLGLEAAKALMDLQVFGRVVVIERNGWVLSRQVDGEAGALVLEGVRGLGVEVLTRKRVKEVECDESKDEGEKEKKRVKGIRFEDGEYLACSTICFAIGIKARDELAREAGITCAERGGGGIVVDDSLQTSAPDVYAIGECASWKGQTFGLIGPGVEMADVLAFNFSQAHLHTPRVFKRPDLSTKLKLLGVEVASFGDFFADRDGPKELPPKLRRELKKSGGKAEVKALTYKDPFLSVYKKYIFTSDGKYLLGGMMIGDTTDYVRLVPLVKTHKELDVPPSQLILGAKKSGDDNGDDDLPDDTQICSCHNVTKADLVAPLKSGECTSLGDLKSCTKAGTGCGGCMPLVTSIFNRTMASLGTEVKNNLCPHFPEYSRADLYNIISVKRLRTLPDVMREAGADADSLGCEACKPAIASIFASLWNDHVMSPAHHGLQDTNDRFMGNIQRNGTFSVVPRVAAGEITPEKLIVIGEVAKEYNLYTKITGGQRIDMFGAKKQDLLKIWKKLVDAGMESGHAYAKSLRTVKSCVGTTWCRYGVGDSVGMAVRLEERYKGLRGPHKIKGGVSGCTRECAEAGNKDFGLIATEKGFNILICGNGGTTPKHSVLLAKDVPPTNVIPIIDRFLMFYIRTADKLQRTARWLEALPGGIDYLKEVILEDRLGICASLEAQMQELVDSYFDEWAEALNNPAMQERFKQFANTDEGQPPMEVEIDRGQERPVMWPREDEGGSAKADFKGLRDKWSSTTWQPVLEASYFQGADDLPNGISASIKRGDTQLAVWRIKGKYYASQQMCPHKRTFALSDGFVGTDPSPSSCSSSALPPSPPSTPPRSSSPVTSPPQSPTSSATPATTASSSCTTNPSGPASPWISCPFHKRNFSLTSGSCKNDNELSIATFDVEERDDGMVYIKLPPVDELDRELGTKKWMVKKGEAGEGQLRELDELNKSKGVEGKKGRRGRKPGASEAGKEVGKKLVEAVGGGGCGGPGLEW

SEQ ID NO: 16061 - protein, 322 aa, Comamonas testosteroni
MKTETTFEVRIAHKQEQAAGICSLELRALEGASLAPFSAGSHIDVHLPGGLVRQYSLSNDPAELDRYVIAVLREPASRGGSAAVHEQLQAGQQITISHPRNHFELHAPARKHLLLAGGIGITPILAMARKLAHDGAEFALHYCGRSRERMAFAQTIETAQWADKAQIHVDDVNGKSSLGLSELLQQREQGQHLYVCGPKGFMDAVLDTARAAGWPAEQLHYEFFAAEVEHRDDDESFEVEVASSGQVVRVTPAQTVVQALESIGVCVQTSCEQGVCGTCLTRVISGEPDHRDMYLTEDEQAANDQFLPCCSRARSGRLVLDL

SEQ ID NO: 16062 - protein, 407 aa, Zea mays; identical to SEQ ID NO: 669

SEQ ID NO: 16063 - protein, 336 aa, Xanthobacter autotrophicus Py2
MSVKVAINGFGRIGRNVLRAIIESGRTDIEVVAINDLGPVETNAHLFRFDSVHGRFSGEVKVAGDTIDVGRGPIKVTAVRDPAQLPHKDLGVDIALECTGIFTARDKAAAHLAAGARRVLVSAPAEGADLTVVYGVNHDKLTSEHLVVSNASCTTNCLAPVAKVLNDAVGIEKGFMTTIHSYTGDQPTLDTMHKDLYRARAAAMSMIPTSTGAAKAVGLVLPELNGKLDGTSIRVPTPNVSVVDFKFIAKRATTKDEINAAVLAAAASGPLKGILGTTDQPNVSIDFNHDPHSSTLHLDQTKVLEGTLVRVLSWYDNEWGFSNRMADTAVAMGKLG

SEQ ID NO: 16064 - protein, 485 aa, Acidobacteria bacterium Ellin345
MEAIISPTPKSAPSNTPQLARDLRVSHATAVVVGTIIGSGIFLVPAEMMRAVGTAKLVYLAWIVGGILSFLGALTYAELGAMKPQSGGEYVYVRDAYGPLMSFLYAWSWFVIAKPGSMATIATGMMQILGGYPALSFLPKNVVSGVPFTYAQLAAVALIIFISAVNYIGVKKAGQFQVVFTVLKLAIIFGVIVVGFFAGHGSWSNFTTSFTGATGGIAGFMIALVAALWAYDGWNDINMVAEEIDHPERNVPIALIVGVGIVAALYMLLNAAVQYALPAQAIAMSKRAASDAVLVSIGAGAASIFAALMAIQMLATINGTTLSGARIPYALARDGYFFEAIGKVHPRYLTPANAIVFQGALAVILVSLVGKFQQLFSLTIFAEWLFYMIATSTVFVFRRREPNANRPYKTWGYPVVPAVFIAAAAMLLCYTFVDNLKYAMIPTTLIGPPLNSISTGGALVILLGVPVFWWFARQKSLTTKGTKEL

SEQ ID NO: 16065 - protein, 555 aa, Xanthomonas campestris pv. campestris str. 8004
MDTAQLAITRRFASGPPRRFDAGEMVFDVGDAHAPVWVVLEGAIEVVRRDGLGNEKPITLHTPGQFTGEVSQLAGRASLAAGRAGEHGCLALPFDTAHLRALMISSAEVGEVVMRALILRRVGLIEGDASGSVLIGEPDDPHLTRLQGFLTRNGYPNTVMDVSDEDGRALVERLGIQEQDLPVMVCPSGRVLRQPSDAEAAHCLGMTPDIDPDHRYDVAIVGAGPAGLATAVYAASEGLSVIVLDQRAIGGQAGASARIENYLGFPTGISGQALAGRAYNQALKFGAELAIPLEAATLECGREDGALRLDLADGKQLQASTVVIASGARYRRPQIDQLDRFEGHGVSYWASPVEARLCEGGVVALVGGGNSAGQAVAFLAPRVKELHLIIRGEGLEASMSQYLIERIAALPNVTLHTGTEVAALEGDPERGLQAAVLRTRADGQTQRLELRHLFLFVGADPNTGWLQQCVETDAHGFVVTGSVRAEGLPPCLPLETNRRGVFAIGDVRAGSVKRVAAAVGEGAAVVAQIHQFLAHQATPVAVSELANATQESATS

SEQ ID NO: 16066 - protein, 272 aa, Zea mays
TRPTSSRSRAAARDLELDHVRRACSVGVVGGGGGAGSPPGSPGHSLSPRMFVPQTPVPPLQRAADVTPVFNQILMNDQEEYDGPPQKEIPSLIVWTLGGKNVYVEGSWDNWKSRKAMQKSGKDHSLLLVLPAGVYRYRFVVDGERRCLPDLPCEIDAMGNAVNLLDVNDFVPESVESVAEFEPPLSPDSSYSFQAPEDKDFAKEPPVLPSQLHLGVLNSQNSEESCARPQHIVLNHLFIEKGWGAHPLVALGLTHRFESKYVTLVLYKPIER

SEQ ID NO: 16067 - protein, 320 aa, Vibrio sp. Ex25
MIKKIGVLTSGGDAPGMNAAIRGVVRTALSEGLEVFGVYDGYLGLYEGRIEKLDRSSVSDVINKGGTFLGSARFPEFKEVEVREKAIENLKKHGIDALVVIGGDGSYMGAKKLTEMGYPCIGLPGTIDNDIAGTDYTVGYLSALNTVIDAIDRLRDTSSSHQRISIVEIMGRHCGDLTLMSAIAGGCEYIITPETGLDKDKLISNIQDGIAKGKKHAIIALTELMMDANELARDIEAATGRETRATVLGHIQRGGRPTAFDRVLASRMGNYAVHLLIEGHGGRCVGIVKEQLVHHDIIDAIENMKRPVRNDLYKVAEELF

SEQ ID NO: 16068 - protein, 271 aa, Pseudomonas fluorescens PfO-1
MNSALYSGWIAHRRFAPRRHEFRYRIGMLYLDLAEQEAVLGLSRLAGTSRFAPFSFRETDYLKTFTDRGVRLSDAVRQLVGEALGHAPQGSICLLTQPRSWGLSFNPVSFFYCHEADGQLAAILCEVRNTPWRERYHYVLPARTPTHLRDFHQHFAVTKAFHVSPFLPPDLEYRMSFSPAAQTLGVHMADWQGEQKLFDATLDLQREPLDRSHLHRHLWRFPWMTAKTALAIYWQALRLLLKRTPVYDHQRADDRFRTATVPTEERHHEIH

SEQ ID NO: 16069 - protein, 853 aa, Vibrio vulnificus YJ016
MSKLKLVIVGNGMVGHRYIEDLVDKTDVSNYDITVFCEEPRVAYDRVHLSSYFSHHTADELSLVKTGFYEKHAIKVLLGERAININREKQTVYSSSGREIQYDKLILATGSYPFVPPIKGNESKDCFVYRTIEDLKAIEACAKKSKSGVVIGGGLLGLEAAGALKALGMETHVVEFAPKLMAEQLDQAGGDQLRQKIERMGVKVHTSKNTLEIAAEGEQARNVMRFADGTELETDFIVFSAGIRPQDKLARQMGLGIAPRGGIEINDHCQTTDNNIYAIGECASWNKMFYGLVAPGYKMATVAVDHLLGNIDSKFEGADMSAKLKLLGVKVGSIGDANGRTPGCKSYVYQNEELEVYKRLIVSPDNKKLLGAVMVGDTSDYGDLLQLMLNEIELPQHPDTLILPAHAGAEKPKLGADSLPDSAVICSCFDVTKGKIAQAVADGHHTIGDIKAVTGAGTGCGGCIPLVTSVLNAELAKAGVEVKSDICEHFAYSRQELFHLIRIEEIKTFDELLAKHGKGYGCEVCKPAVGSILASCWGEHILKPQLVKLHDTNDNFLGNMQKDGTYSVIPRMAGGEVTPQALKVLAEVAAEYNLYTKVTGAQRIGLFGAQKDDLPAIWKKLIAAGYETGQAYAKALRMAKTCVGSTWCRYGVQDSVGLGVFIENRYKGIRTPHKMKFGVSGCTRECAEAQGKDLGIIATDAGWNMYVCGNGGMKPRHADLLASDLDQETLIKYIDRFMMFYIRTSAPLQRTSVWLGNMEGGVDYLRQVIVEDKLGINEQLEADIAKLVEAYRCEWNETINDEAQLTRFAHFINSDKRDENVVFVSERQQHRPATFAEKHPELKGDILHVAVTE

SEQ ID NO: 16070 - protein, 219 aa, Triticum aestivum
HSITSLYKKAGWYRSGIPGISSTHASGLSEVLYECEKELMEKSAIEETISELLDVKIPMLQVEDVPGELRASSSSTVAAGTGECSLQKSVSSGCLSSGDWMNGSAVRPNFLDFQGLDFEAAFGLRRAYSEGDIQKLGANTPRPGIAANVQASGERLVTISDLKSEERKQKLNRYRKKKIQRNFGRKIKYACRKALADSQPRVRGRFAKMDDGDMLKPRK

SEQ ID NO: 16071 - protein, 950 aa, Chromobacterium violaceum ATCC 12472
MSLTELFNRHEFLARHIGPSDAERAEMLAAVGAPSIDALVDQTLPADIRLNRRLDLPSPQPEAEALAALKAVASKNVVNKSFIGLGYYPVLTPTVILRNVLENPGWYTAYTPYQAEIAQGRLEALLNFQQMVIDLTGLEMANASLLDEATAAAEAMAMAGRVSKSKSTRFFVDSRVLPQTLDVMKTRAKYFGFELVQGHPEEAGNGDYFGALFQYPGEAGDLLDLTPHIAAVKAKGGVVAVAADVMALVALKSPAEMGADIALGNTQRFGVPMGFGGPHAAYFAFKDEMKRSAPGRIIGVSIDAKGKTALRMALQTREQHIRREKANSNICTSQVLLANIAGLYAVYHGAEGVRRIAARIHRLAAIFAHAVKEAGGKLVFDRFFDTVQVDAPKADAIYAAALAAGYNLRRVGKTVLGVAFHEAATESDLAKLIELFTGKPADIAALDAAALDAIPAALKRESAILTHPVFNTHHSEHEMLRYMKKLENRDLAMNHSMISLGSCTMKLNATSEMIPITWPEFANMHPFAPREQTVGYLELIEGLQKQLKAITGFDAISMQPNSGAQGEYAGLLAISRYHESRGEAHRNICLIPQSAHGTNPATAQMMNMQVVVVKCDEAGNVDVADLKAKAEQHAANLAALMITYPSTHGVFEQGIKEICEIVHAHGGQVYMDGANLNAQVGLTRPADIGADVSHMNLHKTFCIPHGGGGPGMGPIGLKAHLAPFIANHVVAPVPGAVEGQTAVSAAPFGSASILPISYMYIAMMGAEGMKQATENALLSANYLATRLSEHFPVLYTGANGRVAHECIIDLRPLKAASGVTEVDVAKRLMDYGFHAPTMSFPVPGTLMIEPTESEPKAELDRFIAAMAAIRAEIDRVQSGAWPADNNPLVNAPHSKADIAGDWDRPYSREQGLFPLPYVLENKFWPSVNRIDDVYGDRNVVCSCPSTESYM

SEQ ID NO: 16072 - protein, 747 aa, Glycine max
MGKSSKKSAIKVDAAPAVVPPSKSAKKGGKRQAQDEIEKQLSAKKQKINEVAQKQKEAKVQKKESSSDDSSSESEDEKPAPKSAVLSKKIPAKNGAAPPKKGKLASSSSEDDSSDEDGVRAKKPQKMVAEKQKNGATVQKKKVESSSDDSSSESEAEKPAVKATVPSKKTPTKNGNLSTPAKKGKAASSSSSSDSSEDDSSDEDELATKKQMNEVKVQKGKEESSSDDSSSDSEDEKPAAKVAVPSKNQSAKNGTLSTLAKKGKPAASSSSSESSDDNSDEDEAPKTKVAPAAGKNGHASTKKTQPSESSDSDSSDSDSSSDEDKNKKKPATAKLPALPVAPALKVESSDDESSESSDEDNDAKPAVTDVSKPSALAKKKVDSSDSDDSSSDEDKGKMDIDDDSSDESEEPQKKKTVKNPKESSDSSEEDSEDESEEEPSKTPQKRDRDVEMVDAASSGKKAPKTPVTPKEETGASKTLFVGNLPFSVERADVEDFFKDAGEVVDVRFATDDTGKFKGFGHVEFATAEAAQNALGLNGQQLFNRELRLDLARERGAYTPNSSNWNNSSQKSERGQSQTVFVRGFDTSLGEDEIRGSLQEHFGSCGDITRVSIPKDYESGAVKGFAYVDFGDADSMGKALELHETELGGYTLTVDEAKPRDNQGSGGRGAGGRSGGGRFGGRSGGGGGGRFGARGGGGRFGGSGGGGRFGGSGGGRFGGRGGGGRGRGNRPNLAAEGTGKKTKFADDE

SEQ ID NO: 16073 - protein, 257 aa, Vibrio vulnificus YJ016
MSMAISSRLFVGNVRHRRFTPVEHSLNYQLFMPAIDLDELTQLEKEVWGFGTRWWHWARFKRSDYVGEGCLKRAVQEKITELTGESVSGRVIAVCHLRYLGLYFSPVNFYYVFDEKEHWRYLLAEVSNTPWNERHYYAISADEHDSSFGWKQTKAFHVSPFNPIEQSYIWRLKPLSEKLHIHLECHKENKQFDATMAMSAEPFSSSNLLKRLIVTPIQTVKVLVGIYWHAFKLWKKGAPFYSHPKYRSPANRTENNN

SEQ ID NO: 16074 - protein, 192 aa, Xylella fastidiosa Ann-1
MNMLNVLRFPVLALALAFVSSGVLADVGSLLDLDYRPLAGKETVNLQRLYGGKVLLVVNTASKCGFTPQYEGLEALHQKLSPLGFAVLGFPSNDFKGQEPGDEQQIQEFCTLTYGVKFPMFQKVHVKGDEVTPLYQRLTQTTGVAPGWNFHKYLIARDGHVVAQFDSRTRPDDPILLEAIKRELAKSVQVVH

SEQ ID NO: 16075 - protein, 506 aa, Magnaporthe grisea 70-15
MPLLRRGVASEALPGAFSGVGVYIDAGSRYENDYLRGASHIMDRLAFKSTQKHTADEMLEAVEHLGGNIQCASSRESMMYQAATFNQAIPTTVGLLAETIRTPNLTDDEISQQLETAQYEVTEIWSKPDLILPELVHTAAFKDNTLGNPLLCPQERLGSIDRHVISAYRDAFYRPERMVVAFAGIPHMDAVKLTEQYFGDMRGKPPPKAQETSTIALDEAAAAQQQQQQQPGLLSKLPFFKNTSKPTSPSPLPTAPLDTGASHYTGGFLTLAPQPPPLNPNIPNFTHIQLAFEGLPILDDDIYALAALQTLLGGGGSFSAGGPGKGMYSRLYTNVLNQHGWVESCVAFNHSYTDSGLFGIAASCFPGRTASMLEVMCRELRSLTLDKGYSAVTEVEVNRAKNQLRSSLLMNLESRMIELEDLGRQVQVHGRKVPVHEMTRRINALTVEDLRNVARRVVGGMVENPGKGSGAPTVVLQEATAVGVTNKQLTWDEIQNIIRQWQLGRQ

SEQ ID NO: 16076 - protein, 123 aa, Triticum aestivum
  misc_feature (47)..(47): Xaa can be any naturally occurring amino acid
  misc_feature (55)..(55): Xaa can be any naturally occurring amino acid
MARLNSKAVLAAVVLAAVVLMMAGREASAALSCGQVDSKLAPCVAYXRGRASSIXSKECCSGVQGLNGLARSSPDRKIACKCLKDLATSIKSINMGKVSGVPGKCGVSVPFPIRMSTNCNNVN

SEQ ID NO: 16077 - protein, 364 aa, Candidatus Blochmannia floridanus
MNNNTYHIAILPGDGIGPEIMQQAYKILNTVKNKFKINIITTEYKVGGNALDLEGSPLPKDTIKNCEKSNAILFGAVGGPKWNNINETSRPEFGALLTLRKHFNLFINLRPIYLPIELINLSPLKPEIISQGLDMICIRELIGGIYFGKPQGKSGIRSQEHAFDTAIYHRFEIERIAHFAFKLAQKRRKHVTSIDKANVLHTSMLWRKVVSEVASNYPNVHLQHLYVDNASMQLIRNPSAFDVILCPNLFGDILSDECAEINGSIGILPSASLNEHNFGLYEPAGGSAPDIAGKNIANPIAQILSTALLFRYSLKLNHVAITIEKAVYKALTLGYRTQDIAYNKQKSVNTDDMGDIIASLIYKL

SEQ ID NO: 16078 - protein, 146 aa, Zea mays
MPVPLAPYPAPPAPFTPPNGAQSQLVCTGCRNLLMYPAGATSVCCAVCSTVTALPRESSAGTEMAQLVCGGCHTLLMYIRGATSVQCSCCHTVNLAMEANQVAHVNCGNCRMLLMYQYGARSVKCAVCSFVTSVGTSPGAEQKPSS

SEQ ID NO: 16079 - protein, 540 aa, uncultured bacterium 581
MSSIMNIDPELQSLANQIATRRVTECFEDDANRASDFRCTSNGLVLDYSKHHIDAPSRQRLLEIAQQSALAADFEALTRGDAINITEERAALHTLLRGTRKEESPELYAEVHATNSKLAQLVAKIHSGAWSGFGANRFTDVVNIGIGGSDFGPKMVCRALRTETDLMKSHFVANVDPQDLDETLASLDPQSTLFIICSKSFTTEETLTNALRARAWLLAAGAKDTDVNKHMVAVTTNLEGASRFGISPENCFPMWDWVGGRYSLWSAVGLSIALQSGWETFLRLLTGAHEMDIHTLGSHDKNNLPLMMALLEFWNTVYLKTDTHVVLPYAQALEKLPDFLQQLSMESNGKRVDLSGSALTLPSAPVLWGSAGTIGQHSYYQLLHQGNRRFTADIILPLSHKEKDLDAQRKLAANALAQSRALLVGRDKSAAQRLAAERGQPESFAPHYEMPGNHSHSLIYFESLTPEILGALIAAYEHKTFFLSRLLGINAFDQWGVELGKVIGRQILTMLEHGEGLEVIDPATAIAVEAWRSANAKNTS

SEQ ID NO: 16080 - protein, 519 aa, Candidatus Blochmannia floridanus
MHQQVIIFDTTLRDGEQSLQTSLSVKEKLQIAFALEKLGVDVMEVGFPISSPGDFESVHTIAQNIQNSCVCGLARCLEKDIDIAAEALKSAKKFRIHIFLPTSAIHIQSKLRKNFDQIIDMTTHSIRYARKYTDDVEFSCEDAGRTSIDNLCRIVEIAIKSGARTINIPDTVGYTIPNQFSEIIYSLYKKVPIIDQAIISVHCHDDLGMAVGNSISAIQAGARQIEGTINGIGERAGNTALEEIIMAIKIRHDLLHVYTNIHHHEIYQTSQVVSQLCNMPIPANKAIVGSNAFSHSSGIHQDGVLKNKKNYEIMNPKNIGLKKVQLNLTSRSGRAAVKYHMEKMGYQEHDYNIDELYKVFLKLADQKGRVFNYELEALAFTKYSQEYLEYFALESFHIHSTSSALSNAIINLYCGKEKKIHSCSTTGRGPIDAAYKALTLISKLPIKLEKYQLHSKKYEYNILGQVNIIVSYQGRHFHGIGSNIDIIKASIIAMIQALNNIWQTKQITINHKNTQHIKK

SEQ ID NO: 16081 - protein, 501 aa, Lotus japonicus
MALPECSAANLAQLIGPNATDAAAVAGFICDQFTAVGQRFSDTAFAVDSTYLLFSAYLVFSMQLGFAMLCAGSVRAKNTMNIMLTNVLDAAAGGLFYYLFGFAFAFGAPSNGFIGRHFFGLKDVPTVAFDYSYFLYQWAFAIAAAGITSGSIAERTQFVAYLIYSSFLTGFVYPVVSHWFWSGDGWASATNTGNLLFGTGVIDFAGSGVVHMVGGVAGLWGALIEGPRIGRFDHAGRAVSLRGHSASLVVLGTFMLWFGWYGFNPGSFTKILSAYDSGNYYGQWSAIGRTAVTTTLAGCTAALTTLFGKRIISGHWNVTDVCNGLLGGFAAITAGCSVVEPWAAIVCGFVAAVVLIACNMLAEKVRYDDPLEAAQLHGGCGAWGIIFTALFAKEEYVNQVYPGKPGRPYGLFMGGGGKLLGAHVIQILVIIGWVSATMGPLFFILNKMKLLRISTEDELAGMDLTRHGGFAYAYEDDESHKPGIQLRKIEPNSSSTPSAES

SEQ ID NO: 16082 - protein, 184 aa, Avicennia marina
MASKESADNNPGLHTSLDEATKGYFLQQTMLRVKDPKVSLDFYSRIMGMSLLKRLDFPEMKFSLYFLGYEDTSSAPSDPVERTSWTFGQKAVLELTHNWGTESDPEFKGYHNGNSDPRGFGHIGVTVDDVHKACERFESLGVEFVKKPRDGKIMDVAFIKDPDGYWIEIFDTRTIAKSTADAAV

SEQ ID NO: 16083 - protein, 322 aa, Zea mays
  misc_feature (105)..(105): Xaa can be any naturally occurring amino acid
MAKKRKHTDAQAETAGAEKPDDSAPARPERTLFGFKDPAPDAVPDSAASRAAVAPFRNREKVLITCSRRITYRYRHLMQDVLSMLPHAKKDSKVESKQSKGNALXEMLELRSCSSCLFFECRKQKDLYLWMVKSPGGPSVKFLVNAVHTMEELKLTGNHLKGSRPLLTFSTNFDEQPHWKLVKEIITHIFATPKDHRKAKPFHDHVFVFSIVDGHVWFRNYQISVPHNEIDKVDKGGMDKMTLIEVGPRFCLNPIKIFGGSFGGPTWYENPYYISPNQIRALEKRQKAGKYAKKVKAKVRRKMHEMENTLEPDEFAELWKGE

SEQ ID NO: 16084 - protein, 104 aa, Streptococcus mutans UA159
MTKVVTDATFEAETAKGLVLVDFWATWCGPCLMQAPILEQLSEELDEDELKIVKLDVDENPNTAQNFGIMSIPTLLFKKDGEVVKQVAGVHTKDQIKAIVAELA

SEQ ID NO: 16085 - protein, 172 aa, Methanothermobacter thermautotrophicus str. Delta H
MLIGVISDTHIPDRASEIPEAVFDAFRDVELILHAGDLTSPDILTELETLAPVECVQGNMDRHYGIETPRSRLFEIESFRVGLIHGEVYPRGDTQQLRYLGLELGADVLISGHTHQPFIRELEDMVLLNPGSPTVPRLTDPSVMVLRIDGEKLDAEIIRTGAPVCRSLNFRR

SEQ ID NO: 16086 - protein, 993 aa, Trichodesmium erythraeum IMS101
MVEQISHTNYETKTQEIAKQLLKATQEKNRSFLAQLQNQMRWDDKLLDWAMASPGLRVQLFRFIDCLPALRSKPEIAAHLQEYLTTQEVELPETLKKLLNFANPDSVPGQLAATTVAPAVETLAHKYIAGENVKQIIKTLEKLRKDKMCFTVDLLGEAVITETEAQLYLDRYLELMTQLSQAANSWSSIPQIDEAEGEKLPRVQVSVKLTAFYSQFDPLDVKGSQERVSDHVRTLLRHAQKLGVAVHFDMEQYTYKDLTIDILKELLMEEEFRNRNDIGVTIQAYLRDSEKDLQGIIEWAKIRGRPVTVRLVKGAYWDQETIKALQHDWPQPVFNDKPETDANFEKLTYMMLENHEYIYSAIGSHNVRSQARAIAIAETLKVPRRCFEMQVLYGMGDKIATILAEKGYRVRVYCPYGDLLPGMAYLIRRLLENTANSSFLKQSLENRPLEELLAAPSINGKTTIHDVVKPVFPNAADSDYANFQQRQQALNTIGQIRLELGKTYLPIINGEYTNTAQIVDSLNPSNSKEVVGKIGLISVEQAEQAIQAAKAAFPSWKKTPVRERTRILRKAADLMEKRRHELAAWMVLEVGKPLNQGNAEVSEAIDFCRYYADEMERLEQGYNYDVAGETDRYYYQPRGISLVISPWNFPLAIPTGMTVSSLVTGNCTLLKPAAVSSVIASKISEILLEAGFPKGVFQFVPGNGSTVGDFMVKHPSVNSITFTGSMEVGCHIYAQAAVLQPRQKHLKRVIAEMGGKNAIIVDESADLDQAVAGVVYSAFGYSGQKCSACSRVVVLATIYDSFVNRLVEATRSLNIGDAEKPSTQVGPVIDEKAQKRIQEYIVKGKQEAEVAIEMSAPKDGYFVGPVIFKDVSPSATIAQEEIFGPVLAVMKADNFTQALEIANGTNFALTGGLYSRTPSHIEQAKAEFEVGNLYINRGITGAIVSRQPFGGFKLSGVGSKAGGPDYLLQFLEPRTITENIQRQGFAPIEGVDN

SEQ ID NO: 16087 - protein, 227 aa, Heliobacillus mobilis
MANEVNSYGTQKEQVRQYFDGDAFQRWAAISKGESKNFAQQKLIEGRQAIHRCLLDWIGPIKGKRLIDAGCGAGLLSETFADQGAIVKGIDISQKMIQMAQNRNQGRDNLEFEVSDLLSACGEYDILVSMDVVIHYPLSDMPKLLGHILSLTKERAYISFAPSTAWFRFLKMIGERMSGSSRTTSAYLHPMTDIERILNELGYEITREKLVSNIIYNSMLLEIKPKR

SEQ ID NO: 16088 - protein, 62 aa, Arabidopsis thaliana
MASSMLSSATIVASPAHATMGAPFNGRKASAAFPATRKANNYITFITSNGGRVNCMHLCPPI

SEQ ID NO: 16089 - protein, 319 aa, Bacillus licheniformis ATCC 14580
MKRIGVLTSGGDSPGMNAAVRAVVRKAIYHDVEVYGIYNGYSGLISGKIEKLEIGSVGDIIHRGGTKLYTARCPEFKTVEGREKGIANLKKYGIEGLVVIGGDGSYMGAKKLTEHGFPCVGVPGTIDNDIPGTDLTIGFDTALNTVIDAIDKIRDTATSHERTYVIEVMGRHAGDIALWSGLAGGAESILIPEADYDMEEIIARLKRGHERGKKHSIIIVAEGVGSGVEFGKRIEEATNLETRVSVLGHIQRGGSPTAADRVLASRLGAFAVELLLEGKGGRCVGIQNNQLVHHDIIEILEQKHTIDQSMYRLSQELSI

SEQ ID NO: 16090 - protein, 357 aa, Bradyrhizobium japonicum USDA 110
MSKKQYRIAVIPGDGIGKEVMPEGLRVLEAAAKKHGVSLHFDHFDFSSWDYYEKHGQMMPDDWKEKIGKHDAIYFGAVGWPAKIPDHVSLWGSLIKFRREFDQYVNLRPVRLMPGVPSPLANRKPGDIDFWVVRENTEGEYSSVGGRMFPDTDREFVTQQTVMTRTGVDRILKFAFELAQSRPKKHLTSATKSNGISITMPYWDERVEAMAKKFPGVKWDKYHIDILTANFVLHPDWFDVVVGSNLFGDILSDLGPACTGTIGIAPSGNINPEGDFPSVFEPVHGSAPDIAGQGIANPIGAIWSGAMMFEHLGEKEAGRSIVEAIERTLAERTLRTRDLGGNADTTACGKAVADMVD

SEQ ID NO: 16091 - protein, 666 aa, Heliobacillus mobilis
MKVNTLPLAAITGQEAVKLALTLAAVDPGLKGVAIAGRRGTGKTVLARGLRHLLPPIDQLEGCPCHCNPAEPHSWCNRCRERFTEESGLSDSEVPVVQRNAPFSEVPLGATEDRLLGAIDVEQSLAGGVRAWQPGLLGEANRGVLYIDQLNLLDDGLVNSLFDAMSGTCRLEREGISVQYPSNFVLIGTYDPDEGGLRGHLADRIAMHVSSGVIVDLEQRLEIMRRQELFSEAPEDFFDLYNDEQEQTLRRIEKARTVLPQVTISEAQTLYLIGQSLKRGVPGHRADLFSVRLAKAHAAWQGRTAVEPIDLAVAVEFVIKPRQTVDLPDEEEQMQPPPPPPPPPPPPEPDKPDDPETPPDEAPKDEQTLQLPEEFFFDAEEVPMEDELLSLQNKVQRQARGGAHGKQKSLERGRYARALLPPPGKNSRVAVDATLRAAAPYQRQRRESGQYGDRQVIVTNSDIRAKQFVRKSGALIIFVVDASGSMAFNRMSSAKGAVSVLLNEAYVNRDKVALIIFRGQQAETLVPPTRSVELAKKRFDQVPVGGGSPLAGAIAQAIEVGVNSIGSDVGQVIITLITDGRGNVPMDPQAGPKNREQLNEEILALSRLVPENGFSMLVIDTANKFTSTGFAKKIADAAFAQYYYLPKMTAASLAETVKSGVHALRK

SEQ ID NO: 16092 - protein, 1084 aa, Magnaporthe grisea 70-15
MSSRTLALSRHVARIGQSHSSQVRLLSSSRSLLNRSGLDSSRQQTWGKSSQAGAVARQSCLRRYQSTSAQASGIWGEDVLRQKDFPKIHSLQDFSDRHIGPDAQEEVEMLKALDPPMESMDAFVGEVIPEDVRLSKPMGVWRKQTEQEISSNISAHCRDSPPPCFIGKGYYNTLTPEVIKRNILESPAWYTSYTPYQAEVSQGRLESLLNFQTMVSDLTGLPVANASLLDEGTAAAEAMTLSINSLPSSRVKRAGKTMLVASSMNPMTIKVMEGRAEGFGVKIEKVAIPSPEFNERLEQLGDDVVGVMIQYPDDLGGLADYRDVAKRVHDKGVLLSCATELLALTLFTPPGEWGADIAFGSSQRFGVPLGGGGPHAAFFAVSEKHKRKIPGRLVGVSKDRRGERALRLALQTREQHIRREKATSNVCTAQALPANVAAMYAVYHGPEGLKAIAEGIVRKAKYVQAALAQLGFSVAETKAIDGVVAWDTVVVDMGSRETLQKFLESTKDKFQLRELTTPGRFSITVDESTTQEDINSLLGELSSYAPNKGVSPQQFTDSFTKAVSAELPGHFKRSSPYLQHPVFNSHHSETELLRYIYHLQSKDLSLVHSMIPLGSCTMKLNGSVEMTTLSMPAWSQSHPASNDQPVWADMLSSLNDMLKKVTGMSEVTLEPNSGAQGEFAGLRAIRAYHKSRGDDKRDICLIPVSAHGTNPASAAMTGMRVVPIKCDVKTGNLDVEDLEAKCEKHRDELGAIMVTYPSTFGVFEPRIREVCDIVHRHGGQVYMDGANMNAQVGLCSPGDIGADVCHLNLHKTFCIPHGGGGPGSGPVCAKSHLGPFLPNAAVREAEIKAVSLSGSKSGEEASSFAVSSAPHGSASILPISWSYMALMGPDGLKKATEVAILNANYLLARLKPHYPILYTNDKGRCAHEFILDARPFSKTAGVEAIDIAKRLQDYGFHAPTMSWPVANTLMVEPTESESKAELDRFADALISIRAEIRDIEEGRQPKTGNVLKNSPHPLHDIIGGDGNGGAGWDRPYTREQAAYPLPWLREKKFWPTVARVDDTFGDLNLFCTCPPVVDTTGDVN

SEQ ID NO: 16093 - protein, 124 aa, Oryza sativa
MAAEKGSPLPKFGEWDVNDPASAEGFTVIFNKARDEKKTGGNSQGQDLAAKSEQPSGQGLYPAKPNSSAILVISFTLQVHKCLVDSAREQVILKHNFTPATLALECFFNLKKWFCCMQPTAAES

SEQ ID NO: 16094 - protein, 121 aa, Zea mays
  misc_feature (20)..(20): Xaa can be any naturally occurring amino acid
  misc_feature (71)..(71): Xaa can be any naturally occurring amino acid
  misc_feature (85)..(85): Xaa can be any naturally occurring amino acid
MADSMISSSALVVEPQGLPXLGRRASYFAVGCSKKKIETYKPYWIGGGLTGYVDANGRKGKANGVYQFPNXYGANVYRYRPIYNXDDWSPSGDVYAGGTTVLLIWDVTLSAILRGGTLLIY

SEQ ID NO: 16095 - protein, 241 aa, Frankia sp. EAN1pec
MQPLVLERAGRKHLSGHRSMQFGRETTAAEVLQGVDLEGRRAIVTGASSGIGVETARALADAGAEVTLAVRNTEAGGRVADDIIAGTGNKAIFVSKLDLADRASVTGLVEAWNGPLHILVNNGGVMALPQLQRTPEGWEQHFATSHLGHFALALGLRDALAAAGSSRVVSVSSDGHVHANAPVDFDDIRFERRDYSGHRAYAQSKTANILFAVEGAKRWAKDGIAVNALHPAGSRPASSGT

SEQ ID NO: 16096 - protein, 1333 aa, Paenibacillus macerans
MRKVKRGKCWISGMVIWAMVLQLVVPGISVASENRTVAGETLIPKNDVKSSVTDAIYQIKNIPQNDMGLSVTDSVYQIRNPGFETGDLTGWTVIKGDAFGPNSVTDETTWWAEKIPYNQEGAYHLNGWKYDESATGVLRSSTFELGGSGGISFKLGGAKNPDKVFINIVEVDTGQVIARYGNSAFADVGFPDPAQGMRLANMVQYKADLSTQLGKKLYVEVVDNATSDWGVIFADAFSMYHESEPAEGIVATDIKPDFKRYEIDNPSFETGNLDGWTVEEDAFEVTDEAHASKEGNFYAKSSLQGKGSITSNTFTLQGTGTINFTVLDILKPENAYVALFDANSNTLLMKTGNVSANEKISWKVQEHYNKKLYVKVVDHSNEASIAVDSFQASDRGTIFYLNLDEGAGKKALEKVHNLRHDVNYVFNNARYMASKDPRWTPRGIKGGALLFDGSSNYIEVNANVTVPVSDALTIEAWVAPRSYEWGDGNKLSAIVNQSDQDKAEGFSLGMYRHGTWSMQVGIGGQWIQVWVKDHPLEKYKWNYVAATFSKEDGKIKLYLNGEEVASQATPVNVPITPSTESLIIGKNNKPVELAGVFSFNMFSGLLDEVKLHNKALTNQEILAGYESVKALHGGSIPKIPNADIDEDPSVFDGDQHRPQYHAMPPQNWMNEAHAPIYYNGKYHLFYQHNPQGPFWHQIHWGHWVSDDMVNWENVRPALAPEAGTLDPDGTWSGSAAYDRNGNPVLFYTAGNDSLSPNQRTGLATPADLSDPYLEKWEKYPKPVTEQNGKGIHNEFRDPFVWYDKEVDKWYQLVTSGLPDFSSGTALVYVSDDMYNWKYKGPLYVSDRIRYPELGTVWELPVLLPLGTDSTGKQKYIFMINPHEKPEHVPPANDVQRDVEVFYWIGTWDRDNFKFIPDQEAPSKMDVGDGYLTAESGLVTPDGRTVVFSMVQNVRTPQAEYQSGWAHNLSLPVSLSLDKYDKLHIEPIKELQSLRGEKWVDFSDKNLESANQLIKNVKGDMLEIVMEIDPREAQKFGLKVRRSEKGQEETLIYYDKKNGTFNVDRTKSSIDPDVRVDGIQGGYVDLEGENLKLHIFLDRSVIEAFANYKKKLTTRVYVGRYDSLGLQIWADGDINIKSMQVWDMNALTGKPAAPVYVPDKWDNSVYKDITELPNHDFATGDLTGWMTEGDAFQNVHVTNTQFFWDNIFFNPSHKIPGSYHLWGFNEQAGGDSLTGALRSQNFVLGGNGKINFLISGGRDIDRLYVALVRASDDKELFKETATNYEEYQRKIWDATDYIGEELYIKVVDHSKGGFGHINVDDFNVPVQVKKKTNN

SEQ ID NO: 16097 - protein, 426 aa, Oceanobacillus iheyensis HTE831
MVADKAADSSNVNQENMDVLNTTQTIIKSALDKLGYPEEVFELLKEPMRILTVRIPVRMDDGNVKVFTGYRAQHNDAVGPTKGGIRFHPNVTETEVKALSIWMSLKSGIVDLPYGGAKGGIICDPREMSFRELEALSRGYVRAVSQIVGPTKDIPAPDVFTNSQIMAWMMDEYSKIDEFNNPGFITGKPIVLGGSHGRESATAKGVTIVLNEAAKKKGIDIKGARVVIQGFGNAGSFLAKFLHDAGAKVVAISDAYGALYDPEGLDIDYLLDRRDSFGTVTKLFNNTISNDALFELDCDIIVPAAVENQITRENAHNIKASIVVEAANGPTTMEATKILTERDILIVPDVLASAGGVTVSYFEWVQNNQGFYWSEEEIDNKLHEIMIKSFNNIYNMSKTRRIDMRLAAYMVGVRKMAEASRFRGWV

SEQ ID NO: 16098 - protein, 293 aa, Nostoc sp. PCC 7120
MNLTPDSKVIIQGFHEFISENHIAQMKAYGTNLVAGVQPGYGGQELYHLPVFDLVEEVVGQFGSIDTTIICVHPYQVLDAALEAIASHIRQIIIISAGVPPLDMVELLRKAEAGETLVVGPNSPGIIVPGKILLGTQPSEFYTPGVVGIVSRSSTLTYEVARELTQAGWGQSISVSIGSDAIVGSSFLQWLQILDEDETTEAIVLVGQPGGGSEEAAARYIAEAIDKPVIAYIAGRQAPPGKTWRQTGTLATVVGRPPNFGTAQSKITAFEAAEVPVAERPSLIPQLLKKAIH

SEQ ID NO: 16099 - protein, 236 aa, Rhodospirillum rubrum
MPTMSYHTRRGQLETYFDRTAADAWKRLTSDAPVGKIRATVRAGRDSMRETLLSWLPDDLSGTRLLDAGCGTGSFAVEAARRGASVVAIDISPTLIDMARERAAEVTGPGRIEFRVGDMLDPALGEFDHVVAMDSLIHYQAADTVQVLERLAARTSKTMVFTFAPRTPMLSVMHAVGKLFPRGDRAPAIQPLGEKSFRWKIVGEAGLADWSLGRTQRVKCGFYISQALELVRACAD

SEQ ID NO: 16100 - protein, 219 aa, Actinidia deliciosa
ETGRHVRMLTHEIRSTLDRHTILKTTLVELGRTLALEECALWMPTRTGLELQLSYTLRHQKPVGFTVPIQLPVINQVFSTNRAAKISPNCPVARLRPLAGKYMPGEVVAVRVPLLHLSNFQINDWPELSTKRYALMVLMLPSDSARQWHVHELELVEVVADQVAVALSHAAILEESMRARDLLMEQNVALDLARREAETAIRARNDFLAVMNHEMRTPM

SEQ ID NO: 16101 - protein, 589 aa, Helianthus annuus
MCGILALLGCSDDSQAKRFRVLELSRRLKHRGPDWSGLYQHGDNYLSHQRLAVIDPASGDQPLYNEDETVVVTVNGEIYNHMELREKLMGHKFKTGSDCDVIAHLYEEHGENFVDMLDGMFSFVLLGTRDNSYLVARDAIGITSLYIGWGLDGSVLISSGLKGLNDDCEHFEVFLAGHLYSSKIRGFRRWYNLPWFSESIPSTPYDPLVLRCAFENAVIKRLMTDVPFGVLLSGGLDSSLVASVTARHLAGSKAAKQWGAQLHSFCVGLEGSPDLKAAREVADYLGTLHHEFHFTVQDGIDAIEDVIYHIETYDVTTIRASTPMFLMSRKIKSLGVKMVISGEGSDEIFGGYLYFHKAPNKEEFHQETCRKIKALHQYDCLRANKSTSAWGLEARVPFLDKEFINVAMSIDPEAKMINMDQKRIEKWILRRAFDDEEKPYLPKHILYRQKEQFSDGVGYSWIDGLKSHAEQHVTNKMMLNAERIFPHNTPVTKEAYYYRMIFERFFPQNSAKLTVPGGASVACSTAKAIEWDASWSNNLDPSGRAALGVHNAAYKKNSGSISSANLAPSIADNVPRMMDITGPELVIRS

SEQ ID NO: 16102 - protein, 194 aa, Aspergillus oryzae
MTSRLVLVIGDLFIPDRAPFRKLLTPNKIGQILCLGNLTDRSTFEFLRGIAPDLQLVKGDFDVDSPNLPLSKVVTHGSLRIGLTHGHTIIPPGDAEALLIAARQMDVDILLWGGAHRFDAFEMEGRFFITPGSATGALSTGYWPEGEEPTPSFCLMDIQGDVLVLYVYQLKTDANGVETVAVEKVSFRKNTVQS

SEQ ID NO: 16103 - protein, 449 aa, Streptococcus agalactiae 2603V/R
MTSGKTYVASVLEKVKKQNEHEEEFLQAVEEVFESLVPVFDKYPQYIEENLLERLVEPERVISFRVPWVDDKGQVQVNRGYRVQFSSAIGPYKGGLRFHPTVTQSIVKFLGFEQIFKNSLTGLPIGGGKGGSNFDPKGKSDNEVMRFTQSFMTELQKYIGPDLDVPAGDIGVGGREIGYLYGQYKRLNGYQNGVLTGKGLTYGGSLARTEATGYGAVYFAKEMLAARGQDLTGKVALVSGSGNVAIYATEKLQELGATVVAVSDSSGYVYDPDGIDLETLKQIKEVERARIVKYTEKHPKANFTPADQGSIWSIKADLAFPCATQNELDEEDAKLLVENGVLAVTEGANMPSTLGAIKVFQKAGVAFGPAKAANAGGVAVSALEMAQNSSRRAWTFEEVDQELQRIMKTIFVNASEAADEFGDSGNLVLGANIAGFLKVAQAMSAQGIV

SEQ ID NO: 16104 - protein, 156 aa, Haemophilus influenzae
NRANTPVLVDGKDVMPEVNAVLAKMKDFCQRIISGEWKGYTGKAITDVVNIGIGGSDLGPYMVTEALRPYKNHLNMHFVSNVDGTHIAETLKKVNPETTLFLVASKTFTTQETMTNAQSARDWLLKAAKDESAVAKHFAALSTNAKDVEKFGIDTN

SEQ ID NO: 16105 - protein, 491 aa, Arabidopsis thaliana
MEGLRDSSSQTISSTTSSSSSPSCDVDVDNRGKQLTPSTRRSRAGFSDSFSSHDLSSFCRDEEVKTFCPIKSESDDELLRSIEAETSSSVVSTSDSSETHHHHHHHHSSGGPNNGHWRRGFFRLLKKGSSAMPFNTFTPLKGVPKLTRRKSKRIRDNMVPVIPALDTDHLFYFKPSWRNFSLRDIQTATNDYSRENLIGEGGYAEVYKGQMADGQIVAIKKLTRGSAEEMTMDYLSELGIIVHVDHPNIAKLIGYCVEGGMHLVLELSPNGSLASLLYEAKEKLNWSMRYKVAMGTAEGLYYLHEGCQRRIIHKDIKASNILLTQNFEAQISDFGLAKWLPDQWTHHTVSKVEGTFGYLPPEFFMHGIVDEKTDVYAYGVLLLELITGRQALDSSQHSIVMWAKPLIKENKIKQLVDPILEDDYDVEELDRLVVEILRGDKCSLDKLRERENSKLQRTYSEELLDNEEYNSTRYLNDINRHMETVLGTSKD

SEQ ID NO: 16106 - protein, 407 aa, Arabidopsis thaliana
MTMMSDLSEDLVEEILCRVSITSLGAVRSTCKGWYVLSKTRVLCKAETKHQFLGFMKKNYKLCSMRFDLHGNFNEEGGEEFMNPSIKKSGNLLDQLDICKVFQCDGLLLCVTKEENTRLVVWNPYSGQIRWIKCNNSYHRYEGYAIGYNNNRKHKILRFSDMSFSTYKIYDFISNSWRVLDIAPNWHINPDQRGASLKGNTYFFAREKREDEEDEDILWQPVEYLLCFDFTTENFGQLHPLPFEQYIDDAGALSSFGEEKLAALFQSFASSVVEIWVTSMIEANAVSWIPFLKVDMKPHCSFRFRLPFDGGSFFIDEEKKVAVVIHVDVVAESEMNRYEDVAYIIGENGYVKKVCLVEAVNQGGSLNLSKRSCCNYPHVCCSSYVPSLAQINQSVEFENEREEEEAN

SEQ ID NO: 16107 - protein, 136 aa, Zea mays
LGPSRPAGVHSTSIRLLRPLLFVVLVSSHPQPQGEKGEARRRPGPQQPADRDLCSAQSIHGGRPLPKFGEWDVNDPASADGFTVIFNKARDEKKGGNGQDTDSPSKDPRTERVESYAAKPSTKKWFCCVTSSPTQS

SEQ ID NO: 16108 - protein, 325 aa, Deinococcus radiodurans R1
MTAPTAHDYDVVIIGGGPAGLTAAIYTGRAQLSTLILEKGMPGGQIAWSEEVENFPGFPEPIAGMELAQRMHQQAEKFGAKVEMDEVQGVQHDATSHPYPFTVRGYNGEYRAKAVILATGADPRKLGIPGEDNFWGKGVSTCATCDGFFYKGKKVVVIGGGDAAVEEGMFLTKFADEVTVIHRRDTLRANKVAQARAFANPKMKFIWDTAVEEIQGADSVSGVKLRNLKTGEVSELATDGVFIFIGHVPNTAFVKDTVSLRDDGYVDVRDEIYTNIPMLFAAGDVSDYIYRQLATSVGAGTRAAMMTERQLAALEVEGEEVTAAD

SEQ ID NO: 16109 - protein, 309 aa, Methanosarcina barkeri str. fusaro
MYDLIIIGGGPAGLAAGIYAVRSGLNTLILERSEISGQIALSDIVENYPGFPAISGLELMEKYKAHAQAVGVETKITEVLSVRAEGEKKIISTDSGDLESIAVIVATGANPKHLNVPGEKEFISKGVSYCAICDGPFFKNKTVVVVGGGNSAVTDALLLSKIARKVYLIHRREQLRAVKVLQDRVFATPNIEFIFNAQILEIMGSSGGVRRVEKIRFKDLKSEEQRELATDGVFIYVGIHPNTEIIDVDKDDEGFITTDRFLETSKKGIYAVGDCRDTPIWQLVAAVRDGALAATAANVYIESIKKETT

SEQ ID NO: 16110 - protein, 315 aa, Colwellia psychrerythraea 34H
MSDVRHCPLLILGSGPAGYTAAVYAARANLKPVMITGMQQGGQLTTTTDVENWPGDADDLTGPALMERMQKHAEKFDTEIIFDHIESVDFSSKPYKLTGSSEYTCDALIICTGASAQYLGLPSEEAFMGRGVSACATCDGFFYKNQKVAVVGGGNTAVEEALYLSNIASEVHLIHRRDTFRSEKILTDRLYEKVANGNIVLHTDRTLDEVLGDNMGVTGLRLKEMGSDATEELEVSGVFIAIGHKPNTDIFKDQLDMKDGYLTIQSGTQGNATQTSVEGVFAAGDVADHIYRQAITSAGAGCMAALDSERYLDAL

SEQ ID NO: 16111 - protein, 267 aa, Azoarcus sp. EbN1
MNLDHSNEAAAEPPILVDRRGRVGLLRLNRPSRFNALSDALIDRLGDELEAMDADDGIGAIVITGSDKAFAAGADIGAMADWDFVHVYKTNYVSRNWDRLARIRKPVIAAVGGFALGGGCELAMTCDLVIAAETARFGQPEVRLGVLPGAGGTQRLPRAVGKAKAMDLCLTARMMDAQEAERAGLVSRIVPAERLLDEALEAAARIAAFSLPVAMMIKESVNRAFESGLSEGLLFERRSFHAAFGLQDQKEGMAAFLAKRNASFSHC

SEQ ID NO: 16112 - protein, 975 aa, Saccharomyces cerevisiae
MLSRLSLLSNSRAFQQARWRIYRLKVSPTVHASQYHILSGRKLAQSIREKANDEIQAIKLKHPNFKPTLKIIQVGARPDSSTYVRMKLKASKDSNVDCIIEKLPAEITEVELLKKISDINDDDSIHGLLIQLPLPRHLDETTITNAVDFKKDVDGFHRYNAGELAKKGGKPYFIPCTPYGCMKLLEEAHVKLDGKNAVVLGRSSIVGNPIASLLKNANATVTVCHSHTRNIAEVVSQADIVIAACGIPQYVKSDWIKEGAVVIDVGINYVPDISKKSGQKLVGDVDFDSVKEKTSYITPVPGGVGPMTVAMLVSNVLLAAKRQFVESEKLPVIKPLPLHLESPVPSDIDISRAQSPKHIKQVAEELGIHSHELELYGHYKAKISPNIFKRLESRENGKYVLVAGITPTPLGEGKSTTTMGLVQALSAHLGKPSIANVRQPSLGPTLGVKGGAAGGGYAQVIPMDEFNLHLTGDIHAISAANNLLAAAIDTRMFHEATQKNDSTFYKRLVPRKKGIRKFTPSMQRRLKRLDIEKEDPDALTPEEVKRFARLNINPDTITIRRVVDINDRMLRQITIGEAATEKGFTRTTGFDITVASELMAILALSKSLHEMKERIGRMVIGADYDNKPVTVEDIGCTGALTALLRDAIKPNLMQTLEGTPVMVHAGPFANISIGASSVIADLMALKLVGSEKNPLNDKNIHEPGYVVTEAGFDFAMGGERFFDIKCRSSGLVPDAVVLVATVRALKSHGGAPNVKPGQSLPKEYTEENIDFVAKGVSNLVKQIENIKTFGIPVVVAINRFETDSQAEIEVIKKAALNAGASHAVTSNHWMEGGKGAVELAHAVVDATKEPKNFNFLYDVNSSIEDKLTSIVQKMYGGAKIEVSPEAQKKIDTYKKQGFGNLPICIAKTQYSLSHDPSLKGVPRGFTFPIRDVRASIGAGYLYALAAEIQTIPGLSTYAGYMAVEVDDDGEIEGLF

SEQ ID NO: 16113 - protein, 175 aa, Aegilops tauschii
MAPTVMASSATSVAPFQGLKSTAGLPVSRRSNGASLGSVSNGGRIRCMQVWPIEGIKKFETLSYLPPLSTEGLLKQVDYLIRSKWVPCLEFRKVGFIFREHNVSPGYYDGRYWTMWKLPMFGCPAPTQVIPEVEEVRKEYPDPYCRIIGFDNMRQVQSVSFIASKPPGCEESGKA

SEQ ID NO: 16114 - protein, 166 aa, Arabidopsis thaliana
  misc_feature (6)..(6): Xaa can be any naturally occurring amino acid
  misc_feature (14)..(14): Xaa can be any naturally occurring amino acid
  misc_feature (68)..(68): Xaa can be any naturally occurring amino acid
  misc_feature (97)..(97): Xaa can be any naturally occurring amino acid
  misc_feature (116)..(116): Xaa can be any naturally occurring amino acid
  misc_feature (118)..(118): Xaa can be any naturally occurring amino acid
  misc_feature (124)..(124): Xaa can be any naturally occurring amino acid
  misc_feature (128)..(128): Xaa can be any naturally occurring amino acid
  misc_feature (130)..(131): Xaa can be any naturally occurring amino acid
  misc_feature (137)..(137): Xaa can be any naturally occurring amino acid
  misc_feature (144)..(146): Xaa can be any naturally occurring amino acid
  misc_feature (149)..(149): Xaa can be any naturally occurring amino acid
  misc_feature (152)..(152): Xaa can be any naturally occurring amino acid
  misc_feature (158)..(159): Xaa can be any naturally occurring amino acid
  misc_feature (162)..(162): Xaa can be any naturally occurring amino acid
MASSMXSSTAVVTXPAQATMVAPFTGLKSSASFPVTRKANNDITSITSNGGRVSCMKVWPPIGKKKFXTLSYLPDLSDVELAKEVDYLLRNKWIPCXEFELEHGFVYREHGNNSRXTXNGRYLXMWKXPXXGCTDFXQVLKEGXXXKKXYPXGLIRVXXLEXPSHL

SEQ ID NO: 16115 - protein, 401 aa, Trichodesmium erythraeum IMS101
MVTTPEKIENRKNSISPNQNRQDRVAVLLMGYGEVESYEDFANYNEQALNLLTAKFAPVPTWIYPPLAKLLAIFDLHEWSHQHGNFISPHNAIFESQRAGIEKNLQDKWGDRVKVFKAFNFCAPYLPEQVLNQIKSEGFDKLLIYPLLVVDSIFTSGIAVEQVNKALVKLADKNEHWIKGQRYIPSFYNEPDYINLMAKMVEEQIANDLAVAHLPSQIGIVLTNHGCPHKAKGFTSGIDESQTLYELVRERLINRFALISVGWLNHDTPLIEWTQPDAKTAAQNLIELGATAIIFMPIGFATENHETLLDVEHIIEGLRRKYPEVTYRQMPCVNDRSEFLQMAGEWANLYIEELLSENALAVNPSLALAQAKSTHGHSHDGDHGHSHGDHHHHGHHHHHHH

SEQ ID NO: 16116 - protein, 666 aa, Bdellovibrio bacteriovorus HD100
MGIRRFWKYLSVANKLYIVIGVMALLIALELFTLYFAMNSLSSVRAFVAGESMWSKGQKDAVITLHKYARTRDPQFYITFQENVRVPLGDSKARNALEQVPPDTAKAKEGLLQGKVHPDDIPGVISLVLRFHDFKHVKKAIEIWREGDQMTQELIVMGENLHMLIQKNAPESEIFKALNSVDDLNDRLTVLEASFSYTLGEGSRWLENMLMITLIFAVLIVEGTGLFLTISFSRNLSKGLSELNSAAHEVGEGRFDVQVPVRSGDELGQLAESINLMAHHLSSSIGERQQAEQASQLKSLFLANMSHEIRTPLAAIIGFSDLLKESNLDESERLQYVNIIHRTGEHLTRIINDILDLSKVEAGHLEMQSHPVNLNSLLEDLHILMVARVGDKPVHVEFNRRGIVPDMIRTDPLRLRQILTNIIGNAIKFTDQGYVRMTYEISGSNLLFTVKDTGVGISSAQRSNLFQAFSQIDNSVSRKYEGTGLGLVLSRRLAQMMGGDVHLEDSEPGKGCTFIVKISLDIPKIHTQKIVPIKAKEVHLAAQLSSTSILLVDDVEDNRLLIQRMLAKRGANLTLATNGQEGLTKALEKEFDIILMDIQMPVMDGYTATRKLRQAGYSKPIIALTAHAMKDDRERCLEAGCTDYLTKPVQVESLIQTILNYSMETT

SEQ ID NO: 16117 - protein, 415 aa, Ehrlichia ruminantium str. Welgevonden
MTKILVKKFGGTSLQNIKCINQVTEIIKQDVCSNHKVVVIVSAMGKFTDNIISQIKEISDVKSYNELSEYDLIISSGEQISCGMLSLALQKLGIKAQSWLGWQLPIVTTDDHTKARIMEINTSALQDFLVNNDVAIIAGFQGMHKENRVTTLGRGGSDTSAVAIAAALGIDLCYIYTDVDGIYTSDPNIVPKARKLDYIAYDEMIEMASLGAKVLQVRSVELAMKYNIKLHVLSTFNSIKGTILCKKGEIEMESQLITGITYNSNTASITLKKVRALFGITTLFSIIADNGINVDMIIQNMDNNANDITFTIPEEDLSITETLLIKIKDKLMYEELIINPDVAKVSVIGVGMISHPGIAYKMFDTLTSNNITILAVTTSEIKISVLVLRKDGQLATQYLHSSFKLDSQSNLHTTS

SEQ ID NO: 16118 - protein, 115 aa, Triticum aestivum
MARTAATKLVLVALVAAMILAASDAAISCGQVSSALTPCVAYAKGSGTSPSGACCNGVRKLAGLARSTADKQATCRCLKSVAGGLNPNKAAGIPSKCGVSVPYTISASVDCSKIH

SEQ ID NO: 16119 - protein, 315 aa, Eubacterium acidaminophilum
MENVYDLAIIGSGPAGLAAALYGARAKMKTIMIEGQKVGGQIVITHEVANYPGSVREATGPSLIERMEEQANEFGAEKVMDKIVDVDLDGKIKVIKGEKAEYKAKSVILATGAAPRLAGCPGEQELTGKGVSYCATCDADFFEDMEVFVVGGGDTAVEEAMYLAKFARKVTIVHRRDELRAAKSIQEKAFKNPKLDFMWNSAIEEIKGDGIVESAVFKNLVTGETTEYFANEEDGTFGIFVFIGYIPKSDVFKGKITLDDAGYIITDDNMKTNVDGVFAAGDIRVKSLRQVVTACADGAIAATQAEKYVEANFEE

SEQ ID NO: 16120 - protein, 827 aa, Vibrio vulnificus YJ016
MESIVIIGNGMVGHQLVEQLVATGSHLEKRIIVIGEERFVAYDRVHLSAMFSGQSHQDLLLSSEEWYQKHGIELILGVAVVGIDRQSKRVTLEDESQLSYDQLVFATGSYPFVPPMAGSERSKVFVYRTLDDLSQIKQACLGAKKGAVIGGGLLGLEAANALRLLGLETHVVEFAPRLMPVQLDEGAGAVLKSKIEQLGLTVHTSTATEKIIDGETAYHRMVFKDAPSLEVDVIVFSAGIRPRDQLARDCGLELGERGGIVVNNACQTSDSEIYAIGECALWQGKIFGLVAPGYAMARVVAQQLRGGSEAEFSGADMSTKLKLLGVDVASIGDAHKATPKATEMVLHDAAAGIYKKLVVDQSGTTLLGAILIGDNQDYDVLLQSYLNKTPLPQPVVSLLFDTSALKGDVSDNTVICSCHNVTKGDLISAIQAGAHELGELKAQTKAGSGCGGCSAMVKSVLDQQLSVMGLEVNTQLCEHFSQTRQALYHICQVEKIRDFDSLLAKHGKGHGCDICKPTAGSIFSSLWNEHIMEPEHSPLQDSNDAFMANLQKDGSYSIVPRIPGGEITPEKLIVLGEVARQYDLYTKITGGQRVDLFGAQVEQLPEIWQTLIDAGFETGHAYGKSVRTVKSCVGSTWCRYGVDDSVGLAIELENRYKGLRAPHKLKFAVSGCTRECAEAQSKDIGVIATEKGWNLYVCGNGGMRPRHADLLAADLSKAELITLIDRVLMFYVRTADRLQRTSVWLENLDGGLDYLKSVVLDDSLHLCEQLEQQMAHVVDTYHCEWQQTLTNPEKLMRFRPFINSTQQSTLLGYQRTRGQRIPVKLEE

SEQ ID NO: 16121 - protein, 873 aa, uncultured bacterium 581
MTPSSTSNTAQLRQNVRHLGEILGQVIQSQGDAGLFEAVEAIRLQSKQSRDDDDQEALRALLTQLNEKQILDVARAFSHFLNLANIAEQHHTLADYSQSLFSATASLESAFQQLLKDHEHNRLNTVLKNLSIDLVLTAHPTEITRRTLIHKHGEINDCLTRLEILNDKAAASSKDHSRLKELISQIWHTEEFRSDRPTPIDEARWAFAVIENSLWDAVPQFLRVVDDICERYALPIPPPNWSPIRISSWIGGDRDGNPNVTAKVTREVLLLAQWQACTLLENDIATLYEELSVTTASTTLEEATEGALEPYRFLLKPLRDRLQGQRLNIEKALNDQSLAPAPLTLSEIVDPLEACYESLQAVNLDVLARGYLLDTLRRVHCFGPYLIQLDIRQESARHTQAIAELTEALALGDYRDWNEGQRCDWLRGELDNPRPLIPAGWKPTPETQEVIDTFLVIAETPQSALGSYVISMAAEASDVLAVQVLLKATGCTTNMLVAPLFETLDDLESAPRVVEELLSDNAYRDRCDHQIMVMIGYSDSAKDAGMLAAGWAQYRAQESLLGVCKKFAVKLQLFHGRGGSIGRGGAPAHDALLSQPPGSLENGLRVTEQGEMIRTKLGLTPLAVNTLGRYASAILQANLTPPPEPAGEWRVLMNRLAQHSCEDYRRWVRDEPNFVPYFRQATPEQELASLPLGSRPTRRRSDGGIASLRAIPWIFAWSQNRLMLPAWLGAGSALARAAADGREVVLKSMAREWPFFGARLSMLEMVFAKSDLTIAELYDHLLVSPELADLGAALRQQLSNDRAALLAILETGSELEGDNWGRESINLRDIYTAPLNLLQAELLRRQRANPEEATERALMVTIAGVAAGMRNTG

SEQ ID NO: 16122 - protein, 579 aa, Cytophaga hutchinsonii
MLSKTVSDQLVAMLVQAGIKRVYAVTGDSLNFVNDAIRRSGKIEWIHVRNEETGAFAAGAEAQLKGIACCAGSSGPGHVHLLNGLYDAHKSSASVLAIASTCHSTEFGTDSFQETNTIKLFDDCSCYNQIAVTPLQFPRMLQAAVQHAIHKKGVAVLGLPGDLTSMAAELSPTSMEIYHSNPVIRPSAVELIQLAAILNDHSKITIFCGIGASEAHDQVVKLSKVLQAPVAYSFKAKMSMQHNNPNEIGMTGLLGLPSAFESMHESEVILLLGTDFPYADFMPVKNKIIQIDTAPEKLGRRAKLDMGLCGNIQDTLDALFPLITQKEDDSFLQKQLNLYTEVKEHLKSYVDDPGKENLIHPEYVASRIDALSAEDAIYTVDTGMTCVWAARYLNATGKRTLLGSFNHGSMANAMPQAIGAALACPGRQVIAMCGDGGISMMLGDIMTIVQYKLPIKLIVFNNHSLGMVKLEMEVSGLPDWQTDMVNPDFSKIAEAMGMRAITVTDPADVDGALIEAFAYSGAILLNIITDPNALAMPPKITFEQMKGMATSMTKLMLSGQMDEVWKKIESNKKHLKELL

SEQ ID NO: 16123 - protein, 230 aa, Magnaporthe grisea 70-15
MSQVHALSDDQVGQELRKMTAFIKQEAMEKAREIEIKANEEFAIEKSKLVRQETDTIDSQYEKKFKQATMSQQITRSTVANKTRLKVLGARQELLDDIFDAAQKRLAEGTKDKKKYQEILKNLLLEGFYALHEPQMQVRARKADYDIVKSAIDAAAKEYKQKVGSEIKVTIDESNPIADGSTGGVAILAGGGKIEIDNTFEARLSILNTSALPAMREALFGKNPNRKFHD

SEQ ID NO: 16124 - protein, 213 aa, Cytophaga hutchinsonii
MPILVIVRHGQSEWNLKNLFTGWSDVELTPTGEHEAEYAGIVLRPYHFDIAFTSVLKRAIHTLSIILNQTGATIPIIENEALNERNYGDLQGLNKAEVGEKYGAQQLIAWRRSYTEVPPGGESLENTCQRVIPYYQEKIEPELKDGRNVLIVAHGNSLRALMMHLEKISPEDIAHVDLATGAPRLYEFSSKLDLNSVSYIKLPETPLDVSTLL

SEQ ID NO: 16125 - protein, 391 aa, Candidatus Blochmannia floridanus
MFEPIELTSDAVIKVIGIGGGGSNAVEHMLRERIEGVDFFAVNTDAQALRKMIVGQTIQIGSSITKGLGAGSNPEIGRNSAEEDRDVLRSTIEGADMVFIAAGMGGGTGTGAAPVVAEVAKDLGILTVAVVTKPFNFEGKKRMMFAEQGITELSKYVDSLITIPNDKLLKVLGRGISLLDAFSAANDVLKGAVQGIAELITRPGLMNVDFADVRTVMSEMGYAMMGSGVGCGDDRAEEASELAIASPLLEDIDLSGARGVLVNITSGLDLRLDEFETVGNTIRSFASDNATVVIGTALDPDIKNDELRVTVVATGIGVDKNLENTLPTADHLEEQKMVKESHYNNHAIQKQRKSAFFNESQHDTSSNVVSHDNSILDKDMDYLDIPAFLRK

SEQ ID NO: 16126 - protein, 123 aa, Glycine max
MRPINSVSPSSPMRASGVNIWKSPIPYLFGGLAVMLAIISMALVILVCSYRKRDSQSSSEVNEDVKSQAMANNLETNSEPEVLVIMAGDHNPTYLAKPITSSIFCTCGAQPSEPNPSSTSTPE

SEQ ID NO: 16127 - protein, 356 aa, Burkholderia xenovorans LB400
MRFDLERPSQNATSHRVAVLLINLGTPDAPTPRAVRRYLAQFLSDPRVVEIPALLWQIILRLLILPFRGSASAKKYAAVWMPEGSPLRVYTEKQVEGLRHLLQLNDYTVLVDYAMRYGTPGIPAMLNQLKLAGAERVLLMPMYPQYSSSTTATAFDDAFSALKRMRNQPEIRTVRQYADHPAYIAALAAQVHQYWHQHGRPDFAAGDKLVLSFHGVPKRTLDLGDPYHEQCQQTGALLMQALELTPVECRITFQSRFGKAEWLQPYTAPTLKELGAAGVRRADVFCPGFTADCLETIEEIGMEVRDEFLHAGGKDFHRIPCLNASQAWIAALGEIVAQNLQGWPVQALPVPHTTGA

SEQ ID NO: 16128 - protein, 230 aa, Citrus unshiu
MNDADVSKQIQQMVRFIRQEAEEKANEISVSAEEEFNIEKLQLVEAEKKKIRQEYERKEKQVEIRKKIEYSMQLNASRIKVLQAQDDLVSNMMEAASKEVLNVSRDHNSYKKLLKGLIVQSLLRLKEPAVLLRCRKDDHHLVESVLESAKEEYAQKLQVHPPEIIVDHHIYLPPGPGHHNAHGPSCSGGVVVASRDGKIVCENTLDARLDVVFRKKLPEIRKQLVSQVAA

SEQ ID NO: 16129 - protein, 497 aa, Glycine max
MAAGTGLFAEILDGDVYKYYADGEWKKSASGKSVAIINPTTRKTQYKVQACSQEEVNKVMDLAKSAQKLWAKTPLWKRAELLHKAAAILKEHKAPIAECLVKEIAKPAKDAVTEVVRSGDLVSYTAEEGVRILGEGKFLVSDSFPGNERTKYCLTSKIPLGVILAIPPFNYPVNLAVSKIAPALIAGNSIVLKPPTQGAVSALHMVHCFHLAGFPKGLINCVTGKGSEIGDFLTMHPGVNCISFTGGDTGIAISKKAGMIPLQMELGGKDACIVLEDADLDLVAANIIKGGFSYSGQRCTAVKVVLVMESAADALVEKVKAKVAKLTVGPPEDDCDITPVVSESSANFIEGLVLDAKEKGATFCQEYKREGNLIWPLLLDNVRPDMRIAWEEPFGPVLPVIRINSVEEGIHHCNASNFGLQGCVFTKDVNKAIMISDAMETGTVQINSAPARGPDHFPFQGIKDSGIGSQGITNSINMMTKVKTTVINLPSPSYTMG

SEQ ID NO: 16130 - protein, 135 aa, Magnaporthe grisea 70-15
MVAAAKHTAIVKKRTKSFMRHQSDRFKRVDPSWRKPKGIDNRVRRRFRGNIAMPSIGYGSNKRTKHMMPSGHKAFLVQNINDVELLLMHNQVFAADSQSRIAHNVSSRKRIEIIARAKQLGVKVTNPKAKVTTEV

SEQ ID NO: 16131 - protein, 425 aa, Candidatus Blochmannia floridanus
MVININVPNIGENELEVTEIFIKNGDNIDINQPLLIIEGDKSSTEIPSPYAGIITKIHVQVGDKVQTGTLIISLDIIKTHDLDQSIQTKQNTKNEPNINNNIIDNNTDIQKYHITSISNNNIPTHATPFIRHMARKFDINLSHIQGSGRKGRILKEDIQKYLSNTSTKTMDYNPINKNISSLHPDTNFSKFGHTETIQLNKIQKISASNLQKNWSIIPHVTQFDMVDITSLEIFRKQQNFEIKKNKLNYKITMLVFVIKAVSKALQELPQFNSSLSQDGHTLILKKYINIGIAVDTKRGLLVPVLQNTDKKNITTLSKELLEISQKARVGKHLTPLDIQGGTFTISNLGGIGGTLFTPIINAPEVAILGISQAIMKPVWTGKKFIPRLMLPLSLSYDHRVINGADGAKFINRINKIISDIRLLSI

SEQ ID NO: 16132 - protein, 381 aa, Mycoplasma hominis
MAKELNNFNPVAKIIVIGVGGGGNNSVETMINSHLDSFQIIAANTDKQVLAKFPQECVLHLGDERGIGAGANPEIGKTAAESSREEIKSRLQGADLVIITAGMGGGTGTGAAPVIAQIAKECNALVVAVVTTPFDFEGPKRMRIAKQGLQEIKKCVDSYIVISNNKLLQQYGNISFSDAFICANNVLKQTIRTIVDVIATPSIINLDFADLSTIIKNKGETVIGIGQANGQDRAVKAITSAITSPILESSVVGASDAIVNFSASQKVTLNEIQSALGAMREIVGNEINIIFGITTLESEESNKLGELFVSVIATGLRKDAPKDIDQIQDEVINVIKKDDLNYVNDETKEFFVSEGTFKTQSFFSMDNDEDSNDELADILKH

SEQ ID NO: 16133 - protein, 180 aa, Zea mays
  misc_feature (50)..(50): Xaa can be any naturally occurring amino acid
  misc_feature (63)..(63): Xaa can be any naturally occurring amino acid
  misc_feature (81)..(81): Xaa can be any naturally occurring amino acid
QHITDLTARCSCLPRRWCPARISEEIGGAGPAERMWKVVLLRDNSLLLPXACAVYVNAVDDDXDGGPCCFTTMKLIPSIAXENKTLKSCLAPLDAAARVLRTYVLQGGTVSAQLRTHLGEISTDARGHGACPITVTGEYKSLKLASVTPEDEARHQQENDLLDVMETVYLELHASISSEA

SEQ ID NO: 16134 - protein, 271 aa, Arabidopsis thaliana
MVTLSSPSPSLSCVENVTCKSSHVSRVLISGTDNINHGESSEAKILRDVHISERLLEDFTELARENTEKDLETCGTLAAFLERGIFYVTTLIIPKQESTSNSCQAMNEVEVFSIQNERELYPVGWIHTHPSQGCFMSSVDLHTHYSYQVMVPEAFAIVVAPTDSSKSYGIFKLTDPGGMEVLRGCSETGFHPHKEPEDGNPVYEHCSNVYKNSNLRFKLYPLWAKDVNNNRHHNHHPNQNCILGLRRLSDSGYEHKVPSIKLSNVNKLSCP

SEQ ID NO: 16135 - protein, 216 aa, Triticum aestivum
NKFVQKSRLVPVRNSRDIVDPRVRPSSSSSSSTPQEAAAEPPVPDRGLNRRIAVLTTLAAVGLFGSQRLQLGGFSLKDLAANAVPYEEALSNGKPTVVEFYADWCEVCRELAPDIYKIEQQYKDRINFVMLNVDNTKWEQELDEFGVEGIPHFAFLDKEGNEEGNVVGKLPRQYFLDNVVALSSGDPTIPHARAVGQYSSAEFRKVHQVADPRSHG

SEQ ID NO: 16136 - protein, 149 aa, Synechococcus sp. WH 7805
MHVRFREVDPFNCWLWLRFSEVPSQGERNYVDGIFDSWYVLGRLGGFNAESMQVHEEGDELSWMSYDNEESTSVMPALMHNMGQLEYEQDWARCWVDLGTSDGFSLDVLINALRQLDSDLVQIEELLIGGVNEDWPVEDHPDSIFPGMT

SEQ ID NO: 16137 - protein, 422 aa, Pyrococcus horikoshii OT3
MDMVEQDPFEIAVKQLERAAQHMKISEEALEFLKRPQRIVEVTIPVEMDDGSVKVFTGFRVQYNWARGPTKGGIRWHPEETLSTVKALAAWMTWKTAVMDLPYGGGKGGIIVDPKKLSDREKERLARGYIRAVYDIISPYEDIPAPDVYTNPQIMAWMMDEYETIARRKTPAFGIITGKPLSIGGSLGRNEATARGASYTIREAAKVLGWDGLKGKTIAIQGYGNAGYYLAKIMSEDYGMKVVAVSDSKGGIYNPDGLNADEVLKWKREHGSVKDFPGATNISNEELLELDVDVLAPAAIEEVITKKNADNIKAKIVAEVANGPVTPEADEILFEKGILQIPDFLCNAGGVTVSYFEWVQNITGYYWTLEEVRERLDKKMTKAFYDVYNTAKEKNIHMRDAAYVVAVQRVYQAMLDRGWVKH

SEQ ID NO: 16138 - protein, 114 aa, Vibrio parahaemolyticus RIMD 2210633
MNMKKIEAIIKPFKLDDVREALAEVGITGMTVSEVKGFGRQKGHTELYRGAEYMVDFLPKVKLEIVVTEDVADKCVETIIETAQTGKIGDGKIFVTDVERVVRIRTGEEDEDAI

SEQ ID NO: 16139 - protein, 1044 aa, Pichia angusta
MTCSVPPLPEDISPRAAKKKLVIVGLGMVGLSFLEKLLSNDSKLNEYSIMVYGEEPYLAYNRVGLTEYFQHREFKNLLLSPEEFYQLRGEKWNYAIDEKVVDIDRRARIITTDKGNRASYDVLVLCTGSAAILPTDLLPPLTRKSYREMGCFVYRTIDDLYSMIDYCQGAKKTRAIVVGGGLLGLEAAKALYDMESFEDITIVHRSHWLLSQQMDQKGGSLLTSKVKELGITCRTGTTVSELLFDEDQNLKGVKYDNGQIEECSLLCYTIGIKPRDELTSCGLNAGSRGGFKVNNMLQTSDENIYAIGECASWNNMTFGLIAPGYEMADILAFNLTQGKLHQPKEFSEPSMGTRLKLMGVDVASFGDFFADRNGPKWLLADTTKKFVDLVFEDPIDATYTKLLFTKDGKYMLGGILVGDTSNYTKFSAMIRKPLPKSPSELLIGKSGEDDMEMLSDETQICSCHNITKGKLVEAVKNGCSSLADVKKCTKAGTACGGCEPTVKIIFEKELKKLGGKVSNNLCVHFDYSRVDLFSLIMVKNFRSFRRVMEELGNDPSSSGCEICKPTIGSILSTLYNRHLLKKEVHGLQDTNDRYLGNIQRDGTFSVVPRMSAGEITPEKLVSIGKIAKKYGVYTKITGAQRLDLFGVKKSDLLKIWKDLNEAGFESGQAYGKSLRNVKSCVGSTWCRYGIGDSVGLAVRLEERYKGIRSPHKMKGGVSGCVRDCAEFHSKDFGLCAVSGGFNIYVGGNGGMKPRHAQLLATNVRPDEVIPILDRYLMFYITTADRLQRTARWLENLDGGIEYLKDVIIRDKLGICKDLEAQMRHVVAGYYDEWAKAVSEEKENPIFKQFVNTPENQDCVEIVNERGQPRPAMWPEKAANQKFNEIRWSSVSWQEVCECSDLPLAEAGSSATVLVGDTQIALFRTSKNELYCSQNMCGHKRAFVLNQGLLSEDSDKNCYISCPMHKRNFYLKSGACKNDEALSIATFEVKEENGKVYAKLPPLKELDEVLGTSKWKVTSQETEAKQVRKITTEKNLVDKAILLDW

SEQ ID NO: 16140 - protein, 129 aa, Glycine max
PHAYGKAAEQLQKENVSPHLIPHKTFSGNRPSLSLLLPSLNAYNIGQLLAIYEHRIAVEGFIWGINSFDQWGVELGKSLATQVRKQLNASRTKGEPIQGFNFSTTTMLTRYLQASSDVPADLSTVLPKI

SEQ ID NO: 16141 - protein, 370 aa, Rhodopseudomonas palustris CGA009
MATHKLLLLPGDGIGTEVMAEVSRLIDWLNKAGIASFETEHGLVGGAAYDADKVAITDATMALAQASDAVIFGAVGGPKWDGVPYDARPEAGLLRLRKDLGLFANLRPAVCYPALADSSSLKRDVVEGLDIMIVRELTGGVYFGEPKTITDLGNGQKRAVDTQVYDTYEIERIGRVAFDLARKRRNKVTSMEKRNVMKTGVLWNEVITAVHDREYKDVQLDHQLADSGGMNLVKWPKQFDVIVTDNLFGDMLSDIAAMLTGSLGMLPSASLGEVDAKTGKRKSMYEPVHGSAPDIAGKGMANPVAMLASFGMALRYSLDMGALADKLDEAIAAVLAKGLRTADIKSEGTTVISTSQMGEAIVTELQALHA

SEQ ID NO: 16142 - protein, 104 aa, Rhodospirillum rubrum
  misc_feature (21)..(21): Xaa can be any naturally occurring amino acid
  misc_feature (35)..(35): Xaa can be any naturally occurring amino acid
MKQVSDASFEEDVLKADGPVXVDFWAEWCGPCRQXAPALEELATALGDKVTVAKINIDENPQTPSKYGVRGIPTLMIFKDGQVAATKIGALPKTKLFEWVEASV

SEQ ID NO: 16143 - protein, 170 aa, Arabidopsis thaliana
  misc_feature (115)..(115): Xaa can be any naturally occurring amino acid
  misc_feature (157)..(157): Xaa can be any naturally occurring amino acid
PRVRRVRQKKNKTQKSSLLYVSSPPVVTSPAQATMVAPFTGLKSSAAFPVTRKTNKDITSIASNGGRVSCMKVWPPIGKKKFETLSYLPDLSDVELAKEVDYLLRNKWIPCAEFXLEHGFVHREHGNTPGYYDGRHWTMWKLTLIGCTDFDQVLKEXLQECMTEYPGAFI

SEQ ID NO: 16144 - protein, 378 aa, Gibberella zeae PH-1
MLSRGSLRSAQLLRGVAKQQPQLARSFATVQSDIFKPAKYGGKYTVTLIPGDGIGTEVAESVKTVFKADNVPVEWEQIEVSGLEGAGRTEDAFRESVASLKRNKLGLKGILHTPISRSGHQSFNVAMRQELDIYASISLIKNIPGYETRHKDVDLCIIRENTEGEYSGLEHQSVEGVVESLKIITRAKSERIARFAFSFALANGRSKVTCIHKANIMKLADGLFRSTFHQVAKDYPTLETNDMIVDNASMQAVSRPQQFDVMVMPNLYGGILSNIGAALVGGPGIVPGCNMGREVAVFEPGCRHVGLDIKGKDQANPTAMLLSGSMLLRHLGLDEHANRISKATYAVIADGKVRTPDMGGKSTTHEFTRAILDKLETV

SEQ ID NO: 16145 - protein, 523 aa, Colwellia psychrerythraea 34H
MLDTNLQTQLKSYLDNLKTPVELITFTDESPKAKELAQLVTQIAELSPLITEINGNNSEQAANERVPSMLVRSVASNSEMRFAGLPMGHEFTSLVMALLHSGSHPLKIEAEQIEQVRNLEGDFVFETYISLSCQNCPDVVQALNMMAAINPNIKHTMIDGSLFQTEVFDRDVMAVPSVYLNGESFSQGRVSLTDILNKVDTNAGARQAKALENKDTYDFLVVGGGPAGAAAAIYAARKGINTGLVADRFGGQVSDTMAIENFISVKATQGPKLVASLEEHVREYDVDIMNSNKASKVKRNEATGLVEVSLENGAVLKSKSVVLATGARWREMNVPGENQYRGKGVAYCPHCDGPLFKGKPVAVIGGGNSGIEAAIDLAGIVEHVTVLEFADTLRADDILVRKANSLTNVTIITNAQTTEVHGDGTRVTSLSYTDRGTGEHHSLALAGIFVQIGLMPNTEFLQGEIELTNRGEIIAGSRGETSITGVFAAGDVTNNPYKQIIIAMGSGANAALGAFDYLIRQDV

SEQ ID NO: 16146 - protein, 192 aa, Zea mays
  misc_feature (72)..(72): Xaa can be any naturally occurring amino acid
  misc_feature (102)..(102): Xaa can be any naturally occurring amino acid
  misc_feature (105)..(106): Xaa can be any naturally occurring amino acid
  misc_feature (109)..(109): Xaa can be any naturally occurring amino acid
  misc_feature (111)..(112): Xaa can be any naturally occurring amino acid
  misc_feature (121)..(121): Xaa can be any naturally occurring amino acid
  misc_feature (125)..(125): Xaa can be any naturally occurring amino acid
  misc_feature (130)..(130): Xaa can be any naturally occurring amino acid
  misc_feature (133)..(133): Xaa can be any naturally occurring amino acid
  misc_feature (138)..(139): Xaa can be any naturally occurring amino acid
  misc_feature (141)..(142): Xaa can be any naturally occurring amino acid
  misc_feature (145)..(145): Xaa can be any naturally occurring amino acid
  misc_feature (148)..(149): Xaa can be any naturally occurring amino acid
  misc_feature (151)..(151): Xaa can be any naturally occurring amino acid
  misc_feature (154)..(155): Xaa can be any naturally occurring amino acid
  misc_feature (157)..(157): Xaa can be any naturally occurring amino acid
  misc_feature (160)..(161): Xaa can be any naturally occurring amino acid
  misc_feature (164)..(164): Xaa can be any naturally occurring amino acid
  misc_feature (166)..(167): Xaa can be any naturally occurring amino acid
  misc_feature (169)..(171): Xaa can be any naturally occurring amino acid
  misc_feature (173)..(173): Xaa can be any naturally occurring amino acid
  misc_feature (175)..(176): Xaa can be any naturally occurring amino acid
  misc_feature (178)..(179): Xaa can be any naturally occurring amino acid
MVGVSPKIAPSMLSSDFANLAAEAKRMIDLGANWLHMDIMDGHFVSNLTIGAPVIESLRKHTNAYLDCHLMXTNPMDYVDQMAKAGASGFTFHVEVAQENWXELXXKIXAXXMRPGVALKXGTPXEQLYXLLXRRTKXXLXXVLXILXXPXFGXXKXMPXXMDXRXXIXXXSXHXXHXXARHSPPPRPLGIP

SEQ ID NO: 16147 - protein, 649 aa, Bifidobacterium longum DJO10A
MQAFSGVPKINTAPDKQTIVDGEKMTGAQALIRSLEDLGVEDVFGIPGGAILPVYHEIKDNTKFRFVLMRHEQAAGHAAEGYALATGKVGVCIVTSGPGATNVVTAIADANMDSVPMVVITGQVGVQAIGTDAFQEADIVGITYPVSKHSFLVTRAQDIPRVLSEAYYIANTGRPGPVVVDLTKTAQTGDMYYSWPQRMILPGYNPTTKAHGRVLSDAAKLFSQSYRPVLYVGGGAARSNAGAQVKALADLTGAPVVTTLPARGIIPDSDPKNLGMLGMHGTIAATGAVQRADLLVAIGARFDDRVTGKLDAFAPTARVIHIDIDPAEIGKNRQPDVPIVGDVATVLDDLIPEIQRTQAIQGKPNLAPWWKAIDGWREEYPMTWDEPTDGSLAPQWVIKKLSEMADPSTIWVTGVGQHQMWASQFIDFENQHAWISSGGLGTMGYGLPAAIGASVGSAREFEGKKPVWLIDGDGSFQMTSEELAAAFLDHAPVKIAILNNSVYGMVRQWQTLFYEHHYSQTNLLDGEAHGADGAAALADGDAPLEVPDFIKLAEAYGCVGIRAFTEEEAIAAIEKANQINDRPVLIDFRVWKDAMVWPMVAAGAPNDEVTYKPGIKPLAGGTPAPGTGPDEHATGVFEHETAAATASEH

SEQ ID NO: 16148 - protein, 909 aa, Bdellovibrio bacteriovorus HD100
MTLRLRIFLFNLISVFLATFVVALIGLKIVESTVIDSTYERLTQIRISKTSSIENYFRDLQTAINLISSHELTDDLLRERKVDSLPEFRRLLDNYVLDFNIYDMALINNQGVVVYTTRKDIEDGASVTTDLPQGSKLKDIYTWGVKAQEGSTLFLDFDKDTLNPNSATGFVASPIYRNLRPVGVLVLKISISEIDRITSDNFAWPTHGMGQTGETLIYGEDWSLRNTGRFRVEANQSAQGSLEAEVLSSNRGDEDIKKIENLSEVRELGTDYRGQKVIRSIGKIYLPNGELWYIQTKIDESEAFAVLDRIAIASSAAAVLIFILFFFATFAATGKVVEPIQLLTDRLEKLGTSNLTQKINYNSKDEIGLLVSKYNQLADRLETTTVSKEFLDSVIQSIKAFLFIVKVSHHDDWRQASYMISQANESALKFLGYSLNQISHVDLKQLINTQEEFNNYTWLLQTRLSIEAEITAQDGRRLPILMNWAALPNRTSKDLTFVFVCTDITDRITAEQALIEAREQAVKASQAKSEFLARMSHEIRTPLNAIIGITDILAESDLKPEQSQLVRVCANAGENLLALINDILDISKIEAREVRLEKIAFDLESTTTNICDILKQKATEKDLKFSLTVNLPKNRAPLVIGDPTRLRQILFNLIGNAIKFTQEGEIAVLLDFDSSSQKFVRFTIRDTGTGIPKDKQHLLFQSFVQADSSITRKFGGSGLGLTISKNLVELMGGRIWFQSEEGSGSSFYFTVPYVPTEAPRELAAPEKTQAAETTPRPTMNELTVTRSARILVVDDTEDNRFLLLTYLKKLPFEVVQAENGKEAVEKVLAEPFDLILMDIQMPVMDGYAATRKIRQWEKDQGLKPIPIIAVSANAMAEDMQKSLDVGCSEHVTKPIKKSALLEMIHRYLG

SEQ ID NO: 16149 - protein, 131 aa, Synechocystis sp. PCC 6803
MFLLHTMIRVGDLDKSLQFYCDILGMNLLRKKDYPSGEFTLAFVGYGKESENAVIELTHNWGTDKYDLGNGFGHIALGVEDIYSTCDKIRDKGGKVVREPGPMKHGTTVIAFVEDPDGYKIELIQTSSKKD

SEQ ID NO: 16150 - protein, 928 aa, Wolinella succinogenes
MAFSRREFLKSAAAASAASAVGMSVPSQLLAQAQEGEKGWRWDKSVCRFCGTGCGIMVATKNDQIVAVKGDPAAPVNRGLNCIKGYFNAKIMYGADRLTDPLLRVNEKGEFDKQGKFKPVSWKKAFDVMEAQFKRAYNELGPTGIGVFGSGQYTIQEGYMAAKLIKGGFRSNNLDPNARHCMASAVAAFMETFGIDEPAGCYDDIELTDTIITWGANMAEMHPILWARVTDKKLSNPDKVKVINLSTYTNRTSDLADIEIIFTPQTDLAIWNYIAREIVYNHPESIDMEFVKNHCIFTTGFTDIGYGMRTDIKHAKYDPKELDIAAKERSKVLSEAEGVTLRYLGMKAGDVMEMKHNATAGNHWEITFEDFKKALEPYTLDFVAKLAKGNSEESLESFKEKLQKLANLYIEKERKVVSFWTMGMNQHTRGTWVNEQSYMVHFLLGKQAKPGSGAFSLTGQPSACGTAREVGTFSHRLPADMVVANPKHRAVSEKIWKLPEGTLNPKMGAHYMNIMRDLEDGKIKFAWIQVNNPWQNTANANHWIKAAREMDNFIVCSDAYPGISAKVADLILPTAMIYEKWGAYGNAERRTQHWRQQVVPVGNAMPDVWQMAEFSKRFKLKEVWGAKKIDDKLTLPDVLEKAKAMGYSPEDTLFEVLFANSEAKSFKAKDPIGEGFENTEVFGDRRNVAGSDGEVFKGYGFFIHKYLWEEYRRFGNGHGHDLADFDTYHKVRGLKWPVVDGKETQWRFNAKYDPYARKAGSGEFAFYGDAMKELPRGDLLSPKTEEKFKLTNKAKIFFRPYMDPPEMPSSEYPLWLCTGRVLEHWHSGTMTMRVPELYRAVPEALCYMHPEDAKKLGVKQNEAVWVESRRGKVKARVDTRGRNRTPLGLVYVPWFDEKVYINKVCLDATCPISKQTDFKKCAVKVYKA

SEQ ID NO: 16151 - protein, 312 aa, Oceanobacillus iheyensis HTE831
MEKKKIGLLVMAYGTPYKEEDIEPYYTHIRHGRKPDPEALQDLKERYEAIGGISPLAKITEEQTKALEKKLNANQDQYEFKAYIGLKHIHPFIEDTVEEMAKDGIKEAISLVLAPHYSTFSVKSYNKRANETAEKYGIQLDSVEDWYTEPGFIKFWADGIKATYAEMTEEERNNSVLIVSAHSLPEKILKDGDPYKHQLEETAKLIVEEADVKNYAVGWQSEGNTPDPWLGPDVQDLTRELYESEGYKAFIYTPVGFVADHLEVLYDNDYECKVVCDEIGASYYRPDMPNVHPEFIETLANVVMKKAKSEVR

SEQ ID NO: 16152 - protein, 354 aa, Triticum aestivum
MFADAGFSFSAYSSSPPGPAYSYSYSYSSSPTVLSHPHPDHSSFSSPPSSAAPAQPPPPPLPLPLPLLHQQHQHQHQHQAAAAVATASNDDDDDAMYHHLGDMGQPSLISEYDLGAEGDLFKAPEPIIEEPLLALDPVAAAISMMSGGDNAMDDSIKVSDMGLSEVLYECEKELMEKSAIEETISELLDVKIPMLQVEDVPGELRASSSSTVAAGTGECSLQKSVSSGCLSSGDWMNGSAVRPNFLDFQGLDFEAAFGLRRAYSEGDIQKLGANNPRPGIAGNVQASGERLVTISDLKSEERKQKLNRYRKKKIQRNFGRKIKYACRKALADSQPRVRGRFAKMDDGDMLKPRK

SEQ ID NO: 16153 - protein, 957 aa, Escherichia coli O157:H7 EDL933
  misc_feature (84)..(84): Xaa can be any naturally occurring amino acid
  misc_feature (151)..(151): Xaa can be any naturally occurring amino acid
  misc_feature (472)..(472): Xaa can be any naturally occurring amino acid
  misc_feature (787)..(787): Xaa can be any naturally occurring amino acid
MTQTLSQLENSGAFIERHIGPDAAQQQEMLNAVGAQSLNALTGQIVPKDIQLATPPQVGAPATEYAALAELKAIASRNKRFTSXIGMGYTAVQLPPVILRNMLENPGWYTAYTPYQPEVSQGRLEALLNFQQVTLDLTGLDMASASLLDEXTAAAEAMAMAKRVSKLKNANRFFVASDVHPQTLDVVRTRAETFGFEVIVDDAQKVLDHQDIFGVLLQQVGTTGEIHDYTALISELKSRKIVVSVAADIMALVLLTAPGKQGADIVFGSAQRFGVPMGYGGPHAAFFAAKDEYKRSMPGRIIGVSKDAAGNTALRMAMQTREQHIRREKANSNICTSQVLLANIASLYAVYHGPIGLKRIANRIHRLTDILAAGLQQKGLKLRHAHYFDTLCVEVADKAGVLARAEAAEINLRSDILNAVGITLDETTTRENVMQLFSVLLGDNHGLDIDTLDKDVAHDSRSIQPAMLRDDXILTHPVFNRYHSETEMMRYMHSLERKDLALNQAMIPLGSCTMKLNAAAEMIPITWPEFAELHPFCPPEQAEGYQQMIAQLADWLVKLTGYDAVCMQPNSGAQGEYAGLLAIRHYHESRNEGHRDICLIPASAHGTNPASAHMAGMQVVVVACDKNGNIDLTDLRAKAEQAGDNLSCIMVTYPSTHGVYEETIREVCEVVHQFGGQVYLDGANMNAQVGITSPGFIGADVSHLNLHKTFCIPHGGGGPGMGPIGVKAHLAPFVPGHSVVQIEGMLTRQGAVSAAPFGSASILPISWMYIRMMGAEGLKKASQVAIXNANYIASRLQDAFPVLYTGRDGRVAHECILDIRPLKEETGISELDIAKRLIDYGFHAPTMSFPVAGTLMVEPTESESKVELDRFIDAMLAIRAEIDQVKAGVWPLEDNPLVNAPHIQSELVAEWAHPYSREVAVFPAGVADKYWPTVKRLDDVYGDRNLFCSCVPISEYQ

SEQ ID NO: 16154 - protein, 129 aa, Momordica charantia
VATGAQLEFLKEQGYAIPEPSSPGITYARYLEELSENDPQAFICHFYNIYFAHTAGGRMIGRKVAEKILNNKELEFYKWDGDLSQLLQNVREKLNKVAESWSREEKNHCLEETEKSFKYSGDILRLILS

SEQ ID NO: 16155 - protein, 50 aa, Triticum aestivum
IVPNWCRPWRVSHVSSGLLEMGIRGVTVSDVRGYGAQGGSTERHLGRDHA

SEQ ID NO: 16156 - protein, 109 aa, Glycine max
MNSLAIRVSKLLRSSPISPPLGNQSPLLSPKSSGSVAVTAWRSWFSTGPIDEEGLEEDFEETISERPAELQPHGVDPRKGWGFRGVHRVNLIFNLLLFSLLKIVVTIKP

SEQ ID NO: 16157 - protein, 854 aa, Methylobacillus flagellatus KT
MNEYTRIVVVGNGMVGHYFVQELVKRHPDLAAAKLQVTVLGEEPRPAYDRVHLSSFFSGSTAENLSLVEPGFYDRPGLELRLNARATHIDRHQRCLSLADGTVLPYDKLVLATGSVPFVPPVPGRDREHCFVYRTIEDLEAMTAAGATAKSGVVVGGGLLGLECAKALRDMGLDTHVVEFAPRLMAVQVDDIGGRVLRTKIEELGVHVHTSRNTVNITDGATARHRMVFFDETWLETDMIVFSAGIRPRDELARESGLVIGARGGIAIDEFCRSSDHDIYAIGECANWNGQLYGLVAPGYDMARIACAHLSGDAAMTFQGADMSTKLKLMGVDVASVGDAHGETPGARSYQYLDEVRNIYKKIVVSEDGKKLLGAVLIGNADEYGTLQQMTVNDMPLPENPEFLILPASDGKEKPGLGVDALPDQAIMCSCNNVTKGQIGEAVANGACSIGEIKACTKAGTACGGCVPLVTQVMKAQMLKLGMTVNNHLCEHFPYSRQELYHLVRVGQIKTFDELLDKHGKGLGCDICKPTAASILASCWNDFILKKDLAPLQDSNDYFLGNIQKDGSYSVVPRMPGGEVTPDGLIAIGQIAKKYGLYTKVTGGARVDMFGARVEQLPQIWEELIAAGFESGHAYGKSLRTVKSCVGSTWCRYGVDDSVGLAVQLENRYKGLRAPHKIKFGVSGCTRECAEAQGKDVGVIATEHGWNLYVCGNGGMKPRHAELLASDLSKEELIRMIDRFLMFYIRTADRLQRTSTWRDNLEGGLDYLKDVIIHDSLGLGAELEAQMQHVVDTYQDEWKTAVTDPEVRKRFRSFVNSMAGDDNIVFVKEREQMRPATPQEKQQAKVIPIMALAE

SEQ ID NO: 16158 - protein, 340 aa, Ustilago maydis 521
MPLFKSSDIPDLTGRVAIVTGGNSGLGEVSCLELARNGAKVYMASRTESKAQEAIQKIKQAIPKADIHFLQLNLTELAAVRKAAEDFLSREQRLDILLNNAGVMATPYTFTKDGIELQVGTNVVGHYLFTMLLLPTLYKTSKLPEYSAPDSPSVRIVQVSSLGHVASPSDTSFKDLEAVNKQHWPEVKGTWDRYGKSKLGNILIANELSKLLPKDARITSLSIHPGVVRTGLLRGPNESYGKIIGSVNSLLSRFFTAAEDGALTQLYACTSPEVDRLNLNGAYLVPVAKLGQKSKLAQDTDGRLGQELFSFCNSFIKEKLDLDLPAHLKEIGVQLPQSHL

SEQ ID NO: 16159 - protein, 143 aa, Prunus persica
QEWPFFRVSIDLIEMVFAKADPGIASLYDKLLVSEDLWSFGERLRANYEETKSLVLQVAGHRALLEGDPYLRQRLLLRDSYITTLNVCQAYTLKQIRDPNYHVKVRPHLSKEYMETTSKPAAELVKLNPTSEYAPGLEDTLIL

SEQ ID NO: 16160 - protein, 296 aa, Lyngbya aestuarii PCC 7419
NSRLCMSSAVSGYIQSFGTDGPPCCYDDLEQTDCAFLIGTNTAECHPIIFNRLRVYHKKNKSVKMIVVDPRCTQTAEAADLHLAIKPGTDIDLLNGIAHLLMKWGLFDSLFIDDCTQGFPEYAEIIRHYKPELVARKCGIRLDDLEKAARWWGESNRVLSLWSMGMNQSSEGTAKVRTLINLHLMTGNIGKPGAGPFSLTGQPNAMGGREAGGLAHILPGYRVVKNPQHRAEVEEFWGLKPGSISPHPGLAAWDMILGLEQNKVGLLWIAATNPAVSMPDLERTKAAYRKSPFTVY

SEQ ID NO: 16161 - protein, 296 aa, Gloeothece membranacea PCC 6501
NSRLCMSSAVAGYVQSFGSDGPPCRYDDLELTDCAFLIGTNTAECHPIVFNRLHKHIKKNRKAKLIVVDPRTTKTAEAADLHLAIKPGTDIDLLNGIAHLLMRWGKIDTYFIDECTQGFPEYAEVIRQHPPELVARKCNIRIDKLEEAAKYWAESERVLSLWSMGVNQSSEGTAKVRTIINLHLMTANIGKPGAGPFSLTGQPNAMGGREAGGLSHILPGYRLVKNPSHRTQLEQLWGLQPGQISPYPGRDCWSMITGLETGEVGLLWVAATNPAVSMPDLVRTKAALLKSPLTVY

SEQ ID NO: 16162 - protein, 144 aa, Brassica napus
MEIDSEKTHERKQSDYTSLDERFEIQKDMYRGQQYSQIYFVRLHLMRTLLYSLAPSWKPHLPVCKVLGLEEGKECIIVGTLFKHMKLKPCVLDEYSKERSVTPLVKPHNFMHPDDSLILEDESGRVKLGGSALSPPVYVTGVVV

SEQ ID NO: 16163 - protein, 430 aa, Bacillus licheniformis ATCC 14580
MAFEFKLPDIGEGIHEGEIVKWFVKPNDEVNEDDVLAEVQNDKAVVEIPSPVKGKVLELKVEEGTVATVGQTIITFDAPGYEDLQFKGDESGEAKAEEAEKQETDAPAEAAEANEQADADPNKRVIAMPSVRKYAREKGVDIVNVSGSGKNGRVLKEDIDSFLNGGTAGDAKAAQAEEKAEPAAQQPAAAVQVPEGEFPETREKMSGIRKAIAKAMVNSKHTAPHVTLMDEVDVTNLVAHRKQFKQVAADQGIKLTYLPYVVKALTSALKKYPVLNTSIDDNTDEVIQKHYYNIGIAADTEKGLLVPVVKNADRKAIFEISNEINELATKAREGKLAPAEMKGASCTITNIGSAGGQWFTPVINHPEVAILGIGRIAEKAVVRDGEIVAAPVLALSLSFDHRMIDGATAQNALNHIKRLLNDPQLILMEA

SEQ ID NO: 16164 - protein, 309 aa, Mesorhizobium sp. BNC1
MQTDVIKIGTRGSALALAQAAETRARLMVAHGLPEDAFEIVVIRTSGDRIQDRPLSEAGGKGLFTKEIEEALLEGRIDLAVHSSKDMPTFLPDGLELSAFLEREDVRDVFIGRAAKRLEDLPHGANLGTSSLRRQALALRLRPDLKVGVFRGNVQTRLRKLEDGAADGTLLALAGLKRLKLEHVATELMDPVIFPPALGQGAICIESRTGDTRIAKLVEAIHHPATGFALSCERAFLAALDGSCRTPMAGLATVDGDRIAFSGMILTPDGREVHEIGGDGAAQDAAEIGRDAGRRIRQKAGAGFFESWS

SEQ ID NO: 16165 - protein, 296 aa, Gloeothece membranacea PCC 6501
NSRLCMSSAVAGYVQSFGSDGPPCCYDDLELTDCAFLIGTNTAECHPIVFNRLHKHIKKNRKAKLIVVDPRTTKTAEAADLHLAIKPGTDIDLLNGIAHLLMRWGKIDTYFIDECTQGFPEYAEVIRQHPPELVARKCNIRIDKLEEAAKYWAEPERVLSLWSMGVNQSSEGTAKVRTIINLHLMTANIGKPGAGPFSLTGQPNAMGGREAGGLSHILPGYRLVKNPSHRTQLEQLWGLQPGQISPYPGRDCWSMITGLETGEVGLLWVAATNPAVSMPDLVRTKAALLKSPLTVY

SEQ ID NO: 16166 - protein, 324 aa, Lactobacillus reuteri
MAKKTYIKAITEGIDIALAEDPKTLVFGEDVGKNGGVFRATNGLQEKYGKDRVFSTPLAESGILGLSIGLAATGWRPVSEIQFMGFTFEAMDSIAGQMSRVRFPIGWSKNMPITIRLHTVVVSTAELHGDDLENFFVGIPGLRVVTPSSAYDAKGLVISAIENNDPVLFLENLRLYRSVKGEVPDDKYTVPLDKANVVEEGNDVTIIAYGGEVSEAQKAAKKLAKKNISAEIIDLRSLYPLDTDTIFESIKKTHRVVIVQEAQKMAGVGAQVASAISEGAIMYLDAPVIRVAAPNSVYPFPQAENVWLPGADDIEDAATQAVNY

SEQ ID NO: 16167 - protein, 271 aa, uncultured bacterium
NSRLCMSSAVAGYTRSLGSDGPPCCYDDLDHCSVAFLIGTNTAECHPVLFQRLLKRKKRNPGSVTIVVVDPRRTDTAKAADIHLPIAPGSDLALLHGTAHLVLRENGQDPAFIDDHTENYEAFFDVVARWTPRRVARFYNLPEKRLREVAQLFHRRENVLSLWSMGVNQRQEGTAVVCGLINLHLLTGQIGKEGAGPFSLTGQPNAMGGREAGGLSHLLPGYRLVTNDQHRQDVEQAWKFPAGSIAATPGLAAWQQIEAMERCEIDRWWVA

SEQ ID NO: 16168 - protein, 116 aa, Triticum aestivum
MARAQVMLMAVALVLMLAAVPRAAVAIDCGHVDSLVRPCLSYVQGGPSPSGQCCGGVQSLHNQAQSKSDRQAACNCLKGIARGIHNLNEDNARSLAPKCGVNLPYHISLDIDCNSV

SEQ ID NO: 16169 - protein, 405 aa, Coxiella burnetii
MAIEIKVPTLPESVSDATVAKWYKKEGDSISRDENLVDLETDKVMLEVPAPKDGVVEKIVAKEGEVVKADQILALLKEGGSVAKEKAKKDEKETKKEKEKKEEKKDKEKKEKTEEKESDLSPAVRRMVSEKDVDVEEIEGSGKGGRITKKDVEDYLEKQKEKPSEGKEGPADERTEKRVPLSRIRQRVAERLVQVQQEAALLTTFNEINMQLVMELRKKYREEFEKKFKVRLGFMSFFTKAVVEALKRFPMVNASIDGSDIIYHNYYDIGIAIGTERGLIVPILRNAEKMNMADIEKQIREYASRAQEGRLNIEELTGGTFTITNGGTYGTLLSTPIINPPQTAILGMHKIMDRPTVENGEVVVRPIMQVALSYDHRVIDGREAVLFLVTIKELLEDPARMILEC

SEQ ID NO: 16170 - protein, 409 aa, Oceanicola granulosus HTCC2516
MRRVVVTGLGVVSPIGNDAAEVEASLRAGKSGIEGVPEMAEHGFRSQVAGTLKIDVAEHVDKRALRFMGPGAAYAHIAMSQAIADAGLEESDIVNPRSGLIAGSGGPSTSAMFAAHQTVLEKGSPKRIGPFAVPKCMSSTISANLSTAFRIKGINYSITSACSTSLHCIGAAAEQIAMGKQDLMFAGGAEELDWTLSCLFDAMGAMSSKFNDTPEKASRAFDADRDGFVIAGGGGMVVLEDYERAKARGARIYAEVTGFAATSDGHDMVAPSGEGGERAMRLALETLPEDRKITYINAHGTSTPVGDVGEVEAVRRVFGKGQTPPISSTKSMTGHSQGATGAQEAIYCLLMLQNDFIAPSINVDNLDPALEPDEIASALVENARHDTLMTNSFGFGGTNGSMLLSRMRD

SEQ ID NO: 16171 - protein, 422 aa, Pseudomonas syringae pv. phaseolicola
MSRRIVVTGMGAVTPLGAGVELTWKRLLEGASGIGTLPVEMTQGLPVTIGGQVPGIADDPEGGFNPDSVVGAKDQRKMDRFIVFALAAANEALNQANWSPQEPHEQERTATIVASGIGGFPAIADAVRTLDSKGPKRLSPFTIPSFLCNMAAGHISIKFGLKGPLGSPVTACAAGVQAIGDAARMILAGEVDVAVCGGAEACIHQVSLAGFAAARALSTGHNDFPQKASRPFDQDRDGFVMGEGAGILVIEELSHALARGATPIAELVGYGTSADAYHMTSGPEDGNGALRSMRMALNQAGVTPAEIQHLNAHATSTPVGDKGEIAAINALFGEHPSPAISATKSATGHLLGAAGGIEAIFTVLALRDQVAPGTLNVAHLDPTACNLDIVQGKSRSCAMEYALSNGFGFGGVNASVLFKRWG

SEQ ID NO: 16172 - protein, 262 aa, Bradyrhizobium japonicum USDA 110
MQFKHVTLDFDGSVAILKLDHQEVMNAVSVDMLGGLAEALDAIEEKKDEVRCVVLTGAGRAFCTGANLQGRNNQSKKTKAGLTLETGFHPFLRRIRNLHCPIVTAVNGPAAGAGMSFALLGDMILCARSSYFLQAFRRIGLVPDCGSTWLLPRLIGRARSIELSLMGERLPAEKALEWGLVNRVYDDGVLMEEAMKLARELASGPTVALSLIRKLYWDSPENSFEDQLNLEFQCQLRAGDTQDFREGVGAFLEKRPAQFKGK

SEQ ID NO: 16173 - protein, 286 aa, Alkaliphilus metalliredigenes QYMF
YGILQEEVRATKDALIIGDKTIQFTAHRDPAQIPWKEMGVEIVVESTGIFLTKEAASKHFEGGAKKVILSAPAKSGEDLTIVMGVNHDQYDPKKHHILSNASCTTNCLAPVAKVLEDSFGIESGMMTTVHAYTNDQRILDLPHKDPRRARAAAESIIPTTTGAAKAVAKVIPSLEGKLNGMAMRVPIPVVSVVDLVAELKTKTTAEEVNQKLREAAVGKMEGILGYNEEPLVSIDYKKDPRSSIVDALSTMMVGDKMVKVVSWYDNEWGYSNRIVDLAGYIAEKGL

SEQ ID NO: 16174 - protein, 821 aa, Bdellovibrio bacteriovorus HD100
MPGDFLHLHRIITRQKSSQYTTSLDEGKGPKLTLRIGATMQKALAKELTSLVNWAVTELGHVIEAELGGKQFQRIENIRRFVKSKDGGQLKGLLKLKGDMEVLSPAQRFEIAHSFALMLELINACESAYRTHRLLEEKTAPLSEETHAYGRIIHVLTAHPTESRNSDIIFYFRKVHQLLLQRLTAERHNQTAELHALLRMAWQLPMSKQRKPSVMDEAEYIYSLVLQDDIIEIYLQQRHAQIPFYIRTWVGGDKDGHPGVNEKTMLGSLSMSRARLHSWVKTQFAAYLADLAPLSRSGLRQKNDIRKLQRHAVAVKRNLTKTRRISTGDANRVHALNKSVHDLATEQHRLFGAESPTLNRIRYLLKIFPSLVVPLEIREDSSLVHEALDDSRFRMNISRMLKTLARLSPDHSPRNYVRGFILSQCESAKDIEAGIRLSSKILNGPRLPVVPLFESSHSLKNSTEIIRTFLGVKKNKSLIKKHWSAQLEVMLGYSDSAKENGSFPSRFLIQSAMQGLEATIEKQGLVPIFFHGSGGSIERGGGSIQEQTEWWPLSALKNVKMTVQGEMIYRSYNSPAILQRQLNLLVQNRDARKQAPATHTSAINRKALQKLSDSVQQSYQQILQQPDFLELIEKATPYSFMKDLRMGSRPSKRQGPVQLKSLRAIPWVLCWTQTRALFPTWWGLGSHWKNLTASEKSQYRKAFKESAMFRSYIKAVGFTLEKIEMDVFFMYLRSSRLNKETITKYENSFRQEFAQTVKCIREITREKSLLWYRPWLETSIGLRSPLIHPLNVLQLVALETTDIKLLRETVTGIASGMLTTG

SEQ ID NO: 16175 - protein, 554 aa, Vibrio sp. Ex25
MCSVFGILDIKSDAAALRPIALEMSKKLRHRGPDWSGIYSSERAILAHERLAIVGLNSGAQPLYSPDKKLILAVNGEIYNHKEIRARYEGKYEFQTDSDCEVILALYQDMGADLLEELNGIFAFVLYDEEKDEYLVGRDHIGIIPLYQGHDEHGNYYVASEMKALVPVCKTVSEFPPGSYYSSKDAEPTRYYVRDWNEYAAVQGNTTSKEELTEALEAAVKRQLMTDVPYGVLLSGGLDSSITSAVAKRFAAMRIEDDEKSEAWWPQLHSFAVGLEGAPDLKAAREVADQIGTVHHEMTYTIQEGLDAIRDVIYHIETYDVTTIRASTPMFLMGRKIKAMGIKMVLSGEGADEIFGGYLYFHKAPNAKEFHEETVRKLLALNMFDCARANKSLAAWGVEGRVPFLDKEFIDVAMRLNPADKMCGNGKMEKHILRECFEHYLPESIAWRQKEQFSDGVGYSWIDTLKEVAEQKVTDQQMETAQYRFPYNTPTTKEGYVYREIFEELFPLPSAAECVPGGPSVACSSAKAIEWDESFQNCVDPSGRAVQTVHNDAY

SEQ ID NO: 16176 - protein, 414 aa, Thermobifida fusca YX
MTAPARTRRLVVVGASLAGLRVVEGARDAGFDGELTLIGDEPVAPYDRTVLSTRFLEDREEPQTPVYRPADDLRRDLDVDLRLGVAAHTLDPRSRTVHAGGHTIPYDALVIATGVRPRTPGWAVNLAGVHLLRTVADARALRKSLARSRRVVVVGGGFIGSEVASSARTLGLHVTIVEARDVPFAAALGETAGRLCAALHRAHGTELRCGVTVTALDGTGRVEKVLLSDGSVLKADTVVVGVGSHPNTEWLKGSGVACTDGVECDAALRTTVPGVYAVGDVARWFNPWLGRKVRVEHWTNAAHQAAAVARGIATGQPDTPHASIPYFWSDWYGRRIQFIGEPTADETAVVGDPARGEFACLYRTGERITGALTVGGKGAIARYRTAIRRRAAWQDVLHTALDRAKTVQTGGTRA

SEQ ID NO: 16177 - protein, 277 aa, Bradyrhizobium japonicum USDA 110
MHASMTAIFLQEKKRERAMELKFSKVERKGPITIVTLSRPEVYNALHTDAHFELQKVFDDFSADAEQWVAIVTGAGDKAFCAGNDLKWQAAGGKRGWDKGGFAGLTSRFDCDKPIIAAVNGVAMGGGFEIALACDLIIAAENATFALPEPRVGLAALAGGLHRLPRQIGLKRAMGMILTARHVSAKEGHELGFVNEVVPQGEALTAALRWAEMITKNSPMSIRASKQAIQKGLGVSLEQAIEEQREYPAVKAMVASQDYIEGPKAFSEKRPPKWVGK

SEQ ID NO: 16178 - protein, 674 aa, Rhodobacter capsulatus
MAAKDIDDTKPDTAADEDASFDMSQAAVKRMIGEAKERGYITIDQLNAVMPPETVSGEQIEDVMSMLSEMGINVVEGEEVEESEGGEVVETGSGSREIAVAGAAGETLDRTDDPVRMYLREMGSVELLSREGEIAIAKRIEAGRNTMIAGLCESPLTFQAITIWRDELLSEEILLRDVIDLEATFGRSLDGDEGLEGMEGIEGPVVEGLDLEAAEGAAPAARRPASDEPEYDADGNPISRIDEEEDDDDSSNMSLAAMEAALKPKVLETLELIARDYAKLAEMQDLRMSATLNEDGTFTVAEEAAYQKLRSEIVLLVNELHLHNNRIEALIDQLYGINRKIMSIDSGMVKLADAARINRREFIDEYRGYELDPTWMDRMSAKPARAWVTLFEKSRHKVEDLRHEMAQVGQYVGVDISEFRRIVNQVQKGEKEARQAKKEMVEANLRLVISIAKKYTNRGLQFLDLIQEGNIGLMKAVDKFEYRRGYKFSTYATWWIRQAITRSIADQARTIRIPVHMIETINKLVRTGRQMLHEIGREPTPEELAEKLQMPLEKVRKVMKIAKEPISLETPIGHEEDSQLGDFIEDKNAILPLDSAIQENLKETTTRVLPSLTPREERVLRMRFGIGMNTDHTLEEVGQQFSVTRERIRQIEAKALRKLKHPSRSRKLPSFLDQ

SEQ ID NO: 16179 - protein, 580 aa, Coccidioides immitis RS
MSAMADALKAEGNKAFAAKDFNLAVEKFSAAIELDSSNHVLYSNRSGAYASLKNFDKALEDANKTTELKPDWPKGWGRKGAAMHGLGDLVGAHDAYEEALKLDPANAQAKSGLESVKRAIDAEARADGVAGDPTGGLGRMFNDPQLIQKLANNPKTSQLLADPSFMAKLQKVAQNPNSIGEEMRDPRFLQVISVLLGIDMQFGAPPEGGAQPSGQPKEAEEDVPMPDAKPQKAPEPEPEPEPEDEETIAKRKAKEAADKEKNLGTENYKKRQFDAAIEHYSKAWELHKDITYLTNLSAAYFEKGEYQQTIEACEKAISEGREMLADFKLIAKAFGRIGSSYEKLGDLPKAIVNYQKSLTEHRTPDILSKLRSAEKAQLKAEKDAYVNPEDAEKARELGNQKFKDADWPAAVDAYTEMTKRAPDDPRGYSNRAAALIKLMAFPQAVQDCDEAIKRDPKFIRAYLRKAQALFAMKEYNRCLDVCTEAAEHDESGSSAREIEQQQQKALEAQFSARAGETEAETAERIQRDPEIMAIVQDPVMQSILQQARSDPAALQEHMKNATVRMKIQKLIAAGVIRLGR

SEQ ID NO: 16180 - protein, 383 aa, Deinococcus radiodurans R1
MAAGYFVATGARDEPAGEMGASHFLEHLMFKGSERLSAAALNEQLDNLGGQANAFTAEEATVYHAAALPECTGELLATLTELLRPALRPADIDPERGVILEEIAMYAEQPGVRVAEALRRDYWGEHPLAHQILGTPETLRRLDRPALQRHFAERYGAERVTLVLSGAFDPAEVRAWAERELAGWPSGTPRLPDAAPAPHWPGQVRWVTDPELTRTQVALALPGLPVSHPLREAAGLLAELIGGENGALYWALLDTGLADSADLGHIEYRDAGVFEGGFSCDPDRAQEALDRFRAVLDSAESLITDLSVRRAARKAAVSLLLRSETPQGRLFLLGMEHLATGELRTPAQLAERYAAITPEQVREVLRLCPLRDPSVVVLGPPTP

SEQ ID NO: 16181 - protein, 483 aa, Burkholderia mallei ATCC 23344
MGVHVIKMPDIGEGIAEVELGLWHVKVGDRVKEDQATADVMTDKASVEIPSPVTGVVVALGGKEGDVLAVGSELVRLEVEGDGNHKAEPDGGARAAAAQPERVADTAHAHASAAAKSARGEHGAGHGRDDARAASSGTSSGASHTQHAEREARGHRESSEYREDRSVSRGASQTDVERGPASPPPARRPGERPLASPAVRKRAWDLGVELRYVHGTGEAGRILHEDLDAYLQGRGAAAQRARGGQAAYVERHDEEAVPVIGLRRKIAQRMQDAKRRIPHFSYVEEIDVTELEALRAELNRKYGDTRGRLTVLPLLARAMVIALREFPQINARYDDEAGVVTRHGAVHLGIATQSKAGLMVPVVRHAEARDPWSIAAEVARLADAARAGRAERDELSGSTITITSLGALGGIASTPVINSPEVGIVGVNRIVERPMFRGGAVVARKLMNLSSSFDHRVIDGMDAAEFIQAVRALLEQPALLFVE

SEQ ID NO: 16182 - protein, 410 aa, Arabidopsis thaliana
MLSSIKPSSSSFSTAISGSVRRSIPTKLKFSPLLIIKNCHNQSFNANVVSHQKPLHISSASNFKREVKVEAYEADRSRPLDINIELPDEQSAQKLKIGIYFATWWALNVVFNIYNKKVLNAFPYPWLTSTLSLACGSLMMLVSWATRIADAPKTDLEFWKTLFPVAVAHTIGHVAATVSMSKVAVSFTHIIKSGEPAFSVLVSRFFMGETFPLPVYLSLLPIIGGCALAAITELNFNITGFMGAMISNLAFVFRNIFSKKGMKGKSVSGMNYYACLSMMSLVILTPFSIAVEGPQMWAAGWQNAVSQVGPNFVWWVVAQSVFYHLYNQVSYMSLDQISPLTFSIGNTMKRISVIVASIIIFHTPIQPVNALGAAIAIFGTFLYSQVNKQTYSCLPTSSTWFFSEQFLVLI

SEQ ID NO: 16183 - protein, 406 aa, Thermus thermophilus HB27
MFREAELRNGLRVIAEVVPGARSVALGYFVKTGARDETKEESGVSHFLEHMVFKGPEDMDALAVNRAFDRMGAQYNAFTSEEATVYYGAVLPEFAYDLLGLFAKLLRPALREEDFQTEKLVILEEIARYQDRPGFMAYEWARARFFQGHPLGNSVLGTRESITALTREGMAAYHRRRYLPKNMVLAATGRVDFDRLLAEAERLTEAWPEGEAERAYPPLEPAFGVEERPYEKARALYLVALFPGVAYQEEARFPGQVLAHLLGEEGSGRLHFALVDKGLAEVASFGLEEADRAGTFHAYVQADPARKGEVLAVLQEELDRLGREGVGEEEVERAKTPLATGLVFAGETPMQRLFHLGMEYLYTGRYLSLEEVKARVQRVTSREVNALLERGFLEKGLYYLVLPHGA

SEQ ID NO: 16184 - protein, 468 aa, Synechocystis sp. PCC 6803
MNPSSSPSQSTANVKFVLLISGVAALGGFLFGFDTAVINGAVAALQKHFQTDSLLTGLSVSLALLGSALGAFGAGPIADRHGRIKTMILAAVLFTLSSIGSGLPFTIWDFIFWRVLGGIGVGAASVIAPAYIAEVSPAHLRGRLGSLQQLAIVSGIFIALLSNWFIALMAGGSAQNPWLFGAAAWRWMFWTELIPALLYGVCAFLIPESPRYLVAQGQGEKAAAILWKVEGGDVPSRIEEIQATVSLDHKPRFSDLLSRRGGLLPIVWIGMGLSALQQFVGINVIFYYSSVLWRSVGFTEEKSLLITVITGFINILTTLVAIAFVDKFGRKPLLLMGSIGMTITLGILSVVFGGATVVNGQPTLTGAAGIIALVTANLYVFSFGFSWGPIVWVLLGEMFNNKIRAAALSVAAGVQWIANFIISTTFPPLLDTVGLGPAYGLYATSAAISIFFIWFFVKETKGKTLEQM

SEQ ID NO: 16185 - protein, 461 aa, uncultured bacterium 442
MARWECIVCGLIYDEKEGWPDDGIPAGTKWSDVPDDWLCPDCGVGKDDFELIAGSEDEPVGETDTTTSADESSVATNNRHIVIVGSGLAGYGLVSALRKLDPEVAITLITRDGGESYSKPMISTGYTKNLSAEKLAAQSSEAMAEQLAVTMLTRKTVVSIDPSSNQLNLDDETVIAYSELVLTLGAELIRPPMGGDAAGDVMGVNDLDDYRSFRDTLEAKGVRKVAVIGAGLIGCEFSNDLLNGGFEVEAVDPMSWCIPTLLPEPAGRAVQAALEAKGARFHFGPLATEVNRSATGYQVQLNNGEHIEADAVLSAVGVRPRTQLASSAGLDVGRGIKTNRLLETSSPGIYALGDCAEVAGHVLVYVAPLLAAGRALAATLTGNPTEVSYPAMPVTIKTPACPVCVSPVAKDTEGSWTLSGEGSDIKGLFHSPNGQLLGFALTGAAVKERMALTKELPPILN

SEQ ID NO: 16186 - protein, 403 aa, Thermus thermophilus HB27
MSRVERLPNGLVVALEERDFPGVAFQLLVPAGAVNDPEGMEGAAALLEGWLWKGAGDLDARALAQALDALGVRRNSGAGLEYTAFAAAFLPEVLDEVFRLYALLLTRPRLPEEGLEAVRSVALQALLSLEDQPARKLLSELRRKVFRSPHGREPLGREEGLKGAGAEALKADYRRRYTPKGAILAVAGGVSWERLRAALEPFLAWEGEEALYPAPELSEPHRFVLRRPTAQVQIGLAYPDVGPEDPGFYAARLALEVLSGGMSSRLFTEVREKRGLVYAVSAFPAGVKGQGLLMAYAGTTKERAGETLEVLRAEVERLAEGVTEEELSRAKVGLKTALVMADESIRSRAASMARDLYMLGRVRSLSEIEAAIEGTSLEAVNAFLRAHPYRDPWVGLLGEVEDV

SEQ ID NO: 16187 - protein, 471 aa, Nocardia farcinica IFM 10152
MPLSHPSFPQDPGPSEVAVNPVFTREPVSVPRDRLPAGELDADIAYQVVHDELMLDGNARLNLATFVTTWMEPSARVLMAECFDKNMIDKDEYPRTADLEQRCVRMLADLWHAADPAHATGCSTTGSSEACMLAGLALKRRWQHRRRAAGLSTERPNLVMGANVQVCWEKFADYWDVEARLVPMAGDRFHLTAEAALPHCDENTIGVVAVLGSTFDGSYEPVAEICAALDELERQRGWDIPVHVDGASGAMVAPFCDPDLVWDFRLPRVASVNTSGHKYGLVYPGVGWVVWRDAAALPEDLIFRVNYLGGQMPTFALNFSRPGAQVVAQYYTFLRLGRSGYTRVQQYCRDVATRLADRIAALGAFRLLTDGRQLPVFAFTLAEGETGYSVFDVSAALREQGWLVPAYTFPADREDLAVLRIVVRNGFSHDLADMLLDALAAVLPRLRAQDRPQHGPDTATFAHGAQAPSGH

SEQ ID NO: 16188 - protein, 547 aa, Listeria monocytogenes
MTLKSGFDYMNNPLLNKGTAFSKEERASYQLDGLLPPIIETIEQQAVRIETQIENLETPLHKHRLLTNLYNENRTLYYYVVTKNVTDYLPIIYTPTIGDAVIQYHKDYTAPDEALFVDAFAPEKLSASIKNYAKNNPNIDMIVITDGEGVLGIGDWSVNGVKIAVGKLAVYTVAAGLAPDRVLPVVIDAGTNNETLLNDPLYLGNKRPRLSESEYDAFIASFVNVMKEVFPKAILHWEDFGRANASRILHNYRDKICTFNDDIQGTGAMVVAAVLATIQVSRIPLSEQKIIIFGAGTAGIGIADQLSAQLMRETGLPFEKAKKHFYLVDRKGLVLDNMTDLTTGQKKYAHPSAEWSNVPTDTLENLVEAVHPTMLIGCSGVTGAFKESIVKKMTQYTERPAILPLSNPTKLAEATASDLIQWTDGKALIVTGSPSKPVEYQNTTYEIGQANNALLYPGLGLGALVTRAKYITDDMLAAASMAVAEQISPNKAGAALLPHVRTLRETSRAVAIAVANQAIKENIHQVELTNVIEAIELEMWQPIYKGV

SEQ ID NO: 16189 - protein, 56 aa, Fragaria vesca subsp. vesca
RATVRDPTNAKKVKHLLDLPKAATHLTLWKADLADEGSFDEAIKGCTGVFHVATPM

SEQ ID NO: 16190 - protein, 190 aa, Glycine max
MVLVLALGDLHIPHRAPDLPAKFKSMLVPGKIQHIICTGNLCIKEIRDYLKTLCPDLHITRGEYDEETKYPETKTLTIGQFKLGLCHGHQVIPWGDLDSLAMLQRQLDVDILVTGHTHQFTAYKHEGGVVINPGSATGAYSSITYDVNPSFVLMDIDGLRVVVYVYELIDGEVKVDKIDFKKSSTSHSAH

SEQ ID NO: 16191 - protein, 841 aa, Brassica rapa
MKGVRNIYHHSYTFLLVFFVMILFRPAFSLSTLSSTESLTISSNRTLVSPGNIFELGFFRTNSRWYLGMWYKKLSGRTYVWVANRDNPLSNSIGTLKISNMNLVLLDHSNKSVWSTNLTRENVRSPVVAELLANGNFVVRDPSGFLWQSFDYPTDTLLPEMKLGYDLKTGLNRFLVSWRSSDDPSSGDFSYKLDIQRGLPEFYTFKDNTLVHRTGPWNGIRFSGIPEEQQLSYMVYNFTENSEEVAYTFLVTNNSIYSRLTINFSGFFERLTWTPSLVIWNPIWSSPASFQCDPYMICGPGSYCDVNTLPLCNCIQGFKPLNVQEWDMRDHTRGCIRRTRLSCRGDGFTRMKNMKLPETTMATVDRSIGVKECEKKCLSDCNCTAFANADIRDGGTGCVIWTGRLDDMRNYAVSGQDLYVRLAAADVVEKRTANGKIVSLIVGVCVLLLLIFFCLWKRKQRRAKAMATSIVHRQRKQILLMNGMTLSNNRQLSRENKTGEFELPLIELEAVVKSTENFSNCNKLGQGGFGIVYKGTLDGQEIAVKRLSKTSVQGADEFMNEVTLIARLQHINLVQILGCCIDADEKMLIYEYLENLSLDSYLFGKTRSSKLNWKERFDITNGIARGLLYLHQDSRFRIIHRDLKVSNILLDKNMIPKISDFGMARIFARDETEANTMRVVGTYGYMSPEYAMEGIFSEKSDVFSFGVIVLEIVTGKRNREFNNENNLLSYAWSNWKEGRALEIVDPDIVDSLSPLSSTFQPQEVLKCIQIGLLCVQELAEHRPTMSSVVWMLGSEATEIPQPKPPGYWVRRSSYELDPSSSKCDDDSWTVNQYTCSVIDAR

SEQ ID NO: 16192 - protein, 219 aa, uncultured bacterium
NSRLCMSSAVAGYTRSLGSDGPPCSYEDLDHCSVAFLIGTNTAECHPVLFQRLLKRKRKNPGSVKIIVVDPRRTDTAKAADIHLPIAPGSDLALLHGIAHLVLRENGQDPAFIDDRTENYDAFFDVAARWTPRRVARFCNIPEKRLREVAALFHRREKVLSLWSMGVNQRREGTAVVQGLINLHLLTGQIGNEGAGPFSLTGQPNAMGGREAGGLAHLL

SEQ ID NO: 16193 - protein, 219 aa, uncultured bacterium
NSRLCMSSAVAGYTRSLGSDGPPCSYEDLDHCTVAFLIGTNTAECHPVLFQRLLKRKRKNPGSVKIVVVDPRRTDTAKAADIHLPIAPGSDLALLHGIAHLVLRENGQDPAFIDDHTENYDAFFDVAARWTPRRVARFCNIPEKRLREVAALFHRREKVLSLWSMGVNQRREGTAVVQGLINLHLLTGQIGKQGAGPFSLTGQPNAMGGREAGGLAHLL

SEQ ID NO: 16194 - protein, 195 aa, Pisum sativum
QDFCVAIKDPKDGVFVNGKFCKDPALVKAEDFFKHIDPGNPVNALGSQVTPVFVDQLFGLNTLGISLARIDFAPKGLNPPHIHPRGTEILTVLEGTLYVGFVTSNQDKNRLFTKVLNKGDVFVFPIGLIHFQLNVGYGNAVAIAGLSSQNPGVITIANALFKSNPPISDEVLTKAFQVDKSIIDYLQGQTWYDNN

SEQ ID NO: 16195 - protein, 458 aa, Listeria monocytogenes str. 1/2a F6854
MAQTSTIQNDTKAAEEYAARVFETIKQRNPGETEFHQAVEEFLNSVIPALAKEPKYEANGILEQLTEPERLISFRVPWVDDSGTVHVNRGYRVQFNSAIGPYKGGLRFHPSVTGSIVKFLGFEQIFKNSLTGLPIGGGKGGSDFDPKGKSDSEVMRFCQSFMTELQKHIGPDTDVPAGDIGVGGREIGYLFGQYKRLRGAYDAGTITGKGLSYGGSLARTEATGYGLVYFTVEMLEAAGETIRGKKIVVSGSGNVAIYAIEKAHELGAKVVACSDSAGFVYDKEGIKVETVKQLKEVERKRISEYTTIHPSAEYYAGGDVWSVPCDIALPCATQNEINADQARALVKNGVIAVAEGANMPSTLDAVDIYHENKVLFGPAKAANAGGVAVSALEMAQNSTRMSWTFQTVDEHLQNIMKDIYKNSSNAASEYGAPGNLVIGANIAGFLKVADTMISQGII

SEQ ID NO: 16196 - protein, 115 aa, Synechococcus sp. WH 7805
MTIYIGNLSFQAEQEDLLDLFSQYGEVKSASLPLDRETGRKRGFGFVEMNSDQDEQKAIDDLQNVEWMGRMIRVNKATPRERTGGGGGGGGRGGYGGGGGRGGEGGGYDGGGNRW

SEQ ID NO: 16197 - protein, 195 aa, Pisum sativum
QDFCVAIKDPKDGVFVNGKFCKDPALVKAEDFFKHIDPGNPVNALGSQVTPVFVDQLFGLNTLGISLARIDFAPKGLNPPHIHPRGTEILTVLEGTLYVGFVTSNQDKNRLFTKVLNKGDVFVFPIGLIHFQLNVGYGNAVAIAALSSQNPGVITIANALFKSNPLISDEVLTKAFQVDKSIVDYLQGQTWYDNN

SEQ ID NO: 16198 - protein, 156 aa, Haemophilus influenzae
NRTNTPVLVDGKDVMPEVNAVLAKMKDFCQRIISGEWKGYTGKAISDVVNIGIGGSDLGPYMVTEALRPYKNHLNMHFVSNVDGTHIAETLKKVNPQTTLFLVASKTFTTQETMTNAQSARDWLLKAAKNESAVAKHFAALSTNAKDVEKFGIDTN

SEQ ID NO: 16199 - protein, 404 aa, Bacillus licheniformis ATCC 14580
MLSEKTMQIVKSTAPVLKEKGTEITTCFYKRMFDAHPELKNIFNMSRQQTGGQPKALAFTVLQAAENIDRLEDLLPVVKQIGHKHKSLHVKPEHYPIVGQHLLEAIEIVLGEAATEDILQAWAEAYEEIARVFIEVEKQMYEEDKKQDGNWEGFKPFVIMDKRVESDTITSFYLKPADGTALPAFSPGQYVSVCIKIPGEPYFLTRQYSLSDAWNKDYYRISVKLEAEEGQPVGKVSSYLHENMEIGGSLEVSAPAGDFTLSEGTDRPVYFISAGSGITPVMSMVQTLAQKESRREITFVHAAKTERHHAFKEETEKLLGANPANRLLFVYSRGAEATEEHTVKGRVNEELLKSVVIDPNGEFYVCGPLSFMKSVIEGLQNLGVSMENIRYESFASSLDMQIAN

SEQ ID NO: 16200 - protein, 320 aa, Vibrio sp. Ex25
MKENNKQGVLLVNLGTPDAPTAPAVKRFLSQFLHDHRVVDMTRWLWCPLLHGVILPIRAPKVAKLYQSVWMEEGSPLMVYSKRQTEKLAQKLDMPVELGMTYGNPSLQSGFEALLAQGVEEVIVLPLYPQYSGTTTAAVSDGITKAFKNLPVMPGFSFIRDYYNHPKYIEALAHSVREHWQEYGKGDYLLCSYHGIPKRYADNGDVYPQHCEETTRLLAEALGLNEQQIGMTYQSRFGREEWLQPYTDKTLEALPAKGVKNINVVTPAFSSDCLETLEEISEECKEIFLEAGGESFTYIPCLNDSELHIEMMAELVHSKL

SEQ ID NO: 16201 - protein, 1391 aa, Mesorhizobium loti MAFF303099
MAEADEAIGARGKRGPDKPVHRGDAPPCADRDSPDALRQLLEAGSDWIWETDAELRFSWLSPTYQAATGIDPADVLGRFRFDFLNQDLKGSRSAAAHLEDLQARRPFRDFVYELKAGGADCRWVLTSGFPRFDNEGKFAGYRGIGRNVTTLAGAFETVEQNPLSGSDPDRHLADLERTMDAMHMGVVLLDAKLDTLIVNKAYRDLSSIPDGAVTVGAPFSRLMELNRRNGIYGDIDEQQWQRYLASRIEEIRAGSVAPREFVHASGRTMMFSVTALSGGKRLLTYYEVTELKRRDAEIESANAKIAETFVNLRTMVDEMPIGVLVLDADMRAEVINSAFYDFWRIDPGRAGIGSAFRELMEASRAIDPYGADELAWQRHTTEREAEIRAGVAGSKQLPHNDGRTLVASLAPLPGGKRLISYVDVTDMKGRETEAQDARKHLASVLESLPAGVIIYDRDDKFVFANRKLQDTLPALKPFWQPGCSFREALEFGQSIGYFRSSGDAGIDRLYEVEPEHWLDSMLARYRLPNSSYERLNADGRWYQVYDMRTDDGTFIGVRVDITDIKSREAALRDSMRQIDLFRHVMDELPVAAFIKAQDLSIEFVNKAWCALTGIAKEDVIGRTDRELFGTQDAEGYSHDDTQVVVTGKGIEVEEPVTHRDGTVRQLMTRKSRLVATDGSVHLVGSSTDITDVKAREKALEESMRENEVFRSLIDNVPVSIYAKRSDLRQFYVNKGWCDLTGLSREDAIGKTDIEIFGEDGEAFVAGDLAVLRTGETQEVEETVRLADGSVRHQFARKGAMIASDGSLYLIGSTTDITELKMREAELSEARQRAVLADRAKSEFLANMSHEIRTPMNGVLGMAELLAKSNLDPKQKTFTDIIVKSGNALLTIINDILDFSKIDAGQMVLDPAPFNLAEAIEDVATLVSTRAKEKDLELIVRVEPRLESLFVGDVGRIRQIVTNLLGNAVKFTDEGHVLVDVTGERVPTGTRLTISVTDTGIGIPEEKLKLVFEKFSQVDTSSTRRHEGTGLGLAITSRLVELMGGTIGVESAEGKGSTFWFTVTLPRAGQQNGQRIMPVDVTGARVLIVDDNAVNRAILTEQMTSWTFDSCAAESGAEGLKVLIAAAAYGVPVDCVVLDYQMPEMSGAEMARIVRNTGGLADTPIIMLTSVDQSLANTSYRDLGIDAQLIKPARSSVLLETLVATIQRHRHATDSHAVQPLAAERPDVPQPPPLALSEQRAQLQPPPVRPRLPATGGDGHRLDILVAEDNEVNQMVFTQILGETGYGFEIVGNGRKALDAFGKLNPCMILMDVSMPEMSGLEATAAIRQLEQQTGTHVPIVGVTAHALKGDRERCLEAGMDDYLPKPISPRALLEKVERWLGAGRQVQRNAG

SEQ ID NO: 16202 - protein, 553 aa, Candida albicans SC5314
MDISDKNFKPCPCGYQICQFCYNNIRQNPELNGRCPGCRRLYDDESVEYKTVSAEEYKLMQLKKEKRDREKKQKEKEKKEMEMVNKKHLAGLRVVQKNLVYVTGLNPPCNPDDLHSVLRSDKYFGQYGKISKIVIYKKTPTTQTSTHHHQNPGLVVYVTFTRKEDALRCITELDGSLCDGRVLRAAHGTTKYCSSYLRGQPCPNPNCMFLHEPGEEADSYTRKDLSTQQGIKMGMTARSHTTSFGEESSNNSQSNQAGSDDDHHEAHKEHLPSTAHWAAAGTTSGSNSPSVNNNIPLANSAAFPTLGEIVRDQKQQQKKETKPRSKTTKSNNTLVPDELDAGDNSVFKFVETTTEQLRGLEDIRNVRFKGFDNGKILPLFSFKGNFSNDTQLEEEKVIARQVIEKFLLRPLKNYHLAYQNHPITQQQAILQRQQQQQQQQQQQQTPALQVAQLQQNKNDEQQKQAQQQLLLLQLQHQQQLQQQQQQRQLQQQQNQPHQLNILKTSDRVNTSTPPPPGLFAGKDVAASSDMSNTGAPLPSSSSQLLTQLMSGKR

SEQ ID NO: 16203 - protein, 467 aa, Burkholderia thailandensis E264
MSLFRKKNVDRMIAGAHAAGLKKALGAVDLTFLGIGAIIGTGIFVLTGTGAVQAGPALMLSFVIAAIACGLAALSYAEFASTIPVAGSIYTYSYATLGELVAWIIGWDLMLEYGLAASAVSVGWSGYLQSLLQGFGVSLPAALTAAPGALPGVVTYFNLPAFLVMLVITTLLSIGIRESTRVNNIMVFIKVAVVLLVIAVGIFHVTPANWKPFMPHGWNGVFGAAAVMFFAFIGFDAVSSAAEEVKNPKRDLPVGIIASLGVCAFLYVAVAAIATGIVPWAQYANVSHPISYALQVAGEKWVAGFIDLGAVIGMLTVILVMSYGQTRIIFAMSRDGLLPAALSRVHPRFATPFLTTWLVGLFFGLIAALIPLNVLAELINIGTLAAFSMVSIAVLVLRRTHPDLPRAFRCPGVPFVPILAVAACLFLMLNLQPVTWIAFLTWLVIGLFVYFAYSRSRSKLAHGAQQH

SEQ ID NO: 16204 - protein, 231 aa, Triticum aestivum
  misc_feature (174)..(174): Xaa can be any naturally occurring amino acid
  misc_feature (204)..(204): Xaa can be any naturally occurring amino acid
NKFVQKSRLVPVRNSRDIVDPRVREDFGGGHPDPNLTYAKELVDRMGLGKTSNVEPPEFGAAADGDADRNMVLGKRFFVTPSDSVAIIAANAVQSIPYFASGLKGVARSMPTSAALDVVAKNLNLKFFEVPTGWKFFGNLMDAGMCSVCGEESFGTGSDHIREKDGIWAVLAWXLSILAYKNKDNLGGDKLVTVEDIVLQHWGXLMGRHYYTRYDYENVDAEPAKGTLWLT

SEQ ID NO: 16205 - protein, 295 aa, Bradyrhizobium japonicum USDA 110
MPTMTIEVLMVGTAQARLCPPYEGNDRETFVMSDATKEVLYTVADHIATITLNAPERMNTISGPMLNDLARLLTEANEDKNVRVVILTGKGRAFCAGLDLRKERDGNGLSAASSPTTINLRNTPPTVLQAMDKPTICAVNGGAAGYGMDTALGCDIRIMAESAKLAAAFVKRGVVPESGGTWLLPRMLGWAKASELIFTGRTLSARECLDWGLANEVVPDADLMSRATAIACEIAANAPLAVQASKRMMRMGLNENFSDHVHHVYLQLLPLFKTQDMAEGMKAFMEKREPKFEGR

SEQ ID NO: 16206 - protein, 435 aa, Nicotiana tabacum
MLINGFIYLKDWANAFAIFEDVIRDGLKPDVVLYNNIIRAFCGMGNMDRALRIVEQMKKERHRPTSRTFMPIIHAFAKAGAIRKALDVFDMMRRSGCIPTVQTYNALILGLVEKRQMDKAVEVVDEMLLAGIRPNERTYTTIMDGYASLGDTGKAFEYFSRIKDEGLELDVYTYEALLKACCKSGRIESALAVTKEMNAKNIPRNTFVYNILIDGWARRSDVWEAADLMQQMRQEGVQPDIHTYTSFVNACCKAGDMQKAMNTIQEMKRVGLNPMLKPIPLSYTVGHASLPEKALKCFEEMKKSGLKPDKAVYHCLMTSLLSRATVAEDYIITGIHRVCEEMVESGLTVDMGTAVHWSRCLRKIERTGGDITEALQKTFPPDWNSHRNLNAASYDTGNNEGLNDRVTTMVLCMRLTVTATVTMIQMPPRCNQKVA

SEQ ID NO: 16207 - protein, 932 aa, Bradyrhizobium japonicum USDA 110
MSLQTLPSDAADSRPNRPEDVQALEADARLRDDIRLLGRILGDTVRDQEGADLFDLVERIRQTSIRFHRDEDRLARRELEQILDSMSTSETVRIVRAFSYFSHLANIAEDQNNIRQMRARTAAKIGGSGVLADTLAHAKAAGIGPDALRNFFKTALVSPVLTAHPTEVRRKSTMDREMEVASLLDRRERVALTEDEAAASDEQLRREVLTLWQTNLLRRTKLTVLDEVANGLSFYDYTFLREVPRLVNVLEDRLEEDGDQAASELASFLRMGSWIGGDRDGNPFVTADVMRGTLRLQSSRVMQFYLNELHVLGSELSIAAHLADVSEELRTLAERSPDTSPHRSGEPYRLAVSGIYARLTATAEALEVEITRRPVGKGRPYESVKELQADLDVLHRSLISNNARVIARGRLRLLRRAVDCFGFHLARLDIRQNSAVHERTIAELMDAANPGMSYLALGEDARISLLTNELRSTRALVSPFVKYSDETMGELNVFHAAAEAHAKFGSDAIPQCIISMCKGMSDMLEVAVLLKEVGLVHPSGRSAINIVPLFETIEDLQASSAIMDRMLSLHDYRRLVDSRGSVQEVMLGYSDSNKDGGFVTSGWELYKAEINLVDVFERHHVRLRLFHGRGGSVGRGGGPSYDAIIAQPGGAVNGQIRITEQGEIISSKYSNAEVGRNNLEILAAATLEASLLHPRQSAPRREYLTAMDELSSLAFRAYRGLVYETDGFVDYFWASTVINEIATLNIGSRPASRKKTRAIEDLRAIPWVFSWAQCRLMLPGWYGFGTAVEQWIAEHPDKGMPFLKELYKEWPFFRMLLSNMDMVLAKSSIAIASRYAELVPDEALREKIFGRIRREWHSCIETLLDIMGQDRLLQGNPLLERSVRHRFPYLDPLNHVQVELLREHRAQNPDEQVLRGIQLTINGISAGLRNTG

SEQ ID NO: 16208 - protein, 408 aa, Arabidopsis thaliana
MGSLRRSTSNRSRKKGTAVKMNRMPSSLLPPTPPCSAIVGGTGKSKKRRGGVCLWTRFDRTGFMEVAGCDKSTIIERSSVSAKDLRTAFSHSSKILAREKAIVLNLEVIKAVITSEQVMLLDSLRPEVLTLTDRLKHHFPRKDGPENILQASSHGHQEGGEEGLKSKLPFEFRVLEIAFEVFCSFVDSNVVDLETQAWSILDELTKKVSNENLKDLRSLKTSLTHLLARVQKVRDEIEHFLDDKEDMEDLYLTRKWIQNQQTEAASNSIVSQPNLQRHTSNRISTSMVTEEDDIDDMEMLLEAYFMQLEGMRNKILLMKEHIDSTEAYVKILQNSRRNGLIHLMMLVNIGNYAITAGTVVVNLFGMNIPIGLYSTPDIFGYVVWAVVALCIVLFIVTVGYAKWKKLLD

SEQ ID NO: 16209 - protein, 519 aa, Bacillus alcalophilus
MVLEPQIKSQLNQYLQLMEGDVLLKVSAGNDKVSEDMLSLVDELASMSSRITVEKTNLERTPSFSVNRPGEDTGIVFAGIPLGHEFTSLVLALLQVSGRAPKAEQNVIDQIKNIEGEYHFESYISLSCQNCPDVVQALNLMSVLNPGISHTMIDGAAFKDEVESKDIMAVPTVYLNGESFTSGRMTVEEILAQLGSGPDASELADKDPFDVLVVGGGPAGASSAIYAARKGIRTGIVADRFGGQIMDTLSIENFISQKYTEGPKLAASLEEHVKEYDIDVMKLQRAKRLEKKDLIEIELENGAVLKSKSVILSTGARWRNVGVPGEQEFKNKGVAYCPHCDGPLFEGKDVAVIGGGNSGVEAAIDLAGIVNHVTVLEFMPELKADEVLQERLNSLPNVTVIKNAQTKEITGDDKVNGISYMDRDTEEVHHIELAGVFVQIGLVPNTDWLDGTLERNRFGEIVVDSHGATNVPGVFAAGDCTNSAYKQIIISMGSGATAALGAFDYLIRNTTPAESAAAK

SEQ ID NO: 16210 - protein, 716 aa, Magnaporthe grisea 70-15
MKYYRIPKEGNTGPRCGAFLAALKNPHNRWSMKRHLHIPDSQLPSWRYQHPCFRLVVLLMTSGLLPLLSSPQTKYTGFTQVHNPNRQWPDKVITKAPIWLSTDLRDGNQSLTAPLNSDQKFEFFKLLVEIGYKEIEVSFPAASNVEFEFTRRLVETPGAVPDDVRLRALAPTRNDFLKRTVDALEGAKRATVCTYICVSDKMLKYQGFSRARAIEQAVGAVRYLRSITKDNPDTKTRWDLAFGLESYNESDQDFALAMTEAVMGAWEASADDQMWVVLATSTEVATPNVFADQVETFIAGLSAPENVLISIHTHSDRGCGAAAAELGMLAGAHMVEGCLFGNGERAGNVDLVTLALNLYTRGISPHLDFSDLYAVRDRYEQLTGLQVTARTPYAGEYALQAFSGHHQNIIRKGMGLRLRAEAEGRPAPVWDIPYLPVDPQDLGIPIDHIIRVNSQSGKAAATWILSRRWGLDLPVDMQVHFGRRLMALCEALAREISQDELLGLFTSTYGLETPDRPSHHLGHLTVQRSSNGRGYVVDGLISPIDGVKLVLAGLGSDLATAALQSLNIDTEGKAVAVKIQDTQQLNNDFGRGRYCALATCEVASQVQWGYFIDENKEKAEALAVIAAALVMQRPKSSAANLIHKPPLASQQSARENLDPRLYKPKRNHDICLINPAANRKPAAVAAAAAASECNPGNAHADQMRRIKSFWRRPRHR

SEQ ID NO: 16211 - protein, 184 aa, Arabidopsis thaliana
MAEVLRPEMLDISNDTSSLASPKLLHVLAVDDSMVDRKFIERLLRVSSCKVTVVDSATRALQYLGLDGENNSSVGFEDLKINLIMTDYSMPGMTGYELLKKIKESSAFREIPVVIMSSENILPRIDRCLEEGAEDFLLKPVKLADVKRLRDSLMKAEERAFKDIMHKRELEANDIYSQLKRAKI

SEQ ID NO: 16212 - protein, 502 aa, Xylella fastidiosa Ann-1
MHNGFDALQLHANRLRGVTIPDLLAAELKRPEQYARQVGPLYFNFARQKYDCVALEALFALARNHNVTGAFQRMFCGEQVNVTEGRAVLHTALRGDLSGTSVAVAAYTAAAKVRERMYALIAGLDASEVTDIVSVGIGGSDLGPRLVVDALRPISQGRFRVHFVSNVDGAAMRRTLDMLDPSRTAGILISKTFGTQETLLNGRILYDWLGGSERLYAVSANPERAAHAFDIVSTQVLPIWDWVGGRYSLWSAVGFPIALAIGSQRFEELLAGAAEFDAYALRVPLEENVAVLHGLTAVWNRNFLGCATYAVMAYDQRLALLPAYLQQLVMESLGKRVKCDGTPVDRDTVPVWWGGVGTDVQHSFFQALHQGTNIVPADFIGTIRNDDLYTENHFALNANLLAQIEVLANGQLSDNPHRVYPGGNPSTLILLDALTPQALGGLIAMYEHSVYVQSVIWGINAFDQFGVELGKHLAVQLLPALKGESVEVADPVTRAVLLRLRG

SEQ ID NO: 16213 - protein, 182 aa, Arabidopsis thaliana
  misc_feature (102)..(102): Xaa can be any naturally occurring amino acid
  misc_feature (168)..(168): Xaa can be any naturally occurring amino acid
MASSMLSSAAVVTSPAQATMVAPFTGLKSSAAFPVTRKTNKDITSIASNGGRVSCMKVWPPIGKKKFETLSYLPDLSDVELAKEVDYLLRNKWIPCVEFELXHGFVYREHGNTPGYYDGRYWTMWKLPLFGCTDSAQVLKEVEECKKEYPGAFIRIIGFATPASPMHXFIAYKPQAPSLISF

SEQ ID NO: 16214 - protein, 103 aa, Lactobacillus sakei subsp. sakei 23K
MVDVLTDKDFEAETSQGVVLTDFWATWCGPCRMQSPVIEELAQTNDKVKFTKMDVDANPDTPAKFGIMAIPTLLVKKDGQVVETITGFHNKEQLTETLAKYTD

SEQ ID NO: 16215 - protein, 113 aa, Chlorobium tepidum TLS
MKLITAIIQPDRLDHVREALIQADITRITVSRVSGHGRQEDIEYYRGQKIAPNLLPKVRLDIAVNDQFVNVTVDTIVAAARHESGEIGDGKIFITPLEECVRIRTNERGGSAI

SEQ ID NO: 16216 - protein, 56 aa, Fragaria nubicola
RATVRDPANLKKVRHLLELPQAATRLTLWKADLDVEGSFNEAITGCTGVFHVATPM

SEQ ID NO: 16217 - protein, 521 aa, Salmonella typhimurium LT2
MLDTNMKTQLRAYLEKLTKPVELIATLDDSAKSAEIKELLAEIAELSDKVTFKEDNTLPVRKPSFLITNPGSQQGPRFAGSPLGHEFTSLVLALLWTGGHPSKEAQSLLEQIRDIDGDFEFETYYSLSCHNCPDVVQALNLMAVLNPRIKHTAIDGGTFQNEITERNVMGVPAVFVNGKEFGQGRMTLTEIVAKVDTGAEKRAAEALNKRDAYDVLIVGSGPAGAAAAVYSARKGIRTGLMGERFGGQVLDTVDIENYISVPKTEGQKLAGALKAHVSDYDVDVIDSQSASKLVPAATEGGLHQIETASGAVLKARSIIIATGAKWRNMNVPGEDQYRTKGVTYCPHCDGPLFKGKRVAVIGGGNSGVEAAIDLAGIVEHVTLLEFAPEMKADQVLQDKVRSLKNVDIILNAQTTEVKGDGSKVVGLEYRDRVSGDIHSVALAGIFVQIGLLPNTHWLEGALERNRMGEIIIDAKCETSVKGVFAAGDCTTVPYKQIIIATGEGAKASLSAFDYLIRTKIA

SEQ ID NO: 16218 - protein, 111 aa, Triticum aestivum
  misc_feature (19)..(20): Xaa can be any naturally occurring amino acid
  misc_feature (44)..(44): Xaa can be any naturally occurring amino acid
  misc_feature (73)..(73): Xaa can be any naturally occurring amino acid
MRSLFLLALFLVLAFHHGXXAVTCNNVVGDLYPCLSYVMQGGNXPSTNCCSGVRTLNSQAQTTADRQSVCRCXKNAIGGASYSSSNLKNALSLPAKCGVNLPFSISPSTNC

SEQ ID NO: 16219 - protein, 318 aa, Rickettsiella grylli
MKQGVLLVNLGTPSQPTTQAVRRYLSEFLSDRRVVEYPQWLWQIVLKLFILPKRARYLAKLYQTIWMDEGSPLAVITQRLTEKMQTYLGDNYQLIGVMRYGTPTIESGLKTLLAQGVTTITILPLYPQYSATTTASCFDQISQFFQTSRVIPHIKWITSYFDQRWYIKAIVSQIKKMRAKQSQPSYLLFSFHGLPQRYIENGDPYQQHCFSTVRLIAEQLQLTKDTYQVVFQSRFGKTAWLKPYCDRVLQTLPARGIKNVTIICPGFAVDCLETLEEISKRYRMLFLDAGGEQLTYIPALNDTACHVEGLSQLVRQAQ

SEQ ID NO: 16220 - protein, 416 aa, Gracilaria gracilis
MAFVAPVSSVFSTSSKSAVCSGRSSFAQFSGLKKVNNTARLQTAEQGSAFGGVSDANDAFFNAVNTMGAPARTSNAPSMKVRVAINGFGRIGRNFIRCWAGRTDSNMDVVCINDTSGVKTASHLLKYDSILGTFDSDVVAGEDSITVDGKTIKVVSNRNPLELPWKEMEIDIVVEATGVFVDAVGAGKHIQAGAKKVLITAPGKGEGVGTFVVGVNDHLYSHDKFDIVSNASCTTNCMAPFMKVLDDEFGVVRGMMTTTHSYTGDQRLLDAGHRDLRRARSAALNIVPTTTGAAKAVALVVPTLAGKLNGIALRVPTPNVSVCDVVMQVSKKTFKEEVNGALLKAANGSMKGIIKYSDEPLVSCDYRGTDESTIIDSSLTMVMGDDMLKVVAWYDNEWGYSQRVVDLGEVMASQWK

SEQ ID NO: 16221 - protein, 419 aa, Methanosarcina barkeri str. fusaro
MKEVTVGSRSKLLEGVKQHLCTCAAGLKLTPDMEAFLEMPMRELYVSLPVHMDDGSIKVFKGFRVQYNEALGPTKGGVRFHPEDTMETTRALAALMTWKCALHKLPLGGAKGGVICNPKELSHREIERLSRAYIRGIYQIIGPDRDIPAPDIYTNPQVMAWMMDEYSKLAGRNVFGSITGKPTSLGGSAGRYDATARGGLYTIREAAERIGISLKASRVAVHGFGNVGYHAAYLANKLYGCKVVAVSDSKGAIFSPYGLDPEDVSGHKHSTGSVLDYPEAENLTNKELLELDVEILIPASLENIITEENAGNIKARILAEMANGPTTVEGEAILNSKGIHIIPDILCNGGGVIVSYFEMVQNQSSTQWEEEEVQNRLERKMKEAYFSVYDFASKNNVEMRQAAYTLAVGRVVEAMQLRG

SEQ ID NO: 16222 - protein, 630 aa, Candida albicans SC5314
MLKVARLQIRFNSSTAASAAAVAAKTAEVRTRTVKTPVGIKAAIESLKPKATRLSMDGPVECALSGFSLLNSPQFNKGSAFSKEERESFDLTGLLPSQVNSLDEQVERAYRQFSYLKTPLAKNDFCTSMRLQNKVLYYELVRRHIREMLPIIYTPTEGDAIASYSDRFRKPEGCFLDINDPDGIDKRLSAYGEDKDIDYIVVSDGEGILGIGDQGVGAIRIAIAKLGLMTLCGGIHPARVLPIALDVGTNNDRLLNDELYMGNKFPRVRDEKYWDFVDKVIQAIKKRFPSSVLHYEDFGVSTGRDLLYKYREELPSFNDDIQGTGAVVMASITAALKFSKRDLKDIQVLVYGAGSAGLGIADQITNHLVSHGATEEQARARIHCMDRYGLITNESTNASPAQLKYADPASEWDGVDTKSLLACVNKIKPTVLVGCSTQPGAFTEEIVREMYKHNPQPIIFPLSNPTRLHEAVPSDLMKWTDNNALIATGSPFEPVDGYYISENNNCFTFPGIGLGAVLSRCTTISDTMISAAVDRLASMSPKMENPKNGLLPRLEEIDEVSAHVATAVILQSLKEGTARVESEEKPDGGFVEVPRDYEGCLKWVQSQMWKPVYRPYVKVEYVSEIHTYQY

SEQ ID NO: 16223 - protein, 761 aa, Solanum bulbocastanum
MKSLANSIFILILTLFFSHTCIINLLSVAAITSLKPGDELNHSQVLDSEGGKFKLGFFSISQTNNYYLGIWYAGDPQDKKLWIANPNTPLLNNSGLLTIDTTGTLKITSGGKTVVNITPPLLTRSSIARLQGSGNLVLQDETQNRTLWQSFDHPTNTLFPGMKLGYNLTTKQNWTLTSWLSSYIPASGAFTLSLESIQDAFQLVIRRRGEVYWISGAWRNQSFPLLTALHDSSNRYQYNLNLVSEKDGVFFQFDAPDGSFPSLELNFNGAIVGGGEDSRVYALYNEFCYGYESQDGCVSNQLPECRKDGDKFEQKSGDFIDRSKNSNSYDNASTSLGDCMKRCWEHCSCVGFTTTSNGTGCIIWNGNGEFQVDESGNTVKKYVLVSSKSSNAIVVPMLISGFICYSIVRRRKLQAEKRREEEYIRELTASDSFNDTNMKEKDGREVQDLKIFSFGFVLAATNNFSSENKLGEGGFGPVYKGKFPDGREVAVKRLSRTSGQGLVEFKNELILIAKVQHTNLVRVLGCCIHEDEKMLIYEYMPNKSLDFFLFDPERKKLLDWQKRYEIIEGIAQGLLYLHKYSRMRVIHRDLKASNVLLDENMNPKIADFGMARIFKQNETEAVTARVVGTYGYMAPEFAMEGAFSIKSDVFSFGILMLEIAWELWKEGCALELKDPALGDLCDTKLLLRVIHVGLLCVQEGATDRPTMSDVISMLGNESMPLPTPKQPAFFTGRNETESHSAGIKAEQYSVNDCSITVIEAR

SEQ ID NO: 16224 - protein, 980 aa, Methylobacterium extorquens
MLIKRKSGDAARTKHQAVAAGLAAGVLDRRAFLRKSGLTAGALAAAGTIQLGSVRKAQAAGSSAVGPDTVIKKNVCTHCSVGCTVTAEVVNGVWVGQEPSYASPINRGTHCAKGAAIRELVSSDRRLKYPMKLEGGQWKRISWDQAYEEIGDKLVQIREKNGADSVYWLGSAKFTNEASYLMRKFAALWGTNSIDHQARICHSTTVAGVANTWGYGAQTNSYNDIRNAKTMIILGGNPAEAHPISMQHVLSGKEINRANMIVIDPRFTRTAAHATEYVRIRSGTDIPVVWGILWHIFQNGWEDKEFIAQRVYAMDDVRKEVAKWTPDEVERVSGVPGEQLKRVAEKFAKEKPATLIWCMGATQHTVGTANVRALCILCLATGNVGKPGTGANIFRGHTNVQGATDLGLDVTSLPLYYGLVEGGWRHWARVWDVEYEWLQSRFDEVPAKGGRKARTRKENMEAPGITSTRWFDAVNLPPEQIDQRSPIKAFMVFGHGGNTVTRMPEAIDGMNKLELLVVADPHPTTFAALDARQDNTYLLPICTSLEMDGSRTASNRSIQWGEQIVKPAFESKSDYEVLYRLAQKLGFADKLCKNIKIVDGAPEAEDILREINRGGWSTGYCGQSPERLKAHMRNQHKFDLVTLRAPKDDPEVGGDYYGLPWPCWGKPELRHPGSAILYNTSLHVKDGGGGFRARFGTERNGQTLLAENSFSKGSDLTDGYPEFTFGVFKKLGWDKDLTPDELATILKIGGEKPDTVSWATDLSGGIQRVCLDHGVSPFGNGKARANAWNLPDPVPVHREPVYSPRPELVAKYPTRPDERQLRMPNIGFSVQKSVVDRGVAKDFPIILTSGRLVEYEGGGEETRSNPWLAELQQDMFVEINTGDAAARGIKDGQWVWVSGPENGAKTKVKALVTDRVGKGVAFMPFHFSGWYQGKDMRDFYPKGTDPVVLGESVNTVTTYGFDPVTGMQETKCTLCQIAAA

SEQ ID NO: 16225 - protein, 115 aa, Hordeum vulgare subsp. vulgare
MARAAASQLVLVALVAAMLLVAADAAISCGQVSSALSPCISYARGNGAKPPAACCSGVKRLAGAAQSTADKQAACKCIKSAAGGLNAGKAAGIPSMCGVSVPYAISASVDCSKIR

SEQ ID NO: 16226 - protein, 113 aa, Oenococcus oeni
DIKLLVVSDAEGILGIGDWGVQGVDIAVGKLMVYTVAAGIDPSTVLAVVIDAGTNNEKLLKDPMYLGNKFNRVRGDKYYDFIDKFVNHAESLFPNLYLHWEDFGRSNASNILN

SEQ ID NO: 16227 - protein, 647 aa, Flaveria pringlei
MMSLNSSSVVKSSISGVSWTQSQSVRLSVRRPMVVAMVNSNGRPERSVGVSVDGAVKDVNAPVAVEVADSESKKPTAVVGGGVEDVYGEDSATEDHFITPWSVSVASGYSLLRDPHHNKGLAFTEKERDAHYLRGLLPPVVVNHDLQVKKMMHNIRQYEVPLQRYQAMMDLQERNERLFYKLLIENIEELLPIVYTPTVGEACQKYGTIFKNPQGLYISLKDKGKVLEILKNWPQKKIQVIVVTDGERILGLGDLGCQGMGIPVGKLSLYTALGGIRPSACLPITIDVGTNNEKMLNDEFYIGLRQRRASGKEYAELMNEFMSAVKQNYGEKVLIQFEDFANHNAFDLLEKYRTTHLVFNDDIQGTASVVLAGLISALKLVGGSLADHKFLFLGAGEAGTGIAELIALEISKQTNAPLEETRKKIWLVDSKGLIVRSRLDSLQHFKKPWAHDHEPVNKFLDAVKAIKPTVLIGSSGAGQTFTKEVVEAMSSFNEKPIILALSNPTSQSECTAEQAYTWSEGRTIFASGSPFAPVEYNGKVYVSGQSNNAYIFPGFGLGLIISGAIRVHDEMLLAASEALAEQVTQEHFDNGLIYPPFTNIRKISAHIAAKVAAKAYELGLASRLPQPENLVAYAESCMYSPKYRNYR

SEQ ID NO: 16228 - protein, 438 aa, Brevibacterium flavum
MTSPNNYLAKIKVVGVGGGGDNAVNRMIEEGLKGVEFIAVNTDSQALMFSDADVKLDIGREATRGLGAGANPEVGRASAEYHKNEIEETIKGADMVFVTAGEGGGAGTGAAPVVGRIAKKMGALTIGVVTKPFEFEGRRRTRQAEEGIAALKEVCDTLIVIPNDRLLELGDANLSIMEAFRAADEVLHNGVQGITNLITIPCINVDFADVRSVMSEAGSALMGVGSARGDNRVVSATEQAINSPLLEATMDGATGVLLSFAGGSDLGLMEVNAAASMVRERSDEDVNLIFGTIIDDNLGDEVRVTVIATGFDAARASAAENRRAGIPAAPAAEPVQQQQVPTTNATLPPEKESIFGGAREENDPYLSRSAGARHRIEETRSGGGLFTTGNDRDYRRDERREDHRDERRDDRSYDRRDDRRDDRRDDRGDDLDVPSFLQ

SEQ ID NO: 16229 - protein, 548 aa, Oryza sativa
MSAAHLLRHSRKLRTLRDALDYDRSALVRYFSAASASFPTTGGAAAGVEKRIGGARFPQCKQPGKELETFKVSLGGLNGRYACRRAPNNCIPTTITGLNGSLSCGQVSSARSFSSSADLPPHQEIGMPSLSPTMTEGNIARWLKKEGDKVSPGEVLCEVETDKATVEMECMEEGYLAKIIHGDGAKEIKVGEIIAVTVEEEGDLEKFKDYKPSTSAAPAAPSEPKAQPEPAEPKVKETEPSRTPEPKAPKTEEASQPGGRIFSSPLARKLAEDNNVPLSSVMGTGPDGRILKADIEDYLASVAKGGKREALAAPGLSYTDVPNTQIRKVTANRLLSSKQTIPHYYLTVDARVDNLIKLRGELNPLQESSGGKKISINDLVIKAAALALRKVPQCNSSWMSDFIRQYHNVNINVAVQTEHGLFVPVIRDADKKGLGTIAEEVKQVAQRARDNSLKPEDYEGGTFTISNLGGPFGIKQFCAIINPPQSAILAIGTAEKRVIPGSVDGQYEFGSFMSATMSCDHRVIDGAIGAEFLKAFKGYIENPNSMLL

SEQ ID NO: 16230 - protein, 416 aa, Methanosarcina barkeri str. fusaro
MKYDVVVVGAGPVGSTAARYAALNGAKVLLLEEHAFIGSPVSCTGLLSTRAVAECELKPSDEFVFNSVRGAFVYAPDGQCLPIDGKQTKAYVVSRKNFDRNLAVMAVEEGVELSLRTRAVGLEMPSPKTDKEGQQNSTVKLKVLKNGKPETICASAVIGADGVKSRIASYAGLEKPASVLPGIQIEAPYASDDSDFVELFPGSVAPGFFAWTVPVNEKISRIALALEPGLAWKNGHEESSPLSYLEKFLHSNPHVKARYSGCMLDFVVGGIPIGPQKKTVSDGVLLVGDAAGQTKSTSGGGVYTGAFAAKIAGKVAAQAALEGDTSAKRLSEYDQLWRKGLERELEIGMKIHDYIGKLEDRQFNDLIGSLNTPSILNTITEYGDMDHPSILLRKLMFSGNSFRLMKAFGTFLRTLF

SEQ ID NO: 16231 - protein, 488 aa, Methanosarcina barkeri str. fusaro
MCGIAGAAGTPDTNEEVKRMLAALGHRGPDACGTYQAKGLSIGNTLLKITGDMLQPLVGKGALVLNGEIFNFRELAAEQGIKTNSDTEVLFALIETKIKEGETPTNAIFSVLSRVNGDYALAYVLGNKLVLARDPVGVKPLFYSLEKEGKKPKLAFASEKKAFSSQKDQIKSFPPGRVMAFDIRNGRLEEKSLTIDPPQERISEEHEASSRLKAALEKAVEIRLTKTSGIAFSGGIDSTFLAALAKNIDPSISLYAVGLPDSHDLVQAQRAAEVAGMSDSLKTHTLSPEEIEAAIPNVIYSTESTDPMKIAIGLPLYFVAKTAKEDGKRVLLTGQGADELFGGYNRHKALLEHGPKVLDRAIYTDLKNISTINLERDDMVTMANSVELRVPFLDKEVIKTGLAISPELKVLKRDSLYIRKYILRKAADGLLPSELLWKEKKAIQYGTGVQKVLDRLAREAGFSKREGNHIEKYLKKVAENQGFDFIFR

SEQ ID NO: 16232 - protein, 113 aa, Oenococcus oeni
DIKLLVVSDGEGILGIGDWGVQGVDIAVGKLMVYTVAAGIDPSTVLAVVIDAGTNNEKLLKDPMYLGNKFNRVRGDKYYDFIDKFVNHAESLFPNLYLHWEDFGRSNASNILN

SEQ ID NO: 16233 - protein, 638 aa, Saccharomyces cerevisiae
MSRTNMDTRHAHSALLAAPQSATANSRSSNSSSESSSNKNNINVGVGDDSGNVSAVSIDDGPHFRDIFHYGHEENYKLASSGITNLNSSSHAHQTLSPISISNASTPESFPEHPLGLERETEPALEAEMEAEELPPHQSKYLLSSIKATKRLKDARPFLKPVDPIALNIPHYFNYVQTPMDLSLIETKLQGNVYHSVEQVTSDFKTMVDNCLNFNGPESSISSMAKRIQKYFEKKLSAMPPRVLPASALKKTSRNRKKNEDMDSPLVIRRSVSTTNDNIGESGNREGVSGGRPKRTIHPPKSKDLFDIYENSKPKSKTLQKKFRTCLKILKVLMSKKNSDINFPFLQPVDPIALNLPNYFDVVKNPMDLGTISNNLMNWKYKTIDQFVDDLNLVFYNCFQFNPEGNEVHSMGKKLKELFNFHWLENQDILNEIETDSDLEEDNYSSSYSSDDEYDDEDINENDITNPAIQYLEQKLKKMEVELQQLKRQELSKLSKERKRKHLGKTLLRRKAMKHSVDDLKKSITDKINELSDLEMNGMIRIIKNSLPADEILTSNEDEIEIDLDILDEATIARIYERYFEKKNNNNSKRKLSGNYSTAPTNKKKKTLKFLEKDEIINNNNYSDSEEDSSDSSDSDSD

SEQ ID NO: 16234 - protein, 473 aa, Zymomonas mobilis
MSSESSQGLVTRLALIAAIGGLLFGYDSAVIAAIGTPVDIHFIAPRHLSATAAASLSGMVVVAVLVGCVTGSLLSGWIGIRFGRRGGLLMSSICFVAAGFGAALTEKLFGTGGSALQIFCFFRFLAGLGIGVVSTLTPTYIAEIRPPDKRGQMVSGQQMAIVTGALTGYIFTWLLAHFGSIDWVNASGWCWSPASEGLIGIAFLLLLLTAPDTPHWLVMKGRHSEASKILARLEPQADPNLTIQKIKAGFDKAMDKSSAGLFAFGITVVFAGVSVAAFQQLVGINAVLYYAPQMFQNLGFGADTALLQTISIGVVNFIFTMIASRVVDRFGRKPLLIWGALGMAAMMAVLGCCFWFKVGGVLPLASVLLYIAVFGMSWGPVCWVVLSEMFPSSIKGAAMPIAVTGQWLANILVNFLFKVADGSPALNQTFNHGFSYLVFAALSILGGLIVARFVPETKGRSLDEIEEMWRSQK

SEQ ID NO: 16235 - protein, 529 aa, Erythrobacter sp. NAP1
MLDANMQIQLKQYLANLREPIELVASLDDGEKSAQTRELLTEIAELHEMVTASFDGTHERKPSFIIRRASDANKWVRFAGLPMGHEFTSLVLALLWAGGHPPKVDADLIEQVRALEGDYEFEMFFSLSCHNCPDVVQALTLMALENTHITATLIEGGTFQDEVEERGVLAVPATFLNGESFYNGKMELAEILSKLDSGADEKAAEKLSAKDPFEVLVIGGGPAGAASAIYTARKGFRTGIAAERFGGQLQDTLGIENLPGTSYTEGPKLSDDLKKQVAENEIDMMDLARATELRPAKEAGGMHEVTLANGAVLKSRSLILSTGARWRNLGVPGEAEYRNKGVAYCPHCDGPLFKGKRIAVIGGGNSGVEAAIDLAKIVGHVTLIEFDAKLRADEVLQRKLRSMDNVEIITSGQTTEITGDGARVNGLVLKDRESGDERRIDLEGVFVQIGLVPNTEWLADTGLELSKFGEIIVDDHGATNLPGIYAAGDATTVKDKQIVVAMGTGATAGLGAFDYLIRNEPVDEIAQAA

SEQ ID NO: 16236 - protein, 248 aa, Glycine max
MTVSSENGVSSGQSSLTGLAPLEAVLFDIDGTLCDSDPLHYYAFREMLLEIGFNGGVPISEEFFIETVAGKHNDDIALVLFPGDLERGLKFVEDKEAMFRRLAAEQLKPLNGLDKVRKWIENHGLKRAAVTNAPRKNAELMISILGLSDFFDAVIIGGECEHAKPHPDPYLKGLEALKASKDHTFVFEDSVSGIKAGVAAGMPVIGLATRNPENLLMEAKPAFLIKDYEDPKLWAALEELDKAGARSV

SEQ ID NO: 16237 - protein, 85 aa, Picrophilus torridus DSM 9790
MAKHTVKVGVAGRFGPRYGVTVRKEWSKYYVQKKAYYVCPKCKQKKVRRIANGIWECRHCSYKFAGGSYNPEYSAEIVREVAGNV

SEQ ID NO: 16238 - protein, 161 aa, Bacillus clausii KSM-K16
MSVYDFSVKTSNGQDVSLSAYKGNVLLIVNTATKCGFASQFAGLEKLYNDYKEKGFYVLGFPSNQFLNQEPVADEDMEQVCKINFGVTFPLFAKTDVKGKHANPLFNYLKAAKKGMLSEEIKWNFTKFLVNRKGEVIKRYAPATKPETIEADVIEELKADA

SEQ ID NO: 16239 - protein, 505 aa, Gibberella zeae PH-1
MAHELPFKIPTLQVKQQAPSQVQPLTSSVILPSNSLTTLTTPDPGTNKPWAKVKDNSADDVDHTVQVAYDAFQTFKKTSPRLRAQWLLKWDALIREHKADLATLLVYETGKPYAEAIGEMDYSLTFTSWFAGEAERIQGTCFMPSAPNRRVFTIKQPLGVAVALVPWNFPVAMVLRKAAAALAAGCTMVVKPSPETPVTAMALAKLASEAGFPNGVLNILPTSLDNTPSLSEALCKHDLVKKVTFTGSTRVGTLVANLCSLGLKKVVLELGGNCPCLIFNDADIEAALRELVGLKWRHAGQACVTVNRFLVQSAVYDKFLQRFAEETAKYVVGHGASEGTTLGPVTKPESLDRAERLIKDAVSKGARIVTGGNRLSPKDGEGGYFFEPTILADMTHDTLISCEECFAPIAAFYKFETEEEAVRVANDTPMGLASYAFTKDADRIWRLFENLEAGMIALNTGNSSAAESPFGGIKMSGYGKEAGKDVAVNEYMIQKTGTITVDGLV

SEQ ID NO: 16240 - protein, 224 aa, Pseudomonas syringae pv. phaseolicola 1448A
MQPFVIAPSILSADFARLGEEVDNVLSSGADFVHFDVMDNHYVPNLTIGPMVCSALRKYGVTAPIDVHLMVSPVDRIIGDFIEAGAIYITFHPEATQHIDRSLQLIREGGCKAGLVFNPATPLNLLEYVMDKVDMILLMSVNPGFGGQKFIPGTLNKLREARALIDASGRDIRLEIDGGVNVNNIREIAAAGADTFVAGSAIFNAPDYREVIEKMRAELAASRA

SEQ ID NO: 16241 - protein, 336 aa, Mesorhizobium loti MAFF303099
MTVRVAINGFGRIGRNILRAIHESGRKDIDVVAVNDLGPVETNAHLLRYDSVHGRFPHEVSVSGDQITVGKEKFKVTAIKDPTQLPWKELGVDIALECTGIFTARDKAASHLTAGAKRVLVSAPADGADLTVVYGINHDKLTKDHIVISNASCTTNCLAPLAAVLHETVGIEKGMMTTIHSYTGDQPTLDTMHKDLYRARAAALSQIPTSTGAAKAIGLVLPDLKGKLDGISIRVPTPNVSVVDFKFIAKRATTVQEINEAVIAASNGKLKGILGVTHHPNVSIDFNHDPRSSIMALDQTKVMDGNFVSVLSWYDNEWGFSNRMGDTAVAFGKTIA

SEQ ID NO: 16242 - protein, 502 aa, Lycopersicon esculentum
MVLTTTSIRDSEESLHCTFASRYVQEPLPKFKMPKKSMPKEAAYQIVNDELMLDGNPRLNLASFVSTWMEPECDKLIMSSINKNYVDMDEYPVTTELQNRCVNMLAHLFHAPVGDDETAVGVGTVGSSEAIMLAGLAFKRKWQSKRKAEGKPFDKPNIVTGANVQVCWEKFARYFEVELKEVKLKEGYYVMDPAKAVEIVDENTICVAAILGSTLTGEFEDVKLLNELLTKKNKETGWETPIHVDAASGGFIAPFLWPDLEWDFRLPLVKSINVSGHKYGLVYAGVGWVIWRSKEDLPDELVFHINYLGSDQPTFTLNFSKGSYQIIAQYYQLIRLGFEGYKNVMKNCLSNAKVLTEGITKMGRFDIVSKDVGVPVVAFSLRDSSKYTVFEVSEHLRRFGWIVPAYTMPPDAEHIAVLRVVIREDFSHSLAERLVSDIEKILSELDTQPPRLPTKAVRVTAEEVRDDKGDGLHHFHMDTVETQKDIIKHWRKIAGKKTSGVC

SEQ ID NO: 16243 - protein, 188 aa, Arabidopsis thaliana
  misc_feature (68)..(68): Xaa can be any naturally occurring amino acid
  misc_feature (86)..(86): Xaa can be any naturally occurring amino acid
MASSMLSSAAVVTSPAQATMVAPFTGLKSSAAFPVTRKTNKDIISIASNGGRVSCMRVWPPIGKKKFXPLSYLPDLSDVELAKEVXDYLLRNKWIPCVEFELEHGFVYREHGNTPGYYDGRYWTMWKLPLFGCTDSAQVLKEVEECKKEYPGAFHLGSSIRQHPLKSQCIPVSICPTKPPPKAFHPKA

SEQ ID NO: 16244 - protein, 125 aa, Glycine max
MAGSGSSMLYSFLLFTVILSLQEMYRGKLASSELYTILGGFVSSLLFLVLLTFIGNFQETIGARTGWGAVIVAEAVALIAASTVHRVCITTCFLFSAALLYEVNKISGSALSTSDSRTKKQSGRA

SEQ ID NO: 16245 - protein, 341 aa, Magnaporthe grisea 70-15
MNQVLSRYPDVECDIKSYELGGTSFDLHGEALLPEALEAAKKADAVLVGAVGGPKWNGRVPSVEFQSLGALRRELQLYGNLRPINFAAPSLVDDSPLKAEVVRGTDILMIRELTGGIYFGEKSQGDRAASDTDRYTYEEVERVARLAGSLARQQRDPPLPVVSLDKANVLMACGAFWRRVVAEVFAAEFPDVPLTHQLADSAAMILACSPTKLNGVVLASNLFGDILSDQASVIAGSIGLLPSASLCGIPTAGSGMIKGLYEPIHGSAPDIAGKQVVNPIGMILSVAMMFRYSLGMPEAAGLIETAVRDTIEAGVRTKDMGGNASTKEIGDHVVQILSKLG

SEQ ID NO: 16246 - protein, 336 aa, Mycobacterium leprae
MLFDAALLLSFGGPDGPEQVRPFLENVTRGCNVPPERLDEVTKHYLHFGGVSPINGINLALVNELQVELDLPVYFGNRNWEPYIEDSVVTMRDDGIRCAAVFITSAWSGYSSCTRYVEAIARARRRAGTGAPNLVKLRPYFDHPLFVEMFVDAITAAAASLPAALRSEARLVFTAHSVPVATDRRCGPALYSRQVGYAARLVAAGAGYADYDLTWQSRSGPPYVPWLAPDVGDQLMTLASAGTKAVIVCPIGFVADHIEVVWDLDHELRSQADAAGVAFARAATPNADRRFARLAASLIDELTHDRVPVRVNGSDPVPGCLASINGVPCDLPHCVA

SEQ ID NO: 16247 - protein, 512 aa, Bradyrhizobium japonicum USDA 110
MDKPTPKADVFQANRDRVAPLLKTLRADGIGHMIDGKIVPSISGETFETKSPVDGAVLASVARGNAEDIDRAATAAALAFKSWREMGPAMRKKLLHRVADAIEDNADDIAVLECIDTGQAYRFMAKAAIRAAENFRFFADKCAEARDGQNTPSDEHWNVSTRVPIGPVGVITPWNTPFMLSTWKIAPALAAGCTVVHKPAEWSPATAAILARLVKEAGVPDGVLNTVHGFGEEAGKALTEHPAIKAIGFVGESATGSAIMVQGAPTLKRVHFELGGKNPVIVFDDADLDRALDAVVFMIYSLNGERCTSSSRLLIQQSIAEKFVEKLTARVKALKVGHPLDPSTEIGPLIHERHLAKVCSYFDVARKDGATIAVGGKAYDGPGGGHYVEPTLVTGAHGKMRVAQEEVFGPFLTVLPFKDEADAIEVANDIRYGLTGYVWTNDVGRALRVADALEAGMIWLNSENVRHLPTPFGGMKASGIGRDGGDYSFDFYMETKHVSLARGTHKIQKLGI

SEQ ID NO: 16248 - protein, 69 aa, Zea mays
MADWGPVVIATVLFVLLTPGLLFQLPAHGRIVGFGTMHTSGLAILVHAVLYFALITIFLIAIGVHIYAG

SEQ ID NO: 16249 - protein, 376 aa, Arabidopsis thaliana
MSDLPPDLVEDILSRVPATSLKRLRFTCKQWNSLFKNRRFTEKHFCKAPKQSHVLLWKDYTVCPMSINLNFSGSSIEFKSVLSLKDSHYNSEQVYIAKVFHCDGLLLCTTKDHRLLVWNPCLGETRWINFENDYKPYSRFSLGYKNNKSCRSYKILRFWTSYLTPNHIGLRYNIYEFTTDSWRVLIDKVSLNYFLIESENGVSFKGNTYWLALDEETNFLLGFDFTMERFKRLCLPSNKNCDTMVLSVVREEKLSVSHQNFCSSKMDIWMTNRIDSETAMSWKRYFSVEFKILSMCHSLPFCNSFLIDEEKKIVISTVRGNENMVNIIGAYNAYYAEVPVESTNWPCSPYFVSYVPSLVQIQQCKSKENNKTSLEM

SEQ ID NO: 16250 - protein, 382 aa, Arabidopsis thaliana
MYNLPRDLPEEVLCRIPLTSLRPVRSTCKKWSTLSKCGSFAKKHLAQAKVLADAKEFMVVLMMNFRVYLMRVNLQNNVVESSSSSSSSSSSCIKREAKLISLGDEEADISQVFHCDGLLLCISITESKTRLVVWNPYWGHTRLFEPTHQFNKFDSYSYALGYDKSRKSHKILRGITCLDPFKIYDFNSDLWRDLDVTPEWHLWQMLHGVSLKGNAYWFARENYTETMDTDHFFLLCFDFTSETFGPPLPLPFEFAVSEDTMSVSSVREEQLVVLYQPWDYLQLDIWVTSKIEPNAVSWNSKVFLSVSLKQLVSPQFQLTFGSFFIDEEKKVAVVFDKDYDNKRNIAYIFGVDGSFKAVDLGDSDRKCFPLVCSYVPSLVQLN

SEQ ID NO: 16251 - protein, 707 aa, Oryza sativa (japonica cultivar-group)
MGKSSKKSAVEVAPTSVSVSEGKSGKKGKRNAEDEIEKAVSAKKQKTVREKVVPSKEEAKKVKKQPPPKKVESSSSEEDSSESEEEVKAQPKKTVQPKKAAQPAKEESSDDSSDDSSSDDEPAKKPVARPNKAALSTNSSSSDDSSDESLSDDEPVKKPAAPLKKPVALATNGSKKVETDSSSSDSSSDEESDEDDKKTAAPVKKPSVAAIQKKTQESDSSDSDSDSESDEDVPTKAPAVAKKKEESSESSDSESDSDSDDEAAAVKKEEESSDSSDSDSESESDSDEPAKPTIPAKRPLTKDTKKGQSKDESEDSSDESSEESGDEPPQKKIKDSTTSGTTKPSPKATKKEISSDDESDEDDSSDESSDEDVKQKQTQAKKQAPVAQESSSSDESSEEDSDMESDEPAKTPQKKETAVSVGSNKSATKPGQEEPKTPASNQNQATGSKTLFVGNLPYNVEQEQVKQFFQEAGEVVDIRFSTFEDGNFRGFGHVEFATAEAAKKALELAGHDLMGRPVRLDLARERGAYTPGSGRDNSSFKKPAQSSGNTIFIKGFDTSLDIHQIRNSLEEHFGSCGEITRVSIPKDYETGASKGMAYMDFADNGSLSKAYELNGSDLGGYSLYVDEARPRPDNNREGGFSGGRDFNSSGRGGRRGGRGDGSRGRGDRGRGRGFGRGDRGHGGRGTPFKQSAGTPSAGKKTTFGDDD

SEQ ID NO: 16252 - protein, 592 aa, Pseudomonas aeruginosa UCBPP-PA14
MSSKKVAEIVVETLEAAGVRHCYGIVGDTLNHVTDAIHRSQIQWVHVRHEEAAAFAAGAESYISGRLTACAGSCGPGSLHFINGVYEAQRNRAPMVLIASQIVTPQLGMEFPQEVDFKAVYASCSVFCEQVHSPEQARRVLALACQAALNRRGVAVVILPADISQATVKDDLPFSVHFPQPVLRPSDAELQDIARLLAHGKKIGIYAGSGCQGAHDLLVALADRLKAPIAHTSRAKDFVEYDNPFNMGMTGMLGIESGFHMMTECDTLLLLGADFAWAQFYPQKATLIQVDRDGSHLGRRHPVDLGVVGDVIPTLEALLPLLEVREERSFLDECLKHRERSLRTLEKEEQAGKGELIHPPAPGQPARPARQRGRPVHRRRRLGDGLAVASHPQQRQAPHPHQPGPRHHGQRHAPGAGTEEGLPRAPGDLDLRRRRPGHAARRPADGHPGKTADQGSGAEQCLAELRRAGTEGRGPAGQLHRPAQPGLRPARRGDRLPRTQGDALRGSRGGGAGVPRPARSGAAGRAYQPCGAGDAAEDRVRPGRRHRPLRRQGRAQRALQGRRDATGEQPAEMSRQRRGPPATGPRRAGADS

SEQ ID NO: 16253 - protein, 412 aa, Oceanobacillus iheyensis HTE831
MNKRVVITGLGALSPVGNNVDEMWESVTTGKSGIDFVTKVDKDLFPAKVAAEVKNFDPTLYMDKKDARKMDPFTQYAVAAAKMAVEDANLTINEANAERVGVWIGSGIGGMKTWEDQHTKFMEKGAKRVSPFFVPMMIPDMAAGQVSIQLGAKGINSCSVTACASGANSIGDAFKAIQRGDADIMISGGTEAPISDMAFAGFSSSKALSTNEDPQKASRPFDKNRNGFVMGEGAGILILESLESALQRDATIYGEIVGYGATGDAYHITAPAENGEGATRAMQIALKDANLEPSDVQYVNAHGTSTDLNDKYETQAIKAVFGDHASDLAISSTKSMTGHLLGAAGGIEAVISIKAIQDSIIPPTINYETPDPDCDLDYVPNEARKQTVDAVVSNSLGFGGHNVALVFKKFVK

SEQ ID NO: 16254 - protein, 485 aa, Nocardia farcinica IFM 10152
MTTTAAAGREAATQVPPLTQEETIASLGKYGYGWADPDAAGAAAQRGLSEDVVRDISAKKNEPEWMLEQRLKALRIFDRKPMPNWGSNLEGIDFDNIKYFVRSTEKQAASWDELPEDIKNTYDKLGIPEAEKQRLVAGVAAQYESEVVYHQIREDLEAQGVIFLDTDTGLKEHPEIFQEYFGSVIPAGDNKFSALNTAVWSGGSFIYVPPGVHVDIPLQAYFRINTENMGQFERTLIIVDEGAYVHYVEGCTAPIYKSDSLHSAVVEIIVKKGGRCRYTTIQNWSNNVYNLVTKRAKAEAGATMEWIDGNIGSKVTMKYPAVWMTGEHAKGEVLSVAFAGEGQHQDTGAKMLHLAPHTSSTIVSKSVARGGGRASYRGLVQVNKGAYGSKSTVKCDALLVDTISRSDTYPYVDIREDDVTMGHEATVSKVSEDQLFYLMSRGLTEDEAMAMVVRGFVEPIAKELPMEYALELNRLIELQMEGAVG

SEQ ID NO: 16255 - protein, 475 aa, Nostoc sp. PCC 7120
MSASSNSSKIKFGTDGWRGIIADDFTFPNVRKVTRAIASYLETAYTKDRPVLIAYDTRFLADQFAQTAAQVLADLGWNVKVTDRDCPTPVIAYNARHLNSAGALMFTASHNPAPYCGIKYIPDYAGPATPEITDTIVANIESASDELPSGKPSGTISTFDPKPDYLQFIYTLLDIERIKSAQLKVKYDALYSTSRGYLDEVLLESGVQLESFHTWRDVLFGGGMPEPKGEQLVELVEAVRRDHADLGLATDGDSDRFGIVDELGNVLTPNTVLLVLARHLIKNKGKTGAIVRTVATTHLLDNFAAKYGLTIYETAVGFKYIGEKMRETAVLIGGEESGGLSIIGHIPEKDGVLADMLIAEAIAYEGKPLSQLVKEAIAEADGPLYNNRLDLHLTEAHKVAVIDSFTKNPPSEVAGIKVKEVGRKDGIKLYLEEGSWVLLRPSGTEPLVRVYLETNSPEKLSKLEQELESAIAKLG

SEQ ID NO: 16256 - protein, 343 aa, Corynebacterium glutamicum ATCC 13032
MRIATLTSGGDCPGLNAVIRGIVRTASNEFGSTVVGYQDGWEGLLGDRRVQLYDDEDIDRILLRGGTILGTGRLHPDKFKAGIDQIKANLEDAGIDALIPIGGEGTLKGAKWLSDNGIPVVGVPKTIDNDVNGTDFTFGFDTAVAVATDAVDRLHTTAESHNRVMIVEVMGRHVGWIALHAGMAGGAHYTVIPEVPFDIAEICKAMERRFQMGEKYGIIVVAEGALPREGTMELREGHIDQFGHKTFTGIGQQIADEIHVRLGHDVRTTVLGHIQRGGTPTAFDRVLATRYGVRAARACHEGSFDKVVALKGESIEMITFEEAVGTLKEVPFERWVTAQAMFG

SEQ ID NO: 16257 - protein, 170 aa, Brassica napus
IFPKKHEIDLPQFKLLLFYSSSPLIRSLFAAGGLISFIPSQPDRFDLVSSDKKVDSLGLIFFYETRHVAFGSLRLASSSASGAIRRFKVRVLGPSRTGMPSTTSEIWLLGFCYKISEALNRREEAEAGCVWAAFRQDFSSLKLITYRRGLESIGETTYISDVGWGCMLDT

SEQ ID NO: 16258 - protein, 306 aa, Rhodopseudomonas palustris CGA009
MTILEQGSGAAPQAAADLIKDTTTQSFVRDVIEESKRQPVLIDFWAQWCGPCKQLTPILEKAVRAANGKVKLVKMNIDEHPSIPGQMGIQSIPAVIAFVDGRPADGFMGAVPESQVNAFIEKLTAGMPGGAPTAAELLQEAEAVLAEGDVQTAASIYAEVLRADGTNVAAIAGLARCYMQTGATEQAKKTLGLVPEAKREDAAVKAVQAMIDLAEQAQSLGPIAELEQKVAADPLDHQARFDLAIALNAADRREDATTHLLDIVKRDRKWNDDGARKQLVQFFEAWGPTDDATVEGRKRLSTILFS

SEQ ID NO: 16259 - protein, 371 aa, Vibrio vulnificus YJ016
MPLNHSCPPLWGHLSSFYPNKECSMFFEWQGNEPATLQCVDKFFETDDTVSIRLADLTESLLFQFKPGQFVNLGVEIDGKMEFRAYSISSLAGEEYLQFTIKRVEGGKVSNFIIDSLLIGDTVQALAPAGEFNCVDHPPRELDGQGKALLISAGCGVTPVFAMAKHWLSNEMNVDIEFLHIARSAQETIYFDHLSTCQSAYAHFHLKLLLKDAQGTTHPQGRFNAQWLQDLVPDFATRTIYLCGPNQFMQDTQDYLQALGFDMNHFYHESFTPEKVEAMEASDEEVCISVPDFAQTINAKKGQLLADVLENAGLPLIVACRSGICGSCKCKVANGQVRSISQETLTADEIAQGYVLACSSHIESDLDVSLH

SEQ ID NO: 16260 - protein, 711 aa, Solanum bulbocastanum
MKPGDVLNHSQVLDSEGGRFKLGFFSIPQTNKTYLGIWYAGDPVEKKLWIANPNTPILNNSGLLTLDSTGALRITSGGKTVVNIATPLLTGSLIARLQDSGNFVVQDETRNRTLWQSFDHPTSCLLPGMKLGYNLTTRQNWTLTSWLVSSAVPAPGAFTLSLEAIQDAFQLVVSRRGEVYWTSGAWNNQGFPFLPSFRDSATTYQYNLNLVSGTDGMFFQFEATKGSFPSLELFSDGAIAAGDGSIYTRYNKFCYGYGGDDGCVSSQLPECRKDGDKFEQKRGDFIDLSGTTTSYYDNASISLGDCMQKCWEHCSCVGFTTLNSNGTGCLISNGKRDFRVDESGEKRKKEEHIREMNAADSFNNTNLKEEDVREVQDLKIFGFGLIMAATNNFSSDNKLGEGGFGPVYKGQFPDGREVAIKRLSRTSGQGLAEFKNELILIAKVQHRNLVRVLGCCIHGDEKMLIYEYMPNKSLDFFLFDPERKKLLDWQKRFEIIEGIAQGLLYLHKYSRMRVIHRDLKASNVLLDENMNPKIADFGLARIFKQNETEAVTRRVVGTYGYMAPEFAMEGAFSIKSDVFSFGVLMLEILSGRRNASLQQFNRPLNLIGYAWELWKEGCGLELKDPDLEDLYDTEQFLRVIHVGLLCVQEGATDRPTMSDVISMLCNGSMSLPIAKQPAFFTGRDEIESYSSSNKTEQCSINDCSITVIEAR

SEQ ID NO: 16261 - protein, 138 aa, Candida albicans SC5314
MQCSALRKNGHVVIKNRPCKIVDMSTSKTGKHGHAKVHLVAIDIFTGKKLEDLSPSTHNMEVPNVSRQEFQLLDIDDGYLSLMTADGDTKDDVKVPEGELGDKLQSEFDEGKDLIVTIISAMGEEAAISYKEAPKGSA

SEQ ID NO: 16262 - protein, 318 aa, Trichodesmium erythraeum IMS101
METYEFDVVIIGGGPAGCSCALYTSRADLKTVILDKNPAVGALAITHKIANYPGVAGNISGNALLDEMREQAISFGTKYQRAQVFGIDVEGSLKKVYTPEGTFLGRSLVLATGAMGRKSSLRGESEFLGRGVSYCATCDGAFFRQKEVAVYGVNQEAVEEAQFLTKFVSTVHWLTNKEPQHEDAHVQVLLSQPNVKHWNFTRLTSIQGNESGVTNILMKTRGEPEVASLQVDGVFVYQSGSRPITDYISPDIILIDNGGVKVDEMMATNVEGVWAIGDIRNTPFQQAVVAASDGCIAAMAIDRFLNKRKGIKRDWDHS

SEQ ID NO: 16263 - protein, 745 aa, Methanosarcina mazei Go1
MAPVETTERLGRSLGFFSTFAIGTGTMIGAGIFLLPGIAMANAGSGAIISFLLGGLITIATSISMAELATGMPLAGGSYYYISRTMGAAFGAVIGLGSWLALIFKGTFALIGLAEYAQIFHPMPIYLVAAVTGVLLLIINFRGAKSSGSLQNFIVVILLLILFVFIGKVSFEVRPENLLPVAPHGVVSIFTTAGMIFISYLGLAEAAAVAEEVKNPSKNLPRAFIASAVVVTLFYAGIMAVVAGFSGPEGGASTVTPLADIAGFIAGDSGKFFIAFSALLATLSTANGAILSSSRFPFAMSRDALMPKWFVSIHKKYETPHNAILVTGSVMVLLLFLFDIEQLARLGGAFNILIFILLNMAVIILRKRTLPGYEPTFRDPFFPFTQIFGVVGSMLLLPLLGGLPLLFSVLMIFAGAGWYMFYGKDKAMPAYNLFDLLENNVERVSAEPEPVGRVLVPVSNPGHERDLLKLADLLGNEIICLHVVEVPSQISLTVGQELYHEKQIEIDSRFRDYFEQYPAKFGNKRDYIVAFDHTISNSIIEQAEIENADIIIMGWHDSKRFKYSFGDVTNDVLLSSKSQIALLKGHLPDSIKKVLVAYNGRENSVHGLSLAKKIAENTGASIRIISIVSPDEDPEKKAKIAEELEGLVKKIPSTPASFKLLERYSIEDAILEVSNGYDLTIIGDSSERFKISLLGTLSQRIARHARKPVMIVKKSKPISKESLNYLLKKYARKAYAKFRKEKGRD

SEQ ID NO: 16264 - protein, 112 aa, Rhodopseudomonas palustris CGA009
MKLVVAIIKPFKLDEVRQALTEIGVHGMTVTEVKGYGRQRGHTEIYRGAEYIVNFLPKLRIEIAVDSALADKAVEVITRGARTGQIGDGKIFVTPIDRALRIRTGETDVDAL

SEQ ID NO: 16265 - protein, 306 aa, Bacillus clausii KSM-K16
MIYTVTLNPAMDYFVALDSINKGGVNRAAHDYKAPGGKGINVSRVLKRIGHPSTALGFIGGFTGEYIKANVEADGVHTSFIEISGDTRINIKLKADVETEVNGVSPAIAANDVAALEEQLTQLKANDVVVFAGSVPPSLETNVYAKWSKLLKDRGVSVFIDTSGKPLEEAVAAQPDFIKPNQHELAEFAGEAIDSLEAAVPHAKALVAKGIGHVFVTFAGDGALLATEQSILLATTPRGTVKNSVGAGDSVVAGFIGATAEGMSLPEAFRFAVASGSATAFSTGFAERTTIEALMDEVAVTIYREG

SEQ ID NO: 16266 - protein, 342 aa, Mesorhizobium loti MAFF303099
MMSERLEDIAAAIVANGKGLLAADESSGTIKKRFDVIGVESTADSRRDYREMMFRARDAMTKYISGVILYDETIRQKAADGTPLVDIIKASGAIPGIKVDAGAKPLAGFPGDTVTEGLDGLRERLADYYKLGARFAKWRAVIDIDTGKGVPSANSINSNTHALARYAALCQEAGIVPIVEPEVLMDGAHDIGTCYDVSKATLIKLYDELHAARVVLEGTILKPNMVLSGKKSGTVDSPEKVAEMTIKLFRETVPAAVPGIAFLSGGQEDEEATANLNAINAIGPHPWKLTFSYGRALQAAPQKAWSGKASNVAAGQAAFTHRAHMNYLAALGKWKASLEQAA

SEQ ID NO: 16267 - protein, 375 aa, Methanopyrus kandleri AV19
MEFDVVVVGAGPAGSVAAWAAAEAGCDVLILERKAEIGVPKQCAEGISARALEEVGIRPDDGWIAAEIERGILSLPSGSKFEVEVEGYVLERRVFDKWLVVRAVEAGAEVELLAHARRALLDEGRVVGVEYEGEDGVHEVRARIVIAADGIESRIGRTAGLVPQLEPDHICTCAQYEVVGDRYDPKAFMIHFDPERIPGGYAWVFPKGENRANVGVGIRGSESSPGLALKTLDELVEGPLSELVAGTPVEVNVGGVPVCGPVERTYGDGILLVGDAARQVNPLTGGGLNTALICGRIAGEVAVEAIEEDDTSASFLKRYQDRWEEEFRDTFECAREVAEMLPELDLKEVVEFLSSVENLEEMLRTSGILEDVWWG

SEQ ID NO: 16268 - protein, 322 aa, Oryza sativa (japonica cultivar-group)
MKGEYPERMGQPECQYYLKTGTCKFGPTCKFHHPREKAGIAGRVQLNTLGYPLRPSEKECAYYLKTGQCKYGNTCKFHHPELFNAMASSRGSPIYPSVHSSATAGPPYTGTMASWAFPRGSFIPSPRWQNPSNYAPMIVPQGLVQVPSWNSYTGQMMPVSSSESRLQSPGAQQTYGTSQQVDASAGNQGMLSPYRSSSYPVPQYALQRENVFPERPDQPECQYYMKTGDCKFGAVCKFHHPRVRSMPTPDCVLSPVGLPLRPGEELCKFYSRYGICKFGANCKFDHPTMAPPMGVYAYGSASTNVPMVRRLLQSPSASAYTS

SEQ ID NO: 16269 - protein, 128 aa, Saccharomyces cerevisiae
MNKVNNCDTNEAAYKARYRIIYSNVISKNNPDLKHKIANGDITPEFLATCDAKDLAPAPLKQKIEEIAKQNLYNAQGATIERSVTDRFTCGKCKEKKVSYYQLQTRSADEPLTTFCTCEACGNRWKFS

SEQ ID NO: 16270 - protein, 400 aa, Pantoea agglomerans
MAASESERTGGGNRPMAVIINDTTLRDGEQSPGVAFRASEKLEIAQALVNAGVRELEAGTPALGEEECVRLAILRRQLPDTVMMSWCRMNSAEIHDSARVGMDWVDISVPASDLLREQKLHRPWPAVIASLKPLVQLAHRLGMRVCMGCEDASRSADETLHMLAEVAADLGIERMRFADTLGILDPFSTFTRISALRQHWHGGLEIHAHNDLGMATANTLAAVRAGATHVNTTVLGLGERAGNAALESVTLSLDRCLHLDCGIDFTELPALCRLVAAAAGRTIDVQHPLVGGQVFTHESGLHVAALLRDPRSYQGIDPSLVGREFNLVLGKHSGRQAVSGICARLGYILSETQTLLMLQEVKRFAEHFKRNPGEDEVIAMCQMRMDDQIPFEGQLQAQGG

SEQ ID NO: 16271 - protein, 130 aa, Methanopyrus kandleri AV19
MPEFKVVVADPEKARSYQVEVKGEDAEKLIGKRIGDVIDGEIVGLPGYKLKITGGTDKDGFPMRPDIHGPVRVRLLLSGPPGFRPERKGERRRKTVRGNTISEDIVQVNTVIVEYGDKPVEELLGEGGEE

SEQ ID NO: 16272 - protein, 422 aa, Streptomyces argillaceus
MNRRVVITGIGVVAPGAVGVEAFWEQLTAGRTATRTISLFDASAFRSRIAAEVDFDAARHGFGPAEAERLDRATQFALVSAREAVADAGLDGKTDPSRTGVALGSAVGCTTGLDTQYNVVSEGGSDWYVDHTRAVDHLFDYFVPSSMAAEVAWSIGAQGPVALISTGCTSGLDSLGHAVALIREGSADVMVAGATEAPISPITVACFDAIKATSPRNDDPATASRPFDRSRNGFVLGEGSAVLILESLENARRRDAHVYAEISGFASRCNAYHMTGLRPDGIEMAEAIRTALDEARLDPTAVDYVNAHGSGTKQNDRHETAAFKRSLKDHAYRVPVSSIKSMIGHSLGAIGSLEVAASALAIEHDTVPPTANLHDRDPACDLDYTPITAREQRTDTVLSVGSGFGGFQSAMVLTAPGLREAA

SEQ ID NO: 16273 - protein, 113 aa, Zea mays
KKGRPTRPAGISCGEVASAITPCIFYARGQGSRADGPCYNVDRILNNTRRTTADRRAACNCLKNSVAGVSGLNAGNAGIIYSKCGVSIHYTISIFSDCYTVNLTLNDYYCSRR

SEQ ID NO: 16274 - protein, 279 aa, Picea abies
ASMEEDQWCEMNFRQAEALVLNFSASNYFLPSFLSSMTKLKVLIVLNYGSKRATVNGLPAPSSLTQLRTIRLERLNVPSLQEQSRAFQSLEKLSLSLCEGLGNMSRFNSTQSSLKLPIMLDFNLDHCCDLEELPPGICDMSSVENWSITNCHLLQKLPDDMGKLCSLRMLRLSACLGLKELPDSIGKLGKLEYLDISLCECLKELPEEIGQLKKLQVLDMRECSRLRKLPKSVEGLKSLKHVICDEKIGQQWLRVKNSVLKELRVEIVDAHFSLDWLDG

SEQ ID NO: 16275 - protein, 405 aa, Methanosarcina mazei
MSESEQYSRNTLMDFIDYRPLDIEICDVTLRDGEQTPGVVFSKEQKLAVASELDSMGIEVIEAGFPVVSADEKEIVKEIANQGFNSRICCLSRAVKGDVDAALECDVDIVSIFIAMSDMHLKYKYHRSLEDMLGCAKEAIEYATDHGLKVRFAAEDASRTPVERLKQAFKEVENEYKVQYVSLADTVGILNPTTTNYLVSEIFKSVNTAICIHCHDDLGMATANTLAAAEAGAKQLHTTVNAIGERAGNASLEEVLVALRVQYGIERYDTTKLNSLSEMVSEYSGITPSVNKAVVGKNAFTHESGIHVAAILEEPRTYELFLPEMVGGKRNLVVGKHTGKKALKGIINSIGFCLEREELCALIEKVKVCTEEKHKSISRDQLERLITQVKQEQKPSGSEKEKFSI

SEQ ID NO: 16276 - protein, 456 aa, Oceanobacillus iheyensis HTE831
MLKKSFLIFTALLLLATPVYAATPTPESLELSVNLIWVMLGAFLVFFMHAGFAMVESGFTRSKNTLNILMKNFLTISVASILFFLVGYGIMFGSSAGSIIGSDGFLLSEISEIDFFVFQAMFVATCATIISGAVAERIKLGSYILIVAAMTTIIYPVVGHWVWQGDGWLTSLGFSDFAGSTVVHLTGAVGAFVVVLILGPRIGKYKGKKVNVIQGHNLPLGALGVFILWLGWFGFNGGSTLAADPSLVPYVIGTTLLSTSAALVSSSLYTKLRFKKVDASLSMNGVLGGLVGITAGAAEISLGGSIIVGLISGVVLVEGIRFLDTKLRIDDPVGAIAVHGICGIWGTLAIGLFSVNTGLFYGNGISQLGIQAIGVLAVVAWVAITAGGFTYVINKISQIRVSEEEEISGLDFAEHGSSAYNFKESLLEGTDNNSSSGLAERLNNNIPIGKTSNQSS

SEQ ID NO: 16277 - protein, 209 aa, Glycine max
MEMEASPSPSPSPKQVVARKLWNIVRIVFLMLRKGISKSKLAADFNLNLSFKRGKLAATKAIANTILHRSQNDDAVYPRDYEFSCSNSPALFHVIKRSTNKHRHHHHRCTTTTKFPHHDDVSTVQKVLEILNNNKVEASPLPGFGKSPIGRKLIRITDSPFPLKDEEGGDDNQVDVAAEEFIKRFYKDLNLQQKMAAIDSPYHYNLWDR

SEQ ID NO: 16278 - protein, 208 aa, Schizosaccharomyces pombe
MSAQKRVFLKVVILGDSGVGKTCLMNQFVNQKFSREYKATIGADFLTKDVVVDDKLVTLQLWDTAGQERFQSLGMAFYRGADCCVIVYNVNNSKSFDSVENWRQEFLYQTSQDECAFPFIIVGNQIDKDASKRAVSLHRALDYCKSKHGSNMIHFEASAKENTNVTDLFETVSRLALENESSRDDFVNDFSEPLLLSKPLNNTSSCNC

SEQ ID NO: 16279 - protein, 77 aa, Medicago truncatula
MVRCFSLGSVLILIALAASMVVLPLMLPPLPPPPLALLFFPVGIMAALVVLAFSPSENVKNVVVYSSSSSGIANSKR

SEQ ID NO: 16280 - protein, 113 aa, Oceanobacillus iheyensis HTE831
MKKLEAIIRPEKFQSLRDELSSIGIGGLTVTEVAGTGKQKGQTGVYRSTEFQIQLLSKLKVEMVIEESQLEEIVDIIIKSCKTGNIGDGKIFVSPVEEVIRIRTGERGMEAVL

SEQ ID NO: 16281 - protein, 156 aa, Glycine max
  misc_feature (80)..(80): Xaa can be any naturally occurring amino acid
  misc_feature (94)..(94): Xaa can be any naturally occurring amino acid
  misc_feature (108)..(108): Xaa can be any naturally occurring amino acid
  misc_feature (136)..(136): Xaa can be any naturally occurring amino acid
LHDFNYWKKEQHDTVVCALEDASLEDALSVPWRPVPERVSMLYSDKRVIEELEEDEGRSAGEASIADFSGLLDPKKERVXAQSLKKCLVSDLLXTRLVSSATGVPPAXGVIGGSLAPEVVRAISGRWRSLKDFLYXEASHGKGVIVDIWPKCVFND

SEQ ID NO: 16282 - protein, 132 aa, Arabidopsis thaliana
MDSQVQFFEGVEKRIEFDFAGTNLRDELNRAVLEKIVKPVECVIEGVLSGDHVDSYLLSASSLFVYDDLVIIKTCGATKIFECINGIVAAVGWNKLRSIKYTRGSFFRPDLQPYPHQRPCDEKRCVRLVPKS

SEQ ID NO: 16283 - protein, 365 aa, Lactobacillus sakei subsp. sakei 23K
MNNQLAQLQNWLVENNMDVAYISNPTNILYFTGFESDPAERVLALFVFADQDPFLFTPQLEVGSAKKAGWKLDVYGYLDHEDPYAIIADQIKKRMANPTRWALEKDDLPVQRYEAILKQFPNATFPGDASRFMENLKLIKTPEEIALMEAAGREADYAFEVGFNALKAGKTEQDIVAEIEYALMRKGVMHMSFDTIVQSGINAANPHGGPEANILTPDALVLFDLGTLHKGYMSDATRTVAFGKPDAKSLEIHKVCLEANLAAQDAVKPGITAAELDKIARDVITKAGYGEYFIHRLGHGIGTSEHEFPSIMEGNDMIIKPGMCFSIEPGIYIPDVAGVRIEDCVHVTETGAESFTHMTKELQTF

SEQ ID NO: 16284 - protein, 937 aa, Zea mays
  misc_feature (522)..(522): Xaa can be any naturally occurring amino acid
  misc_feature (542)..(542): Xaa can be any naturally occurring amino acid
EYDALLVDRFLNILQDLHGPSLREFVQECYEVSADYEGKGDTTKLGELGAKLTGLAPADAILVASSILHMLNLANLAEEVQIAHRRRNSKLKKGGFADEGSATTESDIEETLKRLVSEVGKSPEEVFEALKNQTVDLVFTAHPTQSARRSLLQKNARIRNCLTQLNAKDITDDDKQELDEALQREIQAAFRTDEIRRAQPTPQDEMRYGMSYIHETVWKGVPKFLRRVDTALKNIGINERLPYNVSLIRFSSWMGGDRDGNPRVTPEVTRDVCLLARMMAANLYIDQIEELMFELSMWRCNDDVRVRAEELHSSSGSKVTKYYIEFWKQIPPNEPYRVILGHVRDKLYNTRERARHLLASGVSEISAESSFTSIEEFLEPLELCYKSLCDCGDKAIADGSLLDLLRQVFTFGLSLVKLDIRQESERHTDVIDAITTHLGIGSYREWSEDKRQEWLLSELRGKRPLLPPDLPQTDEIADVIGAFHVLAELPPDSFGPYIISMATAPSDVLAVELLQRECGVRXQPLPVVPLFERLADLQSAPXASVERLFSVDWYMDRIKGKQQVMVGYSDSGKDAGRLSAAWQLYRAQEEMAQVAKRYGVKLTLFHGRGGTVGRGGGPTHLAILSQPPDTINGSIRVTVQGEVIEFCFGEEHLCFQTLQRFTAATLEHGMHPPVSPKPEWRKLMDEMAVVATEEYRSVVVKEPRFVEYFRSATPETEYGRMNIGSRPAKRRPGGGITTLRAIPWIFSWTQTRFHLPVWLGVGAAFKFAIDKDVRNFQVLKEMYNEWPFFRVTLDLLEMVFAKGDPGIAGLYDELLVAEELKPFGKQLRDKYVETQQLLLQIAGHKDILEGDPFLKQGLVLRNPYITTLNVFQAYTLKRIRDPNFKVTPQPPLSKEFADENKPAGLVKLNPASEYPPGLEDTLILTMKGIAAGMQNTG

SEQ ID NO: 16285 - protein, 397 aa, Streptococcus agalactiae 2603V/R
MAFSPIKKLLQDIKSGKMVVLMDDENRENEGDLICAAEMVTKESINFMAKFGKGLICLPLSNYYAEKLELAQMASHNTDNHETAFTISIDHLSTSTGISAEDRALTAKMVANDSSKAKDFRRPGHLFPLLAKEGGVLARNGHTEATVDLCRLAGLKECGLCCEIMAEDGSMMRKDELLAFAQKHDLAIATIKQLQDYRRQEEGGVVREIEIQLPTQFGHFTAYGYSEVVANKEHVALVKGDISSGEDVLCRLHSECLTGDVFHSLRCDCGEQLANALQQIEAEGRGVLLYMRQEGRGIGLINKLKAYHLQEEGLDTLEANLALGFEGDERDYGVSAQLLKDLGINSINLLTNNPDKIQQLEAEGICVKNRVPLQVAVTAYDLNYLKTKKEKMGHLLD

SEQ ID NO: 16286 - protein, 458 aa, Prochlorococcus marinus str. MIT 9312
MENKEKNSNLENVVIIGSGPAGYTAAIYAARANLQPLLVTGFNSGGIPGGQLMTTTFVENYPGFPDGVLGPELMDLMKAQAERWGTNLYESDVVSINTDLHPFELKTLDGTIKANSIIIATGASANRLGVINEDKFWSKGISACAICDGATPQFRDEELAVIGGGDSACEEAAYLTKYGSKVHLIVRSEKLRASAAMVDRVKANPKIHIHWETKVEKANGSEWLEKIETIHSQEGKGEINIKGLFYAIGHTPNTKFLDKKIDLDNKGYIACKPGRPETSVEGIFAAGDVVDSEWRQGVTAAGTGCMAALATERWLAEKNLAKTIIRETPEPDKKLNSSDFNEDEVNEDTFDSNSEWQKGSYALRKLYHESKKPLLVIFSSPSCGPCHVLKPQLKRIIKELNGAVLGVEIDIDKDQDIAKQAGINGTPTVQLFKDKLLKKQWQGVKQRSEFKEAIKNII

SEQ ID NO: 16287 - protein, 112 aa, Rhodopseudomonas palustris CGA009
MKIVMAIIKPFKLEEVRDALTAIGVHGLTVTEVKGYGRQKGHTEIYRGAEYAVSFLPKIKIEVAIANEQVEKTIEAITSAAKTGQIGDGKIFVIGLDHAVRIRTGEADAAAL

SEQ ID NO: 16288 - protein, 351 aa, Methanosarcina barkeri str. fusaro
MKKYSLDVADVSLNNLEKNMFKFDTDDFLKSLRCRVGCTRQEIFKAKELGFSKIVINTSLDPLVPIPDILKSIESLQSVLQTVCSNDQEIYLSIDNALEFPVEEVNIVDILDPFIAEYGIKRLILGDVNGKMDPFTTYNKLNLFTNITQCPVEYMGCNNYGMATANTLSALRAGVEYVATAVSGIGIPGVAAMEEVLMAARHLWKNEQVPNGYTIAADCENILRRAGIILPGEKAIIGKNVFAHESGIHVDGVIKNPNLYEAIKPEEVGLSRFLVIGKHSGTASLTQKFRQLDLSLSPQEAATLLDKVRYTAVLQKKPVTDAQLKTLYNLHMESIKESNVHLSIEGEISCD

SEQ ID NO: 16289 - protein, 346 aa, Geobacter metallireducens GS-15
MKKTLPQLVIMSVLCLLAALPALAQEEIPAAAKERFKAGLALIEKADKSADFLAALAEFEAAAALAPTWPDSHYNLAQLAAESDKPAKAIKEYRAYLALKPDAADRGAVEAEMARMKELIALKRKVGLPGVTFAAMADGIWVLQVLPGAGIEKTGLRKGHQIVGVGGKPLAGNKLEDLFKAIEANNITDTMSRGSSERMYSRMTRDTKTQGPVVVLNVKQSRQQEKPFLILCKKEMFRSKIIEIEEDEFEDEVLKAPLPVAVTFWGDSCEPCKEFVPVLEAESAKYAGKVKFVNINVDGNRKLADQLAVKEVPALMVYKGGSAVATATGKLPREKVAEMLQDAAGR

SEQ ID NO: 16290 - protein, 410 aa, Arabidopsis thaliana
MAMSNLPRDLLEEVLSRVPVKSIAAVRSTCKNWNSLTYGQSFTKKLYGKTMATKEKEFLVVMTMDLEVYLMRVNLHGIHKDDNNVKSSIMQKAKLIRLNDDRVRVDDICKVFHCDGLLLCITIGIRLVVCNPYCGQTRCIKTRRDYHITDNYALGHEKMKNSPLRNYKILVFHDKSFLQNSWFEIYNFNSDSWKVLYFTCDWKLPFSQLVVSLKGNTYWFAREMYIHGPRIDLPDFLICFDFTTERFGPRLHLPFHSRCVDTVTLASVREEQLAVLFQDSKTLILEVWITTKIEPNAVSWSSKVFLEVNMSPLTGFQFNRSFGSFFIVEEKNVVVVPIKGGHFKRNLAYIIGKDEYFKEVDLGVPSSYIYFSPHVCSYVPSLVQIKKDAQVMLQHHNVSAEKHHEFCASL

SEQ ID NO: 16291 - protein, 287 aa, Methanosarcina barkeri str. fusaro
MIRNEGFEIIDTTLRDGEQSAGVVFSVEERMNIISALDKAKVKWIEAGIPAMGKQECEDLKLMLNLPIKSNLIAWNRANLEDLKASIDCGFKFVHVSLPVSDLHIEHKLQKSRTWVLDQLKKCMEYLQSCKVTIIVGAEDASRADPEFLLQYAGIAASYGAIRIRYSDTVGCLDHFTTYRKIKEIADHSPPPVEIHAHNDFGLAVANTLAAYKAGAKFASVTVTGLGERAGNASMEETAFSLKRFYNYDCGIELEALPFLAEMVSKASERTLFPYKPLVGSLASNLF

SEQ ID NO: 16292 - protein, 245 aa, Bacillus cereus ATCC 14579
MIKLVLIRHGQSLWNLENRFTGWTDVDLSENGLSEAREAGAILKKNGYTFDVAYTSVLKRAIRTLWIVLHEMDLTWVPIHKSWKLNERHYGALQGLNKDETAQKYGEEQVHIWRRSVDVRPPALTEDDPRYEATDPRYKTLKKGEFPLTECLEDTEKRVLAYWHSEIAPTLKSGNKVIISSHGNTIRSLVKYLDNLSSDGVVSLNIPTSIPLVYELDENLRPIRHYYLSMDGEVPEGEIPKHISF

SEQ ID NO: 16293 - protein, 370 aa, Geobacter metallireducens GS-15
MKKAIRQLVITSLFALLTVSPLLAQEEIPEAARERFKAGFAIIEKADSPAGFRAAMDEFEAAAALAPRWPDIHYNLAKVAAETDKPAKAINEYRAYLALAPEAADRAAVEGDIARMKEMIARKRKLGLPGVVFAAMPDGIWVMELAPGSRVGKTLLRKGYKILAVEGESVVGAKLDGFFRAIETQSAKVAAAKSEEKKQPGQIPAGFRSEMGFIRSQKFMRTTQPNAAGNAVEETGPAIAFTVISPGSTDTGKLFFKQSMFRSSVIEIEEDEFEDEVIKERLPVVVTFWGSDCGPCQDFVPAVEAQSARYAGKVKFVNVNVNENRKLAGQLAIKGVPAMMVYKGGSPVSTTTGRIDNAKLAELLQGVAAN

SEQ ID NO: 16294 - protein, 494 aa, Aspergillus fumigatus
MASRRLAFNFNQALRSRAALKAVQPVKRGFASPVALPSTTQSTTLSNGFTVRKLIKIHLNGFAIPLIDDRLPLNTPHGLRHPLLASGSTPAAEQRLTRPTEPHISLSTLLSRTQHQLELEIENMGAHLNAYTSRENTVYYAKSFNNDVPKAVDILADILQNSKLEPAAIERERDVILREQEEVDKQLEEVVFDHLHATAFQNQPLGRTILGPKENIQTISRENLTDYIKTNYTADRMVLVGAGGIPHEQLVKLAEQHFGSLPSKPPTSAALALTAEQKRTPEFIGSEIRIRDDTLPSAHIAVAVEGVSWKDDDYFTALVAQAIVGNWDRAMGNSPYLGSRLSSFVNHHNLANSFMSFSTSYSDTGLWGIYMVSENLTRLNDLVHFALREWSRLCYNVSAAEVERAKAQLKASILLSLDGTTAVAEDIGRQIITTGRRLSPEDVERIIGRITEKDVMDFANRKIWDQDIAISAVGSIEGILDYQRIRSDMSRNSL

SEQ ID NO: 16295 - protein, 238 aa, Methanosarcina barkeri str. fusaro
MGHLILVRHGEPGLKPEERLAGWVDISLSRKGIEEALQCAAELEKFELDLAFASNLVRTQETLFLILSGQKKTGVVVHESTGKKGNPGKTDWYSYPEKLGKKLIPIYFTPYLNERYYGKLQGRKKQKMEEKYGAEKLASWRWNFQPGPPEGESLKVVYERAVPYFKEKILPAVKAGKNVLICAHQGSLRALVKYIEEISDEDIKEVKFSTGELAIYRYSEGKLIRENAEMSSEIKRNL

SEQ ID NO: 16296 - protein, 121 aa, Triticum aestivum
  misc_feature (109)..(109): Xaa can be any naturally occurring amino acid
MASSIEMAPFAVGQVVLVPLVGAMLLHVPEAGLSCGQVSSALSPCISYARGNGASPFVACCNGVRSLASSARSTADKQTACKCIKSASAGVNAGKAPGIPTKCGVRVPXAISFSVDCFKIR

SEQ ID NO: 16297 - protein, 381 aa, Staphylococcus epidermidis RP62A
MLTEKEQDIIKQTVPLLQDKGTEITSIFYPKMFEANPELLNMFNQTNQKKGMQSAALAQAVLAAAMNINNLGAIKPAIMPVAHKHCALQVYPEHYPIVGENLLAAIQDVTGLESDDPVIQTWAKAYGEIADVFIKLEQEIYNHMLWKGFKPFKITNITQETSDIKSFTVESEEYDLSQFEPGQYITVDVSSEKLPYRAKRHYSIIDGDENHLVFGVKRDVTTEHEGEVSTILHDEISEGDMINLSAPVGGFSIENTERPQLFIGSGVGMTPLVSMFKKAASLNVPTQMIQAVVTEDERPFAQKLDSITDNYEQAQLHLHVKDKEGYLEAKELEQYLSEQPEIYICGGTKFLHSIINSLKELNYDMNHVHFETFIPRLSVQV

SEQ ID NO: 16298 - protein, 595 aa, Porphyromonas gingivalis W83
MTNDILQRLASLRKVMSHEHIDAYIIPSSDAHLSEYTPEHWKGRRWISGFTGSAGTVVVTANKAGLWTDGRYFLQAGQQLEGTSIDLYKEGIPGTPSIEQFLAAELKAGQTVGIDGRCFPAGAASATESALDIYGIKLRTDKDLFDEAWRDRPEIPRGELFVQPVKYAGESVKDKIARVNKELATQGANATIITMLDELAWIFNLRGRDVECNPVGVAFGYVSARESVLFAFPEKITKEVRSAMEEGGVKIMPYEAIYEYIPALPAEERLLIDKKRITRALYDLIPAACRKIDGVSTITALKAIKNEQELSGVRAAMVRDGVALTRFFMWLEQEWEAGRNHDEVVLGEKLTAFRTAQPLYFGDSFDTICGYQDHGAIIHYRATPESAHVVKREGVLLLDSGAQYHDGTTDITRTVALSTPSAELKRNYTLVMKGHIAIATAQYLEGTRGSQIDVLARKALWDNGMNYAHGTGHGVGCFLNVHEGPQNIRMDENPTEMKIGMITSNEPGLYRSGKYGIRIENLVVTKLNVETEFGRFFGFETLTAFYFDNELIEKSLLTADELKWYNDYQQWVYKTLAPELTTEERAWLKEKTLTI

SEQ ID NO: 16299 - protein, 364 aa, Nicotiana tabacum
MAFQIARRLLRSRASSSIRYLDRSFSSESNSNLIRATLFPGDGIGPEIADSVRQIFKTAEVPIEWEEHYVGKEIDPRTNSFLTWESLESVRRNKVGLKGPMATPIGKGHRSLNLTLRKELNLYANVRPCYSLPGYKTRYDDVNLITIRENTEGEYSGVEHQVVRGVVESLKIITRQASLRVAEYAFHYAKAHGRERVSAIHKANIMQKTDGLFLKCCREVAEKYPEIKYEEVVIDNCCMMLVKNPALFDILVMPNLYGDIISDLCAGVIGGLGLTPSCNIGEGGIALAEAVHGSAPDIAGKNLANPTALLLSAVTMLRHLELHDKADRIQGAVLNTIAEGKYRTGDLGGTSSTTDFTNAICDHL

SEQ ID NO: 16300 - protein, 423 aa, Ehrlichia ruminantium str. Welgevonden
MTGKRVVITGLGLVTPLGNDIKTVWDLLCKGTSGIKKINRFDASDLDCKIGGQIIMKSDSEIHTFDPANWIEEKELKKMDIFIHFGIAAAIQAVNDSNLLAYSNLDYNRVGVIVGSGIGGLAFIEKTSICLQDRGPKRISPFFIPASLINLLPGHISIKYGFAGVNDGGVTACATSAQTIGNAARIIKSGEADVIIAGGAESAICRMGVAGFAALKALSTKFNDTPELASRPWDKQRDGFVMGEGSGIIVLEDYEHAKKRNAKIYAELIGYGMTADAYHITAPHPEGKGGKKSMELALSSAQLSPDSINYINAHGTSTPIGDSTEIHAIKEVFKDSTYKIPISSTKSSIGHLLGAAGSVEAIFCILAINTGIVPPTLNLYDSSEDPKLNLVPLTAQEHTINYALSNSFGFGGTNVSLVFSKLY

SEQ ID NO: 16301 - protein, 191 aa, Glycine max
MESNAPVLAEKVWSMVRVLLFMLRKGISKGKLMMDLNMMLKRRGKLAGKAIANLMSHNHNHRGSHKSQLRFSAPREYEFSCSNTPHNLFPTAGKRHRHFFACVHAPPTQDDDVVTVNAMKAVLEMLNNNDVVKVEASPALPGFGRSPIVRQLRVTDSPFPLRDSDHDNDHQVDKAAEEFIKRFYKDLKKQD

SEQ ID NO: 16302 - protein, 328 aa, Gibberella zeae PH-1
MVKHASKATVHQLAKEYSSIIKGKTILTTGVSPGGLGALFVEAIAVAEPELAILAGRNINKLQQTADHLASKHPNLKTKLLTLDLSSLASIRSAAQQVNGWSDVHKIDVLVNNAGIMATDFKLTEDGFENQFASNHLGHFLFTNLIIDKILAAEAPRIVSVSSNGHRLGPIRWGDANFSNGDLYNRWNAYGQSKTANMLFAISLAEKLGSRGLQAYSLHPGAILETSLGDHLANLDSLVEADRAIGDPWGWVDWSTVPVTAEVGAATHVFAAFDPDLKDHNGAYLLDCRLADPFTDTVRPWATSSTEAELLWRLSEKMVGQKFPLKLQ

SEQ ID NO: 16303 - protein, 123 aa, Methanosarcina barkeri
MKEVTAVVRPNKMSVTKDALDKIGYRRMTAIPVLGKGKQRGISGELNFYIQPKLLAKRYSTGMKYIPKRLLSIVVNDEDVDQVIKTIIGVNQTAQIGDGKIFVESIDEVIRIRTGEKGELALK

SEQ ID NO: 16304 - protein, 390 aa, Candidatus Tremblaya princeps
MARSRRRRIAILDTTLRDGEQAPCIVMGPDAKAEMARRLEIAGVDVVEAGFAASSSSDFEAIRRISCCVRGCVVCSLARAVGHDVRKAAKALEFARHPRIHVFIGSSSLHIEEKLRMHPLDVVDRAAAMVRLARAYCDDVEFSPEDSSRADPSFLCSLAKAAVEAGATIVNVTDTVGHGIPEQLSDVAGMLCRSVPISDRVTLSVHCHNDVGLALANTMAAIACCAGQAECTVTGIGERAGNAALEEVVVAAGLEYSGAGMDVRVDARHMRSIAQLASAIARRRLPATKPVVGCHAFAHASGIHQDGVIKNRRTYEALRAEDVGGRGGSIVLGKLSGTHALRNRLEGGGVTIGAMGVPRLATMMKGLASHLPVVYDSALAALHAIASRPC

SEQ ID NO: 16305 - protein, 153 aa, Zea mays
MSDDGDRTCPLCAEEMDTTDQQLKPCKCGYDICVWCWHHIIDMAEKEETVGRCPACRTCYDKDRIVKMAATCDRTVADKNVEKKHKTQKVKPKAAPTAAATSTVESKKHLASVRVIQRNLVYIIGLPAHLCNESVLECREYFGQYGKVLKVSV

SEQ ID NO: 16306 - protein, 376 aa, Gibberella zeae PH-1
MSFLFGRARTRTVADLPKQAREHVLKLEGPQGPSKVVTAEELARVLSQMKTILQGTPDISQEADTSPEQILQLVTGLIDEDLLHLLAVNLFRLPFESRKDTQVIFSYVFRFRPATAAPKSDPLALSYVVCNRPQVLVELCRGYDHKESATPAGSVLRELLKNEAAAAIILYDDGDEPGSSSKGLNAIDRDRPQSGRGVFWRFFDWVDKSSFEVAADAFTTFRELLTRHKDLVPRYLSANFELFFDKYNNILVQSNSYVTKRQSIKLLGEILLDRSNYSVMTAYVDRGEHLKICMNLLRDDRKMVQYEGFHVFKVFVANPHKSVAVQKILLMNRDKLLTFLSHFLEDRTDDEQFIDEREFLIKQIRNMPAVPVPPQR

SEQ ID NO: 16307 - protein, 570 aa, Arabidopsis thaliana
MASALECWTTRNAAGGCADDDFVDQVLMSSEDRSESLTAPPPSDQTSSAMQKRFQRLGRNVSDAIASLKNSLNLDSSRDNQNAATGGGRKLVWATVVRNLAKMYPGSQLPDKLVSNLRKHYDSLPLSYSQTGFDMKDVFVHIKLIEQAFGDDNPVFVIQEVCDEEADDQGSVFKLTFACTCSLPWSTISGSLDGALICCKKVQIFEKKGLTLGVVLLLVESGQEKMFKVKVVNALRSAVRKPKSTSVKLPFGLCGCEEQNAGVGEFGDVDVESIDQCYRHELDDLNTRIQLQMPPPSSSFSVSVDEWQTIQSGGDDIRKWLLNSDDLEFSGQLGPNSFKGVYRGTKVAIEKLKGCEKGNSYEFAIRKDFLELMTCGHKSILQFYGVCIDENHGLCVVTKLMQGGSLRELVLKKKKLQTKLIFQIAVDIAEGMKFINDHGVAYRDLNTQRILLDKQCNACLGDLGIVTACKSVNEAMEYETDGYRWLAPEMSNAYSFGMVLWEMVTGEEAYGSCSPVQAAVGIAACGLRPDIPKECPQVLKYLMIKCWNTCPSTRLNFSQIHCILLRAISR

SEQ ID NO: 16308 - protein, 643 aa, Nicotiana tabacum
MAVPTIALYASPPSSVCSTPYPCQINSHGSYDFDLNGRSSSSSSTSSSSGKSFVGGLSSLFSSPTVKANYSTGTEDLGSLWHDRGDELSSSFRCSSLSSSLKRDQSPVSVFQGPASTSSSGIGSCSRSPPRRIAGDVGSIRSGTGGLFNGFVRHALGSCVDHDPTTFRVLDVDSPSSGLLDELTFNMEEGFLESNSEPYAKDLLLNAQSRHKIFCDDFVIKAFYEAEKAHRGQVRASGDPYLQHCVETAVLLAMIGANSTVVAAGLLHDTLDDTFMTYDYIFRTLGAGVADLVEGVSKLSQLSKLARDFNTASKTVEADRLHTMFLAMADARAVLIKLADRLHNMMTLDALPLAKQQRFAKETLEIFAPLANRLGISTWKEQLENLCFKHLNPDQHNELSSKLVKSFDEAMITSSVGKLEQALKDDSVSYHVLSGRHKSLYSIYCKMLKKKLNMDEVHDIHGLRLIVENKEDCYKALRVVHQLWSEVPGRYKDYIANPKFNGYQSLHTVVLGEGMVPLEVQIRTKEMHLQAEYGFAAHWRYKEGACKHSSFVNQMVEWARWVVTWQCETMNRDQSSVGHTESIQPPCKFPAHSEDCPFSCKPNCGTDGPVFIIMIDNDKIVCARIPCKLNCQGSFGESWSRQF

SEQ ID NO: 16309 - protein, 396 aa, Thermobifida fusca YX
MERIVIVGGGLAASRTCEQLRSRGYEGELVMLCAEPHPPYDRPPLSKAALLEEEHDSTFPTDYAQLSVDVRLGVAATGLVPDARTVQTTDGELSYDALVIATGASPIRLPGPGRQFTVRTVEDAAQLRAELKPGQRVVLVGASWISAEVATAALRRGCSVTCIEAGPAPLSAALGADVGQRFLPWWSEVDLRLDTGVAEVTETGVQLANGEQVDADVVVTGIGVRPAVDWLSGSGIALDTGVVVDEHLRTSLPGIYALGDVAVRWSPRWNTRIRVEHWDDAREAARTLAGVLLHDPSSQDPLPVHDPVPYFWSDQFGHKIQYVGHHSPEDTLVIRGDGTPQWAAAWVDAEGRLTAHLSIDAPRLMIDARMAIAAGARPDEAALRDPQAKLAPPRGR

SEQ ID NO: 16310 - protein, 299 aa, Arabidopsis thaliana
MASLLRPTPLLSTPRKLTHSHLHTSISFPFQISTQRKPQKHLLNLCRSTPTPSQQKASQRKRTRYRKQYPGENIGITEEMRFVAMRLRNVNGKKLDLSEDKTDTEKEEEEEEEDDDDDDEVKEETWKPSKEGFLKYLVDSKLVFDTIERIVDESENVSYAYFRRTGLERCESIEKDLQWLREQDLVIPEPSNVGVSYAKYLEEQAGESAPLFLSHFYSIYFSHIAGGQVLVRQVSEKLLEGKELEFNRWEGDAQDLLKGVREKLNVLGEHWSRDEKNKCLKETAKAFKYMGQIVRLIIL

SEQ ID NO: 16311 - protein, 471 aa, Vibrio vulnificus YJ016
MAMKLVWLRRDLRCVDNTALNHAIATSQEVVACFVATPLQWRDHHMAPMQADLIARRLAVLAEELNALNIPLLYDEVDDYAQSATRVANWAEQLAVSEVVLNREYEVNERVRDEQLVNRLASSEMGVLDVEDKCVQAPGCVLNKQGDYFKVFTPFKKAWLKSFIPPQIIKTSAAQPVVLPEALQSSLWHEQAPFSYPRQSSEAWSVDSQQIRETLRRFCHEEVDRYHEQRDFPATAGTSVLSPYLAIGAISVRQCIARLYWQQSYLSNGREVWLSELIWREFYHHLIHFEPKLVKGQGFVEWEKHLLWPAKPDWFERWCRGETGYPIVDAAMRQLNQTGWMHNRLRMIVASFLTKDLHVNWRLGEQYFMQKLVDGDFAANNGGWQWCASTGCDGQPYFRIFNPITQGEKFDPNGEFVKHWLPELAEVPSKFVHQPWKWLGHMRLDYPAPMVDHKQEREITLSLYTQAKDCL

SEQ ID NO: 16312 - protein, 731 aa, Nocardia farcinica IFM 10152
MSAADTAAAVLDAQFRAGVAQAAPAALPPGISADDLWELFEAQATSRQLDLAARRLGAQGRGFYSIGSAGHEGNAALAAATRPSDPALLHYRSGAFFVHRLRRVGGSDPVRDVLLGVVAAAADPISGGRHKVFGSKAAHIVPQTSTIASQLPRAVGLAFALERAARLGLPTEWPADAIVLCSFGDASANHSTATGAINAALHTAFQGVPMPILFVCEDNGLGISVPTPPGWIAHAYGARPGLHYLHADGCDPADALTTCARAVDWVRTHRGPAFLHLSTVRLLGHAGSDAESAYRRPAELAADLRRDPLLGTAGLLVAAGADPGTVLARYDSIADRVAATAESVCAEPKLDTAEAVLAPLARSRPAAVRADVLRDTPTSPTRAHPGVRAGRDPGADVPVTLAQAVNTTLAALLARDPDVLVFGEDVGRKGGVYGVTKGLRARFGPRRVFDTLLDEQSVLGTALGAALAGFVPIPEIQYLAYLHNAADQVRGEAATLRFFSAGRYRNPMVVRIAGLAYQRGFGGHFHNDNSVAALRDIPGVVLAVPARADDAAALLRTCVSAARVDGRVCVFLEPIALYHTRDLHPDDGAWAVPAAAPEHVPIGRARAYGDGTDLTIVTFGNGVPMSLRVAARLARQGVATRVLDLRWLAPLPVDDLVHHARATGRVLVADETRRSGGVSEAVCTALVDAGFRGRLTRVTSADSFVPLGPAAAAVLLSEAAIESAALALVRD

SEQ ID NO: 16313 - protein, 480 aa, Pyrococcus horikoshii OT3
MVERKRWSEEFSEWFNEVIEEAGILDKRYPVKGMNVWLPYGLKIMRNIEKFIHEEMERTGHQEVLFPALIPETEFKKEAEHIAGFEGEVFWVTHAGHEPLDVRLVLRPTSETAMYSMFALWIRSHADLPFKVYQIVNVYRYETKHTRPLIRVREISRFFEAHTAHADFEDAERQIKEDLEIFDNLMRKLALAYIISKRPEWDKFPGAFYSLGAEVVMPDGRTLQIGTMHNYKQNFSKAYNILYEKEDGTHDYVHQTTFGMSERLLAAVIAIHGDDRGMVLPPTIAPIQVVIVPIPKKGSEEEVYSYAKGIEEELRDAGIRVYLDLRDKRPGWKFYDWELKGVPVRVEVGPIDVQNSTVVLARRDKLEKITVKREELVDKVRELFEDIMEFLYERANEWLESHIKRVDTLEEAKAVFEDRRGIVEIPWCGEESCGLKMEEELEAKMLGIPYPEEKAKAPEGSKCPVCGREAKFIARFARTY

SEQ ID NO: 16314 - protein, 627 aa, Legionella pneumophila str. Paris
MLFQYIKKFFLFLWVQAVSISFLLAMASVSFAQLTAQDHAAHHQGEKESEGMGGMMKNIGTPSKELYPSLMNLPTLSPEKRLAIQQKAHQRITSGMALMKGGLNELLLASNNNDYAKMQEALEKLREGIAQYESALAALRALSEGKNPRDIALQWFKREMNLLPSTPQAKNVLGGPFFHLTIIALFGLFFLVMIWMYFFKMRRAAALLDRLTKQNATVSSETPPQFSKAPEPTPSLTSVEPIKSSQVSKVPSEIAPTTPPTCPAHKCPVPQFPVMRSLTEPEEKWEGQLRVCRIFQEAPGIKTFHLASTHEVALPFTYYPGQFITLTALINGKTVRRSYTMASTPTQLHYCAITVKREEQGVFSRYLHDEIKEGDLLEVMGPNGKFTFTGEEAKSIVLICGGVGITPMMSIIRYLTDIGWHNDIYLLYCCRTTSEFLFREELEQLQERYLNLHVYASMLRSEGTVWMGLQGLFTKNIISHLVPDIASHRIHVCGPPAMMEAILASLKELNVPADLILTEAFGPEKKPEIAQEELEAIKAETRAMISFRKSEKMVPILPDRTLLEIAEANGVTIDNACRTGQCGLCKVKLLSGEVTMACEDALSKEDKQQGLILACQAKATQNIEVDA

SEQ ID NO: 16315 - protein, 401 aa, Gibberella zeae PH-1
MQTANNPISHHTSHTMGEGAASSNSGDNSCGANSVGHHTSHTMGQGASSSSSGANGGGGVAEAQRVDDGITLGASLTDVETYNNDNDNESDDASSLGDSLASLDGTAGSVATSMRSSGSLSNFKIIDTTLREGEQFATAYFTTETKMKIAKALDDIGVEYLELTSPASSPQSKADAQAICKMGLKAKVLVHIRCNMDDARIAVETGVDGINMCIGTSAQLMKHSHGKDLDWIAAKAKEVIEFTQAHGLEVRFSGEDSFRSDFSEILKLYSLMDRLGAHRVGIADTVGGASWREVYDKVSTLRQMIGCDIETHFHNDTGCATSNAYTALEAGATHIDTTVLGIGERNGITPLGKLFQCMLGFGHEYVATKYRLDKLPALEKLVAEAVDIEIPWDTPDLSVFL

SEQ ID NO: 16316 - protein, 569 aa, Agrobacterium tumefaciens str. C58
MDGKITTISKGMTDASVKYRPYPTINIPDRTWPGKTIDKAPIWCSVDLRDGNQSLVNPMGHDRKARMFKLLLEMGFKEIEIGFPSASQTDFDFARWCVEEGNVPDDVSLQVLVQCRPELITRTFEALEGANKPIIHFYNSTSELQRRVVFGKDVHGIKQIAVDAAKMITDMAAKAGGGFRFEYSPESFTGTELEVALEICNAVVEVVKPTADNKLILNLPSTVEMATPNIYADQIEWMCRNIDNRENVIISLHPHNDRGTGIAATELALMAGADRVEGTLFGNGERTGNVDVVTLALNMYTQGVDPELDCRDIERIKAVYEYSNEMTIPERHPYVGELVYTAFSGSHQDAINKGMKAIKVANHPVWEVPYLPIDPKDVGRSYEAIIRINSQSGKGGIAYILQQDYGINLPRNLQVEFREDIQRITDEEGVELPAKRIYERFIERYVTQPNARIKFVDHHTYPAGDFKGVRIVAAEITDNGEVKRIEGKGTGPIDGFINALSVYLGVDLSVNDYSEHSLQHGSNASAIAYVEMEHPGGKLFGAGVNTNIVAASLEAIVSAANRVLEERAK

SEQ ID NO: 16317 - protein, 336 aa, Zymomonas mobilis
MTIEFMQPSDSSEVSELPRISVIGVGGGGGNAVANMIASGVQGVDFIVANTDAQALNISPAEQRIQLGPTTTQGLGAGSRPEVGKAAAEETIEQIQEALEGARMCFIAAGMGGGTGTGAAPVIAKVARDRGILTVGVVTKPFNFEGKRRARSAESGIEELQKHVDTLIVIPNQNLFLIANPNTTFKQAFQMADEVLQQGVRGITDLMVCPGLINLDFPDIRSVMSEMGKAMMGTGEASGDNRAIEAAERAIANPLLDGVSMNGARGVIVSIIGGEDITLMEVDEAANHIRELVDDDANIIFGSAFNEDLDGRIRVSVVGNRYRFEQKRRRRRKIFL

SEQ ID NO: 16318 - protein, 931 aa, Streptococcus agalactiae 2603V/R
MSHPKLESSSNKEIITEEVGLLKQLLDEATQKLIGSESFDKIEKIVSLSLTDDYTGLKETISALSNEEMVIVSRYFSILPLLINISEDVDLAYEINYKNNLNQDYLGKLSTTIDVVAGHENAKDILEHVNVVPVLTAHPTQVQRKTVLELTSKIHDLLRKYRDVKAGIVNQEKWYADLRRYIGIIMQTDTIREKKLKVKNEITNVMEYYNRSLIKAVTKLTAEYKALAAKKGIHLENPKPLTMGMWIGGDRDGNPFVTAETLRLSAMVQSEVIINHYIEQLNELYRNMSLSINLTEVSPELVTLANQSQDNSVYRENEPYRKAFNFIQDKLVQTLLNLKVGSSPKEKFVSRQESSDIVGRYIKSHIAQVASDIQTEELPAYATAEEFKQDLLLVKQSLVQYGQDSLVDGELACLIQAVDIFGFYLATIDMRQDSSINEACVAELLKSANIVDDYSSLSEEEKCQLLLKELTEDPRTLSSTHAPKSELLQKELAIFQTARELKDQLGEDIINQHIISHTESVSDMFELAIMLKEVGLIDANQARIQIVPLFETIEDLDNSRDIMTQYLHYELVKKWIATNNNYQEIMLGYSDSNKDGGYLSSGWTLYKAQNELTKIGEENGIKITFFHGRGGTVGRGGGPSYEAITSQPFGSIKDRIRLTEQGEIIENKYGNQDAAYYNLEMLISASIDRMVTRMITNPNEIDNFRETMDGIVSESNAVYRNLVFDNPYFYDYFFEASPIKEVSSLNIGSRPAARKTITEISGLRAIPWVFSWSQNRIMFPGWYGVGSAFKHFIEQDEANLAKLQTMYQKWPFFNSLLSNVDMVLSKSNMNIALQYAQLAGSKEVRDVFNIILNEWQLTKDMILAIEQHDNLLEENPMLHASLDYRLPYFNVLNYVQIELIKRLRSNQLDEDYEKLIHITINGIATGLRNSG

SEQ ID NO: 16319 - protein, 123 aa, Methanosarcina barkeri str. fusaro
MKEITAVVRPNKMSATKDALDKIGYPSITAIPVLGKGKQRGISGELNFYIQPRLLAKRYSTGMKYIPKRLLSIVVNDEEVDQVIKTIIEVNQTAQIGDGRIFVESIDEVIRIRTGEKGKLALK

SEQ ID NO: 16320 - protein, 357 aa, Bacillus clausii KSM-K16
MEPLELGVLYGDGIGYEIVSASVKIVSAAAAKSGLAIDWHVLPMGLDAIKQTGSSMPAETVQALDKLDGWLMGPHDSQSYPKQLQNVRNPSGELRHHFDLYANIRPAKSEPYVKGVVERADLVIYRENTEGFYVDRNMYKGIGEWMVTADVAVTAGVFTRKAIERIAHAAFRAARERRKKVSIVHKANVISLGSGLFLNVCKEVGHHYPDVSVDDYHIDAMCAHLVRRAAEFDVIVAENMFGDILSDLTGELVGSLGLAGSINASESKAMAQAAHGSAPDIAGLGLANPIGMIRSSAMLLGWIGKKHKSQLCSTVERRINQGVADTLVSGVCTKDLGGTASTQQFTDVVCEKIEEAE

SEQ ID NO: 16321 - protein, 381 aa, Staphylococcus aureus subsp. aureus Mu50
MLTEQEKDIIKQTVPLLKEKGTEITSIFYPKMFKAHPELLNMFNQTNQKRGMQSSALAQAVMAAAVNIDNLSVIKPVIMPVAYKHCALQVYAEHYPIVGENLLKAIQDVTGLEEHDPVIQAWAKAYGVIADVFIQIEKEIYDQMMWIGFKPFKITNIKQESEDIKSFTVETEEYDFSEFTPGQYITVDVSSDKLPYRAKRHYSIVSGEKNHLTFGVKRDVTTEHEGEVSTILHDEIKEGDMINLAAPVGGFVLENTTEPQLFLGSGIGVTPLVAMYEAASAKGLDTQMVQVAENEQHLPFKDNFNSIASHYDNAKLYTHLKDKQGYIGTEELQAFLANKPEIYICGGTKFLQSMIEALKSLNYDMDRVHYETFIPRLSVAV

SEQ ID NO: 16322 - protein, 262 aa, Parvularcula bermudensis HTCC2503
MTDCVIRKDRHGIALLTLNRPEKLNALNYETNDRLLELLNEIEDDPEIRAVIVTGAGDRAFSAGADIHEFSDSIRAGTNVAIKDFVRRGQAMTSRFENFPKPVIAAVNGLAFGGGCEITESVHLAVASEDALFAKPEISIGITPTFGGTQRLSRLAGRKRALEFLLTGDPFTAERACEIGLINRVVPPEAVLESAFEMAEHILRHSSTVISAILHAVTRGINLPIAEALEIEVQQFARIAGSNDTCKELDAWITCRSTGTLS

SEQ ID NO: 16323 - protein, 285 aa, Streptococcus pneumoniae TIGR4
MTQIIDGKALAAKLQGQLAEKTAKLKEETGLVPGLVVILVGDNPASQVYVRNKERSALAAGFRSEVVRVPETITQEELLDLIAKYNQDPAWHGILVQLPLPKHIDEEAVLLAIDPEKDVDGFHPLNMGRLWSGHPVMIPSTPAGIMEMFHEYGIDLEGKNAVVIGRSNIVGKPMAQLLLAKNATVTLTHSRTHNLSKVAAKADILVVAIGRAKFVTADFVKPGAVVIDVGMNRDENGKLCGDVDYEAVAPLASHITPVPGGVGPMTITMLMEQTYQAALRTLDRK

SEQ ID NO: 16324 - protein, 187 aa, Arabidopsis thaliana
MRPLDETETTVVFEKLFKFVGNNLKKIVENPSDEGPESTPGSYCFRLQKNRVYYVSEALVKRATNISRKNLVSFGTCIGKYTHAGSFHLTIMSLNILAANAKHKVWLKPTSEMSFLYGNHVLKGGLGRITDSIVPGDGVVVFSMSDVPLGFGIAAKSTQDCRKLDPNGIVVLHQADIGEYLRGEDDL

SEQ ID NO: 16325 - protein, 483 aa, Staphylococcus epidermidis ATCC 12228
MGSFFNRMTRKENPTIYQSKDGHLKRTLRVRDFLALGVGTIVSTSIFTLPGVVAAEHAGPAVSLSFLLAAIVAGLVAFTYAEMASTMPFAGSAYSWINVLFGELFGWVAGWALLAEYFIAVAFVASGFSANLRGLIAPLGISLPKSLSNPFGSNGGVIDIIAAVVIILTALLLSRGMNEAARMENVLVILKVLAIILFVIVGLTAINFSNYIPFIPEHKVTETGDFGGWQGIYAGVSMIFLAYIGFDSIAANSAEAINPQKTMPRGILGSLIVAIVLFVAVALVLVGMFHYSQYADNAEPVGWALRESGHGIIAAIVQAISVIGMFTALIGMMLAGSRLLYSFGRDGLLPSWLSQLNHKHLPNRALVILTIIGVVIGSMFPFAFLAQLISAGTLVAFMFVSLAMYRLRKREGKDLPKPEFKLPLYPILPAITFILVLLVFWGLSFEAKLYTLIWFIVGIIIYLIYGIRHSKKNDEEAYQVPRK

SEQ ID NO: 16326 - protein, 123 aa, Zea mays
MAAPKLATLALAVLLAATVVAPPGAVRAAMSCSTVDSTLMAWLAVVQMGGGMAPQACCGGIRRLLQQGNNTPDRRTICGWLKNVANGANGSGTYISRGGALPSKCGVALPYKISTNVNCNTIN

SEQ ID NO: 16327 - protein, 430 aa, Synechococcus sp. WH 8102
MELCHAVLTSLLHGPALDHWTLPNGVRCVAAEMPEAPLTCLDLWCRAGSFTEAAGEEGMAHFLEHMVFKGSERLEAGAFDLAIEALGGSSNAATGFDDVHFHVLIPPETSQQALDLLLDLVLHPALEQESFRLEREVVLEEMAQYADQPDELVLQQLLKQGCPDHPYGRPILGERSSLLAMDPEAMRTFHQRRYRGHHCCLAISGPKARELRATVESSALAQLPPDPQPSADAIDQVEPKGLRMQPGRHTMELARLESARLLMLWSGSTAHDQAWVMGADLATTLLGEGRRSRLVAQLREELRIAESVDMDLSVLEQGCLMTLEISCEPEDLEQVEATVHEQLNQAAPFTAEELSRGRQLVGNGLRYSLESVGQVAAQAASQMLWNRPQELLQPLQHLQAWTEERLSEDLMPLLQPSRACSLIATPAGQR

SEQ ID NO: 16328 - protein, 786 aa, Mesorhizobium loti MAFF303099
MLGLRMPEYSSFIRFVRVRYLSGLLIFALASTAIMVALNRVNSFRHEIDALSSNLVVFTRDLRNATSFAETTGSAWRNETRDALTASARDHSERLTSEIDTLSAQFAALRSRLSAKTLNELETASVNGDLFWSAHDMVRNFNLMSVAQKADEWSYREIRNQNDLFVQPMLVRVRTAMDEERHLADASSDRLLLWASGLLFGVLAIVAFWIFRPMEQAIRRAFAQSAESLFKAEAADRAKSEFLANMSHEIRTPMNGVLGMAELLAKTELTPRQKTFTDVIVKSGNALLTIINDILDFSKINAGQLTLDPAPFRLTEAVEDVATLVSARVAEKNLELIVRVDPRLPAHVVGDAGRFRQIVTNLVGNAVKFTEKGHVLIDVGGETVNDVVQLRLRVEDTGIGIPAEKLQNVFEKFAQVDGSSTRRHEGTGLGLAIAARLVDLMAGKIGVESEIGRGSVFWFAVPLPVHHAEAREAIVPVDVTGARVLVIDDNPVNREILLEQLRSWSFDCAAAESGAVGLAFLDRACQLGASVDCIILDYQMPGMNGADVARAIAADSRLSAIPIVILTSVDQVDFGKMIIDFGISAHLTKPARSAVLLGTVISVIQKARSQGGKAQFIREPVQPKPVPQAAPPAFTVIRGPAVPVMAVPESTAMPNGPIDILIAEDNEVNQLVFGQILNGLGLSYRIAGNGRTAVEMYRSLHPKLILMDVSMPEMNGYEATRAIRAIETSSGGHIPIIGVTAHALKGDRDKCIEAGMDDYLPKPVSPDRLGTKIGTWLSETVVAKTA

SEQ ID NO: 16329 - protein, 617 aa, Synechococcus sp. WH 8102
MTLTSASTVVGGLDANAPQTISGAAALMDALRRHGVDTIFGYPGGAILPIYDALHIAESEGWVKHILVRHEQAGTHAADAYARATGKVGVCFGTSGPGATNLVTGIATAQMDSVPMVVITGQVPRPAIGTDAFQETDIFGITLPIVKHSWVVRDPADLGSIVAQAFLIAASGRPGPVLIDIPKDVGQEQFNYVPVEPGSVIPGGFHQPEPPLDAAVAAALDLIEQAQRPLLYVGGGAISACAHDSLRMLAERYQLPVTTTLMGKGAFDENDALSVGMLGMHGTAYANFAVTECDLLIAVGARFDDRVTGKLDTFAPRARVVHFEIDPAEIGKNRKADVAVLGDLGLSLARMVEISLQRTAEPRTAAWLERINTWKDRYPLTIPPAEGAIYPQEVLLAVRDLAPDAIVTTDVGQHQMWAAQHLRNGPRGWISSAGLGTMGFGMPAAMGAQVAMPDRQVVCIAGDASILMNIQELGTLAAYGLPVKVVIVNNHWQGMVRQWQESFYDERYSASDMLNGMPDFIALARSFGVDGVKITDRELLHRDLAAALQSPTPTMIDVHVRRGENCYPMVPPGKSNAQMVGLPSHPELAMGTTRTCSSCGAITAHEHRFCPQCGASL

SEQ ID NO: 16330 - protein, 391 aa, Synechococcus sp. WH 8102
MSRVGVVLLNLGGPERIQDVGPFLYNLFADPEIIRLPSPALQKPLAWLISTLRSGKSQEAYRSIGGGSPLRRITEQQARELQSLLRQRGLDATTYVAMRYWHPFTESAVADMKADGMDEVVVLPLYPHFSISTSGSSFRELQRLRQGDAAFEQLPIRCIRSWFDHPGYIKAMAELIAEEVRNSDDPEKAHVFFSAHGVPKSYVEEAGDPYQQQIEACTDLIMKSLAEHMGHSNPHTLAYQSRVGPVEWLKPYTEEALEQLGEAKTNDLVVVPISFVSEHIETLEEIDIEYRELATEAGVVNFRRVRALDTYPPFIEGLADLVTTSLEGPEVSLDAAAELPTKVKLYPQEKWEWGWNNSSEVWNGRLAMLGFSAFLLELISGHGPLHALGLL

SEQ ID NO: 16331 - protein, 328 aa, Pseudomonas putida
MELLIQPNNRIIPFSAGANLLEVLRENGVAISYSCLSGRCGTCRCRVIDGSVIDSGAENGQSNLTDKQYVLACQSVLTGNCAIEVPEADEIVTHPARIIKGTVVAVESPTHDIRRLRVRLSKPFEFSPGQYATLQFSPEHARPYSMAGLPDDQEMEFHIRKVPGGRVTEYVFEHVREGTSIKLSGPLGTAYLRQKHTGPMLCVGGGTGLAPVLSIVRGALKSGMTNPILLYFGVRSQQDLYDAERLHKLAADHPQLTVHTVIATGPINEGQRAGLITDVIEKDILSLAGWRAYLCGAPAMVEALCTVTKHLGISPEHIYADAFYPGGI

SEQ ID NO: 16332 - protein, 260 aa, Thermobifida fusca YX
MSTTNDDAPEVLVEERGRVLVITMNRPRVRNAMSQAMAYRIAEALETLDSRPDLSVGIITGAGGTFCAGMDLKGFARGERPVVPGRGFAGLVQQPPKKPLIAAVEGYALAGGFEIVLACDLIVASQEAKFGLPEVKRGLTAAAGGLLRLQHRIPYHLAMELVLTGKMWPATEAAEVHLVNRLTEPGKAFEVALELAEEVAANAPLALAASKQVLVRSVDWPLDTQFEKQEEYVNPVRESEDAKEGARAFVEKREPRWTGR

SEQ ID NO: 16333 - protein, 229 aa, Juglans nigra
NGVLSIMKACVQAKTVRRLVFTSSAGALDVSEHQRPVYDESCWSDVEFCRAKKMTGWMYFVSKTQAEQAAWKFAKENNLDFVSVIPPLVVGPFLMPSMPPSLITALSPITGNEAHYSIIKQGQFVHLDDLCMGHIYLFEHPKAEGRYLCSACDATILDVAKLLREKFPECNVPTKFKGVDESLEIISFNSKKIKDLGFQFKYSLEDMFVEAVQTCRAKGLLPPAAEKTL

SEQ ID NO: 16334 - protein, 432 aa, Legionella pneumophila str. Paris
MEECMYLDALSRLDKAASFCRIDSEALEKLKHPKSCLEVSLPVRMDNGELKIFPAYRVHHNDSRGPMKGGIRYHPKLDLDEIKTLALWMTIKCAVADIPFGGAKGGVIVDPKQLSRMELERLSRSYIELIADFIGPDKDIPAPDMYTNEMIMGWMMDEYATIVRKNSPAVITGKPISLGGCLGREGATGLGAYYCIKILEKKKKWQSSELRVAVQGFGNAGQSIAKLLYDNGYKIVAISDSKGGIYNTKGIDIPRMIEIKNSSKDVQSIYCKESVCKLAKEATITNEELLELDVDLLIPAAAQNQITQENAARIKAPIIIEIANGPITLEADALLQKKGLLIVPDILANTGGVIVSYFEWVQNKSGYYWSLEKVQEELQTIISREFGNIWQLMEQYQTDMRQAAYVHALNRYDKAVTAQGTRGYFSNLSLSL

SEQ ID NO: 16335 - protein, 112 aa, Nocardioides sp. JS614
MRLVTAVIKPHKWEDVREALEAFGVTGMTVSEVSGYGRQKGHTEVYRGAEYDIALVPKVRIEIVVADDDADDVVGIIVKTAQTGRIGDGKVWVSPIDTVVRVRTGDRDDAAL

SEQ ID NO: 16336 - protein, 339 aa, Nocardia farcinica IFM 10152
MTVRVGINGFGRIGRNFFRAVEAQKALGTTDIEIVAVNDLTDNATLATLLKYDSILGRLPKDVSLDGDDTIVVGDQRIKALAIKEGPAALPWGDLGVDVVVESTGIFTDATKAKGHLAAGAKKVIISAPAKGEDITIVMGVNDDKYDGSQNIISNASCTTNCLGPLAKVLNDEFGIVKGLMTTIHAYTQDQNLQDGPHKDLRRARAAAVNIVPTSTGAAKAIGLVLPELNGKLDGYSLRVPIPTGSITDLTADLAKKATVEEINAAFKAAAEGPLKGILKYSVDPIVSSDIVTDPHSSIFDAPLTKVIDDQVKVYSWYDNEWGYSNRLADLIGLVGKSL

SEQ ID NO: 16337 - protein, 228 aa, Enterococcus faecalis
MPKLVFSRHGLSEWNALNQFTGWADVDLAPEGVEEAKEGGRKIKEAGIEFDVAYTSVLTRAIKTCNYLLEYSDQLWVPQIKSWRLNERHYGKLQGLNKKETAEKYGDEQVHIWRRSYDTLPPLMEATDEGSAANDRRYAMLDQRDIPGGENLKVTLERALPFWQDEIAPALKDNKTVLVAAHGNSLRALAKHIEGISDEDIMDLEIPTGKPLVYELNDDLTVKEKYYL

SEQ ID NO: 16338 - protein, 328 aa, Lactobacillus sakei subsp. sakei 23K
MLDPNHLFDITVIGGGPVGMFAAYYAGMRKADVQIIESLPELGGQVATLYPEKEIFDVAGFKGITGAQLTANLAEQLAVFEPTTQLETSVKAILPQEDGTYILETSKGTTHTRGVIVAVGNGAFTPRKLAVDYQPEWENNYIHYFAKEMAQFKDQTVAVAGGGDSAIDWALMLEKVAKQVYIIHRRDQFRGLESSVDALMNSSIQIKTPFLIDGLTEVDHQLALSLNKMKSTDQEQLVVDKLLVNYGFISDTRILRDWGLTLDHHQVSVNQQMATNLPNVYAIGDIATYPGKVKLIASGFGEAPVAVTELLTKLYPEKRQPLHSTSIM

SEQ ID NO: 16339 - protein, 162 aa, Chlamydomonas reinhardtii
MANPEFYGLSTTTLSGQPFPFKDLEGKAVLIVNVASKCGFTPQYKGLEELYQQYKDRGLVILGFPCNQFGGQEPGDASAIGEFCQRNFGVTFPIMEKSDVNGNDANPVFKYLKSQKKQFMMEMIKWNFEKFLVDKSGQVVARFSSMATPASLAPEIEKVLNA

SEQ ID NO: 16340 - protein, 212 aa, Ralstonia eutropha JMP134
MNRRQTAFAASVRRAMFATALALAAASAALLPHPARAADKPAAMPAAAPAGNCPASLNFQFPRLQDEAPQNLCQYAGKVVLVVNTASYCGFTPQYEGLEALYSKYRDRGLVVLGFPSNDFSQEPGSSKEIADFCYNTYGVKFPMLGKSHVRGGDVNPMYALLAKETGTAPKWNFYKYLIDRSGNVVGSYNSMTKPDDKQFVAKIEQLLSSPR

SEQ ID NO: 16341 - protein, 514 aa, Agrobacterium tumefaciens str. C58
MLASMKGYSRECNMRDGPSALTFIHLCDSFASGTRVRRKEQPWFSTGAAGGGINTATPMRIETIIFDCFRQAAEKPQEISIFRHKFTLHLHAAVASICQTCLWVYAKRRAMMAKQKVAMLTAGGLAPCLSSAVGGLIERYSDIAPEIDIIAYRSGYQGVLLGERIEITKDMREKAHLLHRYGGSPIGNSRVKLTNAADCAKRGLVKEGDNPLRVAAERLAADGITILHTIGGDDTNTTAADLAAYLGANGYDLTVVGLPKTVDNDVVPIKQSLGAWTAAEVGAAFFDNVSNEQSAAPKTFVIHEVMGRHCGWLTAATARAYIQKTRGNDYVEGLMMNTQMKNIDGIYLPEMAFDIEAEAERLKEVMDKHGYVTLFVSEGAGLDAIVAEREAAGEAVKRDAFGHVKIDTINVGGWFQKQFAGLIGAERSMVQKSGYFARSAPANGDDLRLIQGMVDLAVESALNKVSGVTGHDEDQNGKLRTIEFPRIKGGKHFDLSAKWFTEVMEHVGQPFTAA

SEQ ID NO: 16342 - protein, 401 aa, Streptococcus pneumoniae TIGR4
MEYRKIQEALEALQKGRLVLVIDDKDRENEGDLICSAQAATTENVNFMATYAKGLICMPMSESLANQLMLSPMVENNTDNHKTAFTVSIDYKETTTGISAEERGLTARMCVAEDITPSDFRRPGHMFPLIAKKGGVLERNGHTEATVDLLKLAGLKECGLCCEIMNHDGKMMRTDDLIQFSKKHNIPLITIKELQEYRKVYDQLVERVSTVNMPTRYGNFKAISYIDKLNGEHHLALIMGNIEDEANVLCRVHSECLTGDVLGSLRCDCGQQFDKAMKMIVENGSGVLLYLRQEGRGIGLINKLKAYHLQDQGMDTLDANLALGFEGDLREYHIGAKMLKDLGLQSLHLLTNNPDKVEQLEKYGITISSRISIEIEANPYDSFYLETKKNRMGHILNMEEK

SEQ ID NO: 16343 - protein, 233 aa, Lactococcus lactis subsp. lactis Il1403
MPKLVFARHGESEWNLANLFTGWADVDLSENGTKQAIEAGKLIKEAGIEFDIAYTSVLKRAIKTTNLALEYSDQLWVPVVKSWRLNERHYGGLTGLNKADAAAKHGDEQVHIWRRSYDVLPPAMDHDDKYTAHGDRRYAGLEDSLIPDAENLKVTLERALPFWEDQIAPALKEGKNVFVGAHGNSIRALVKQIKKLSDDEIMDVEIPNFPPLVFEFDDNLNVQNEYYLAPKKA

SEQ ID NO: 16344 - protein, 497 aa, Bacteroides thetaiotaomicron VPI-5482
MAKELKDLTKRSENYSQWYNDLVVKADLAEQSAVRGCMVIKPYGYAIWEKMQRQLDDMFKETGHVNAYFPLLIPKSFLSREAEHVEGFAKECAVVTHYRLKNAEDGSGVVVDPAAKLEEELIIRPTSETIIWNTYKNWIQSYRDLPILCNQWANVFRWEMRTRLFLRTAEFLWQEGHTAHATREEAEEEAIRMLNVYGEFAEKYMAVPVVKGVKSANERFAGALDTYTIEAMMQDGKALQSGTSHFLGQNFAKAFDVQFVNKENKMEYVWATSWGVSTRLMGALIMTHSDDNGLVLPPHLAPIQVVIVPIYKNDEQLKQIDAKVEGIVAKLKALGISVKYDNADNKRPGFKFADYELKGVPVRLVMGGRDLENNTMEVMRRDTLEKETVTCDGIETYVQKLLEEIQANIYKKALDYRNSKITTVDTYEEFKEKIEEGGFILAHWDGTTETEEKIKEDTKATIRCIPFDSYVEGDKEPGKCMVTGKPSACRVVFARSY

SEQ ID NO: 16345 - protein, 506 aa, Wigglesworthia glossinidia endosymbiont of Glossina brevipalpis
MQKIFVDVGRVLILWKIFMNKENNNNLNEIKDNTEITDYKEGFSTILKTEELEHGINEKVVKDISEKRQEPEWMLRFRLKAYDAWTKMKEPHWLNGKFENIDYNKYIYYSAPDCNEFKKEKKNNNNTKYLTKEVKNTFNKLGIPTSEKNNIAIDAIFDSVSVSTTYQKFLKKIGIIFCSFSDAIKKYPKLVKEYLGSVVPVNDNFFAALNSAVASDGTFIYVPKGVRCPMELSTYFRINSANTNQFERTILIADEFSYISYIEGCSAPIRNNYQLHAAVVEVILLNNARVKYSTVQNWFPGKKNKGGILNFVTKRALCKGKESKMSWTQSETGSAITWKYPSVILKGDKSVGEFFSIALTKSYQQADTGTKMIHIGKDTKSTIISKTISSGKSNNTYRGLVKILPLAKNSRNFTQCDSMLIGSNCGAHTFPYIEVFNKKSNIEHEATTSKIEENQIFYCQQRGIKVEDAISMIVNGFCKEIFSKLPLEFAIEAQKLLSINLDNSVG

SEQ ID NO: 16346 - protein, 509 aa, Lactococcus lactis subsp. lactis Il1403
MILDETLRAQLMPYMDLLENPIILKVDADLESENGKKIVEFTDELASLSEMISKETAKLNRKTAFSIEREGVSGVLFSGLPLGHELNSLVLALVQVSGRPPRIEQELVERIQAIQNPLHFETYVSLTCHNCPDVVQALNTMSILNPNISHTMIEGGMFQEEVEAKGIMAVPTVFKNGEEFHNGRASLEELLEKITGPESSEAFFDKDPYDVLVVGGGPAGASAAIYAARKGIRTGLIAERFGGQPLETLGIENLIGTPYVEGVQLGRQLEEHVKKYPVDLMNLQKAVKLEKKDLIEVSLENGALLKSKSVIISTGARWRDLGIPGEQEFKTKGVAYCPHCDGPLFAGKDVAVIGGGNSGIEAAIDLAGLVRHVTVLEFLPELKADKILQEKLATLNNVTVLTNVETKEILGDDKVRGLNYQVRGSKETVHLELAGVFVLIGLVPNTQWLEGTIDLSARGEILTDKVGATNLPGVFAAGDCTDSVYKQIIISMGTGATASLGAFDYLIRN

SEQ ID NO: 16347 - protein, 826 aa, Shewanella oneidensis MR-1
MSISRREFLKANAAVAAATAVGVTLPVKMVEAAESDNIKWDKAPCRFCGVGCSVLVGTKAGKVVATKGDPESPVNRGLNCIKGYFLSKIMYGKDRLTTPLLRMKDGKYHKEGEFTPVSWDVAFDTMAAKWKHSIATKGPTSVGMFGSGQWTIWEGYAASKLHKAGFLTNNIDPNARHCMASAVVGFMRTFGIDEPMGCYDDLEAADHFVLWGANMAEMHPILWARLSDRRLSSKDCRVHVLSTFENRSFDLADNPMVFHPQSDLVILNYIANYIIQNKAVNTDFVTKHTKFALGVDDIGYGLRPDHPLEKKAKNPGNGKSTPISFDEYAKFVSTYTLEYAAKMSGVEPEKLETLAKAYADPKAKVMSLWTMGINQHVRGVWANNMLYNIHLLTGKIATPGNSPFSLTGQPSACGTAREVGTFAHRLPADMVVDNDKHRAITEKMWQVPEGTIPPKPGYHAVLQSRMLKDGKLNCYWTMCTNNMQAGPNINEEMYPGFRNPENFIVVSDPYPTVTAMAADLILPTAMWVEKEGAYGNAERRTHMWHQQVKAPEGAKSDLWQLVEFSKRFKVAEVWPAELIAKKPEYADKTLYEVLFANGVINKFPTTDCKGDLNDESEHFSFYVQKGIFEEYAAFGRGHGHDLAEFDRYHETRGLRWPVVNDKETLRRFVEGSDPYVKAGEGYNFYGKPDGKAVIFALPYEPAAEEPNSEYDLWMSTGRVLEHWHTGSMTARVPELYRAYPDAQIFMHPEDAKARGLQRGDEVLVASPRGEIKTRVETKGRNKPPRGVVFMPFFDARQLVNKLILDATDPLSKETDFKKCPVKVMKA

SEQ ID NO: 16348 - protein, 129 aa, Solibacter usitatus Ellin6076
MESDILVVDDSAAIRKILQRVLRQTGMAIRAIHEAGDGQEALALLAEHRVDLVLTDINMPKMDGLQLLASLKASAQWHNTPVVMITTEGGETKVAEAVKLGAAGYVRKPFTADQIKEKLVGILEPALPL

SEQ ID NO: 16349 - protein, 369 aa, Oryza sativa (japonica cultivar-group)
MENGEQGSLGLTCGGEEWGCGSTAASTTGGLCRRLAHSQGSLDGGGGIGIGIGGEGSDGSGIEGGGGGSGERERAGRANIEDDVLLNPRATTPQSNIAAATASRNSTDDEDELRIRGDAEIQAQPPCSKLVISTKALICAPDSSAVTLSKTKKKPGLERKGKVVTDIKDAVEHYANAYVFTYDNMRNQKLKDLREQLKSSSRIFLAGKKVMQIALGRSPADEAKTGLHKLSKFLQGDTGLFFTNLPRDDVERLFREFEEHDFARTGSIATETVELKEGPLEQFTHEMEPFLRKQGMPVRLNKGAVELVADHIVCEEGKPISPEAAQTLRLLGMQMATFRLYLVCRWSSDDFEVYKEGLAQLRAEADDSS

SEQ ID NO: 16350 - protein, 415 aa, Magnaporthe grisea 70-15
MSDLQGRKIFKVFNQDFIVDERYTVTKELGQGAYGIVCAAVNNQTSEGVAIKKVTNVFSKKILAKRALREIKLLQHFRGHRNITCLYDMDIPRPDNFNETYLYEELMECDLAAIIRSGQPLTDAHFQSFIYQILCGLKYIHSANVLHRDLKPGNLLVNADCELKICDFGLARGFSVDPEENAGYMTEYVATRWYRAPEIMLSFQSYTKAIDVWSVGCILAELLGGRPFFKGRDYVDQLNQILHILGTPNEETLSRIGSPRAQEYVRNLPFMAKKPFPTLFPNANPDALDLLDRMLAFDPSSRISVEQALEHPYLHIWHDASDEPDCPTTFNFDFEVVEDVGEMRKMILDEVYRFRQLVRTAPGAGGHGAPHAPQVPIPAGAGQGQWKAEDPRPQEYVGQMNDLEAELAGGLDQRR

SEQ ID NO: 16351 - protein, 453 aa, Staphylococcus epidermidis ATCC 12228
MKYIVVGTSHSGYEVIQTLLKEDENADIQVFESADQPSFLSCGIQSYLEDISSSLDDLHYASVDSYKAQGVNIHTNSTVTDLDTDNKTVVVEHQGQTATYSYDKLFLSPGGKPVTPPVDGIEKYKHVLFMRGRDWANQIKERMKDAKKAVVVGGGYIGIEAAEAFAKADIDTTIVDVADRILNTYLDKEFTDILETNAQQHGLHFKGGETVKSISGNQNGEVTTVVTDKNEYDADTVLFAVGVEPATEWLKDKIDLGKKGIININHQQQTSAKDVYAGGDATLVPFAPVSEDRYIALATNSRRQGVVAAKNMLGKEMTMPRVSGTSGLQLFDYKFGQTGIHGTEIDNYDGNLGQTYVEELIRPQFMQDDTKIHMKIIYDKDTHRILGGQVMSKEDITASINTISVVISAGFTLEQLAVQDFFFQPDYDRPWHYLNVLAQQALGDTFGSDKMLF

SEQ ID NO: 16352 - protein, 306 aa, Oryza sativa
MDSEHWISSLAAAKRFYAAQLGHVDDMAGIGMEEVEMEMEDDGEGMELELEMQLEEATWPDVACPYCYEDHDIASLCAHLEEDHPYEPHTSAYFCKQATGVDFAMAQNNLEKLMMPCPICFEKITRDMLNHITMQHGYLFKSGRRMRRFDIPESQALSLLSRDLRDAQLQALLGGGHRQRRSNTTATNISADPLLSSFGLGFSTLDSEERSKAPVPIPDDTSIHKDTPAQPWESRNIGLYKHKSCYMLYNAKANAEAPFISNQLSKNVSRFFMKTDKIPRKRFTITLGVQNYYLTTMKVYVQVECP

SEQ ID NO: 16353 - protein, 157 aa, Triticum aestivum
MQFLRGVGGGGGGAGSTAWEAFRRHFSRKRAVDIRRINPKVPKEEAVAISGRLLQILADHGPLTVGNTWNHAKDAAIDGLNSKTHMKILLKWMWGRRIIKLSCTQAGNTKKFLYSPFTADDAEAAEEPSPAEEQPKKKGWKGKHPKYQTKKQPAAAA

SEQ ID NO: 16354 - protein, 358 aa, Campylobacter coli RM2228
MNTYKIAVLPGDGIGLSVMKEALKILNFVAQKHGFKLETKEAKIGGASIDAYGVALSDETLKLCEQSDAILFGSVGGPKWDNLPIDQRPERASLLPLRKHFNLFANLRPCKIYESLRHASPLKDEIIQKGVDILCVRELTGGIYFGKQELGKESAYDTEIYTKAEIERITRLAFESARIRNKKVHLIDKANVLASSILWRDVVGQIAKEYEDIKLEYMYVDNAAMQIIKNPSTFDVMLCSNLFGDILSDELAAISGSLGLLCSASLNDKGFGLYEPAGGSAPDIAHLNIANPIAQILSAALMLKYSFKEEKAARDIENAIAIALERGKMTKDLNANSYLSTDEMGDCIVEILKENNNG

SEQ ID NO: 16355 - protein, 107 aa, Haemophilus somnus 2336
MSEVLHTTDATFDTDVLKSDIPVLLDFWAPWCGPCRMIGPILEELSAELGDKVKIVKINIDENQATPAQFGVRSIPTLIFFKEGKAVATQVGALPKNQLVNFINQNS

SEQ ID NO: 16356 - protein, 445 aa, Porphyromonas gingivalis W83
MKTQEIMTMLEAKHPGESEFLQAVKEVLLSVEEVYNQHPEFEKNGIIERIVEPDRVFTFRVPWVDDQGKVQVNIGYRVQFNNAIGPYKGGIRFHPSVNLSILKFLGFEQMFKNALTTLPMGGGKGGADFSPKGKSEAEIMRFCQSFMTELWRNIGPDTDIPAGDIGVGGREVGYMFGMYKKLAREHTGTLTGKGFEFGGSRLRPESTGFGAVYFVQNMCKQNGVDYKGKTLAISGFGNVAWGVAQKATELGIKVVTISGPDGYVYDPDGINTPEKFRCMLDLRDSGNDVVSDYVKRFPNAQFFPGKKPWEQKVDFAMPCATQNEMNLEDAKTLHKNGVTLVAETSNMGCTAEASEYYVANKMLFAPGKAVNAGGVSCSGLEMTQNAMHLVWTNEEVDKWLHQIMQDIHEQCVTYGKDGNYIDYVKGANIAGFMKVAKAMVAQGVC

SEQ ID NO: 16357 - protein, 638 aa, Oryza sativa
MLSARAAATAAAAAASPLWKRGEGGSSGSGSGCTSCREVRRRAAVRVRTPVPRRVEAVAMESAAETEKKEEVAAAGGGVEDMATEEVPVTPWAFSVASGYTLLRDPHHNKGLAFSEKERDAHYLRGLLPPAVVSQDLQVKKIMHNLRQYSVPLQRYMAMMDLQERNERLFYKLLIDNVEELLPVVYTPTVGEACQKYGSIFRQPQGLYVSLKDKGKVLDVLRNWPERNIQVIVVTDGERILGLGDLGCQGMGIPVGKLSLYTALGGVRPSACLPITIDVGTNNEQLLNDEFYIGLRQRRATGKEYHELMEEFMSAVKQIYGEKVLIQFEDFANHNAFDLLAKYSKSHLVFNDDIQGTASVVLAGLLSSLKVVGGTLAEHTYLFLGAGEAGTGIAELIALEISKQTKAPIEECRKKVWLLDSKGLIVNSRKESLQAFKKPWAHEHEPVTTLLDAVQSIKPTVLIGTSGVGKTFTKEVIEAMASFNERPVIFSLANPTSHSECTAEEAYNWSQGRAVFASGSPFDPVEYNGKIHVPGQSNNAYIFPGFGLGVVISGAVRVHEDMLLAASETLADQATQENFEKGSIFPPFTNIRKISARIAATVAAKAYELGLATRLPQPRDLEKYAESCMYTPVYRSYR

SEQ ID NO: 16358 - protein, 511 aa, Campylobacter coli RM2228
MKNNKIIIFDTTLRDGEQALGSSLNINQKLQIALALENLGVDVIEAGFPVSSQGDFEAVKNIASKVKNSTICALSRALDKDIDTAYEALKVADSFRIHTFIATSTLHIQDKLKKDFDEILAMAQRAIARARNYTDDVEFSCEDAGRTPIDNLCFMVENAIKAGARTINIPDTVGYTLPSEFANIIKILFNKVPNIDKAIISVHCHNDLGMATGNSLSAILQGARQIECTMNGLGERAGNCALEEVVMAIKTRSDYLKGFYTDIKCENISKTSKLVSAITNESIPSHKAIVGSNAFSHSSGIHQDGVLKNRQTYEIISPSSIGLHENRMLMTARSGRAMIKTCLDNLGYDEKTYNLDEVYESFLRLADKKGQVYDYDLEALMFLSYENDEENELVLEKLSVISGTIPTACVCVRIKEELKTEACTGNGPIEAVFNCISRITGLNPVLKAYSINAKSSGVDAQGQVDVDLEFKGRKFHGKGLSTDVIEASAQAFISAYNAIYRSLKVEERKAV

SEQ ID NO: 16359 - protein, 331 aa, Picrophilus torridus DSM 9790
MEDYDLVIIGAGPTGLFATFLAGLRDIKSITLEALDYVGGQIPELYPEKPVYDVQGIPKINAIKLRDQMYEQAKTFNNRIELNSKVTDIIKENDIFKIEVNGVYKYNARAVLLCTGIGDFTPRKIGCEGEDRFFNKGLTYTVKDTEKFRDLTVAVVGGGDSALDYATELANTARHVYIIHHSENFKAAEKTIDLARKNEKITFIVNSSVISIDGGSKLESIKIKNELTNDISELGLDALVVAIGHVGRANIYKSLPLQLSPNKRGVLVNSKLETNIPGIYAAGDVASVEGEPANPLIAIGGAQAYQAINYIKKYINPQASFFGGHSSNLKI

SEQ ID NO: 16360 - protein, 367 aa, Photobacterium phosphoreum
MALSSAKEIIDDIRQGKMVILMDDEDRENEGDLIIASEKITPETINFMAMYGRGLICLTLSKARCQKLGLPLMVQDNTEQFGTPFTISIEAATGVTTGISAADRARTVQAAVAADATAANIVMPGHIFPLMAQEGGVLTRAGHTEAGCDIARLAGLEPSSVIVEILNEDGTMARRPQLEIFAEKHGLKLGTIADLIEYRNHHETTIERVGECKLNTEFGEFDMITYRDKIDDQIHYALCKGDIEADAATLVRVHLQDTFKDILQSGATQWTLPAAMQRISAENGVLVILSKQESTDSIINKVKNIAAEKEGRPQVKMSPYNPSRQVGVGSQILSDLGIGKMRLLSSSTQRYHSLSGFGLEVVEYICE

SEQ ID NO: 16361 - protein, 491 aa, Synechococcus sp. WH 8102
MSSLQIVWFKRDLRVDDHRPLLEAAARGPVLPLYVVEPELWQQPDASERQWLFCRESLLELRQALAELGQPLVVRSGDVVQVLERARRQFGVDGLWSHEETGNGWTYQRDKRVGAWARAHGIQWGEIRQFGVTRRMRSRNGWAKRWEEQMAEPITPAPAGVPALEEIDPGVIPERPCPELLPDDCSQRQTGGRSIGLGELRDFLQHRAPCYQRAMSSPKSAFTGCSRLSAYLAWGCLSMREVLQTSRHHSGRGVSSFESRLHWHCHFIQKLEDQPEIEFSDFHPYMRGIRETNAERLAAWTEGRTGVPFVDACMRALKAHGWINFRMRAMLMSFASYNLWLPWRDSGLHLARQFVDYEPGIHWSQCQMQSGSTSINTIRIYNPIKQGMDHDPQGVFIRQWCPELKDVSTIHIHEPWMLGGGRSAPIVDVTTSMQLAKDRIWEIRRSAGFDRHADAIQRMHGSRKAGLKPTASRRRQKRSNDNGVRQLSLEL

SEQ ID NO: 16362 - protein, 494 aa, Bacillus cereus ATCC 14579
MSQLAVNLHEKVEKFLQGTKKLYVNGSFIESASGKTFKTPNPATGETLAVVSEAGREDIHKAVVAARMAFDEGPWSRMSTAERSRLMYKLADLMEEHKEELAQLETLDNGKPIRETMAADIPLAIEHMRYYAGWATKIVGQTIPVSGDYFNYTRHEAVGVVGQIIPWNFPLLMAMWKMGAALATGCTIVLKPAEQTPLSALYLAELIEEAGFPKGVINIVPGFGESAGQALVNHPLVDKIAFTGSTPVGKQIMRQASETLKRVTLELGGKSPNIILPDADLSRAIPGALSGVMFNQGQVCSAGSRLFVPKKMYDNVMADLVLYSKKLNQGVGLNPETTIGPLVSEEQQKRVMGYIEKGIEEGAEVLCGGSNPFDQGYFVSPTVFADVNDEMTIAKEEIFGPVISAIPFNDIDEVIERANKSQFGLAAGVWTENVKTAHYVASKVRAGTVWVNCYNVFDAASPFGGFKQSGLGREMGSYALNNYTEVKSVWLNLN

SEQ ID NO: 16363 - protein, 164 aa, Thermus thermophilus HB27
MEARTTDLSDLYPEGEALPMVFKSFGGRARFAGRVRTLRVFEDNALVRKVLEEEGAGQVLFVDGGGSLRTALLGGNLARLAWERGWAGVVVHGAVRDTEELRGVPIGLLALAATPKKSAKEGKGEVDVPLKVLGVEVLPGSFLLADEDGLLLLPEPPSGVRSGG

SEQ ID NO: 16364 - protein, 716 aa, Thermosynechococcus elongatus BP-1
MQEGLYIVLISIHGLIRGDRLELGRDADTGGQTRYVVELAKTLAAHPRVAQVDLVTRLIPDAKVSPDYAQPIERIGDRARIVRLACGPRRYLRKEVLWPYLDVFADELLRYLRQSGRMPDVIHSHYADAGYVGCRVAGWLGVPLVHTGHSLGRVKRQRLLAQGSKPDAIEEQFHLTTRIEAEEQTLASAALIIASTHQEVEEQYRLYDQYDPARMAVIPPGVDTSRFYPAPVPADLPFRQELRRFLVEPEKPFIFCLSRPVPRKNVAALLNVYGSDRFLQARANLVLVLGNRTDISKMEASPRQVLMELFLLVDRYDLYGKVAYPKTHRSDEVPDLYRLAAQQRGVFINPALTEPFGLTLIEAAACGLPILATADGGPQEIIRHCRNGLLFDALDLEAIRSALHQAFQSDSQWQTWADNGLKGVQAHYSWHSHVEMYLQALDQLAEKSVLPVLSVQRQPLQCQTHPLPTTLTRNRLLTLERLLISDIDHTLIGDRAALERLLTLLQRRPEMGFGVATGRHLEMTLEVLHEWGVPIPDVLITSVGSEIYYGPHLVPDTSWQQHISYRWEPQRVRDTLADVAGLRLQPPENQRSHKISYNVDTTVLPSITPVLRLLRQQKLHCRPIFSHNQFLDILPLRASKGDALRYLALKWGYPLQKLLVAGDSGNDEQMLTGNTLAVVVGNHSPELEKLRDRPHIYFAKGHYAQGILEAIEHYGF

SEQ ID NO: 16365 - protein, 479 aa, Nostoc sp. PCC 7120
MSDLVLFWHRRDLRIADNIGLAAARQQSSKVVGVFCLDPNILERDDVAPARVTYMIGSLQELQQRYVQAGSQLLILHGDPVQAIPHLAEALNAKAVFWNWDVEPYSQTRDRAILDILKDKGIQFLTHKWDQILHSPDEIRSGSNTPYTVYTPFWKNWSSKPKAKPVETLQNAEGLTESEQELAQKAGVKTLPTAKDLGFFWDADLIIAPGEAAAQAKLEEFTAKAITEYQEQRNFPAVDGTSQLSAALKFGVIGIRTVWQATLEALENSRSEEASAAIRTWQQELAWREFYQHAMYNFPELADGAYRETFKNFPWETNEEHFQAWREGKTGYPIVDAAMRQMNESGWMHNRCRMIVASFLTKDLLINPQLGEKYFMQKLIDGDLSANNGGWQWSASSGMDPKPLRIFNPASQSQKFDPDAEYIRRWVPELRSMDTEYLVTGKITPLERHAVGYVKPIVDHQKQQQLFKQRYQQQKATSL

SEQ ID NO: 16366 - protein, 312 aa, Deinococcus radiodurans R1
MAYKDYYDVLGVSRSASDADIKSAYRKLAKQYHPDKNQGDEKAADKFKEIGEAYAVLNDPEKRKLYDQYGHTGQVPPGYGDAGMGGGFQGGDFGGFDPGQFSDFFQQMFGGRGGMGGMGGRGGFAGGQVNLDDLFGGASGGLGGAGAGRRFVQNVEGELQVTLREALEGSDEVINVDGKRLSLRVPAGTRDGARLRLAGQGPGGGDVLLTIRVLEDARFELDGDDLTTTVDVPAPVAALGGEVKVQLLSGKSGNLNVPAGSSGGRKMRLRGQGWPKKSGGNGDLYVRLNVTVPKDLSDEEKELYTKLRDLQK

SEQ ID NO: 16367 - protein, 448 aa, Listeria monocytogenes
MAKHRYLPMTEQDEKEMLDVIGVKSIDDLFQDIPEKIRFKRDYDLKPAKSEPALLRELSKLASKNANTSEYASFLGAGVYSHYIPTVVDHVISRSEFYTAYTPYQPEISQGELQAIFEFQTMIAELTGMDLANSSMYDGGTALAEAAMLASGHTKRKKILISGAVHPESSNVLKTYATGQHIEVEVIPELDGKTDIEALKKALSDDIAGFVAQYPNFYGQVEPLAELEKLVHENNSLLLVSSNPLSLGLLTPPGEFGADIVVGDSQVFGIPESFGGPHCGFFAVTNKLMRKVPGRLVGETVDENGKRGYVLTLQAREQHIRRDKATSNICSNQALNALASSVAMATLGKTGLVEMAKQNLDKSHYAKQKFREKGFEVLFSDGFFNEFVVKLSKPIKEVNKSLLDEGIIGGYDLGFYEEKYKHHMLVAVTEMRTKEEIDAFVASLEGAK

SEQ ID NO: 16368 - protein, 260 aa, Nocardia farcinica IFM 10152
MSDAATLERRGSVALITLNRPDAMNAVDSALSRAVGAALEQLAEDPQLRVGVITGAGRAFCAGADLKALAAGQNIGDPEHPEYGFAGLVQHFVDKPLIAAVNGFALGGGTEIVLACDLAVMSDQASLGLPEVKRGLVAAAGGLLRLPRQIPHKIALEMALTGAPVDAETAARWGLVNRVVPADQVLAVALELAETIAANAPLAVRASKRIIHRAAAFGSDWDAPIWQMNMEQTMPVFLSKDAAEGPRAFAEKRAPQWRGE

SEQ ID NO: 16369 - protein, 543 aa, Lactobacillus sakei subsp. sakei 23K
MKAQQILNDPFLNKGTAFTAEERAQFGLTGMLPPHVQTIDEQVKQAYAQYQSKANMLEQRIFLMSIFNENRVLFFKLFSQHVAEFMPVVYDPTIADTIENYSALYVNPQHAAFLSIDDPDSMKTTLANAADGREIKLIVVTDGEGILGIGDWGTQGVDISVGKLMVYTAAAGIDPSQVLPVVLDAGTNRESLLNDELYLGNWHERVRGDRYYDFVDQFVQTAEELFPNMYLHFEDFGRSNAANILNKYKDQIVTFNDDIQGTGIITLAGIMGALNISGGKMTDQVYMSFGAGTAGAGITHRIFEEMLQEGLTEEQARSRFYMVDKQGLLFDDDPELTPEQKPFARKRSEFANADELTTLEAAMKAIHPTILVGTSTQPGTFTESIVKEMAAHTERPIIFPLSNPTKLAEATAEDLIKWTDGKALVATGIPAAPVEYNGVTYEIGQANNALVYPGLGLGTIASTAKVLNDEMISKAAHSLGGIVDPTEPGAAVLPPVTKLDVFSQTVANAVAQSAVDQGLNKEEIADVQKAVADMKWEPEYKAL

SEQ ID NO: 16370 - protein, 1208 aa, Magnaporthe grisea 70-15
MEVRPQARVPPRPVLEEASMRTNYSISQNSATPPNYQHGGLKTENIRPAQPQKTRRDIPVSSSHVPLNPRLYEIREEAQSTPQSKRESQASTASYKSSSSNTFRKPKTHVGPWQLGKTLGKGSSARVRLARHTSTHQYVAVKIVAKSTCKMTQAGSLAKLDEIDSAAPEKVEGMRRMPIALEREVAILKLIEHPNIVKLYDIWENSNEIYLILEYVERGDLFDFISKHGPMPEEEAIFVFRQIMSALEYCHSYGICHRDLKPENILLKSNGQVKIADFGMAALHQGPRTPLWTFCGSPHYAAPELLREKAYRGEKSDIWSMGVILFAMMAARLPFDDEDMNLMFAKARKAIYHMPSFFSDEAKDLIHRLLQVDPRKRLSMRQMWQHPVVWKYGYLDELGGEGIPEVPNPRTRQEIKPLDLCDIDPQILRPIQSMWHTLSEDELVKKLISDDYRERQLENYDPSLTHSPSDYHHIRPPLWLTKVSTRQFMTNKANGQGRSISKFTVISNVTETGTGANLGTVRSYDPYKSPAVKQPQATHARIVIHRDSTDTDRNAASLGSTSHRRPRANSTGSWKRPARRSQLGSRILTPRSTASSVQSSRKFHARSRTSSRQKRAMDFSTARRKAAAAKLSNQQTLLGTDGSKTVTGWNIQCSSDPDIPGDTADSSNARLRSKDRLHEELRHFSSSIAKDCDEAFNSSLLSVSQFDGDRSRQGSPFSLSLGTPVSATPVTPVVTPTIPRPSARPWDSRPLPPTPPSSSHEKESAVNFGENPSILARRGQPPTQGYNLRSGPVAMTPTPSDRRVVSAPVHGGQYGGCATGKLPSIEEATPNTIQDEVNRSRIVSLPAKPVATAPTSNEARGLEFLSNAEQTIRIVHSPSAQRESGITRRPHPIQANAKPSKMVGTSTGPVKQASIDLYHADDSIISHRNAQLAQTSSHGSASTFAMRKKTSSWFKRLSRESKGSKGSLCDELDDTKSIDVPHGLTSGPIKNERDNSSINMSHRPPEKTSNKKKSFFLPFWRHKSEPRMSLAEPDFEESPSPETNAAVKSHKTSGNNLLNFGDAESAERMIKPQQNWLARLFRVKPVTRVICLSISRRRARQEVAILLRDWRKYGIRDVEVDKKRNVVFARLSSKNHLNIKEVALACEIITVIEHGKRNHLSIVRFTQEKGAASSFQRVVDTMRDVLGNRNLLVTDKSKAKMMIKTLNS

SEQ ID NO: 16371 - protein, 482 aa, Corynebacterium glutamicum ATCC 13032
MNANARVFILNSLAMNDPQRSPTLLWFRDDLRLSDNAALKWAADHGPVIGLFIDETINRSIGAAARWWREQSLNALAQDLSFYGVPLLRRTGNPLEILPKIVSEMEVKAVTWNRRYHQPLCEVDATLKKNLRDKGIEVHSHPGFLLTEPWEVSTATGTPYKVFTPFSKAAWEVARVHAYETVKNNVPVPSHLTGPEDVELPILEMEQPFWSTTLVKECAPGEKNASEKLFDFLEHLQDYPQARDSLARSATSKLSAHLRFGEISIHRVWAETAAIDSEGTELFLKELLWRDFAWHRLYALPHMDTQNVRMQFNRFGWSWDPSEKDKLNTPSTPLIPTKADQFHEDLAAWRAGKTGIPLVDAGMRELWATGSMHNRVRMVVASFLTKNLQIHWRHGEEWFWETLVDADPASNAFNWQWAAGSGDDASPYFRIFNPVTQAKKFDPDETYIRRWVPEYGTPSYPDPIVDLKESRQIALDAYSAIK

SEQ ID NO: 16372 - protein, 524 aa, Cyanophora paradoxa
MASPQMAQLFSRSTQALIFNYKPNPVQRMLDFDFLARRETPSVAGLINVGSKGGFEKVFFGTKEIAVPVYASTQDAVRAHPNADVFINFASFRSAYQSSLEALEIPSIRVVVIIAEGVPEGDVKKLIAVSKKKGKIIIGPATVGGVQAGAFKIGDTAGTVDNIISCKLHRPGSVGFVSKSGGLSNECYNILSRTTDGLFEGIAVGGDAFPGTTLADHVIRFQHIPQIVVLGELGGTDEYEIVEAMKKGVITKPICAGVSGTCAKVFPSEVQFGHAGAKSGGMAESAEAKNQALRDAGAHVPTSFEELPDTIGKVYKDLVNSGKHVPVQDIPAPEMPMDIKKAMKAGKIRASTNIICTISDDRGEEPTYAGIPMSEMIEQEYSVGDVLALLWFKRQLPKYATRFLEMCLIICADHGPCVSGAHNAIIAARAGKDLVSCVASGLLTIGPRFGGAIDDAARDFKAACDAGMAADEFVESMKKLGKRIAGIGHRIKTAENPDKRVQLLSEYADRHFPTTKYLNFAKSV

SEQ ID NO: 16373 - protein, 260 aa, Clostridium perfringens str. 13
MELNNVIFEKEGNIGVLTINRPKALNALNSETLKDLDTAIDHIEKQDDIYVVILTGAGDKAFVAGADIAEMKDLNEEEGKEFGLLGNKVFRRLENLDKPVIAAINGFALGGGCEISMACDIRIATTKAKFAQPEVGLGITPGFGGTQRLPRIVGPGKAKELIYTGDMIKADEALRIGLVNKVVEPENLMEEAMSLAKKISNNAPIAVKLCKDAINRGIQVDIDSAVVIEAEDFGKCFATEDQTEGMSAFVERREKNFKNK

SEQ ID NO: 16374 - protein, 414 aa, Nocardia farcinica IFM 10152
MTRFDTIERAVADIAAGKAVVVVDDEDRENEGDLIFAAEKATPELVAFMIRYTSGYICVPLTGEDCDRLGLPPMYATNQDKHGTAYTVSVDAREGITTGISAADRATTMRLLADADAKADDLTRPGHVVPLRAKDGGVLRRPGHTEAAVDLARMAGLRPAGVICEIVSQKDEGHMARTEELRVFADDHDLALISIADMIAWRRKHEKQVVRVAEARIPTAHGAFTAVGYQSIYDDVEHVALVRGDIGDGEDVLVRVHSECLTGDVFGSLRCDCGPQLDAALEMVDQEGRGVVLYMRGHEGRGIGLMHKLQAYQLQDSGRDTVDANLDLGLPADARDYGTGAQILVDLGIRSMRLLTNNPAKRVGLDGYGLTITERVPMPLRANAENLRYLRTKRDRMGHDLVGLDDLDLGETAQ

SEQ ID NO: 16375 - protein, 474 aa, Halobacterium sp. NRC-1
MSSEDIQDTDTEARFEFKKEENSAFESEKGLTEETIRVISEDKDEPDWMLDRRLRALEQYTKMPMPTDWPGQPDLTELDIEEIVPYIRPDVDKRSGADEWEDLPDEIQDTFEQLGIPEAERNALSGVGAQYESEVVYQNMQERWEEKGVVFCNMDEAVQEYPELVKEHFMTSCVPPSDNKFAALHGAVWSGGSFVYVPEDVTVNMPVQAYFRMNSEGMGQFEHTLIIAEEGSEVHYIEGCSAPKYGSHNLHSGGVEVFVGEDAHVQYSTVQNWSKNTFNLNTKRAVVEGNGTMEWVSGSMGSKATMLYPSTILKGRGATDNHITIAFAGDGQDIDTGAKVYHNAPDTSSTIESKSIAKDGGRTNYRGLVHIADGAEDSKTNVECDALMFDNDSTSDTMPYMEINESKVDVAHEATVGKIGDEDVFYLQSRGLDDDDAKQMIVSGFIEPITEELPIEYAVELNRLIELEMEGSLG

SEQ ID NO: 16376 - protein, 511 aa, Cylindrotheca fusiformis
MAEFDNTFILEFCSGGNESSSDVQVLCQVASLANGTSASAGGLTEGINTFFLLFAGALVFIMQAGFAMLCAGSVRQKNVKNIMLKNMLDACGGAIGFWTIGYAFAYADNSSGNKTFIGGKNFFVNQLDESGGAWIGFFFQFAFAATAATIVAGTVAERCKMSAYLCYSIFLTGFVYPVVVHSIWSADGWLTAFRDDPWQGVGVIDFAGSGVVHMCGGATALVAAIVLGPRKGRFYDEDGNALETPASFPAHSVALQVLGTFLLWFGWYGFNPGSALVIDNAASASTSALCAVTTTLAAASGCVTAMFTDTLIEMMATGEASYDLTMAMNGALAGLVAITAGCSVVTPWASLIIGIIGGWVYLGLSKLLIKLKIDDAVDAVPVHFGNGMWGVLAVGFFAEPDAMVTAGYNDVPGVFYKGDGSLLLCQFVAIVWVCAWVFFLMTPFFVVLNILGMFRVDPLEEEVGLDISHHRGSAYDMTTAKKEDVEELMEHRSSKHGKVEIPKEVQKEDTA

SEQ ID NO: 16377 - protein, 404 aa, Halobacterium sp. NRC-1
MSTQLHTDISAETVRRIADERDEPAWLRETRLDALEALDDLAFPSVIETPGRKWTTLEDLDFDALVDPLSQTEDKDQVGAENARVESFHDALQDDDLADRVEDAFGSVIDPHQNRLTALSTALFTTGTVVYVPAGVDAEDVTIRTSMNSRSLFNYTLVITEDNATATILERQDTGDDVDGERYYSGIVEVDAGENSYVQYGSLQDFDEQTYNYTLKRGHADTYATVNWIEGNIGSRLTKTGVSTELAGDASETKIVGAFFGHDDQHFDLDAKVWHRAEHTTADLVTRGVIDDDARSVYEGVQDVGSDAWDTSSYQRENTLMLSDESEADASPKLIINNHDTEASHSATVGQVDQETLFYMQDRGLTAQQATDMLVAGFFVPVLEEVEVQELREDLETRIAERLD

SEQ ID NO: 16378 - protein, 641 aa, Cyanophora paradoxa
MASPQMAQLFSRSTQALIFNYKPNPVQRMLDFDFLARRETPSVAGLINVGSKGGFEKVFFGTKEIAVPVYASTQDAVRAHPNADVFINFASFRSAYQSSLEALEIPSIRVVVIIAEGVPEADVKKLIAVSKKKGKILIGPATVGGVQAGAFKIGDTAGTVDNIISCKLHRPGSVGFVSKSGGLSNECYNILSRTTDGLFEGIAVRGDAFPGTTLADHVIRFQHIPQVKMIVVLGELGGTDEYEIVEAMKKGVITKPICAWVSGTCAKVFPSEVQFGHAGAKSGGMAESAEAKNQALRDAGAHVPTSFEELPDTIGKVYKDLVNSGKHVPVQDIPAPEMPMDIKKAMKAGKIRASTNIICTISDDRGEEPTYAGIPMSEMIEQEYSVGDVLALLWFKRQLPKYATRFLEMCLIICADHGPCVSGAHNAIIAARAGKDLVSCVASGLLTIGPRFGGAIDDAARDFKAACDAGMAADEFVESMKKLGKRIAGIGHRIKTAENPDKRVQLLSEYADRHFPTTKYLNFAKSVEAYTLTKSNNLILNVDGCIGALFCDFLVSSQCFTDEEIQEVLDIGTMNGLFVQARTIGLIGHALDQKRLKQPLYRHPWDDILYAEEYLTREQKEEARMSGNKSQKDFVEMQLRS

SEQ ID NO: 16379 - protein, 340 aa, Glycine max
IRLEIGRTLKPHEYIGMVRREVLDAYLRDRAKENGANVINGLFLKMDIPKDNNSPYVLHYSSYDGKTNGAGEKRTLEVDAVIGADGANSRVAKSIDAGDYEYAIAFQERVRIPDDKMVYYENLAEMYVGDDVSPDFYGWVFPKCDHVAVGTGTVTHKGDIKKFQLATRKRAEDKILGGKIIRVEAHPIPEHPRPRRLSGRVALVGDAAGYVTKCSGEGIYFAAKSGRMCAEAIVEGSENGKRMVEEGDLRKYLEKWDKTYWPTYKVLDILQKVFYRSNPAREAFVEMCADEYVQKMTFDSYLYKTVVPGNPLEDLKLAINTIGSLVRANAIRREMKKLNV

SEQ ID NO: 16380 - protein, 127 aa, Gibberella zeae PH-1
MSKLYVGNLSWNTTDETLRQTFSEFGEVTDSIIMRDRDTGRARGFGFVTFSTEEQATAAVDALNEQELDGRRIRVNVANARPAGGNGGGFGGGRGGGYGGGRGGYGGGDRSYGGGDRSYGGGDRGGY

SEQ ID NO: 16381 - protein, 399 aa, Borrelia burgdorferi
MKDYNMIDSHTRRFDSTTNPTILKVIGAGGGGSNAVNRMIEYGVRDVEFIVANTDLQALQTSIAPIKIALGAKVTAGLGAGGKPEIGQAAAEEDIDVIRNHLSGADMVFITAGMGGGTGTGAAPVIAQVAKELGILTVGVVTKPFKFEGPKKLRLAEQGINNLRKSVDTLIIIPNQKLLTVVDKRTTIKDAFKRADDVLRMGVQGIAGLIIEHGEVNIDFADVKSIMQGQGDALMGIGYGKGENRAVDAATSAISNPLLEEVRIEGSKGLLVNVTGGDDFSLLELEEIMGIITVSVDDEATVIYGHAINSNLEDEIYVTVVATGFASKKQKEISSTPENNTLSSKEFDTLMSGNQNAPSGSYEQQDSSFAAKSKNVNYFDDDIDVPTFLRNLNKKSSDD

SEQ ID NO: 16382 - protein, 528 aa, Streptococcus agalactiae 2603V/R
MKFTELNLSQDILSAVEKAGFVEPSPIQEMTIPLALEGKDVIGQAQTGTGKTAAFGLPTLNKIHTEDNTIQALIIAPTRELAVQSQEELFRFGRDKGVKVRSVYGGSSIEKQIKALRSGAHVVVGTPGRLLDLIKRKALKLNHIETLILDEADEMLNMGFLEDIEAIISRVPETRQTLLFSATMPDPIKRIGVKFMKDPEHVKIKATELTNVNVDQYYVRVKENEKFDTMTRLMDVDQPELSIVFGRTKRRVDELTRGLKLRGFRAEGIHGDLDQNKRLRVIRDFKNDHIDILVATDVAARGLDISGVTHVYNYDIPQDPESYVHRIGRTGRAGKSGQSITFVSPNEMGYLTIIENLTKKRMTGMKPATASEAFQAKKKVALKRIARDFEDQELVSKFDKFKADALELATQYTPEELALYVLSLTVQDPESLPEVEITREKPLPFKPSGGGFKGKGGRGNGRGGDRRRNDRGDRRGNRDRDDRGSRCDFKRRDDKFKKDNRRQENKKPHKNTSSEKQTGFVIRNKGDK

SEQ ID NO: 16383 - protein, 353 aa, Streptococcus pneumoniae TIGR4
MNKRVQAFLAKMQEKELDGIIINNLKNVYYLTGFWGSNGTVFISRDRQVLVTDSRYIIAAKQETSGFEIVADRDELAVIAGIVKDMGLTRIGFEDEISVSYYHRMQAAFAGLNLLPQTQFVEGLRMIKDEAEIAAIRKACSISDQAFRDALDFIKPGKTEIEIANFLDFRMRELGASGLSFDTILASGINSSKPHAHPMHKPVELGEAITMDFGCLYDHYVSDMTRTIYLGHVSDEQAEIYNTVLKANQALIDQAKAGLGFRDFDKIPRDIIIEAGYGDYFTHGIGHGIGLDIHEEPYFSQTSTETIKTGMALTDEPGIYIEGKYGVRIEDDILITETGCELLTLAPKELIVI

SEQ ID NO: 16384 - protein, 314 aa, Glycine max
  misc_feature (41)..(41): Xaa can be any naturally occurring amino acid
  misc_feature (110)..(110): Xaa can be any naturally occurring amino acid
  misc_feature (136)..(136): Xaa can be any naturally occurring amino acid
MGTKEGKWVGAIFFNCKFWFFGVADFEAKIMGKKRKHSETXSKKEDAAPERPARTLLGWKDKNQVEDNNNADSPIFRNKEKLLVTCSRRINYRYRHLMLNLVTLLPHLQXRYKVESKETKGATLNELVELKNCPLXYFLSHRMEELKLTGNHLQGSRPILTFSANFEKDAHWKLLKEMLLQIFETPKDHRKAKPFHDPPFVFSIVDDHIWFRNYQISAHHNESDKLPRGGLDKMTLIEVGPRFCLNPIKIFGGSFGGPTLYENPLYVSPNQIRALEKKKKSGKFAKKVKAKTRRKMHEMSNPLEPDEFADMWKD

SEQ ID NO: 16385 - protein, 451 aa, Pisum sativum
MATHAALASTRIPTNTRFPSKTSHSFPSQCASKRLEVGEFSGLKSTSCISYVHSARDSSFYDVVAAQLTSKANGSTAVKGVTVAKLKVAINGFGRIGRNFLRCWHGRKDSPLEVIVVNDSGGVKNASHLLKYDSMLGTFKAEVKILNNETITVDGKPIKVVSSRDPLKLPWAELGIDIVIEGTGVFVDGPGAGKHIQAGAKKVIITAPAKGADIPTYVIGVNEQDYGHEVADIISNASCTTNCLAPFAKVLDEEFGIVKGTMTTTHSYTGDQRLLDASHRDLRRARAAALNIVPTSTGAAKAVSLVLPQLKGKLNGIALRVPTPNVSVVDLVVNVAKKGISAEDVNAAFRKAAEGPLKGILDVCDVPLVSVDFRCSDVSTTIDSSLTMVMGDDMVKVVAWYDNEWGYSQRVVDLAHLVANKWPGTPKVGSGDPLEDFCETNPADEECKVYE

SEQ ID NO: 16386 - protein, 1765 aa, Shewanella oneidensis MR-1
MDKSKLRTFRSKILSHIALPLILIMATVYGITSWFNYLSIEKRLYENLAQESSHSASRLQFLLEHAQANTQGLSDFIGLLADKDDINNPEKLKTVLTNRIQRNPDFFGSAIAFKPNTFPNKKLFSPYVYRSGSGFNYLDIGADGYDYTDGNWDWWSKAINQVGGYWSKAYFDEGAGNVLMITYAVPFGVQPDYFGVTTVDLALDRLPEQLGIAPSRLVVLDDQGRLIFHSDKEKVLAASSSGWLDKQNIKNIAFATLLNDGQAGQASFVDDKGTVYLASVAEVAKLKWRVVVMVPKHELFASLLDDIASAILNLSLLTLLLLLTCYIAAKRLTRPLEALESGILAFGQGKAQELTIPKGAVSEIVTLSETFNQMAALLAEREQAILDSRGNRFARLIDGMSDKSFYCSLDPDGQLAQVSEGVTKVLGIPPELLKRKYQRLFSANPLNEKNWEYTDLALKGQNVPPHQIELVDAKGQARRLDVFMQPLVSDTGELMSVEMLFTDVTEQFSAAAWSNAVLEAAPEAMLIVDQNGQIVFSNSRCQQLFGYDAKAMLALQIETLLPEELRHLHTGERLDFLREGRDRPMASARHVRALKSDGGEFVAEIALSILPSDFDGRRQVAASIRDMTQKIMVEQKIRDSELRFRGLVTNIPGAVYRTRIGEVWVIEYVSDNIAEITGYAASQFIENRQRTFTSLILEDDRALCNQHIERALAQQETFEVEYRIRHRDGSIRWVHEKGKASYSEEGLPLWFDGSIDDVTESKLAIDEIEASRQQLTNITESIPCTVYQLRWVSPTDRSFTFLSGAALAMLGLHREELLRDFNIIAERIFDEERPEVISALAGKSDDQLRWIREFRYRHPNGGIRWMEAGASGHYADDGSIIWNGYVMDVTERKSIEEELAVSEAHFKALFDGATIGIVNVDIKGLILDCNYQFCEDMGLSRDELRSTPIFDVLSAQDKDVAKAQFKELVEGKIDHYRGERSFVRPSGEPLWMTVNVSTLLDSQNQFESAVVSMVDMTELKLLSDELLVAKDEADAASKAKGDFLANMSHEIRTPMNAIIGMSQLCLQTQLDKKQKNYLEKIERASQSLLSIINDILDFSKIEAGKLDIENVSFQLDTMLEDLSDMFSERAAQKQIELLFAVAPNVPRHLLGDPLRLGQVLINLMNNAIKFTERGEVLLSLSLVEQQNDDVVLRFSVRDSGIGLTQEQQSKLFKSFTQADTSTTRKYGGTGLGLAISKQLVELMGGSIGVESQLGHGSTFFFTVKLCISSGQKLFVGQELDGMSILVADDNATARDIMRTTLESMGFNVDTVRSGDEAIMRCSQQEYAVALIDWKMPNLDGIETAKQIKQQTKNAPRILMVSAHANQDFLTQIEQLGLAGYISKPISASRLLDGIMNALGRSGILPVRRHQDNIAPELLLPLKGKRILLVEDNEMNLEVATEFLEQVGIILSIATNGQIALDKLAQQSFDLVLMDCQMPVMDGYQATKAIRQRPELAQLPVIAMTANAMAGDKEMCLRAGMNDHIAKPIEVNLLYQTLLKYLGAPVPSLENAEFVVNESLNPLNLDVESVVKWPEHPELDIDRGLQLVQNSKRLYQRIFDRFATSQRNVVDQINKALASNKREDAVRMAHTLKGLAGNLSSSKLAELARQLELHLSENADYQVELDQIQILVASICEAIEKAKPQFEETSTSTAEHLPKDALIAALKQLRQSLEDADSDAVTQMDALKPQMSALLWQQLSPALTMINQYQFDEAVDLIDEVLAKLT

SEQ ID NO: 16387 - protein, 185 aa, Zea mays
MAEQYQLIRRRDADQPEPFEARVLPELLARLKQAGHSNDALARQLAKLDIQLVLTAHPTEVARRTLIQKYDAIAGQLATQDHRDLTPAEREQVRERLRRLIAEAWHTEEIRRTRPTPVDEAKWGFAVIEHSLWHAIPSHLRKVDKALLEATGLRLPLEAAPIRFASWMGGDRDGNPNVTAAVTRE

SEQ ID NO: 16388 - protein, 547 aa, Lactococcus lactis subsp. lactis Il1403
MKFSELGLSEGIVNTLTEIGYEQPTPIQEQTIKLALEGRDVLGQAQTGTGKTAAFGLPTIEKIDASNPAIQALVIAPTRELAVQGQEELFRFGKSKGLKVRTVFGGSSIEKQIKGLKAGAHIVVGTPGRLVDLIKRKAIKLDQLETLILDEADEMLNMGFLEDIHFIIEKTPEARQTLLFSATMPNDIKKIGVKFMKNPEHIKIAAKEMTADRIDQYFVKTKEFEKFDVLTRLLDVERPELAIVFGRTKRRVDELIRGLKLRGYRAEGMHGDLDQNKRLAVLRDFKAGHIDVLVATDVAARGLDVSGVTHVYNYDITQDQESYVHRIGRTGRAGKSGRSVTFVSYNEMGYLRAIENMTKKPMKGLKPPTKEEAYQASLSVAMDDVLRDLSDDSAKAKLAKFDKQAASLLEKFDAKELVALLLQGRVKDPDNQEEVKITAERPLPYNGEGKGFKKKGKGGGGRYKGRGNGDRDGNRGGYRGNRDGKDGDRGGDRKRNWKDRDDNRGGYRGKRDDRRFDDRKQGEKTPRKRTTGTEKSAGFVMRSRGDK

SEQ ID NO: 16389 - protein, 438 aa, Nicotiana tabacum
CLSKKFEVAEFAGLRSSGCVTFSNKESSFFDVVSAQLTPKTTRSTPVKGETVAKLKVAINGFGRIGRNFLRCWHGRKDSPLDVVVVNDSGGVKNASHLLKYDSMLGTFKADVKIVDNETISVDGKHIKVVSSRDPLKLPWAELGIDIVIEGTGVFVDGPGAGKHIQAGAKKVIITAPAKGADIPTYVVGVNEQDYSHEVADIISNASCTTNCLAPFVKVMDEELGIVKGTMTTTHSYTGDQRLLDASHRDLRRARAAALNIVPTSTGAAKAVSLVLPQLKGKLNGIALRVPTPNVSVVDLVVNVAKKGITAEDVNAAFRKAADGPLKGVLAVCDEPLVSVDFRCSDVSSTIDSSLTMVMGDDMVKVVAWYDNEWGYSQRVVDLAHLVANNWPGSCSTRKWRSHWMSFARQILLMRNAKSMNNRFCYVSSFEMDDFRSQ

SEQ ID NO: 16390 - protein, 450 aa, Synechococcus sp. WH 8102
MLRVAVIGGGPSGSCAAEILAKAGIQTWLFERKLDNAKPCGGAIPLCMVEEFDLPDDIIDRKVRNMKMISPSNREVDIKLDPLGYDDNAYIGMCRREVFDAYLRNRAADLGTTLVNGLVQKIDTGSNRQGPYTLHYADYSGGGPTGDQKTLDVDLIIGADGANSRVAKAMDAGDYNVAIAFQERIKLPAEEMTYYEDLAEMYVGTDVSPDFYAWVFPKYDHVAVGTGTMQQNQSLIKGLQKGIRERANKRLFKGEVIKVEAHPIPEHPRPRRVVGRMALVGDAAGYVTKSSGEGIYFAAKSGRMCAEAIVEISKNGTVIPTEKQIKSTYLKRWDRKYGATYAVLDILQRIFYRNDAAREAFVEMCDDRDVQKLTFDSYLYKRVVLMNPWQQMKLTLRTLGSLLRGEALAPSNYTPVPSAVGRSDGDFLAEEAVQAVKAQAKREDKKATVS

SEQ ID NO: 16391 - protein, 379 aa, Glycine max
CTAPKSLLLRFSSHTMASLGNPKSWVPYMNNKDCSQGFCSLYCPQWCYVIYPPPPPFEFPDDDSSPNFSPLVIAVIGVLVSAFLLVSYYTIISKYCGSRESSQSENHEENVELEEDHNPSLHEPWHAPTIGLDEALIKSITVCKYKKGDGLVEVTDCSVCLSEFQDDESVRLLPKCSHAFHLPCIDTWLKSHSSCPLCRASIFTFNAAALHVASPVTEPPSRNDTSSGNQRADENIVAVARDSELDAVEGEVTLTHGGAVSKSALRALSDLGNLRGRHSVIEIRDEGYDSIRRTVSMDHSFQRGSGLSIADVLHVNQEHEGCSNGAGPSKNSRGESSKSSYRRKVLHCVLSPIAMKRSFSSGRFSLSRNGRGRQWVLPV

SEQ ID NO: 16392 - protein, 125 aa, Zea mays
MAAAKIAPSMLSSDFANLASEAERMVRLGADWLHMDIMDGVRWHFVPNLTIGAPVIQSLRKHTKAYLDCHLMVTKPSDYVEPFGKAGASGFTFHIEVARDNWQDLIQSIKSKGMRPGVSLRPGTP

SEQ ID NO: 16393 - protein, 337 aa, Antirrhinum majus
MAPIKIGINGFGRIGRLVARVALQRDDVELVAVNDPFISTDYMTYMFKYDSVHGAWKHHELKVKDEKTLLFGEKPVVVFGRRNPEEIPRASTGAEYIVESTGVFTDKDKAAAHLKGGAKKVIISAPSKDAPMFVVGVNEKEYKSDLHIVSNASCTTNCLAPLAKVINDRFGIVEGLMTTVHSITATQKTVDGPSAKDWRGGRAASFNIIPSSTGAAKAVGKVLPQLNGKLTGMSFRVPTVDVSVVDLTVRLEKKATYEQIKAAIKEESEGKLKGILGYTEDDVVSTDFVGDSRSSIFDAKAGIALNDNFVKLVSWYDNEWGYSTRVVDLIVHMASVQ

SEQ ID NO: 16394 - protein, 473 aa, Pseudomonas syringae pv. syringae B728a
MSSSSTSAAAGQQGRQRAASNRLIFISVLVATMGALAFGYDTGIIAGALPFMTLPADQGGLGLDAYSEGMVTASLIVGAAFGSLASGYISDRFGRRLTLRLLSVLFIAGALGTAIAPSIPFMIAARFVLGIAVGGGSATVPVFIAEIAGPSRRARLVSRNELMIVSGQLLAYVLSAVMAALLHTPGIWRYMLAVAMVPGVLLLVGTFFVPASPRWLASKGRFDEAQDVLEQLRPSKQDAQREVDEMKAQDEEARHRPKARELLRQRWVIKLLLIGVGLGFTAQFTGVNAFMYYTPIILKNTGMGTNAALTATIGNGVVSVIATLLGIWAIGRYGRRHLLMTGLVIVILMQAALGCVLQFMPQNMTQSYTALACILVFLLFMQMCISPVYWLLMSELFPMQVRGLLTGTAVSMQWLFNASVAFTFPIAVDTIGNPTFFIFAAINIGSLIFVFLCLPETKGKSLEQIEKHLKKEL

SEQ ID NO: 16395 - protein, 331 aa, Gibberella zeae PH-1
MPLPAKPLDAISQAFPPKPHFTESNVPDLTGKVTIVTGANTGVGREIAQVLYSKNATVWVAARNEKKGLDAIEGIKKQHPASKGSIKFLKLDLADLTTIGPSAKEFLAQETKLDILFNNAGVMTPPEGSKTEQGYELQLGVNCLGHFLFTKHLTPLLQSTAKSAPKNSVRVIWVSSSAADVLSPKNGFERDNLDYHQPRNLMHKYATSKAGNYYHNTEFARKYKNDGIVSVSLNPGNLASELDRTSPWYMYYPRMFTTYPSINGAYTELFAAFSEEITTENSGIWVVPWGRFMPIRPDVQKGALPESEGGTGMAEFFWNWSEEQIKPYFST

SEQ ID NO: 16396 - protein, 625 aa, Hordeum vulgare subsp. vulgare
MGSHGKPPLPYAYKPLPSDAADGKRTGCMRWSACATVLTASAMAVVVVGATLLAGLRMEQAVDEEAAAGGFPWSNEMLQWQRSGYHFQTAKNYMSDPNGLMYYRGWYHMFYQYNPVGTDWDDGMEWGHAVSRNLVQWRTLPIAMVADQWYDILGVLSGSMTVLPNGTVIMIYTGATNASAVEVQCIATPADPNDPLLRRWTKHPANPVIWSPPGVGTKDFRDPMTAWYDESDETWRTLLGSKDDHDGHHDGIAMMYKTKDFLNYELIPGILHRVVRTGEWECIDFYPVGRRSSDNSSEMLHVLKASMDDERHDYYSLGTYDSAANTWTPIDPELDLGIGLRYDWGKFYASTSFYDPAKNRRVLMGYVGEVDSKRADVVKGWASIQSVPRTVALDEKTRTNLLLWPVEEIETLRLNATELTDVTINTGSVIHIPLRQGTQLDIEASFHLDASAVAALNEADVGYNCSSSGGAVNRGALGPFGLLVLAAGDRRGEQTAVYFYVSRGLDGGLHTSFCQDELRSSRAKDVTKRVIGSTVPVLDGEALSMRVLVDHSIVQGFDMGGRTTMTSRVYPMESYQEARVYLFNNATGASVTAERLVVHEMDSAHNQLSNEDDGMYLHQVLESRH

SEQ ID NO: 16397 - protein, 254 aa, Frankia sp. EAN1pec
MADSVLVERHDAVLVITINRPEARNALDAEAARGIAAAADELDGDPQLRVGVLTGAGGSFCAGMDLKAFLRGETPNIKGRGFGGITVTPPRKPLIAAVEGWALAGGFELLLACDLVVAAATSRFGVPEVKRALVAGGGAAMLLPRRIAFSVALELLLTGEPVTAERAAALGLVNRVVPEGGALAGALELAAKIAANGPLAVATTKQIARAQADWTAEEGWQRQAELCAPVFASEDAREGATAFAEKRPPVWLGR

SEQ ID NO: 16398 - protein, 442 aa, Synechococcus sp. WH 8102
MTLRLLLVRHGLSSFNKERRIQGRDDLSNLSEEGHEQARRLGASLTEVPFDAIYSSPLQRAASTTASLLEGRGGSAPTPVFDDGLLEVDLEPWSGMSIDELTERHPVDFATWKRQPLELDLQRRDGSSYRPLVELMDQARSFVDGLLQRHPVDQDGTVLVVAHNAILRCLMLTLLGEPEQGFRRLRVDNTSLSIFNLRPGVDQPQVQIECLNSTTHLQPLPDRGKGARLILVRHGETDWNKAGRFQGQIDIPLNDHGRSQAAAARDFLKDVSIDRAWSSTLSRPTKTAEIILEAHSGVPLTQIDGLVEIGHGLWEGKLESEIREGWSELLDTWKRSPETVQMPEGETIQDVWARSVTSWQEIAKGLKPEETALVVAHDAVNKTILCDLLGLTPADIWAVKQGNGGVTVVDITPDPSQPAVVTCLNLTSHFGSVIDRTAAGAL

SEQ ID NO: 16399 - protein, 629 aa, Poa pratensis
MARLRPFAGGAGSVAAVVVVFTGWLLAAGGVSAGDPPLSPKGLNYEVAALMAVKSRMRDEKGVMAGRDINSVDPCTWSMVTCSADQFVVSLQVANNGLSGALSPSIGNLSYLQTMLLQNNRISGDIPPEVGKLAKLKALDLSGNQFVGEIPNSLGQLTQLNYLRLDRNNLSGQIPVNVASLPGLTFLDISFNNLSGPVPKIYAHDYSLVGNKFLCNSSILHGCTDVKGGTHDTTSRPSAKAKNHHQLALAISLSVTCAIIFVLLFVCWLSYCRWRLPFASADQDLEMELGHLKHFSFHELQSATDNFNSKNILGQGGFGVVYRGCLRNGTLVAVKRLKDPDVTGEVQFQTEVELIGLAVHRNLLRLYGFCMTSKERLLVYPYMPNGSVADRLREYRHGKPSLDWSKRMRIAIGAARGLLYLHEQCNPKIIHRDVKAANILLDESFEAVVGDFGLAKLLDRQDSHVTTAVRGTIGHIAPEYLSTGQSSEKTDVYGFGILLLELITGPKTLSNGHGQSQKGMILDWVRELKEEKKLDKLVDRDLKDLFDIAELECSVDVIIQCTLTNPILRPKMSEVLQALESNVTLAENGIDLNREALPYGGSCSFSVRHEDPHDSSSFIIEPIELSGPR

SEQ ID NO: 16400 - protein, 629 aa, Poa pratensis
MARLRPFAGGAGSVAAAVVVFTGWLLATGGVSAGDPPLSPKGLNYEVAALMAVKSRMRDEKGVMAGWDINSVDPCTWSMVTCSADQFVVSLQMANNGLAGALSPSIGNLSYLQTMLLQNNRISGDIPPEVGKLAKLKALDLSGNQFLGEIPNSLGQLTQLNYLRLDRNNLSGQIPINVASLPGLTFLDISFNNLSGPVPKIHAHDYSLVGNKFLCNSSVLHGCTDVKGGTHDTTSRPLAKAKNHHQLALAISLSVTCAIIFVLFFVFWLSYCRWRLPFASADQDLEMELGHLKHFSFHELQNATDNFNSKNILGQGGFGVVYRGCLRNGTLVAVKRLKDPDVTGEVQFQTEVELIGLAVHRNLLPLYGFCMTSKERLLVYPYMPNGSVADRLREYHHGKPSLDWSKRMRIAIGAARGLLYLHEQCNPKIIHRDVKAANILLDEGFEAVVGDFGLAKLLDRQDSHVTTAVRGTIGHIAPEYLSTGQSSEKTDVYGFGILLLELITGPKTLSNGHGQSQKGMILDWVRELKEEKKLDKLVDRDLKDLFDIAELECSVDVIIQCTLTSPILRPKMSEVLQALESNVMLAENGVDLNREALPYGGSCSFSVRHEDPHDSSSFIIEPIELSGPR

SEQ ID NO: 16401 - protein, 471 aa, Frankia sp. EAN1pec
MDDVAVLTPRSTDFPRWYQDVLDKAELADNGPVRGTMVIRPYGYALWERMQADVDTRIKAAGAVNAYFPLFIPESYLRREAEHVEGFSPELAVVTHGGGKELAEPVVVRPTSETVIGEYMAKWTQSYRDLPLLLNQWANVVRWELRPRLFLRTSEFLWQEGHTAHADAADAAAYARRIALEVYREFMTSVLALPVFVGAKTRKERFAGAINTMTCEGMMGDGKALQMATSHELGQNFARAFDIDFLGPDGGRHLAWTTSWGSSTRMIGGLIMAHGDDNGLRVPPVLAPTQVVVLPVRDDDAVVTKAREITDALTALGVRARLDARPGLSFGRRVTDAELKGIPVRVEVGPRDLAAGNVTLARRDTAEKFPVPLGEAAGRVPVLLDEVQASLYAQALALRDERTSDVTSLTEAVEAAATGFARLPWRLVGEDGEARLAEDSLTVRCLQTPDGALPTADTRDEDLVCLVARAY

SEQ ID NO: 16402 - protein, 112 aa, Thermosynechococcus elongatus BP-1
MKKVEAIIRPFKLDEVKIALVNAGIVGMTVSEVRGFGRQKGQTERYRGSEYTVEFLQKLKVEIVVEDNQVDMVVAKIIEAARTGEIGDGKIFVTPVEQVIRIRTSEKDHEAV

SEQ ID NO: 16403 - protein, 227 aa, Nocardia farcinica IFM 10152
MSTFSRPAEPMIAPSILSADFAHLADEARRVEGSDWLHVDVMDAHFVPNLTLGLPVVQSLLKATDIPLDCHLMIEDPGRWAPPYAEAGAHNVTFHAEATDDPVAVARDIRAAGAKAGLSVKPNTPIEPYLEILKHFDTLLVMSVEPGFGGQSFIPHVLDKARTVRRLVDSGELRLLVEIDGGINADTIEQAAEAGIDCFVAGSAVYNTDDPGATVAKLRRQAAAARG

SEQ ID NO: 16404 - protein, 519 aa, Caulobacter crescentus CB15
MVVRTTACALIPVTLMSPATKGPTRTSRASTGRYGPMGRTPVASVSNAGPSAGMSADGGKVNMTFVAAIVAVATIGGFMFGYDSGVINGTQEGLESAFNLSKLGTGLNVGAILIGCAIGAFAAGRLADVWGRRTVMIISALLFVISAIGTGAAESSIVFIIFRLIGGLGVGAASVLCPVYISEVTPANIRGRLSSVQQIMIITGLTGAFVANYALAHTAGSSTAEFWLGLPAWRWMFWMQIIPAGVFFLCLLGIPESPRYLVAKGKDAQAEAILSRLFGAGQGAKKVEEIRASLSADHKPTFSDLLDPTTKKLRVILWAGLVLAVFQQLVGINIVFYYGSVLWQSVGFTEDDSLKINILSGTLSILACLLAIGLIDKIGRKPLLLIGSAGMAVTLGVLTWCFSTATTVNGALTLGDQIGLTALIAANLYVIFFNLSWGPVMWVMLGEMFPNQMRGSALAVCGFAQWIANFAISVSFPALAAASLPMTYGFYALSAVVSFFLVQKLVHETRGKELEAMQG

SEQ ID NO: 16405 - protein, 101 aa, Brassica napus
MNSLAIRVSKLLRSSPISPPLGNQAPLLSPKSSGSVAVTAWRSWFSTGPSDDEGLEEDFEETISERPAELQPHGVDPRKGWGFRGVHRAIICGKVRQAPLQ

SEQ ID NO: 16406 - protein, 606 aa, Bifidobacterium adolescentis
MTDMIAHRGPDSEGHYIDEHAALGHRRLSIIDLGGGQQPIYNEDGSKVITFNGEIYNYQTLREELIAAGHTFTTKSDTEVLLHGYEQWGVDLLQRVRGMFTFVIWDKNKQELFGARDHFGIKPFYYAKMNGTFMYASEIKSLLRHPDFVKELNAEALKPYMTFQYPAIGETFFKGVYKLPEGHYFTYRDGKMDIHRYYDEDFREGKQKLGELVNSIDQTVCDSVKAHQIADVEVGSFLSSGVDSSYVAAVARPQHTYSIGFGKGTYNESQQAGELAELLKLNNTAESLTDEEAFAAFPRIQWHLDEPDSNPSCVPLYFLSALAAKDVKVVLSGEGADELFAGYIDYGVHTKFKPIKVVTRWLTHLPAGARKAIARFCKGKTFPGAWHLYANLAPAEESFIGQARVFEESQSEQLLKPEYRKAPSVQSIVDKTYARVEGKGLSELKKKQYLDMHQWMPGDILLKADKMTMAHSLELRVPLLDKELMGVAEQVPTKYLITDENTKYAFRQAAGRHLPKEWYDREKLGFPVPIKKWLREEKFYKYVRSVFERDYVSQFFDQDALLKMIDDNYAGKTDDRRKIWTVYSFLTWYDVYFVHDGEKPDVIAIA

SEQ ID NO: 16407 - protein, 212 aa, Arabidopsis thaliana
  misc_feature (116)..(116): Xaa can be any naturally occurring amino acid
  misc_feature (144)..(144): Xaa can be any naturally occurring amino acid
  misc_feature (165)..(165): Xaa can be any naturally occurring amino acid
  misc_feature (171)..(171): Xaa can be any naturally occurring amino acid
  misc_feature (175)..(175): Xaa can be any naturally occurring amino acid
  misc_feature (181)..(182): Xaa can be any naturally occurring amino acid
RIIHQHTQRALNLEEEDDVPQSQLFGLTSHKLLRRSVNCLGVAESGKAAQATTQDDLLTWVKNDKRRMLHVVYRVGDMDRTIKFYTECLGMKLLRKRDIPEEKYTNAFLGYGPEDXHFVIELTYNYGVDKYDMGAGFGHFGIAXDDVAKTVELVKAKGGKVSREXGPGKGXKTVXAFIEDXXYNFELLEGGLHRTSCKVCSRVGDSKGHKVH

SEQ ID NO: 16408 - protein, 355 aa, Callistephus chinensis
MVISANTRVESLATSGSDLIPKEYIRTHDELTTITNIFDEEKSDQGPQVPIIDLHDINSNDPKTRDKCTYELRKAATEWGVMHLVNHGISSDLINRVKAAGKSFFDQPVEEKEKYCNDIASGKIQGYGSKLANNACGQLEWEDYFFHLAFPEEKRDLSIWPTTPHDYIPATTEYAKQLRALATKILAALSLGLGLEEGRLEKEVGGMEELLVQLKINYYPKCPQPDVALGVEAHTDVSALTFILHNMVPGLQLFYGGKWVTAKCVPDSIIMHIGDTIEILSNGKYKSILHRGLVNKEKVRISWAVFCEPPKDKIILKPLPETISEDEPPLFPPRTFQQHMEHKLFRKNNDAVDPK

SEQ ID NO: 16409 - protein, 264 aa, Medicago truncatula
MGFDSNLGGSPSSSSPSSKRTRDPEEEVYVDNLRSHKRYLSEIMASSLNGLTVGDSLPDNLMESPARSESAFSLRDDMSLQYSPMSEDSDDSRFCETGLHSCSSHPDSRPGSPVSPCRYQRSQNTFSSAPSTSLNGSHGFSVSAVTCSQPRQRSSDSDGRFPSSPSDICHSADLRRAALLRSVQMRTHPPGSASLELPFGSGQEPPPNIDPEERPCSYLKSMVDERDYQIEECSPIGIPEPEFNHDNKPCRVLNMNPKEADSGG

SEQ ID NO: 16410 - protein, 229 aa, Chlamydophila pneumoniae CWL029
MKKQESVLVGPSIMGADLTCLGVEAKKLEQAGSDFIHIDIMDGHFVPNLTFGPGIIAAINRSTDLFLEVHAMIYNPFEFIESFVRSGADRIIVHFEASEDIKELLSYIKKCGVQAGLAFSPDTSIEFLPSFLPFCDVVVLMSVYPGFTGQSFLPNTIEKIAFARHAIKTLGLKDSCLIEVDGGIDQQSAPLCRDAGADILVTASYLFEADSLAMEDKILLLRGENYGVK

SEQ ID NO: 16411 - protein, 297 aa, Streptomyces lividans
MDLTGRRAVVTGGASGLGAETVRALAAAGAEVTIATRHPQSAEPLVQEAAAAGAGRVHAEALDLSDVASVDSFARAWRGPLDILVANAGIMALPTRTLTPYGWEMQLATNYLGHFALATGLHAALRDAGSARIVVVSSGAHLGTPFDFEDPHFARRPYDPWAAYGQSKTADVLFTVGARRWAADGITANALNPGYILTRLQRHVDDETMRAFGVMDDQGNVKPLPYYKTPEQGAATSVLLAASPLLNGVTGRYFEDNQEARTVEDGDVQPGGVAAHALDPEAADRLWEYGADTLSAG

SEQ ID NO: 16412 - protein, 497 aa, Oryza sativa
MATCLDSLGPLLGGAANSTDAANYICNRFTDTSSAVDATYLLFSAYLVFAMQLGFAMLCAGSVRAKNSMNIMLTNVFDAAAGALFYYLFGFASRRTPSKGFIGKQFFGLKHMPQTGYDYDFFLFQWAFAIAAAGITSGSIAERTRFSAYLIYSAFLTGFVYPVVSHWFWSTDGWASAGRLTGPLLFKSGVIDFAGSGVVHLVGGIAGLWGAFIEGPRIGRFDAAGRTVAMKGHSASLVVLGTFLLWFGWFGFNPGSFTTISKIYGESGTIDGQWSAVGRTAVTTSLAGSVAALNHAVRQEMADGALERDRRLQRSPRRVRAITAGCSVVDPWASVICGFVSAWVLIGCNKLALMLKFDDPLEATQLHGGCGAWGIIFTALFARKEYVELIYGVPGRPYGLFMGGGGRLLAAHIVQILVIVGWVSATMGTLFYVLHRFGLLRVSTSTEMEGMDPSCHGGFGYVDEDEGQRRVRAKSAAETARVEPRKSPEQAAAGQLV

SEQ ID NO: 16413 - protein, 530 aa, Lactococcus lactis subsp. lactis Il1403
MCGFLFMETSDLTIEEFKSNLELIEHRGPDDQQHVRDTLGNDFGFCRLSIMDLSDLGRQPFGLNGKRVMCNGEIYNFLSLRKFLETKGYKFTGDSDCEVLLPLFETTGIETMVKMLDAEFAFVLVDENTAEIFAARDPFGIRPLFYGYNKVTGKISFSSEAKALISTCNDVTPFPPGYYYANGEFHVFNDIAEVSTIVEEPLAEISGHIRRKLERAVKKRLHADAPMGYLLSGGLDSSLVCAIAAKELESPIKTFAIGMETDPIDLKYAREVADFLRTDHTEILMTKEDVLSAVREVIWHLETWDITTIRASIGMYLICKYIHENTELKVLMTGEVSDEMFGYKYTDFAPSAGAFQKEAQKRVHELYMYDVLRADRCLAAHSLEARVPFADLDFAAYVMSINPSRKLNTYGKGKYLLRHAFEGTELLPDEILFREKAAFSDAVGHSMVDYLKEFADEKYSDEDLAKASEKYPKHTPFTKESLMYREIFEEFYPGYEDWILDFWMPNRDWVGAEVTDPSARVLSNYGDSGK

SEQ ID NO: 16414 - protein, 495 aa, Oryza sativa
MATCADTLGPLLGTAAANATDYLCNQFADTTSAVDSTYLLFSAYLVFAMQLGFAMLCAGSVRAKNTMNIMLTNVLDAAAGALFYYLFGFAFAFGAPSNGFIGKHFFGLKQVPQVGFDYSFFLFQWAFAIAAAGITSGSIAERTQFVAYLIYSAFLTGFVYPVVSHWIWSADGWASASRTSGSLLFGSGVIDFAGSGVVHMVAACRTLGRPHRGPPHWRFDHAGRSVALRGHSASLVVLGSFLLWFGWYGFNPGSFLTILKSYGPPGSIHGQWSAVGRTAVTTTLAGSTAALTTLFGKRLQTGHWNVIDVCNGLLGGFAAITAGCSVVDPWAAIICGFVSAWVLIGLNALAARLKFDDPLEAAQLHGGCGAWGVIFTALFARKEYVDQIFGQPGRPYGLFMGGGGRLLGAHIVVILVIAAWVSFTMAPLFLVLNKLGLLRISAEDEMAGMDQTRHGGFAYAYHDDDASGKPDRSFGGFMLKSAHGTQVAAEMGGHV

SEQ ID NO: 16415 - protein, 121 aa, Arabidopsis thaliana
  misc_feature (19)..(19): Xaa can be any naturally occurring amino acid
IKLACLLLACMIVAGPITXSNAALSCGSVNTNLAACIGYVLQGGVIPPACCSGVKNLNSIAKATPDRQQACNCIQGAARALGSGLNAGRAAGIPKACGVNIPYKISPSPNCKTREVMSYHR

SEQ ID NO: 16416 - protein, 369 aa, Burkholderia vietnamiensis G4
MRRTCSPTCTCRIRERGLTEQLPADTANRIFQETDMARKITYSQAINEALAQEMARDDSVIVMGEDNAGGAGAPGEDDAWGGVLGVTKGLFHKFPGRVLDTPLSEGGYIGAAVGAAACGMRPVAELMFIDFMGVCFDQIFNQAAKFRYMFGGKAVTPVVIRAMYGAGLRAAAQHSQMLTSLFTHIPGLKVVCPSTPYDAKGLLIQSIRDNDPVIFLEHKLLYTREGEVPEESYAIPFGEANVVREGDDATIVTYGRMVHLATDAAAKLAKDGIHVDVIDLRTTSPLDEETILESAERTGRVVVVDEANPRCSIATDIAALVAQRAFRSLQAPIELVTAPHTPTPFAGVLEDLYIPSADAIAQAVLKTRS

SEQ ID NO: 16417 - protein, 566 aa, Rickettsiella grylli
MPKFKPVTDQNENVRFLETNALGSTLLTTAKLNKGTAFTESERQELGLLGKLPYRVESLQQQTQRVYQQFLKKEDNLEKHLYLRCLHNTNEILFYKLVSQHLTEMLPVLYTPTVGKAVEQFSQEFQEARGLYIAYPDNDRIDQILDNRLNPEVDIIVMTDGEGVLGLGDQGIGGMGICIAKLIVYVLCAGINPNRLLPIQIDVGTNNEQLLNDPLYLGWRHPRVSGQQYDDMIARVVSAIQRKLPRAYLHWEDFGRENARRNLECYRDTMCTFNDDMQGTGAVTLVALLSAIRRTKVPLTEQRIVIVGAGTAGTGIADQLCAGMLRQGLSRDEALSRFYLVGRHGLIQDSTPNLTAFQKPYAQRLMNKTEATWQLYDVVQKFKPTVLIGSSGQGGIFTEAIVKTMASQVEYPIIFPLSNPTEKSEATPDDLFNWTEGRALIATGSPFGQVYYKGEKIPIAQCNNALIYPGIGLGVVTAQATRLSDGMIWEACNALSHFTQTSSSKKALLPHFEDIQAMSRCIALAVAAQARREGLAQVPDSIDLTQEMDRQFWKPEYLPYRYSKSL

SEQ ID NO: 16418 - protein, 382 aa, Tropheryma whipplei TW08/27
MASQSPTQTRSERFCSENPSDFPEPSNRDLAWKYAPIPIVENFLSKDFYPYEYHISLAGSDAGNVKPAIDRPIFRWSTKENVALGRAGLPEDRTSAFAWQRTQRVLLVDLEGAESIILDRRFERCTVAHTIIHVKAHADAKLFINNHGYDGLIENLEIILEDNAILQLISCQDWDEASVHLAYHFVYFGKNSRLKHCSATTGGRFVRLNPAFQLAEEGSEVESLGIYFAQNKQHFEHQVYVHHAAQDTKSEINYRGVLSGNGARTAWVGDVLIDTLARNSDSYEQNRNLMIGSGTRADSVPNLEIKNGNILGAGHASATMRFDDEHLFYLQSRGIDKNQALRMVVSGFVHGMLQKSDIGCGGDVLLRLFSKKLDALVSCIGD

SEQ ID NO: 16419 - protein, 88 aa, Methanosarcina barkeri str. fusaro
MKPMLLDFSATWCGPCRMQKPILEELEKKYGDKVEFKVVDVDENQEMASKYGIHAVPTLIIQKDGTEVKRFMGVTQGSVLASELDKIL

SEQ ID NO: 16420 - protein, 306 aa, Gibberella zeae PH-1
MASVNFSPDTDIPSLNGKVILITGGNSGLGLESTRQLLKHDPAKIFLACRSKAKYDQAIAELQEQGSKTDAVSFLSLNLASLESIKSAVRQFQQESTRLDVLLNNAGIMMTPEGLTEEGYEIQIGTNHMGHAFLTHLLLPVLEETTKINPDVRVICLASMGEAMAPKNPYQFEQFKTTMSNFSTSARYYISKLANVHYAAALAERHPSLKIISIHPGIVQTNLTGPAVSNSLIMGTLTRLFFSVVGVNSSKGALNQLWALSDPKAESGVFYHPVGVTGKGSKLSQNKDARESLWEWTEKEIKQHLS

SEQ ID NO: 16421 - protein, 168 aa, Zea mays
MEYGQQGQRGHGRTGHVDQYGNPVGGVEHGTGGMRHGTGTTGGMGQLGEHGGAGMGGGQFQPAREEHKTGGILHRSGSSSSSSSEDDGMGGRRKKGIKEKIKEKLPGATRDDLHATATTGGAYGQQGHTGSAYGQQGHTGGAYATGTEGAGEKKGIMDKIKEKLPGQH

SEQ ID NO: 16422 - protein, 163 aa, Zea mays
MTTTAAGHGCCWAGIPPFALLPRILSTGRETPPPRASLVASSSKLRALAPRLRVSNRPRRLIVSASSSGEANSDAVPSPTEAAIDIKLPRRSLLVQFTCNACGERTKRLINRVAYERGTVFLQCAGCQVYHKFVDNLGLVVEYDLREENELQGENAVDTSSED

SEQ ID NO: 16423 - protein, 300 aa, Arabidopsis thaliana
MELLFLLCSIIYTSITSIFFSLLLPFRFLLHRLLPSRAAVDPNVSFYEGTVWHDRLRPVRHSFRYSVRYALFDLDKAINTPPDHFSADEARRVSRTTGPIFLLTIPPSVGYEQNPLSLYYCYDLEGASKRLSKCIAQVTNTPWGERVTFVFDPESDLVAKSLQVSPFMDMLGNWKIRANEPGDDLSVSIASQHPHFGNYFSATLKAKRIPLSRVSDPAVFFWLMPHKVAIWIYWHALQLWWKSVPFMEEAAKRDQELRCPGLDGSDSDKPNKFDGLKGDGCSSSFGGCRFAWRDANWPWS

SEQ ID NO: 16424 - protein, 410 aa, Alkaliphilus metalliredigenes QYMF
MSNPFQTALSTLKAASEVAGLEPNVVKMLSQPKRIFEFTIPMKMDNGDLEIFTAYRVHYNDALGQTKNGIRFVPNLDLDTVKALGFWMTVKHAVSGIPAGGGKGGIRVDPKKLSEGELERLTRSYIRKLPMKGAWVDIPGADIGTSAKTQGWMLDEYEEIMGFHSPAAINDKPAELNGTVGSMEATGTGAFFVTMEAVKDLSIPKGSTVVIQGFGNVGRIAGRLLHQEGYVVIAVSDISGGIYNPQGLDVEKLEAYVDETGSIKDFPGTTVVSNEALLQLECDILMPSAVQSVITEQNAHNIKTKLIMECANGPTTPAGEAILEKRGIIIVPDVLTNSGSAIVCSFERTQGLTDTYWDIETVNSKLKERIVKAYKETTTTAKDKNTSLRNAAWVNGLTKVAKAMKARGWV

SEQ ID NO: 16425 - protein, 505 aa, Ralstonia metallidurans CH34
MNIAENRQIAEIHHYVGGTVRRAGTDRFADVFNPATGEVAARVAMGSADDVAAAVAAAKAAAPAWAEMPPLRRARILFKFKELLDRHHDDLAALITREHGKVFSDAKGEVTRGIEVVEFACGIPNLLKTDFTDNIGGGIDNWNLRQPLGVVAGITPFNFPVMVPMWMFPVALACGNTFVLKPSERDPSPSLLIADLLKQAGLPDGVFNVVQGDKVAVDALLAHPDVQALSFVGSTPIAEYIYTEGTKHGKRVQALGGAKNHLVVMPDADLDQAVDALVGAAYGSAGERCMAISVAVAVGDVADRLVPRLAERAATLKIRNGMEDDAEMGPLVTAAHKAKVEGYIAKGVAEGAKLVTDGRGHKVDGHENGFFVGGTLFDNVKPDMTIYKEEIFGPVLSVVRVHDFAEAVDLINRHEFGNGVSCYTSDGGIARAFARQIQVGMVGINVPIPVPMAWHSFGGWKRSLFGDHHAYGEEGVRFYTRYKSVMQRWPDSIAKGAEFTMPVAK

SEQ ID NO: 16426 - protein, 469 aa, Ralstonia metallidurans CH34
MSLFRTKNIDAMLEVSEHDGLRKVLGAVDLVLMGIGAIIGTGIFVLTGTGALTAGPALTVSFVIAAMACGFAALCYAEFASAIPVSGSIYTYSYATLGEIVAWMIGWDLLLEYGLATSAVSVGWSGYFQSLIAGFGIHLPTVLTAAPGAVPGEHTLFNLPACLIMLAITWIVSYGVKESARLNNVMVAIKIGVVLLFIAVGVWHVKPANWQPFAPFGMTGVFNAAALVFFAFIGFDAVTSAAEEVRNPRRDLPIGIIGSLAVCTILYVTVAAIMTGIVPFMKFEGVDHPVSLALQYAGQNWVAGFVDLGAILGMTTVILVMTYGQTRIIFAMSRDGLLPEALSTVHPVHATPYTATWTVGIVFAAIAAFVPLNVLAELINIGTLAAFTLISIAILVLRRTRPDLRRGFRCPGVPVVPLLAVGFCLFLMAHLQALTWIAFLCWIGLGLIIYFAYSRRNAVLHNHGGDAEG

SEQ ID NO: 16427 - protein, 287 aa, Methanosarcina barkeri str. fusaro
MLDEGYESRIIDGKVLAKKIEDEVRSGVEALVSGRGITPGLATVLVGDDPASKMYVRLKHRACERVGIQAEDHFLPAETSQEELISLINTLNKDQNVHGILLQLPLPKHLFPQEAMEAIAPEKDADGFHPYNMGKLMIGDEGLVPCTPHGVIRALEEYNVPVKGKNVVIVGHSNVVGKPLAAMFLNRNATVSVCHVFTDDLKKYTLDADILVVATGVKHLIKADMVKEGAVIFDVGITKEKDGVYGDVDFENVIKKAALITPVPGGVGPLTVAMLMKHVLGCAETNY

SEQ ID NO: 16428 - protein, 275 aa, Glycine max
MAIFNGHNHLALAFGMLGNVISFMVYLAPLPTFYRIYKKKSTEGFQSLPYLVALFSSMLWLYYASLKPADATLLITINSLGCVIEIVYIVMFTIYATKDARNLTVKLFMVMNVGSFALIFLVTYFAIHGSLRVQVVGWVCVSIAVGVFAAPLSIVAQVIRTKNVEFMPFNLSLFLTLSAVMWFFYGLLLKDICIAIPNILGFTLGLLQMLLYAIYRNGKTNNKEVATKEEKALEAIMKNVVVVNPLGTCEVYPVINKENNNGQGIEGAKEKECPV

SEQ ID NO: 16429 - protein, 106 aa, Oryza sativa (japonica cultivar-group)
MVVALLLAAPAASAVTCGQVVSMLAPCIMYATGRVSAPTGGCCDGVRTLNSAAATTADRQTTCACLKQQTSAMGGLRPDLVAGIPSKCGVNIPYAISPSTDCSRVH

SEQ ID NO: 16430 - protein, 338 aa, Yarrowia lipolytica CLIB122
MPTTLVTGATGFLAGHCVDQLLKAGHNVIGTVRNPAKAERLTQALQSSVDSGKLTLETVKDIQNEAEFEALFKKHPKLDYILHTASPFNFTAEDPEEEMLKPAIQGTLSVLKTAKAHAPNVKKIVITSSVASNLDVATFYDPNTTYTEKSWNPMTWEQAAEKGNPFANYMGSKLYAEKAGIEFRDKEKPQFSITWINPTYILGPGVALDMSALNTSNEVLANVLGSKKGQDPEGVAGWFVDVRDCARAHVVALKPELDGERLLLATAKFCTQDIEDIANKIPEFHGKIAIGNPANREKELNHASQCDASYSKKLLDIDWIPFNKTVEDFANQWYEQHK

SEQ ID NO: 16431 - protein, 457 aa, Staphylococcus epidermidis RP62A
MAIGVILNRVFRLNNNPLFDYIYSNKESINHCYFIIPTEEFEEEAKKKAQYYYGSIQKFMYELQRYDIEPFLMSYDKLIDFCKKQAIDKVVVAGDIMSYHHEEYDILHQRKRFKQANIQVISLRANHYFNPRKTHNKQGEPYKVFTSFYRKWRPYLMIRDEYDYHLEDISKVVVKSQHKIKEDYHSYGISERDVQNRWSEFLSQDIENYKENREYLPEVLTSQLSIYLAYGMIDIIQVFNDLLQNYDKNEQNYETFIRELIFREFYYVLMTNYPETAHVAFKEKYQQLKWSYNEENFKLWKDGNTGFPIIDAAMEELKTTGFMHNRMRMVVSQFLTKDLFIDWIWGESFFKQKLIDYDAASNVHGWQWSASTGTDAVPYFRMFNPIRQSERFDNNARYIKTYIPRLNQVDAKYLHDTHKFEQQIKGQGVEIGKDYPKQMIDHKESRQRVMSEFKALD

SEQ ID NO: 16432 - protein, 117 aa, Oryza sativa (japonica cultivar-group)
MARAQLVLVALVAALLLAGPHTTMAAISCGQVNSAVSPCLSYARGGSGPSAACCSGVRSLNSAATTTADRRTACNCLKNVAGSISGLNAGNAASIPSKCGVSIPYTISPSIDCSSVN

SEQ ID NO: 16433 - protein, 360 aa, Deinococcus radiodurans R1
MQVYLAGQNIEVQDLDEDEDELEGDDADTEDAVPGTAQAQQDDDEEKYFDDMPRAVSNDPVRQYLHEIGRVSLLTLEEEIALARRIEEGEEARKQLEEDESLDDRSRRRLMRQMEDGAAARQGLIEANLRLVVSIAKKYTGRGLGFLDLIQEGNQGLIRAVEKFEYRRRYKFSTYATWWIRQAINRAIADQARTIRIPVHMVETINKLTRTARQLQQELSREATHEEIAEAMGPGWDAAKVEEVQKVSQEPVSLETPIGDEKDSFYGDFIPDENLDSPVDNAAKTLLSEELEKALGKLTEREAMVLKFRKGLVDGREHTLEEVGQRFSVTRERIRQIENKALRKLKYHESRTRKLRDFLD

SEQ ID NO: 16434 - protein, 256 aa, Pseudomonas sp. Y2
MPNTLVVQAHQATRLITLHRPHALNALTTELLGELADELQRCADDPDVRAVVITGSRKAFAAGADLNEMAERDLVGMLDDPRQGYWQRITQFPKPLIAAVNGYALGGGCELAMHADILIAGEDAQFGQPEINLGIMPGAGGTQRLLRAVGKSLAMQMVLAGESISARRALDAGLVSEITQPELTVERALQIAQRIAAKAPLAVRLAKEALLKAQDLDLASGLRFERHAFTLLAGTADRDEGIRAFQEKRQADFKGC

SEQ ID NO: 16435 - protein, 258 aa, Synechococcus sp. WH 8102
MPQWISTPERGSLYQWLPRSLKSPRIPRYFYMSTKPLVISPSILSADFSRLGDEVKAVDEAGADWIHVDVMDGRFVPNITIGPLIVEALRPVTQKPLDVHLMIVEPEKYVPDFAKAGADIISVQVEACPHLHRNLAQIKDLGKLAGAVLNPSTRLDTLEYCLELCDLVLIMSVNPGFGGQSFIENQVQKISDLRRMCDERGLDPWIEVDGGVKAGNAWKVIEAGANAIVSGSGVFNQPDYAEAIKGIRNSSSKEAVLV

SEQ ID NO: 16436 - protein, 263 aa, Pseudomonas sp. Y2
MSYQHILFSIEAGVATLSLNRPEQLNSFNTLMHQEVREALKTVQNNSDVRVLLLTGEGRGFCAGQDLSDRNVAPGAEMPDLGQSIERFYNPLIRTLRELPIPVICAVNGVAAGAGANIPLACDLVLAARSASFIQAFCKIGLIPDSAGTWALPRLVGMARAKALTLLGERLSAEQALEWGLIYRVVDDAELRDQAIALARQLATQPTYGLGLIKRSLHASLDNSFEQQLTLERDLQRLAGRSEDYREGVAAFMEKRAPQFKGY

SEQ ID NO: 16437 - protein, 327 aa, Chlamydophila pneumoniae J138
MTTPAYLLANFGGPRHAKDLQEFLISLLTDRDVTGTFLPRVLHRHLFTFIAKKRVPKVLPQYQSLQNWSPIYFDTETLAKTLSEILRAPVIPFHRYLPSTHEKTLLALRTLHTRHVIGIPLFPHFTYSVTGSIVRFFMKHVPEIPISWIPQFGSDSKFVSLITCHIRDFLQKLGILEKECCFLFSVHGLPVRYISQGDPYSKQCYESFSAITTNFKQSENFLCFQSKFGPGKWLSPSTAQLCQNIDTDKPNVIAVPFGFISDHLETLYEIERDYLPLLRSRGYRALRIPAIYSSPLWVSTLVDIVKENSTVVAEELIKSGKKHTGIR

SEQ ID NO: 16438 - protein, 591 aa, Arabidopsis thaliana
MAAALECWSSRAGDGGDPDNDLVDQVLMRTHDRSESVITSLPETSLEVEGSTTVFDQSSSAMQKRFQRLSRNVSEAIVSLKNTLNLDSARDNQSFGGAMTPKAEVSGGGGGRKLVWATVVKNLAKMYPGSQLPEKLVSNLKKHYDSLPFSYSQADFDMKEVFLHVKLIEQAAGDDNPVFMIQEVSTEEPRGSVLRLTFACNSFLSWSTMSGVLDSASICCKKIQIFEKKGLTLGVVLLLDQSGQHSLFKTRVENTLKVATKKPKPTSVKLPFGLCGCQEQNGGVGELGGVEEESIQHSSRLGIENLNSTIQIQVPLPSSSFAVSVDEWQTIQSGGNEIGKWLLNSDSFEFGDQIGPTSLKGIFRGKRVGIEKLKGCDKGNSYEFELRKDYLELMACGHKSILQFYGVCIDENHGLCVVTKLMEGGSLHELMLKNKKLQTKQILRIAIDIAEGLKFVNDHGVAYRDLNTQRILLDKHGNACLGNIGIVTACKSFGEAVEYETDGYRWLAPEMSNAYSFGMVLWEMVTGEAAYASCSPVQAAVGIAACGLRPEIPKECPQVLRTLMINCWNNSPSKRPNFSHIHNTLLRAVSR

SEQ ID NO: 16439 - protein, 944 aa, Candida glabrata CBS 138
MLKFLRTNRYYHLLSGTKLSQKIIEQCRNEIDTIRKNHKFLPTLKILQVGNRLDSSAYVNMKLKKSEQSGVKCIVEKLPESITEFELLSKIEAINNDTSIHGLLIQLPLPKHLDETTITSSVSVDKDVDGFHIYNAGELTKKNGHPKFIPCTPNGCIELLKEHNITIAGKNAVVIGRSSIVGTPITSLLKNLDATVTQCHSKTVNLPEIVKTADIVIAACGQANMIKGEWLKEGAVVIDVGINHVPDNTKKSGHRLVGDVDFDSASKKASYITPVPGGVGQMTVAMLVSNVVLAAKRSLANFEKVPEIKPLPLKLEKPVPSDFEISKSQEPKHIDNLAKELGIFQDELELHGHYKGKISTSILDRLESKKNGRYVLVAGITPTPLGEGKSTTTMGLVQALTGHLGKPSIANVRQPSMGPTFGVKGGAAGGGYAQVIPMDQFNLHLTGDIHAVGVANNLLAAAIDTRMLHESTIKNDAKFYDKLVPKKNGIRSFSPAMTRRLERLGINKTNPDELTAEEINKFVRLNINPDTINIKRVVDVNDRMLRKITIGQAATEKGRTRETGFDITVASELMAILALSTSLQDMKRRVSKLVVASDINGKPVTVDDIGCSGAIVALMTDTIKPNLMQTLEGSPVLVHAGPFANISIGASSVMADKIALKLMGTCLDSQEPGYVVTEAGFDFSMGGERFFNIKCRSSGLVPDTVVLVATVRAIKSHGGAPDVKPGQALPQEYIEENIEFVKKGVANLVKQIENVKKFGVPVVVAINKFSTDTENETKAIEESCKAAGANNVVVSNHWEEGGKGAIDLANAVVQSCEEPKSFQFLYDTDLPIKEKLETIVKEMYGGAGIELSEKAQKQIALYTEQGFDKLPICIAKTQYSLSHDPKLKGVPQDFIVPIRDIRASIGAGYLYALAAEIQTIPGLSVHAGYLNVEVDDKGNINGLF

SEQ ID NO: 16440 - protein, 427 aa, Nostoc sp. PCC 7120
MTQTVKPSLAQSPIHRTVLDNGIVVLVAENPAADIIAGRIFIRAGSCYEKREQAGLAHLLAAVMTKGCEGLSSLEIAEQVESVGASLSADTSTDYFLVSLKTVTSDFPEILALAGRILRSPTFPETQIELERRLALQDIRSQKEQPFTLAFEQMRQVMYQNHPYAMSVLGDETTLNSITRTDLVEYHQTYFRPDNLVISVAGRITLQEVVALVEQIFGDWQAPTIAPAVVNLPEISVNPQHRLKPVQTQQSIVMLGYLGPSVSSPDYAPLKLLSTYLGNGLSSRLFVELREKRGLAYEVSAFYPTRLYPASFVVYMGTAPENTSIALEGLRTEVELLCSEEVSTTNLQAAKNKILGQYALGKQTNGQIAQIYGWYEILGLGIDFDGEFQELIASVTAQDALTSAQQYLQQPYVSLVGQEEAINRAIN

SEQ ID NO: 16441 - protein, 289 aa, Bacteroides fragilis NCTC 9343
MSILIDKSTRLLVQGITGRDGLFHAKKMAEYGTNVVGGTSPGKGGTMIDDTFPVFNTMHEAVRRTQANTSVIFVPARFAADAIMEAADAGIRLIICITEGIPTLDVIKAYRFVELKGAKLIGPNCPGLISPGESLVGILPGQVFTPGNIGVISRSGTLTYEIVSHLTAKGMGQSTAIGMGGDPVVGLYFRDLLGMLQNDPQTDAIVMIGEIGGNAEELAATYIREHVTKPVVAFIAGRSAPPGKQMGHAGAIISGSSGSATEKISALEAAGIRVAGEPSEIPDLLKGSF

SEQ ID NO: 16442 - protein, 478 aa, Caulobacter crescentus CB15
MTDTLRHYIGGERVAADAPAESLNPSNTNDVVAKVPMGGQAEVDAAVDAARKAFPAWADASPEVRSDLLDKVGSTIIARSADIGRLLAREEGKTLAEGIGETVRAGRIFKYFAGEALRRHGQNLESTRPGVEIQTYRQAVGVYGLITPWNFPIAIPAWKAAPALAFGNTVVIKPAGPTPATANVLADIMAECGAPAGVFNMLFGRGSMGDALIKHKDVDGVSFTGSQGVGAQVAAAAVARQARVQLEMGGKNPLIVLDDADLERAVAIALDGSFFATGQRCTASSRLIVQDGIHDKFVALLAEKVAALRVGDALDPNTQIGPAVSEDQMETSYRYIDIAASEGGRVVTGGDRIKLDNPGWYVRPTLIADTQAGMRINNEEVFGPVASTIRVKSYEEALEIANGVEFGLSAGIATTSLKHARHFQRYARAGMTMVNLATAGVDYHVPFGGTKSSSYGAREQGFAAVEFFTQTKTSYSWS

SEQ ID NO: 16443 - protein, 469 aa, Clostridium acetobutylicum ATCC 824
MGENNSHKHSLLFIVLISCAAGLGGLLYGYDTAVISGAIGFLKKLYNLSPAMQGFVISSIMVGGVLGVGFSGFLGDAIGRRKVLMLAAALFAISAVISSISTSAFMLIFARIVGGLGIGMASALSVTYITECAPPSIRGRLSSLYQLFTILGISITFFVNLGIVNMGSETWRVSTGWRYMLACGTVPAIVFLITLFFVPESPRFLVKSGNIKKAAAVLTKINGAEIAKQELDSISKSLATENDSSLGQLLQPGLRRALLIGIFLAIFNQAIGMNSITYYGPEIFQMIGFKNNSSFLATSVIGVVEVFSTILAMFLIDKLGRKKLMEIGSAAMAVFMLLIGTSFYIKLSNGFVILIFIICFVVSFCISMGPIPWIMIPEIFPNHLRARATGIATIFLWGANWAIGQFTPMLLNGIGGAYTFWIFCGINVICFLVVTTKVPETKNKSLEEIEKFWIPKSKQNAKGSSVGAK

SEQ ID NO: 16444 - protein, 284 aa, Corynebacterium glutamicum ATCC 13032
MTAIKLDGNLYRGEIFADLEQRVAALKEKGIVPGLATVLVGDDPASHSYVKMKHRDCEQIGVNSIRKDLPADVTQEELFAVIDELNNDDSCTGYIVQLPLPKHLDENAVLERIDPAKDADGLHPVNLGKLVLNEPAPLPCTPNGSISLLRRFGVELDGAKVVVIGRGVTVGRPIGLMLTRRSENSTVTLCHTGTKDLAAETRAADVIIAAAGQPHMLTADMVKPGAAVLDVGVSRKDGKLLGDVHPDVWEVAGAVSPNPGGVGPLTRAFLVHNVVERAEKLAGL

SEQ ID NO: 16445 - protein, 244 aa, Triticum aestivum
  misc_feature (189)..(189): Xaa can be any naturally occurring amino acid
  misc_feature (211)..(211): Xaa can be any naturally occurring amino acid
MNDTDVSKQIQQMVRFIRQEAEEKAGEISVSAEEEFNIEKLQLVEAEKKKIRQEYERKEKQVDVRKKIEYSMQLNASRIKVLQAQDDLVNKMKEDAMKELLNISSNHHEYKNLLKELVVQGLLRLKEPAVLLRCRKEDHHNVESVLHSAKNEYASKADVHEPEILVDHSVYLPPSPSHGDEHGQICHGXGVVLASRDGKIVFEDTVDARLXEVVFRKKLPEDPEASWLRHKAHLYFGDGTAVSM

SEQ ID NO: 16446 - protein, 285 aa, Arabidopsis thaliana
MAEEVLSRVPMTSLRRLRFTCKKWNTLSRCRSFAKKHLVCQAKVAAKKREYKVVMMMDFRVYLMRINLQNNVELCIKRERELLFPDASDQIYVRHVFHCDGLLLCIMKDNPRLVVCNPYSGQTRWIETTNNPQRLDAYSYALGYNSSTKSHKILSFGMMFDYVSSTSAEFKIYDFNSDSWRGDIWAAVCLRRPLSGIFKSSLLLSNVRDEQLAVLFQRMDTLQMEIWVTTKIEPNTVSWSSKFFLSVDMRELTGRYSMFSFSDASFFIDEEKKVAVLTSLERMDP

SEQ ID NO: 16447 - protein, 443 aa, Clostridium acetobutylicum ATCC 824
MEILKHVMDDVIKRNPNEPEFHQAVKEVLLSLEIVAEKHPEWVKDKIFDKIVEPERQIIFRVPWVDDNGEEHINRGFRIQFNSAIGPYKGGLRFHPSVNLGIVKFLGFEQIFKNSLTGLPIGGGKGGSDFNPKSKSNSEIKRFCQSFMLELNKYIGANTDVPAGDIGVGSREIGYLYGMFKKIRNESTGVLTGKGLTLGGSLVRTEATGYGLCYFMNEALKAKGKSFDGATVIISGSGNVAIYANQKATQLGAKVVAMSDSNGYIYDANGINLNTIRKIKEVERKRIHEYTKYHPNASYTEGCDGIWKLKCDIALPCATQNEIDENSAKTLIANGCYAVGEGANMPSTIEAVDLFIKNKVIFGPAKAANAGGVATSALEMSQNSMRYSWTFEEVDTKLQNIMKNIYIKCSNAANEYGFEDNLVAGANIAGFTKVAEAMYSLGF

SEQ ID NO: 16448 - protein, 455 aa, Clostridium acetobutylicum ATCC 824
MNKKISPALIYFFGAFGGFMFGYDIGIINGALPGINATWHVSSWLEGFITSGLFVGAMIGASLMASLADRFGRRRMIMWSAIVFALGALGSAVSTSTNLLIGARVILGVAVGGASALVPMYMGEISPAETRGKLSGLNQLMITVGMLFSYGVNFAFAGAFEGWRWMLGGAMVPAMVLLIGTFILPESPRFLARIGKTELAKQVLQTLRSKEEAETEYQEIINSKHTETGSFGDLFAKQALPAVIAGCGLTLLQQIQGANTIFYYSSQILSNVFGSANGGTISTVGIGVVLVLATIVTLLVVDKFKRRTLFMTGSIGMGASLLLVGLIYPYSEAKHAWATWLVFFFICLYVVFYAYSWAATTWIVVGELFPSNVRGLATGIASAVNWFGNILVALFFPVLLETVGLSVIFFGFAAICIIGFLFAKYVLYETKGKSLEEIETYLYNRSIGKVRGLNE

SEQ ID NO: 16449 - protein, 352 aa, Ananas comosus
MASKVQLVFLFLFLCVMWASPSAASRDEPSDPMMKRFEEWMAEYGRVYKDNDEKMRRFQIFKNNVNHIETFNNRNGNSYTLGINKFTDMTNNEFVAQYTGGISRPLNIEKEPVVSFDDVNISAVGQSIDWRDYGAVTEVKDQNPCGSCWAFSAIATVEGIYKIVTGYLVSLSEQEVLDCAVSNGCDGGFVDNAYDFIISNNGVASEADYPYQAYQGDCAANSWPNSAYITGYSYVRSNDESSMKYAVWNQPIAAAIDASGDNFQYYNGGVFSGPCGTSLNHAITIIGYGQDSSGTQYWIVKNSWGSSWGERGYIRMARGVSSSGLCGIAMDPLYPTLQSGANVAVIKMVSKT

SEQ ID NO: 16450 - protein, 449 aa, Bordetella parapertussis
MGPQLVSWKNKRNLSPEILPMSQAPAHSLPSYLDAEHLGPWGIYLQQVDRVTPYLGPLARWVETLKRPKRALIVDVPIEMDNGSIAHFEGYRVQHNTSRGPGKGGVRFHQDVTLSEVMALAAWMSIKNAAVNLPYGGAKGGVRVDPRTLSHSELERMTRRYTSEIGVIIGPSKDIPAPDVNTNAQTMAWMMDTYSMNEGATATGVVTGKPIALGGSLGRVEATGRGVFVVGCEAARDLNLDVSKARIVVQGFGNVGGTAARLFHEAGAKVIAVQDHTGTIHNDGGLDVHKLLAHVGNQGGVAGFTGAQQLADDDFWGLETDFLIPAALEGQINENNAARVRAKVVVEGANGPTTPEADDILRENGVYVVPDVLANAGGVTVSYFEWVQDFSSFFWSEEEINQRLERLMREAYSAVSQVAKEHKVTLRTAAFIVACTRILQARQVRGLYP

SEQ ID NO: 16451 - protein, 966 aa, Medicago sativa
MANKMEKMASIDAQLRQLVPAKVSEDDKLIEYDALLLDRFLDILQDLHGEDLKDSVQEVYELSAEYERKHDPKKLEELGNLITSFDAGDSIVVAKSFSHMLNLANLAEEVQIAHRRRNKLKKGDFRDESNATTESDIEETLKKLVFDMKKSPQEVFDALKNQTVDLVLTAHPTQSVRRSLLQKHGRVRNCLSQLYAKDITPDDKQELDEALQREIQAAFRTDEIKRTPPTPQDEMRAGMSYFHETIWKGVPKFLRRVDTALKNIGINERVPYNAPLIQFSSWMGGDRDGNPRVTPEVTRDVCLLARMMAANLYYSQIEDLMFELSMWRCNDELRVRAEELHRNSKKDEVAKHYIEFWKKIPLNEPYRVVLGEVRDKLYRTRERSRYLLAHGYCEIPEEATFTNVDEFLEPLELCYRSLCACGDRAIADGSLLDFLRQVSTFGLSLVRLDIRQESDRHTDVMDAITKHLEIGSYQEWSEEKRQEWLLSELIGKRPLFGPDLPQTDEIRDVLDTFRVIAELPSDNFGAYIISMATAPSDVLAVELLQRECKVRNPLRVVPLFEKLDDLESAPAALARLFSIDWYINRIDGKQEVMIGYSDSGKDAGRFSAAWQLYKAQEDLIKVAQKFGVKLTMFHGRGGTVGRGGGPTHLAILSQPPETIHGSLRVTVQGEVIEQSFGEEHLCFRTLQRFTAATLEHGMRPPSSPKPEWRALMDQMAVIATEEYRSIVFKEPRFVEYFRLATPEMEYGRMNIGSRPAKRRPSGGIETLRAIPWIFAWTQTRFHLPVWLGFGAAFRQVVQKDVKNLHMLQEMYNQWPFFRVTIDLVEMVFAKGDPGIAALNDRLLVSKDLWPFGEQLRSKYEETKKLLLQVAAHKEVLEGDPYLKQRLRLRDSYITTLNVFQAYTLKRIRDPNYKVEVRPPISKESAETSKPADELVTLNPTSEYAPGLEDTLILTMKGIAAGMQNTG

SEQ ID NO: 16452 - protein, 356 aa, Ananas comosus
MAWKVQVVFLFLFLCVMWASPSAASADEPSDPMMKRFEEWMVEYGRVYKDNDEKMRRFQIFKNNVNHIETFNSRNENSYTLGINQFTDMTNNEFIAQYTGGISRPLNIEREPVVSFDDVDISAVPQSIDWRDYGAVTSVKNQNPCGACWAFAAIATVESIYKIKKGILEPLSEQQVLDCAKGYGCKGGWEFRAFEFIISNKGVASGAIYPYKAAKGTCKTNGVPNSAYITGYARVPRNNESSMMYAVSKQPITVAVDANANFQYYKSGVFNGPCGTSLNHAVTAIGYGQDSNGKKYWIVKNSWGARWGEAGYIRMARDVSSSSGICGIAIDSLYPTLESRANVEAIKMVSESRSSV

SEQ ID NO: 16453 - protein, 412 aa, Rickettsia typhi str. Wilmington
MKENFNISKLKNGLTILTYNMPYVHSVAINLIAKVGARYENEEEEGISHFLEHMAFKGTKTRTAQQIAEEFDSIGGYFNAYTGYENTVYYVRVLSENCHKALNILADIIQNSIFADEEISKEYQIIMQEIAHHHDNPDDLIYETFYNTVYKDQPLGKSILGTAKTLVKFTQEHFLNFIGKHYNAENLYLSIAGNIEHNKIVIIAEELFASLKQGVTSSFIPAKYIGGKGFIHKELEQTSLVLGFECTSYINLEKLYQTYLLSIIFGGGVSSRLFQSIREKLGLAYVVGSYNSAYFDSGVFTIYASTAHEKLELLYSEIKNEIIKITETVSTEELMRAKIQLRSNLQMAQEQNSYKSEEIGKNYSVFGKYILPEEIIEIITNIKADDIINTANKIFSGTTALAIIGPNDLNGF

SEQ ID NO: 16454 - protein, 336 aa, Emericella nidulans
MAPKVGINGFGRIGRIVFRNAIEAGTVDVVAVNDPFIETHYAAYMLKYDSQHGQFKGTIETYDEGLIVNGKKIRFHTERDPANIPWGQDGAEYIVESTGVFTTQEKASAHLKGGAKKVVISAPSADAPMFVMGVNNETYKKDIQVLSNASCTTNCLAPLAKVINDNFGIIEGLMTTVHSYTATQKVVDGPSAKDWRGGRTAATNIIPSSTGAAKAVGKVIPSLNGKLTGMAMRVPTSNVSVVDLTVRTEKAVTYDQIKDAVKKASENELKGILGYTEDDIVSTDLNGDTRSSIFDAKAGIALNSNFIKLVSWYDNEWGYSRRVVDLISYISKVDAQ

SEQ ID NO: 16455 - protein, 340 aa, Ananas comosus
MASKVQLVFLFLFLCVMWASPSAASRDEPSDPMMKRFEEWMAEYGRVYKDNDEKMRRFQIFKNNVNHIETFNNRNGNSYTLGINKFTDMTNNEFVTQYTGVSLPLNFKREPVVSFDDVNISAVGQSIDWRDYGAVTEVKDQNPCGSCWAFSAIATVEGIYKIVTGYLVSLSEQEVLDCAVSNGCDGGFVDNAYDFIISNNGVASEADYPYQAYEGDCTANSWPNSAYITGYSYVRSNDESSMKYAVWNQPIAAAIDASGDNFQYYNGGVFSGPCGTSLNHAITIIGYGQDSSGTQYWIVKNSWGSSWGERGYVRMARGVSSSGLCGIAMDPLYPTLQSGA

SEQ ID NO: 16456 - protein, 524 aa, Silicibacter pomeroyi DSS-3
MTHVTDQDRVLIFDTTLRDGEQSPGATMTHTEKLEIAEMLDEMGVDIIEAGFPIASEGDFKAVSEIAKRAQNSRICGLARANFADIDRCWEAVKHAEKNRIHTFIGTSPLHRAIPNLTQDEMAEKIHETVSHARNLCDNVQWSPMDATRTEWDYLCRVIEIAIKAGATTINIPDTVGYTAPAESADLIRRLIETVPGADDVIFATHCHNDLGMATANSLAAVAGGARQIECTINGLGERAGNTALEEVVMAMKTRHDIMPWRTGIDTTKIMAISRRVATVSGFNVQFNKAIVGKNAFAHESGIHQDGMLKNRENFEIMRPEDIGLSGTSLPLGKHSGRAALRDKLEHLGYEVGDNQLKDIFVRFKELADRKKEVFDDDVIALMRSGENAEQDHLQLVSMKVICGTGGPAEATVEMEIDGKDVSATAHGDGPVDASFKAIRALHPNEAHLQLYQVHAVTEGTDAQATVSVRLEEDGMIATGESANTDTVVASAKAYINALNRLIVRREKAGPGADAREISYKDLT

SEQ ID NO: 16457 - protein, 336 aa, Bacillus coagulans
MAVKVGINGFGRIGRNVFRAAVKNPDIEVVAVNDLTANADGLAHLLKYDSVHGRLDAEVVVNDGVSVNGKEIIVKAERNPENLAWGEIGVDIVVESTGRFTKREDAAKHLEAGAKKVIISAPAKVENITVVMGVNQDKYDADAHHVISNASCTTICLAAFARVLHQIFGEVSRMMTTAHSYTNIQRILDAATHADLRGARAAAESIIDTTNGAAMAVALVLPELKGKLNGMAMRVATANVSVVDLVYELAKEVTVEEVNAALKAIAEGELKGILAYSIEPLVIRNYNGSTVSSTIDILSTMVIDGAMVKVVSWYDNETGYSHRVVALAAYINAKGL

SEQ ID NO: 16458 - protein, 115 aa, Triticum aestivum
MARTAATKLVLVALVAAMLLVASDAAIPCGQVNSALASCVSYAKGSGASPPGACCSGVRRLAGLARSTADKQAACRCIKSAAGGLNPGKAASIPSKCGVSIPYSISASVDCSKIH

SEQ ID NO: 16459 - protein, 335 aa, Bacillus megaterium
MAVKIGINGFGRIGRNVFRAALKNDNVEVVAINDLTDANMLAHLLKYDSVHGKLDAEVVVDGSNLVVNGKTIEISAERDPAQLSWGKQGVEIVVESTGFFTKRADAAKHLEAGAKKVIISAPASDEDITIVMGVNEDKYDAANHNVISNAPCTTNCLAPFAKVLNDKFGLKRGMMTTVHSYTNDQQILDLPHKDYRRARAAAENIIPTSTGAAKAVSLVLPELKGKLNGGAMRVPTPNVSLVDLVAELDKEVTVEDVNNALKEAAEGDLKGILGYSEEPLVSGDYNGNINSSTIDALSTMVMEGNMVKVISWYDNESGYSNRVVDLAQYIAAKGL

SEQ ID NO: 16460 - protein, 324 aa, Ananas comosus [sequence omitted]

SEQ ID NO: 16461 - protein, 264 aa, Burkholderia thailandensis E264
MIELDYADDGAIALVTLKRPSANTFSADGLLELQRTLERLEADSRVRALVVTGDGPKFFSAGADLNAFADGDHAMARTMASRFGAAFEALHDARFPTIAAINGYAMGGGLECALACDMRIAERHAQMALPEPSVGLTPCGLGTQTLPWLVGEGWAKRMILAGVRVDAQTALRIGLVEDVVDTGRARDAALELARGAVALGPRAVGVAKELIGLARQGVPRGAALALERERFVDLFDGGEPREGVAAFLGKRKPQWRADDGGRPR

SEQ ID NO: 16462 - protein, 158 aa, Staphylococcus epidermidis ATCC 12228
MSIYDIAVENYDGSTYLLKRYKGKVLIIVNTATNCTLNDQFNKLEMLYKKYHKYGLEILSFPCNDFNNQEPELIKDIYRVYKYKFGITFPIHAKINVNGEHEHPLYTLLKCKQPGLFGSQIKWNFTKFVVDQQGNIVKRFLPCDNPNQMEKLIRQLLK

SEQ ID NO: 16463 - protein, 461 aa, Desulfovibrio desulfuricans G20
MHAPVSSPRHPAKRFARTAALWLVVATLLHASPALAEDAPAMLSQQHGNILWTLIAAILVMLMQAGFAMVECGFTRAKNAGNILMKNFVDFAAGSLVFFLVGYAFMFGADAGGFIGTSGFALAHVDPATEGGMWDLTFWFFQSVFAATAATIVSGGIAERTRFASYIIVSVLVTGIIYPVSGHWAWGGLAGNAGWLEGLGFADFAGSTVVHSVGGWVALAGAIVVGPRAGKYGPDGSVRAIPGHNIPLAALGVFILWFGWFGFNPGSTTTADGTIGYIAVNTSLAACAGTVTAMLTAWIRFGKPDASITMNGALAGLVGITAGCYELSPSGAIIVGIICGFVVVLSIEFLDKILKIDDPVGAVSVHGVCGAIGTLMVGLLAHPSYGGSTGLVYGGDASLLMVQALGVAVVFAWAFGMGLVVFRIVAAVAGLRVSPEEELKGLDITEHGSESYNGFQIFTVE

SEQ ID NO: 16464 - protein, 242 aa, Yarrowia lipolytica CLIB122
MKLNIAYPAQGTQKCIDIEDEHRVRGFYEKRMGQEVEADFLGDEFKGYVLKITGGNDKQGFPMKQGVMHPTRVRLLLSKDSSCYRSRRAGERKRKSVRGCIVSSDLSVLSVVIVKQGDADIEGLTTETVPRRLGPKRANNIRKLFALSKEDDVRQYVIRREVTTKSGKTYTKAPKIQRLITPRRLAHKAQLREKKVKAIQASKDAAAEYAQLLAKRVAEKKSEKAEEKKRRASSLRTQSVQA

SEQ ID NO: 16465 - protein, 369 aa, Vibrio fischeri
MAISSAKDIIEDIRLGKMVILMDDEDRENEGDLIIAAEKITPEAINFMATHGRGLICLTMTKDRCEKLGLPPMVQDNNAQFTTNFTVSIEAAEGVTTGISAADRSRTVEAAVAKNAVAADLVQPGHIFPLAAQEGGVLTRAGHTEAGCDLARLAGYEPAGVIVEILNDDGTMARRPDLEIFAEKHGIKLGTIADLIEYRNNNETTIERVAECKLPTEFGEFDLVTYRDTIDNQLHYALKKENTSSEAPLVRVHLQDTFTDILHSDRCAERSWTLPTAMQRIANEGGVLVILGNEESTDNIVHKVKVLERQDSGEAPTMAKKQGTSRRVGVGSQILADIGISDMRLLSSTSKRYHALSGFGLNVVEYVTK

SEQ ID NO: 16466 - protein, 103 aa, Anabaena variabilis
MSVYVGNLSYDVTEDSLNPVFAEYGSVKRVQLPTDRETGRMRGFGFVEMGSDAEETAAIEALDGAEWMGRDLKVNKAKPKEDRGSFGGGNRGGYGGGGGRNRY

SEQ ID NO: 16467 - protein, 159 aa, Erythrobacter sp. NAP1
MTTIADFEVTTNRGETLDLATKKGKVLLVVNTASKCGFTPQYDGLEKLYQDFKDKDFEVLGFPCNQFGAQEPGNADEIAEFCKVNFGVTFPLMAKIDVNGPDASPLYDWMKSEKKGVMGSKSIKWNFTKFLIDREGNVVKRYGPQDTPRMIAKDIEKLI

SEQ ID NO: 16468 - protein, 312 aa, Yarrowia lipolytica CLIB122
MSKPYIQSLSLADAHKADIFSVATTDKYTISASADGTVKLWENNDSNPAGSVLATNAVGFHHVATDTNGDILAAVAFDGALSLFDLRSLEPIATKINNEVSGIWAVAISGNGHMMAVTNTSGHVFQWNLETDELVHKFPVTRPSHGICVDFSQCGEYISSGHENGGLYLFSTQTGRLMYSLLGHSTPIRSVKISPNSSLLAVGDDSGIVYLYHISSGEYYTNLTGHDTWVMAVAWNESGEYVLSGSYDGKMKVWSTENKTCVCTQTALTTPVFTVAWLKKGWGLGVIGGKNQGFVAGGVGKNLVWCREAAGE

SEQ ID NO: 16469 - protein, 587 aa, Triticum aestivum
MAMAVQVFLGGLACIFSTSLLFQLLVGPCREGVFFCSQSSTKGPSTAIVSERYRTAYHLQPPKNWINDPCGPMYYNGIYHEFYQYNPDGSFNPNTSYNIVWGHSVSTDLVNWITLEPAIEPDTPNDIKGCWSGSATIVSGDQPVIIYTGVIDIEKHQVQNIALPKNRSDPYLREWTKAGNNPVIQSGVPGLNSGQFRDPTTGWIGPDGLWRIAVGAQLNGYGAALLYKSEDFLNWTRVDHPLYSSNASIMLECLDFFAVLPGSNNGLDMSSAIPNGAKHVLKMGLNFGEDVYVIGVYDLKRDVFVPDTDDSRLWPRIDYGNFYASKTFFDSKHGRRIIWAWTTETDSSSDDVAKGWAGIHSFPRTIWLDSDSKRLLQWPVEEIESLRGNEINHQGLDLKMGDLFEIEGADTLQADIEIDFELTSIDDADPFDPSWLFDAEKHCREADASVHGSIGPFGLVILASDDTEEHTVVHFRVYKSQKNYMILMCSDLRRSSLTPGLDTPTYGGFFEFDLEKERKISLRTLIDRSAVESFGGGGRVCIMARVYPVSLVDDNRQPHMYAFNNGSATVRVPQLRAWSMRRAQVSV

SEQ ID NO: 16470 - protein, 133 aa, Brassica napus
MESEGKIVFTEEQEALVLKSWSVMKKNSADLGLKLFIKIFEIAPTAKKLFSFLRDSPIPAEQNPKLKPHAMSVFVMCCESAAQLRKTGKVTVKETTLKRLGASHSKYGVVDEHFEVTKYALLETIKEAVPEMW

SEQ ID NO: 16471 - protein, 64 aa, Arabidopsis thaliana
IRITATRRRVARPCATDAAVEWDYKRGEIGRVSGVPEGHLSRKVRIYAAARTATQAGSGKLGKW

SEQ ID NO: 16472 - protein, 368 aa, Neurospora crassa
MATHNIVVFGGDHCGPEVVLEAIKVLKAIETNSPSACKFNLQNHLLGGASIDKHNDPLTDEALNAAKAADAVLLGAIGGPEWGTSSTVRPEQGLLKLRKELGTYGNLRPCNFASESLVDSSPLKAEVCRGTDFIVVRELTGGIYFGDRTEDDGSGYACDTEPYSRAEIVRIARLAGFLALAKNSPAKVWSLDKANVLATSRLWRKTVTDVISKECPQLQLEHQLIDSAAMLLVKNPRALNGVVITSNLFGDIISDEASVIPGSIGLLPSASWGGIPDGKVKCNGIYEPIHGSAPDISGKGIVNPVCTILSVAMMLRYSLNLPKEADAVEAAVKAAIDNGTKTKDLGGNATTSDMGNAVVAELEKILKA

SEQ ID NO: 16473 - protein, 608 aa, Oryza sativa
MSSSSSGRSSRIAVVTEDRCRPSKCGQQCRKRCPVNATGRQCIEVTPSSRVSLISEELCIGCGICVKVCPFDAIQIINLPSDLDKETTHRYGPNSFKLHRLPVPRPGQVLGLVGTNGIGKSTALKILAGKVKPNLGKFTDPPNWDEIMRNFRGSELQKYFTRLLEDKMKATMKPQYLDHIPKSVTGKVGDLLSKKDERHMKNLLCDTLELNQVLDRDVSALSGGELQRFAIAARAMEEADVYMFDEPSCYLDVKQRLKAAQVIRSLLQPKNYVIVVEHDLSILDYLSDYICCLYGTPGAYGVVTLPSSVREGINIFLDGFIPTENLRFREEKLTFRVTESTEEIVEGQTYQCYRYPTMTKTRCGFKLSVTEGSFNDSQIIVMLGENGTGKTTFIRMLAGRVKPDKVGDEEVDVPEYTVSYKPQELISKYSSTVRDLLFEKVPGSCTQAQFRSDVMKPLKIEQLMDRQVPTLSGGELQRVALCLCLGKPADIYLIDEPSAHLDSEQRLLAAKVIKRFILHEKKTAFVVEHDFIMATYLADKVVVFEGKPSVDCIANAPEPLASGMNRFLSHLDVTFRKDPTTYRPRINKLGSIKDAEQKAAGCYYYLEY

SEQ ID NO: 16474 - protein, 603 aa, Lactobacillus plantarum
MVMKQTKQTNILAGAAVIKVLEAWGVDHLYGIPGGSINSIMDALSAERDRIHYIQVRHEEVGAMAAAADAKLTGKIGVCFGSAGPGGTHLMNGLYDAREDHVPVLALIGQFGTTGMNMDTFQEMNENPIYADVADYNVTAVNAATLPHVIDEAIRRAYAHQGVAVVQIPVDLPWQQIPAEDWYASANSYQTPLLPEPDVQAVTRLTQTLLAAERPLIYYGIGARKAGKELEQLSKTLKIPLMSTYPAKGIVADRYPAYLGSANRAAQKPANEALAQADVVLFVGNNYPFAEVSKAFKNTRYFLQIDIDPAKLGKRHKTDIAVLADAQKTLAAILAQVSERESTPWWQANLANVKNWRAYLASLEDKQEGPLQAYQVLRAVNKIAEPDAIYSIDVGDINLNANRHLKLTPSNRHITSNLFATMGVGIPGAIAAKLNYPERQVFNLAGDGGASMTMQDLATQVQYHLPVINVVFTNCQYGFIKDEQEDTNQNDFIGVEFNDIDFSKIADGVHMQAFRVNKIEQLPDVFEQAKAIAQHEPVLIDAVITGDRPLPAEKLRLDSAMSSAADIEAFKQRYEAQDLQPLSTYLKQFGLDDLQHQIGQGGF

SEQ ID NO: 16475 - protein, 478 aa, Idiomarina loihiensis L2TR
MSEQIDQALARKYDAGFISEIESETFPIGLDEDVIARLSAIKGEPEWMLEWRLKAYRTWLKMEEPDWAHVDYPKVDYQSISYYSAPKSMKDKPKSLDEVDPELLRTYEKLGIPLHEQEMLAGVAVDAVFDSVSVVTTFREKLEEAGVIFCPISEALHKYPDLVKKYLGTVVPRGDNFFAALNSAVFTDGSFVYIPKGVRCPMELSTYFRINEQNTGQFERTLIVAEEGSHVSYLEGCTAPQRDENQLHAAVVELVALDDAEIKYSTVQNWYPGDENGKGGIYNFVTKRGLCEKNAKISWTQVETGSAVTWKYPSCILKGDNSVGEFYSVALTRGRQQADTGTKMIHLGKNTKSTIISKGISAGRSNNAYRGLVRMGPGAEGARNFTECDSLLIGDQCGAHTFPYIESSNPTAIVEHEATTSKVSDDQLFLCRQRGLDPEKAVSMIVNGFCKEVFRELPMEFAVEAGKLLEISLEGSVG

SEQ ID NO: 16476 - protein, 741 aa, Pseudomonas aeruginosa PAO1
MKFQKRSACMLGLLLIFACMAGYAVPARATAGEYSSMLRIPAPDRPGDADVVDEAPLRQAADGLRSPSPSSLVLGLLVACLVCVGCLGWNTVLQLRLRRWQRTEADLSGRLALKQALVDGIPYPVSIRTLDGRLLACNRNYLESLRMTREQARGTLLTDSDWVEGSKARLMHQQCLAVARGGTASFTDMAVRIGGQLLEIHHWVTPYRDRQGRVLGLMNGWIDITERERLARQLREAMRQADEANRAKSVFLATMSHEIRTPMNAVIGILELVLQRLAPEQRERASLEVAYEAAGSLQLLIGDILDVAKIESGHLTLTPERVRLRHVVESVRRMFEGLARQKGLRLVVELDDAPGRDVLIDPLRFKQVLSNLVSNAIKFTERGQVTIRLQERSLDEGRAIVRVDVEDSGIGIAPADQARLFQPFIQVAKGRTVQGGTGLGLAICRKLVDLMGGDVEMHSEPGKGTRVSLDLLLRQCGPKMPESGQDPLAASMEPSRRLHILIADDYPPNRVLLRQQLEFLGHRVAEAEDGQVALELWADERFEVLISDCNMPRLNGYQLARRIRIQERCERRAPILILGYTADAEPDEVQRCRDAGMDDCLFKPLGLETLRNYLATSFGRDAAQPRGLYDAAALSSLGGDRPERLRELLETLLGSNRQDLQRLAILLREGDRTRLAEHAHRIKGAARMIGARTLLEACEALEDACRRSGDGECLQAPGERLRLALEALQEELQEQLAGAAV

SEQ ID NO: 16477 - protein, 416 aa, Listeria monocytogenes
MAVEKITMPKLGESVTEGTISSWLVKPGDTVEKYDAIAEVLTDKVTAEIPSSFSGTIKEILAEEDETLEVGEVICTIETEEASSSEPVVEAEQTEPKTPEKQETKQVKLAEAPASGRFSPAVLRIAGENNIDLSTVEGTGKGGRITRKDLLQVIENGPVAPKREEVKSAPQEKEATPNPVRSAAGDREIPINGVRKAIAKHMSVSKQEIPHAWMMVEVDATGLVRYRNTVKDSFKKEEGYSLTYFAFFIKAVAQALKEFPQLNSTWAGDKIIEHANINISIAIAAGDLLYVPVIKNADEKSIKGIAREISELAGKARNGKLSQADMEGGTFTVNSTGSFGSVQSMGIINHPQAAILQVESIVKRPVIIDDMIAVRDMVNLCLSIDHRILDGLLAGKFLQAIKAKVEKISKENTALY

SEQ ID NO: 16478 - protein, 482 aa, Bacteroides fragilis NCTC 9343
MNHTNEGSKLYLYSITSVAILGGLLFGYDTAVISGAEKGLEAFFLTATDFQYDKVMHGITSSSALIGCVLGGALSGIFASRLGRRNSLRLAAVLFFLSALGSYYPEFLFFEYGKANMNLLITFNLYRILGGIGVGLASAVCPMYIAEIAPSNIRGTLVSCNQFAIIFGMLVVYFVNYLILGDHQNPVILKDAAGTLSVSSESDMWTVTEGWRYMFGSEAFPAAFFGMLLFFVPKTPRYLVMIDQDQKAYSILKKVNGATKAQEILAEIKATSQEKTEKLFTYGAAVIVIGILLSVFQQAIGINAVLYYAPRIFENAGAEGGGMMQTVIMGIVNIVFTLIAIFTVDRFGRKPLLIIGSVGMAVGAFAVALCDSMGIKGILPVLSVIVYAAFFMMSWGPICWVLISEIFPNTIRGKAVAIAVAFQWIFNYIVSSTFPALYDFSPMFAYSLYGIICVIAALFVWRWVPETKGKTLEDMSKLWKKR

SEQ ID NO: 16479 - protein, 121 aa, Malus x domestica
MSSSAGNQVRASHILIKHQGSRRKASWKDPEGQIIRNTTRDSAVSQLKALRDDILSGKAKFDDLAARYSDCSSAKRGGDLGPFGRNQMQKPFEEATFALKVGEMSDIVDTDSGVHIIKRTG

SEQ ID NO: 16480 - protein, 559 aa, Oceanospirillum sp. MED92
MSKPHFPFTAVCGQEQFKLALILTAINPAIGGVVISGPRGSAKSTLARGMADLLPEHLQAEGGDQLEQAEFVTLPLGASEEMLLGTLDLEQVLNEKKMQFSPGLLSKAHGGVLYVDEVNLLPDNLVDLLLDVSTSGVNRVERDGISHSHRSEFLLVGTMNPDEGELRPQLHDRFGFSVNLSNQYAPLERVEIVKRREQFDRDPQAFLSEYEDQQAELVELIIEAREQLSTIECTDELRLEIAERCAQAQVDGLRADIVWYRAALTHAALNQQSNVSKQNLDAVEELVLAHRRKAAPEQSPPQQPPTPPQDQNRQGFKRPDDSHRQRSDEGDGEWGAMSPQQQKTAERTALVLPDLINRNHEKQGTKLSAELNTRPDWFKTLLSSLPDWPPKALQFKKQGKSADRLHLVLLDTSASTLQAQSFAYAKAAVLQISGQAYLNREQIALFGFGNTEVKNLLSRVRAPKELRCWLDQLGAGGGTPMREAFVEARKYLQQLRKQQPELDVAIYILSDGRSSSSLEGIALEGEPIWIDTELSQVKRGKGRRFADQLNATYLSLAGV

SEQ ID NO: 16481 - protein, 568 aa, Clarkia franciscana
MASPALISETEAWKDLKAHLEGIKTTHLRELMGDTERCQSMMVEFDNIFLDYSRQQASPDTINKLYKLADAAHLKQKIDRMYNGDHINITENRSVLHVALRAPRNSAICSDGKNVVPDVWNVLDKIKDFSDRVRNGSWIGATGKELKDVIAVGIGGSFLGPLFVHTALQTDPEASKNARGRELRFLANVDPIDVARNISGLNPETTLVVVVSKTFTTAETMLNARTLREWISSALGPSAVAKHMVAVSTNLPLVEKFGIDPINTFAFWDWVGGRYSVCSAVGVLPLSLQYGFAVVEKFLQGAHSIDQHFSSAPFEKNIPVLLGLLSVWNVSFLGYPARAILPYSQALEKLAPHIQQVSMESNGKGVSIDGLPLPFESGEIDFGEPGTNGQHSFYQLIHQGRVIPCDFIGVVKSQQPVYLKGEVVNNHDELMSNFFAQPDALAYGKTPEQLKKENVSEHLIPHKTFTGNRPSLSILLPTLDAYRIGQLLAIYEHRVAVQGFVWGINSFDQWGVELGKSLATQVRKQLHASRVKGEPVEGFNFSTKTLLTRYLEATSDVPADPSTLLPNI

SEQ ID NO: 16482 - protein, 569 aa, Clarkia lewisii
MASPALISETEAWKDLKAHLEGIKMTHLRELMGDTERCQSMMVEFDNIFLDYSRQQASPDTISKLYKLADAAHLKQKIDRMYNGDHINTTENRSVLHVALRAPRNSAICSDGKNVVPDVWNVLDKIKDFSDSVRNGSWIGATGKELKDVIAVGIGGSFLGPLFVHTALQTDPEASKNARGRELRFLANVDPIDVARNISGLNPETTLVVVVSKTFTTAETMLNARTLREWISSALGPSAVAKHMVAVSTNLPLVEKFGIDPNNAFAFWDWVGGRYSVCSAVGVLPLSLQYGFAVVEKFLQGAHSIDQHFSSAPFEKNIPVLLGLLSVWNVSFLGYPARAILPYSQALEKLAPHIQQVSMESNGKGVSIDGLPLPFESGEIDFGEPGTNGQHSFYQLIHQGRVIPCDFIGVVKSQQPVYLKGEVVNNHDELMSNFFAQPDALAYGKTPEELKKENVSEHLIPHKTFTGNRPSISILLPTLDAYRIGQLLAIYEHRVAVQGFVWGINSFDQWGVELGKSLATQVRKQLHGSRVKGEPVEEGFNFSTKTLLTRYLQATSDVPADPSTLLPNI

SEQ ID NO: 16483 - protein, 518 aa, Agrobacterium tumefaciens str. C58
MADWLVFFLSGEKGMDSSSSGVSYKKADASYFEKRGLSRYAGVWSLWALGVGAVISGHFSGWNFGFSTGGWGGMLVAGIIIAIMYLGLTFSIAEMSPALPHTGAAYSFARTAMGPWGGFVTGLCENVEYVLTPAVVVTFITAYVNSILGLDPAYSPFVWIVFYAIFLALNVFGLELSFKVTLVITLISLAVLVFFWISAIPNIDFSRFALNIGVGPDGKAVELPEGGGSFFPFGFSGVLATLPFAVWLFLAIEQLPLAAEESVDPKRDMPKGIILGMVTLMVSAFMIVLLNPSLPGVGAFHLSSSLEPLLDGFKAIYGDGGVVLLGLVALTGLIASFHTILYAQGRQIYSLSRAGYFPTVLSITHSKYRTPYVANITGAIVGLAVMLVIWFSLGAEQGGSIIGSVLLNMAVFGAMFSYIMQAISFILLRKNLPNIERPFRSPFGIPGALLTIIIAIVTLLYQIQDPNFTKGVLWVAVWFAVAIAYFAFVGRHRLILSPEEEFALEHKQAAVAAAAAKA

SEQ ID NO: 16484 - protein, 278 aa, Triticum aestivum
  misc_feature (61)..(61): Xaa can be any naturally occurring amino acid
WNPTKGEIGPKLHAPGRHGPGIWNGLPGTVGPGHSNSLLPNPNHLQLLERALEASGDDLDXPIRSLNDLRLESAEAIFSAAVSEPENGLSTALKLSAEGNGQLDTISGNPPATDNCPTNHHSSEWVELFVREMMSASDINDARARASRALEVIEKSIMERTGAEAVQNLHKENTMLKEQLAIALRENAVLKRGVAIQHERQKEFDDKTQEVHNQKQLILQYQEQLKTLEINNYALRMHLQQAQQNSSMPTSAATTLITSPAACRSTIWESSERVGCIA

SEQ ID NO: 16485 - protein, 548 aa, Bacteroides thetaiotaomicron VPI-5482
MTKSALQIARAAYQPKLPKALATGAVKAVAGAATQSVADQEAIKALFPNTYGMPLITFEAGEAVQLPAMNVGVILSGGQAPGGHNVISGLFDGIKKLNPESKLYGFILGPGGLVDHNYMELTADIIDEYRNTGGFDIIGSGRTKLETEAQFEKGFEIIKELGIKALVIIGGDDSNTNACVLAEYYAAKKYGVQVIGCPKTIDGDLKNDMIETSFGFDTACKTYAEVIGNIQRDCNSARKYWHFIKLMGRSASHIALECALQVQPNVCIVSEEVEEKDMSLDDVVTSIAKVVADRAAQGNNFGTVLIPEGLVEFIPAMKRLIAELNDFLAANAEEFSQIKKSHQRDYIIRKLSPENSAIYASLPEGVARQLTLDRDPHGNVQVSLIETEKLLSEMVATKLAAWKEDGKYVGKFAAQHHFFGYEGRCAAPSNFDADYCYSLGYTASMLIADGKTGYMSSVRNTTAPAAEWIAGGVPITMMMNMERRHGEMKPVIQKALVKLDGAPFKAFAAQRDRWAVETDYVYPGPIQYFGPTEVCDQATKTLQLEQAK

SEQ ID NO: 16486 - protein, 358 aa, Triticum aestivum
  misc_feature (235)..(235): Xaa can be any naturally occurring amino acid
  misc_feature (325)..(325): Xaa can be any naturally occurring amino acid
MAGEGGSGGERGKDPLEGVRAIVLKPSESLDESRFTKIAGADFNDAGLGLDGLLGSLASTGFQASNLGDAIDVVNQMLDWRLSHEKPTEDCDEAELDPKYRESVKCKIFLGFTSVDVIVTTAGGIEEDLIKCLAPTYRGEFSLPGALLRSKGLNRIGNLLVPNDNYCKFENWIMPLFDQMLQEQSTENVWTPSKVIARLGKEINDESSYLYWAYKNNIPVYCPALTDGSLGDMLXCHAVRNPGLIIDIVQDIRLINGEAIHASPRKTGAIILGGGLPKHHICNANMFRNGADYAVYINTAQEFDGSDSGAQPDEAVSWGKIKGSXAKPVKVHCDATIAPTLLVAATFARRSHGANSTN

SEQ ID NO: 16487 - protein, 656 aa, Arabidopsis thaliana
MTKMSNLPNDLAEEVLSRVSLTSLRNVRLTCKDWNTLSKGESFAKNHLGYQAIVAAKEKEFMMVLMMDFRVYLIRVNVHNDIESCIKPEGELISLGDEVDVSQVFHCDGLLLCITEDNEDNAKVVLWNPYWGQTRWIESTNNFHKLDMYTYALGYKKSSKSSRSYKILRFIDFSPTCSEFKIYNINSDSWKVLDVSPDWKIDSYIRGVSLKGNTYWIARERHGYGHTFLVCFDFTRERFRSRLPLPSQPCVLDTVSLSSVREEQLAVLFQCSSTLEMQIWVTTKIEPNAVLWNSKVFLAVDMHSLKFQFQVRASSFFIDEEKRVVVVFDKEKRYLASSRNKAYIVGVDGTWEQVDLGMSLMMVMISLHFSTPPLAFLKSDSNSRFLKNPNPNFIQFTPKSQLLFPQRLNFNTGTNLNRRTLSCYGIKDSSETTKSAPSLDSGDGGGGDGGDDDKGEVEEKNRLFPEWLDFTSDDAQTVFVAIAVSLAFRYFIAEPRYIPSLSMYPTFDVGDRLVAEKITMSKVSYYFRKPCANDIVIFKSPPVLQEVGYTDADVFIKRIVAKEGDLVEVHNGKLMVNGVARNEKFILEPPGYEMTPIRVPENSVFVMGDNRNNSYDSHVWGPLPLKNIIGRSVFRYWPPNRVSGTVLEGGCAVDKQ

SEQ ID NO: 16488 - protein, 329 aa, Prochlorococcus marinus str. MIT 9312
MKKFTYSTAILDAYNFLLKNYPEVFVIGQGLWSPWYVGNTMKDLDKNFGKKRIIDTPVSEAAVTGAAVGASLNEMKPIVVHPRMDFMMYAMDPIINQAAKWSYMFGGQSSPSITIRGIINRGGEQGAQHSQALHSLFAHIPGLKVVLPSSVADARDLLIASVLADQPVIYIDDRWLYDQEDQLPEAKEINLESINPCILREGNSITLVGCSYSTFLLKQITKKLIKNKINPEIIDMRIINPFHSELITNSVKKTGRLFVLDGGWGPCGISSEIISSAVENVEPKFFKSKPARLTLPFTPAPTSKVLEKEYYPNEKKILNKIFKIFENNL

SEQ ID NO: 16489 - protein, 169 aa, Zea mays
MAEESPQSIYDFTVKDIEGKDVSLSQFKGKTLLIVNVASKCGLTDANYKELNVLYDKYKDQGLEILAFPCNQFLGQEPGNNEEIQQTVCTKFKAEFPIFDKVDVNGKNTAPLYKYLKAEKGGLLIDAIKWNFTKFLVSPDGKVSQRYSPRTSPLQFEKDIQTLLGQASS

SEQ ID NO: 16490 - protein, 298 aa, Zea mays
MAVARLVAAFPLATCRLRRPRPALPPAHAGPGPRPQVLVLAPPAATAARRAVPVRAAPEDEAVVAGDGGGGDAEAVAARAARKQSERRTYLVAAVMSSLGITSMAAGAVYYRFAWQMEGGGEIPVTEMVGTFALSVGAAVGMEFWARWAHRALWHASLWHMHQSHHRPRDGPFELNDVFAIVNAVPAMSLLAYGFFNRGLVPGLCFGAGLGITLFGMAYMFVHDGLVHRRFPVGPIENVPYFRRVAAAHQIHHMDKFQGVPYGLFLGPKELKEVGGTEELEKEIKKRIRRREALDAIQ

SEQ ID NO: 16491 - protein, 225 aa, Rhodospirillum rubrum
MTRAIRIAPSLLSADFAISRPRCPSDGRTGADILHFDVMDNHYVPNLTVGPLVCAALRPHTSLPIDVHLMTRPVDPLIDSFAEAGADMITFHPEASDHVHRSVQMIRKRGLKAGVALNPASPLSLLDHILEDLDLVLIMSVNPGFGGQSFIPSALPKIAALANGRRRACRGDRVDGGVNPADARALARPGADILVRLAIFGASDRAKAIASIRGAAESGLGQEAA

SEQ ID NO: 16492 - protein, 353 aa, Streptococcus thermophilus LMG 18311
MQRRLERFDAKLVQSGLDALLVTGQNNIYYLTDFWGTNATVFITKNRRLFLTDSRYTLIAKQSVHGFDIIESKDPLKDIVKFVEVDKLETIGFDNQVSFAYYQALQAIFEGYTLSPQTNFMEELRMIKDEKELATIRKACSISDRAFTDVLDFIKPGQTTELQVANFLDFRMREYGASGISFESIIASGYRSAMPHGVASDKVIQSGETLTMDFGCYYNHYVSDMTRTIHIGETTDEEREIYDIVLRSNRALIDATKAGMTRRDYDKVARDVIVEAGYGDYFTHGIGHGIGLDIHEIPYFGNSDETIEAGMVLTDEPGIYLADKYGVRIEDDIIITENGCEVITLAPKELIVL

SEQ ID NO: 16493 - protein, 678 aa, Bacteroides thetaiotaomicron VPI-5482
MKKKYDIKTTDVETLKKWYHLMTLGRALDEKAPSYQLQSLGWSYHAPYAGHDGIQLAVGQVFTLGEDFLFPYYRDMLTVLSAGMTAEEIILNGISKATDPGSGGRHMSNHFAKPEWHIENISSATGTHDLHAAGVARAMVYYGHKGVAITSHGESATSEGFVYEAINGASLERLPVIFVIQDNGYGISVPKSEQTANRKVAENFSGFKNLKIIYCNGKDVFDSMNAMTEAREYAISTRNPVIVQANCVRIGSHSNSDKHTLYRDENELEYVKEADPLMKFRRMLLRYKRLTEEELLQIEAESKKELSAANRKALAAPEPDPKSIYDFVMPEPYQPQKYKEGTHQEEGEKTFLVNAINETLKAEFRHNPDTFIWGQDVANREKGGVFNVTKGMQQEFGEARVFSAPIAEDYIVGTANGMSRFDPKIHVVIEGAEFADYFWPAVEQYVECTHEYWRSNGKFAPNITLRLASGGYIGGGLYHSQNIEGALTTLPGARIVCPSFADDAAGLLRTSMRSKGFTLFLEPKALYNSVEAAAVVPEDFEVPFGKARIRREGTDLSIITYGNTTHFCLHVAEQLEKESGWKVEVIDIRSLIPLDKEAIFESVKKTSKALVVHEDKVFSGFGAELAAMIGTDMFRYLDGPVQRVGSTFTPVGFNPILEKEILPDEAKIYEAAKKLLEY

SEQ ID NO: 16494 - protein, 353 aa, Parvularcula bermudensis HTCC2503
MSRTVRLTILPGDGIGPEVTDAAISVLTAVAPDAGLSLAIDRCPFGGAGIDATGNPLPEQTLKSCVSADAILLGAVGGPKYDEAARHQGAPRPEQGLLGLRKELELFANLRPSKLFEGLEAASPLRRDIVADTDILIVRELTGGVYFGDHREGTDVASDIMPYSREEVDRVARVAFEAAKGRNGRLTSVDKANVLATSRLWRAVVDDVAKDYPTVTVDHVLVDAMAMHLVTKPASFDVVVTENLFGDILSDELSAIVGSIGLAPSASLGTPDTPGLFEPIHGSAPDIAGQGIANPIGTILSAAMLLRHGLKADAAAERIETAVSTVLKQGLRTKDLGGDADTAAATSAILAAL

SEQ ID NO: 16495 - protein, 497 aa, Oryza sativa
  misc_feature (204)..(204): Xaa can be any naturally occurring amino acid
  misc_feature (219)..(219): Xaa can be any naturally occurring amino acid
MATCADTLGPLLGTAAANATDYLCNQFADTTSAVDSTYLLFSAYLVFAMQLGFAMLCAGSVRAKNTMNIMLTNVLDAAAGALFYYLFGFAFAFGAPSNGFIGKHFFGLKQVPQVGFDYSFFLFQWAFAIAAAGITSGSIAERTQFVAYLIYSAFLTGFVYPVVSHWIWSADGWASASRTSGSLLFGSGVIDFAGSGVVHMVGGXGRTLGRPHRGPPHWXRFDHAGRSVALRGHSASLVVLGSFLLWFGWYGFNPGSFLTILKSYGPPGSIHGQWSAVGRTAVTTTLAGSTAALTTLFGKRLQTGHWNVIDVCNGLLGGFAAITAGCSVVDPWAAIICGFVSAWVLIGLNALAARLKFDDPLEAAQLHGGCGAWGVIFTALFARKEYVDQIFGQPGRPYGLFMGGGGRLLGAHIVVILVIAAWVSFTMAPLFLVLNKLGLLRISAEDEMAGMDQTRHGGFAYAYHDDDASGKPDRSVGGFMLKSAHGTQVAAEMGGHV

SEQ ID NO: 16496 - protein, 394 aa, Parvularcula bermudensis HTCC2503
MTYTPPETVRIFDTTLRDGEQSPGFSMTMKGKLRMARALSALKVDVIEAGFAAASPGDAEAVRAIAAEADGPIVCSLARVTERDIDAAAEALKDAKRKRAHVFIGTSPTHRRHKLKMRKGEILDAIDHGVRYARERFEDVEFSAEDAMRTEKTFLAEALRTAMEAGARTLNVPDTVGYFTPEETFQVFSYLIDAVEPEEGVVFSTHCHDDLGMAVANSLAAVRAGVRQIECTINGIGERAGNCAMEEAVMALRTRRDTYGVETTLDTTKFYDASRTLEDITGQKVQRNKAVVGRNAFAHEAGIHQHGMLSNRQTYEIMSPEDIGAPVSSLVLGKHSGKHALFARLEELGHEVPVDSRDAVFAAFKLLADEHHEVTDDMLRTLVAGASNRVVPAL

SEQ ID NO: 16497 - protein, 567 aa, Parvularcula bermudensis HTCC2503
MTQAASGPPKTTPTAVPGTRTGARLVVESLLAQGVDLVFGYPGGAIMPVYDALPNSGLRHILCRHEQGAAFSAAGFGRLTGRAGVCFATSGPGATNLVTGIADAYMDSVPMVAVTGQVAQPVMGTDAFQEIDTFGITMPVVKHSYIVRDPDQIPEIFAEAFEIAESGRPGPVLIDIPKDIQQAPASSEPLPRRPDLELALDEEGLRQAEAAVRDADRPLFYLGGGITRAGAVEDVRNLIARSPTIPAVCTLHGNGILPTGHPQLLGMLGMHGARAANLAVQECDLLINIGGRFDDRATGRLDGFAPKARVIHFDRDPSEISKLRYAEVGVGGDLRPALQSFRPEPGDISAWTTLNAERRDTFQARYDAPGEGIFAPSLLKALSETAGDRFVAIPDVGQHQMWVAQHCRFSRPEAHLTSGGLGSMGYSLPTAIGAQLADPDAIVVSISGDGGFMMNIQELATLRRYNIPLKVMVINNYRLGMVRQWQELFFEKNYSEVDLSDNPDFAEIAKAFGIEGFTISKRDEVTPAIERFLSADGPILMHVIIDPAENVWPLVPQGASNEQMLEG

SEQ ID NO: 16498 - protein, 463 aa, Streptococcus pyogenes MGAS8232
MTIFRKKKKYSNKTEMQRHFKVIDLIFLGLGSMVGTGIFTVTGIGAAKYAGPALTISIIISAIAIGILALFYAEFASRMPSNGGAYSYVYATLGEFPAWLVGWYIIMEFLTAISSVAVGWGSYLKGLLANYNIVLPNALNGTFNLKNGTYIDILPVLVMFFVTGIVLMNSKLALRFNSFLVILKFSALALFIFVGIFFIDHNNWSHFAPYGVGQITGGKTGIFAGASVMFFAFLGFESISMAVDEVKEPQKTIPKGIILSLIIVTALYIVVTTILTGIVHYTKLNVPDAVAFALRNIRLYWAADYVSIVAILTLITVCISMTYALARTIYSISRDGLLPKSLYTLTKKNKVPQNATLVTGLLAMICAGIFPLSSLAEFVNICTLAYLIILSGAIIKLRRIEGEPKANEFKTPLVPFLPILAIIICLSFMSQYKAFTWIAFAIATIIGTLIYLAYGYTHSIENK

SEQ ID NO: 16499 - protein, 172 aa, Magnetospirillum magnetotacticum MS-1
MAAGLGSDLFRIKTLERLNADAEAGENKLERHLGPWSLVGLGIGAVIGAGLFSLTGIAAAEHAGPAVTLSFAIAAIGCALAGMCYSELAGMIPVAGSAYTYTYATMGEFVAWIIGWDLVLEYAVGAATVSVSCRATSPASCATPSASTCPVRWCIHPSRPTSSPTARGARLS

SEQ ID NO: 16500 - protein, 463 aa, Erythrobacter sp. NAP1
MTKPQILWLRRDLRMADNPALYHAAKAGPVVCVYVLDDEAPEHHRMGGASRWWLHHSLESLSKSLGTRNAKLILRRGDAVEELTTVANAVGADTIHANTHYEPWWRKAQKKLKDEIDLQLYDGVYLFPAGHVTTGSGDPYKIYTPFYKALRQELPPRDVLPEPETLSSPDDWPASDELADWNLLPTKPDWSGGIADFWEVGEDAAHERLSEWEDHVADYEDKRNFPSVDKTSRLSPHLHFGEISPVQVWHALKHKRSDGWNSFESELIWRDYAANVICEYPAYASENYREDYDKLEWRDPDSDEKAAKDLKKWQEGKTGYPIVDAGMRQLWQTGWMHNRVRMITASFLIKHLLIDWRKGEQWFWDCLVDADYSSNAVNWQWNAGTGVDSNMFSRIMAPLTQSEKFDAAAYIREYVPELADLDEPYIHDPEEHGRLPKAYPAKMIAHKEGRERAMSAYKDMKNG

SEQ ID NO: 16501 - protein, 161 aa, Methanosarcina barkeri str. fusaro
MPKVAVGGTFQYFHDGHAKLIEKAFEIAEDGKVHIGLTSDEMLSKSHSVDNYEKRRNWLLQYIKEMGIPDDRYEITKLNDPYGPALEEDFDYIIVSPETYPVALKMNRIREEKGKKLLEIVYVEYVMAEDGIPISSTRIAKGEIDRHGRLKKNIKHCNTKN

SEQ ID NO: 16502 - protein, 567 aa, Oryza sativa (japonica cultivar-group)
MASSALICDTEQWKGLQAHVGEIQKTHLRHLMHDVERCKAMTAEYEGIYLDYSRQRATGETMEKLFKLAEAAKLKEKIEKMFRGDKINSTENRSVLHVALRAPRDEVINSNGVNVVPEVWGVKDKIKQFSETFRSGSWVGATGKALTNVVSVGIGGSFLGPLFVHAALQTDPEAAESAKGRQLRFLANVDPVDVARSIKDLDPETTLVVVVSKTFTTAETMLNARTLKEWIVSSLGPDAVAKHMIAVSTNLELVEKFGIDPKNAFAFWDWVGGRYSVCSAVGVLPLSLQYGFPIVQKFLEGAASIDKHFRSSSFEKNIPVLLGLLSVWNVSFLGYPARAILPYSQALEKFAPHIQQLSMESNGKGVSIDGVQLPFESGEIDFGEPGTNGQHSFYQLIHQGRVIPCDFIGVVKSQQPVYLKGEIVSNHDELMSNFFAQPDALAYGKTPEQLHSEKVPEHLIPHKTFQGNRPSLSLLLPSLSAYEIGQLLAIYEHRIAVQGFLWGINSFDQWGVELGKSLASQVRKSLHASRVEGKPVLGFNSSTTSLLTRYLAVEPSTPYNTTTLPKV

SEQ ID NO: 16503 - protein, 361 aa, Helianthus annuus
MTSAIGFEGFEKRLEISFFNPGPSVDPVARGLRSLTKNQLDKFLAPAECTIVSSLSNDLLDSYVLSESSLFVYPYKIIIKTCGTTKLLLSIPHILELSGELSLTVQSVRYTRGSFIFPGAQTFPHRSFTEEVMVLDSHFGKLGMCSNAYVMGGAEKDQKWHVYSASAESANLVTQTAPVYTLEMSMTGLSKRNASVFFKSESSSAAVMTEDSGIRKILPESQICDFDFDPCGYSMNAIEGDAISTIHVTPEDGFSYASFEAVGYDFKSMGLTVLIERVLACFEPSEFSVALHGNENVVKDLNLENNDVNVKGYNVEETKFEVLGGEGGSMVYYGFARGGSSCGSPRSTLHRCWSETENEEE

SEQ ID NO: 16504 - protein, 424 aa, Mycobacterium leprae
MCRTTLPGGLRVVTEHLPAVRSASVGVWVGVGSRDEGATVAGAAHFLEHLLFKSTSTRTAMDIAQAIDAVGGELNAFTAKEHTCYYAHVLDSDLELAVDLVADVVLNGRCAVDDVELERDVVLEEIAMRDDDPEDALGDMFLAALFGDHPVGRPVIGTMESVSAMTRTQLHSFHVRRYTPERMVVAVAGNVDHDEMVALVREHFGSRLIRGRQSAPPRKSTGRINGGPALTLGKRDAEQTHVLLGVRTPGRSWEHRWALSVLHTALGGGLSSRLFQEIRETRGLAYSVYSALDIFADSGALSVYAACLPGRFADVMQVISEVLASVAGDGITEAECRIAKGSLRGGIILGLEDSNSWMSRLGRSELNYGKYRGIEHTLQQIDEVTVEQVNALAHQLLNKRYGAAVLGPYASKKTLPRQLRIMVN

SEQ ID NO: 16505 - protein, 157 aa, Methanopyrus kandleri AV19
MTPLARFRKVVVGGTFDRLHLGHQRLLSVALELGDRVVIGVTTDSFVREEGKKGVEPFEERVRAVRRFVEEKGASDRVEIVPLEDRYGTTLEDDEMDAIVVSPETEPVALEINELRRKRGFPPLSIVVIPFVLDGDGRKISSSRLRGEVDEGPCRDD

SEQ ID NO: 16506 - protein, 300 aa, Symbiodinium sp. HG39
DAYVGDEAQAKRGILTLRCPVEHGIVTNWDNMEKIWHHTYYNELRVAPEEHPILHTEAPLNPKANRERMTQITFETFNAPAMYVSIQSVLALYASGRTTGIVASSGDGVTHTVPIYEGYALPHAILRIDLAGRDLTEYLQKILAERGYSFTTTAEREIVRDIKEKLAYVAKDFDDEMKKAETSSDLEKTYELPDGNVITVGNERFRCPEVLFQPSFIGKEASGIHETVFQSIMKCDVDIRKDLFGNVVLEGGTTMFKGIAERLTEELTNLAPAAIKVKVVAPPERKYSVWIGGSILSSLS

SEQ ID NO: 16507 - protein, 284 aa, Pseudomonas syringae pv. phaseolicola 1448A
MTAKLIDGKAIAASLRQQIAKRVAERSQQGLRTPGLAVILVGSDPASQVYVSHKRKDCEEVGFISQAYDLPAETTQTALTDLIDRLNEDAAVDGILLQLPLPAHLDASLLLERIRPDKDVDGFHPYNVGRLAQRIPLLRPCTPKGIITLLESTGVDLYGLDAVVVGASNIVGRPMAMELLLAGCTVTVTHRFTKDLAGHVGRADLVVVAAGKPGLIKGEWIKPGAIVIDVGINRQDDGKLVGDVVYETALPRAGWITPVPGGVGPMTRACLLENTLYAAETLHD

SEQ ID NO: 16508 - protein, 375 aa, Methanosarcina acetivorans C2A
MTQYKVPVLPGDGIGPEIIAEGKKVIDAAGERFGFDVEWIEYPHGADHYLKTGELISEETLKELSGYPAIYLGSIGDPRIAPGVLEKGILLTARFYFDQYINLRPIKLLEGVWTPIKDKTAKDIDFVVVRENTEDFYIGVGGRAKKGESKDLLEVKRTLYSAKFGLDIETDSEEIGYQIGLISKEGTKRVIEYAFDLAENRKKHVSSVDKANVLSDIYGFWREEFNAVAAAHPDITTDFNFVDAITMWFVKNPEWFDVVVTPNMFGDIITDLGAMIQGGLGLAPGGNINPKGTSMFEPIHGSAPKYKGQNKVNPIATIWAGAMLIEQLGEKEAADTIVNAIQKNILEGKVKTYDMGGKNTTSDVGDDIARIVKGE

SEQ ID NO: 16509 - protein, 475 aa, Frankia sp. EAN1pec
MAAVLEFALPDLGEGLTSAEIVRWMVGIGDVIVVDQPVAEVETAKAVVEVPCPHAGVVTALAGPPGTAVPVGTPLITVTVDEPAEQPADGPDGPDGAPGSAGGGSGRVLIGYGPRAEPAPTSRAGRASRASRIDRSLVGATAPEPLPSTPPAPTPPAPTPTAREARQAVKVISPLVRRLARDNAVDLRELTGTGPDGLIRRRDVEAAITAATRTGPATPADLAAPAAPAAPAPLADLAGPDGADVVPLSPLARRAAEAFGRSRREVPDATTWVDADATELLAARDALNAGGAEPRIGVLALLARVCVAALRRFPDLNSTVVTDADGRATGVRQHRAVHLGFAAQTPRGLVVPVVRDAQGHTTASLAAEVTRLTAAARAGRLTPAELTGGTFTLNNYGVFGVDGATPIVNHPEVAMIGIGRILPRPWAVDGELAVRRITQLSFTFDHRVCDGATAGAFLRFVADAVENPTTLLRYL

SEQ ID NO: 16510 - protein, 654 aa, Hydrilla verticillata
MFSSYALARTGHLSCNPCTELRPKVSKGGSSCVYQRTFVRCCGNGAPSRRVATASLEARNSVVLKEPEAMEGALNGSAVVDSPSAVSGGVRDTYGEDRATEDQLLTPWTASVASGNSLLRDPRLNKGLAFTEKERDAHYLRGLLPPVFLTQEIQEKKLMTNLRQYQVPLQRYMAMMDLQERNERLFYKLLIDNVEELLPVVYTPTVGEACQKYGSIFRRPQGLYISLREKGKILEVLKNWPERNIEVIVVTDGERILGLGDLGCQGMGIPVGKLALYTALGGVRPSACLPVTIDVGTNNENLLQDEFYIGLRQKRARGKEYAELIEEFMSAVKQNYGERVLVQFEDFANHNAFELLTKYSKSHLVFNDDIQGTASVVLAGLIASLKLVGGTLAEHTFLFFGAGEAGTGIAELIALQMSKETGVPIEETRKKIWLVDTKGLIVSSRKESLQHFKQPWAHDHEPVQDLLDAVKMIKPTVLIGSSGVPNKFTQDVVEAMASFNEKPVIFALSNPTSNSECTAEQAYTWSKGRAIFASGSPFDPVEYEGQTYTSGQANNAYIFPGFGLGLVMSGAIRVHDDMLLAASEALAEQVTEENFEKGLIYPPFTNIRKISANIAAKVAAKAYELGLSGHLPRPENLVEYAESCMYSPVYRSYR

SEQ ID NO: 16511 - protein, 568 aa, Clarkia mildrediae
MASPALISETEAWKDLKAHLEGIKRTHLRELMGDTERCQSMMVEFDNIFLDYSRQQAIPDTIKKLYKLADAAHLKQKIDRMYNGDHINSTENRSVLHVALRAPRDSAICSDGKNVVPDVWNVLDKIKDFSDRVRNGSWIGATGKELKDVIAVGIGGSFLGPLFVHTALQTDPEASKNARGRELRFLANVDPIDVARNISGLNPETTLVVVVSKTFTTAETMLNARTLREWISSALGPTAVAKHMVAVSTNIPLVEKFGIDPNNAFAFWDWVGGRYSVCSAVGVLPLSLQYGFAVVEKFLQGAHSIDQHFSSAPFEKNIPVLLGLLSVWNVSFLGYPARAILPYSQALEKLAPHIQQVSMESNGKGVSIDGLPLPFESGEIDFGEPGTNGQHSFYQLIHQGRVIPCDFIGVVKSQQPVYLKGEVVNNHDELMSNFFAQPDALAYGKTPEQLKNENVAEHLIPHKTFTGNRPSLSILLPTLDAYRIGQLLAIYEHRVAVQGFVWGINSFDQWGVELGKSLATQVRKQLHGSRVKGEPVEGFNFSTKTLLTKYLEATSDVPADPSTLLPNI

SEQ ID NO: 16512 - protein, 215 aa, Campylobacter upsaliensis RM3195
MYVAPSLLSANFLKLEEEIKAVSEAGADLLHIDVMDGHFVSNLTFGPCVLEKISSISSVPLDVHLMVKDVSKFVELFLPLKPKFLSFHIEAEAHPIKLCEYLRTQGIHPAITLNPHTPISSLEHLIEFVDMVLLMSVNPGFGGQKFLPLVYDKIRELRALIEKKQAKVFIEVDGGVNGLNAADLEEAGADILVAGNYIFSSNDYKNAIKSLKLEF

SEQ ID NO: 16513 - protein, 614 aa, Hydrilla verticillata
MLSHNRLRVLRKAVIPCCVGRRKGFAADRKGSAMERENEAYVDNHQVANGAAFVVDNAAALDQPITPWMSMVASGYTLLRDPHHNNGLAFTEKERDAHYLRGLLPPVSISQELQEKKLMRNLREYKVPLQRYMAMMDLQERNERLFYKLLIDNVEELLPVVYTPTVGEACQKYGSIFRRPRGLYISLREKNKVLEVLKNWPQKNIQVIVVTDGERILGLGDLGCQGMGIPVGKLALYTALGGIRPSACLPVTIDVGTNNENLLNDEFYIGLRRKRATGQEYAELLEEFMSSVKQKYGERILIQFEDFANHNAFDLLSKYRETHLVFNDDIQGTASVVLAGVVAALRLVGGTLAEHTFLFLGAGEAGTGIAELIALQMSKETRIPVEEARKKIWLVDSKGLIVRSRIQSLQHFKKPWAHEHESIKGLLDAVKSIKPTVLIGSSGAGQAFTQEVIETMALFNEKPIILALSNPTSQSECSAEQAYTWSKGRAIFASGSPFDPVEYKGRTFVPGQANNAYIFPGFGLGLVMSGAIRVHDDMLLAASKALAEQVTDENFEKGLIYPPFSNIRKISAHIAANVAAKAYELGLAGNLPRPDNLVKHAEKCMYSPIYRTYR

SEQ ID NO: 16514 - protein, 570 aa, Clarkia rostrata
MASPALISETEAWKDLKAHLEGIKMTHLRELMGDTERCQSMMVEFDNIFLDYSRQQASPDTISKLYKLADEAHLKQKIDRMYNGDHINTTENRSVLHVALRAPRNSAICSDGKNVVPDVWSVLDKIKDFSDRVRNGSWIGATGKELKDVIAVGIGGSFLGPLFVHTALQTDPEASKNARGRELRFLANVDPIDVARNISGLNPETTLVVVVSKTFTTAETMLNARTLREWISSALGPSAVAKHMVAVSTNLPLVEKFGIDPNNAFAFWDWVGGRYSVCSAVGVLPLSLQYGFAVVEKFLQGAHSIDQHFSSAPFEKNIPVLLGLLSVWNVSFLGYPARAILPYSQALEKLAPHIQQVSMESNGKGVSVDGLPLPFESGEIDFGEPGTNGQHSFYQLIHQGRVIPCDFIGVVKSQQPVYLKGEVVNNHDELMSNFFAQPDALAYGKTPEELKKENVSEHLIPHKTFTGNRPSISILLPTLDAYRIGQVLAIYEHRVAVQGFVWGINSFDQWGVELGKSLATQVRKQLHGSRVKGEPVEEGFNFSTKTLLTRYLQATSDVPADPSTLLPNII

SEQ ID NO: 16515 - protein, 575 aa, Hydrilla verticillata
MEGNSNACGGVRDPYGEDCATEEQLVTPWTFSVASGYTLLRDPRHNKGLAFTEKERDAHYLRGLLPPVCITQERQEKKIMHNLRNYQVPLQRYMAMMDLQERNQRLFYKLLIDNVEELLPVVYTPTVGEACQKYGCIYRRPQGLYISLKEKGKILEVLKNWPEKNIQVIVVTDGERILGLGDLGTQGMGIPVGKLALYTALGGIRPSSCLPITIDVGTNNETLLNEEFYIGLRQKRATGKEYADLLHEFMISVKQNYGERVLVQFEDFANHNAFELLSKYSKTHLVFNDDIQGTASVVLAGVVAALKLVGGALAEHTFLFLGAGEAGTGIAELIALEISKQIKAPVEETRKKIWLVDSKGLIVSSRKESLQHFKKPWAHEHEPIKHLVDAVKTIKPTVLVGSSGVGRAFTKEVIEAMASFNEKPIILALSNPTSQSECTAEEAYTWTQGRAIFASGSPFDPVEYEGKTFVPGQANNAYIFPGFGLGLIIAGAIRVHDDMLIAASEALANQVSEENFEKGLIYPPFSNIRKISANIAANVAAKAYELGLASHLPRPANLVKYAESCMYSPVYRTYR

SEQ ID NO: 16516 - protein, 324 aa, Arabidopsis thaliana
MMRNFRVYLTSIDIHNNVDPSFTPKGTLISLSDDANHHQVDNVSRVFHCDGLLLCITKDLHYRLVVWNPYFGQTRWIQPRNSYHRKDNYALGYDEKKNHKILRLKDNYYAPRERICEFELYSFESNSWKVVLDVSPDWYIPSYNRGLSLKGNTYWYATEKHVNVDFLICFDFTTEKFGPRLPLPFNATESPTYEDVVTLSSVGEEQLAVLFQSEYTLMMEIWVTSKVESTEVLWNKLFLEVDLIAISSHFQFLAEAGSFFIDQKKNVVVVFDKDMDEATDRDMAYVVGKNGYFKKVDIGEEAYTSCFPLVCSYVPSSEQIRQLT

SEQ ID NO: 16517 - protein, 535 aa, Brassica oleracea var. alboglabra
SFKDKLFQTNNSTKLEDNSKTSTNVTSNRSSSTNTEEFSSPKKDSKNSPLVIPSKEPIMRRNMDNQAYYVLGHKTPNIRDLYTLSRKLGQGQFGTTYLCTELATGVDYACKSISKRKLISKEDVEDVRREIQIMHHLAGHGNIVTIKGAYEDSLYVHIVMELCAGGELFDRIIQRGHYSERKAAELTKIIVGVVEACHSLGVMHRDLKPENFLLVNKDDDFSLKAIDFGLSVFFKPGQIFTDVVGSPYYVAPEVLLKRYGPEADVWTAGVILYILLSGVPPFWAETQQGIFDAVLKGYIDFDSDPWPVISDSAKDLIRRMLSSKPAERLTAHEVLRHPWICENGVAPDRPLDPAVLSRLKQFSAMNKLKKMALKVIAESLSEEEIAGLREMFQAMDTDNSGAITFDEPKAGLRKYGSTLKDTEIHDLMEAADVDNSGTIDYSEFIAATIHLNKLEREEHLVAAFQYFDKDGSGYITIDELQQACVEHSMTDVFLEDIIKEVDKNNDGQIDYGEFVEMMQKGNAGVGRRTMRNSLN

SEQ ID NO: 16518 - protein, 415 aa, Caulobacter crescentus CB15
MSRLVMKFGGTSVADLERIRRVARLVAAEVATGKQVAVVVSAMSGKTNELVAWTDGAGRAAAGLPESDDEYDAVVASGEQVTAGLLAMTLRNMGHKARSFLGWQVPILTDEAHGRARIEEIPPENLEECFANGEIAVIAGFQGVTPNRRITTLGRGGSDTSAVAIAAAVKGDCDIYTDVDGVYTTDPRIESKARRLAKISYEEMLEMASLGAKVLQTRSVEMAMAHRVPVRVLSSFVEPGEAPGQGTIVCDEEEIMEKRIVSGVAYSRDEAKITLLGLPDHPGVSSQIFGRLAEANVNVDMIVQSRARSADTANMEFTVGKRDATRAVEIVQAAQKEIGFEAVAVNEDVAKVSVIGVGMRSHAGVAQSMFQALAEKNINIQVISTSEIKISVLIDAAYTELAVRALHAVYGLDQL

SEQ ID NO: 16519 - protein, 550 aa, Chlamydophila pneumoniae CWL029
MHPLYVDLDTIISSYSPPLPKEFQEAASLIAVPDTSHSKPVVPGVKTLFPQTYHLPYLKFVQGENVVHTPLKVGVMFSGGPAPGGHNVIQGLFNSLKDFHPDSSLVGFVNNGDGLTNNKSIDITEEFLSKFRNSGGFNCIGTGRKKIVTPEAKEACLKTAEALDLDGLVIIGGDGSNTATAILAEYFAKRRPKTSIVGVPKTIDGDLQHTFLDLTFGFDTATKFYSSIISNISRDALSCKAHYHFIKLMGRSASHIALECALQTHPNIALIGEEIAEKNLPLKTIIHKICSVIADRAAMEKYYGVILIPEGIIEFIPEIINLITEIESLSEYEDKISRLSPESQRLLKSFPAPIIEQILNDRDAHGNVYVSKISVDKLLIHLVSNHLQQYFPNVPFNAISHFLGYEGRSGLPTKFDNTYGYSLGYGAGILVRNHCNGYLSTIESLACPFMKWKLRAIPVVKMFTVKQQADGTLQPKIKKYLVDIGSTAFRKFKLYRKIWALEDSYRFLGPLQIETPPEMHSDNFPPLTLLLNHNFWQRHQGCIEIPDTTY

SEQ ID NO: 16520 - protein, 568 aa, Clarkia williamsonii
MASPALISETEAWKDLKAHLEGIKMTHLRELMGDTERCQSMMLEFDNIFLDYSRQQASPDTISKLYRLADAAHLKQKIDHMYNGDHINSTENRSVLHVALRAPRNLAICSDGKNVVPDVWNVLDKIKDFSDRVRNGSWIGATGKELKDVIAVGIGGSFLGPLFVHTALQTDPEASKNARGRELRFLANVDPIDVARNISGLSPETTLVVVVSKTFTTAETMLNARTLREWISSALGPSAVAKHMVAVSTNIPLVEKFGIDPNNAFAFWDWVGGRYSVCSAVGVLPLSLQYGFAVVEKFLQGAHSIDQHFSSAPFEKNIPVLLGLLSVWNVSFLGYPARAILPYSQALEKLAPHIQQVSMESNGKGVSIDGLPLPFESGEIDFGEPGTNGQHSFYQLIHQGRVIPCDFIGVVKSQQPVYLKGEVVNNHDELMSNFFAQPDALAYGKTPEQLKKENVSEHLIPHKTFTGNRPSISLLLPTLDAYRIGQLLAIYEHRVAVQGFVWGINSFDQWGVELGKSLATQVRKQLHGSRVKGEPVEGFNFSTKTLLTRYLEATSDVPADPSTLLPNI

SEQ ID NO: 16521 - protein, 621 aa, Oryza sativa
MDLPKLLFTVLILSLLNYESSSATAWDDEDFFKTCSSHRCSKHGPEIRFPFRLSTQPPSCGAPGMHLSCSGQDTILNHPVLGPCKVTEISYSYATMNVIPPVDSSPHCPLQKLMSKNQSTSVYKPQGPQSQGATLVVCSRDPIPANQYDIVGPISCLGHNNQFWYLADPYTYMSVLPLDCTVISKGIPMPYSYDKKGRINWDTSNFKETANRVINDGETVFMWYSSNITSICQRCEYEGRPCGFSSQSGQAFCRRHGPRVTLVAATSSVATFVILSLVVATAFYISLKSRYNKEIHLKVEMFLKTYGTSKPMRYTFSDVKKITRRFKNKLGHGGFGSVYKGELPNGVPVAVKMLENSLGEGEEFINEVATIGRIHHANIVRLLGFCSEGTRRALIYEFMPNESLEKYIFSNGSNISREFLVPKKMLDIALGIARGMEYLHQGCNQRILHFDIKPHNILLDYSFSPKISDFGLAKLCARDQSIVTLTAARGTMGYIAPELYSRSFGAISYKSDVYSFGMLVLEMVSGRRNTDPTVENQNEFYFPEWIYERVINGQELVLNMETTQGEKETVRQLAIVALWCIQWNPTNRPSMTKVVNMLTGRLQKLQVPPKPFISSENHLAT

SEQ ID NO: 16522 - protein, 385 aa, Populus tomentosa
MAIDCIKTMPSITTPQHHPKDQDQCKDDGKSFVFDAQILRHQTNIPQQFVWPDHEKPNINAPELQVPLVDLGDFLSGNPVAAVEASRLVGEACKKHGFFLVVNHGVDKTLIAHAHNYVDTFFKLPLSEKQKAQRKIGESCGYASSFTGRFSSKLPWKETLSFRYTAEENSSKHIEEYFHNRMGEDFAEFGTVYQDYCEAMSTLSLGIMELLGMSLGVSREHFREFFNENDSIMRLNYYPPCQKPDLTLGTGPHCDPTSLTILHQDQVGGLQVFVDNEWRSINPNFDAFVVNIGDTFMALSNGIYKSCLHRAVVNGQTPRKSLAFFLCPKNDKMVTPPHELVDTCNPRIYPDFTWPMLLEFTQKHYRADMKTLEVFTNWLHQRSFT

SEQ ID NO: 16523 - protein, 316 aa, Legionella pneumophila str. Paris
MSISNHHRLIILGSGPAGYTAAVYAARANLNPVLITGMQPGGQLTTTTDVDNWPGDIEGLQGPALMERMQKHAERFDTQVIFDHIVKADLAQAPFTLQGDSATYTCDALIIATGASARYLGLPSETAYQGRGVSACATCDGFFYRNKSVCVIGGGNTAVEEALYLSNLASSVTLIHRRDSLRAEKILQNKLFEKAHSGNIKIVWNSTLDEVLGDEKKVTGAMIRNLKTGETDQLAMDGIFIAIGHTPNTAIFQDQLAMRDGYILIKSGLDGMATSTSVPGVFACGDVADHVYRQAITSAGFGCMAALDAEKYLDSI

SEQ ID NO: 16524 - protein, 568 aa, Clarkia xantiana
MASPALISETEAWKDLKAHLEGIKMIHLRELMGDTERCQSMMVEFDNIFLDYSRQQASPDTISKLYKLADAAHLKQKIDRMYNGDHINSTENRSVLHVALRAPRNSAICSDGKNVVPDVWNVLDKIKDFSDRVRNGSWIGATGKELKDVIAVGIGGSFLGPLFVHTALQTDPEASKNARGRELRFLANVDPIDVARNISGLNPETTLVVVVSKTFTTAETMLNARTLREWISSALGPSAVAKHMVAVSTNLPLVEKFGIDPNNAFAFWDWVGGRYSVCSAVGVLPLSLQYGFAVVEKFLQGAHSIDQHFSSAPFEKNIPVLLGLLSVWNVSFLGYPARAILPYSQALEKLAPHIQQVSMESNGKGVSIDGLPLPFESGEIDFGEPGTNGQHSFYQLIHQGRVIPCDFIGIVKSQQPVYLKGEVVNNHDELMSNFFAQPDALAYGKTPEQLKNENVSEHLIPHKTFTGNRPSISILLPTLDAYRIGQLLAIYEHRVAVQGFVWGINSFDQWGVELGKSLATQVRKQLHASRVKGEPVEGFNFSTKTLLTRYLEATSDVPADPSTLLPNI

SEQ ID NO: 16525 - protein, 129 aa, Prochlorococcus marinus str. MIT 9312
MRILHTMLRVGDLDKSINFYVNRLGMNLLRKKDYPHGKFTLAFVGYGSEKENAVIELTYNWDKKSDDYELGDKYGHIAIGVKDIHLICQGLENNGCKVTTKPKTMKNSTTVLAFIEDPDGYKIELIERD

SEQ ID NO: 16526 - protein, 427 aa, Triticum aestivum
  misc_feature (369)..(369): Xaa can be any naturally occurring amino acid
  misc_feature (414)..(414): Xaa can be any naturally occurring amino acid
MDDDAGDASPPPGPVPPAATGASSSRDMAASPTSSRSVTETVNGSHRFVIQGYSLAKGMGVGKHIASETFTVGGYQWAIYFYPDGKNPEDNSAYVSVFIALASEGTDVRALFELTLQDQSGKGKHKVHSHFDRSLESGPYTLKYRGSMWGYKRFFRRTALETSDFLKDDCLRINCTVGVVVSTIDYSRPHSIQVPDSDLGYHFGSLLDSNEGVDVILNVSGERFHAHKLVLAARSTVFRSKLFDDESEGDKNEVNESEDLKEIVLDDLEPKVFKAMLHFIYRDTLVDDYELDASGSMGSIFDTLAAKLLAAADKYDLGRLRLLCESYLCKGISVASVASTLALADSHHAMELKAVCLKFAAENLSAVIXRTDGFDYLKDNCPSLQSEILRTVAGCEEPCSSGGKSQSVWGQLSXGGDTSGRRVRPRI

SEQ ID NO: 16527 - protein, 410 aa, Glycine max
MPGHRSKSEKHGGGGEKPLRRDPYEVLGISRNSTDQEIKTAYRKMALKYHPDKNANDPKAADMFKEVTFSYNILSDPDKRRQYDSAGFEAVESDNQELELDLSSLGAVNTMFAALFSKLGVPIKTTVSATVLEEALNGLVTIRPLPLGHNIAKRVEKQCAHFYSVTITEEEAQAGFVCRVQSPDKSKFKLLYFDQEDNSGLSLALQEDSAKTGKVTSAGMYFLGFPVYRLDQTMNSIAAAKDPDTSFFRKLDAFQPCELTELKAGTHVFAVYGDNFFKSANYTIEALCAAPFSEEKENLRNIEAQILSKRAEISKFEAEYREVLAQFSDMTNRYAHEMQAIDELLKNRNEIQASYTSAPLKRTTSRSRSKNSSKEAKEDGQAKEKRSTRERPKKKKWYNLHLRVDKRKAC

SEQ ID NO: 16528 - protein, 483 aa, Mesorhizobium sp. BNC1
MSGRKYPNPSLFINGRSVTGRGAKEEMVIDPSNEEVLGSYRSAAPEDLQELLDSAAAGFEKWRRTSAYERCEILHKVAAALRENAQEIGSLLTLETGKILSESITEVRGAADHFDWSGEEGRRLYGYTVPARRAESRLRVELEPLGIVFALIPWNFPLGTSARKVAPALAAGCSVILRPPEEAPATVEAFVRCCQEAGLPPGVLNMVLGSPKDVVEPLMASFSVRAVTFTGSTRVGKILIQQAADTVKHLVLELGGHAPAIVLPDADPKKVGVAAARAKFRNAGQVCVSPSRFIVHEKIVEPFTQAMVEETRSIKLGSGFDAGAQMGPLTTARQRERVERLVEDARSKGARILAGGQRPSGFNRGFFFEPTVLGDVPDTALIFEEEPFGPVAPIIPVRSVQEAVEKANAVKWGLAGYLFTSSLADATKVSEAMQVGMVGLNTFAAAAPEAPFGGVKESGYGRECGLEGIREFVSSKLIHTDIG

SEQ ID NO: 16529 - protein, 407 aa, Wigglesworthia glossinidia endosymbiont of Glossina brevipalpis
MRRVVITGLGLLSSIGNNKEEVLNSLKSGKSGINFSQELKDSGMRSQIWGNIKTDVSGIISRKTSRFMSDASIYAYLSMEQAIFDAKLNFNIISNNRTGLIVGSGGGSPKNQVYGSDAMRYRGLRGVGPYIVTKAMASGISACLSTPFKIRGINYSITSACSTSAHCIGNAMEMIKFGKQDVMFAGGGEELCWEMACEFDAMGALSTSYNNFPQKASRAYDSNRDGFVISGGGGIIVLEELKHALSRNAFIYAEIIGYGATSDGSDMVIPSGEGAVRCMKMALENLDVSSIDYLNVHGTSTSIGDIKELNAIKETFGENSPMISSTKSMTGHALGAAGVHEIIFSILMLNNNFIAPSINIENLDKKAKDLDMKIITKYTKYDLNYVMSNSFGFGGTNATLILKKYNN

SEQ ID NO: 16530 - protein, 240 aa, Zea mays
  misc_feature (83)..(83): Xaa can be any naturally occurring amino acid
MELRRPAPSPLVDNYVVPGDVVLDLSEMNNQTIKLGAGLRQECDTIEATSAGKLRQLKPNKYCIENSQKRYKPSVEDTVLGIXANTKPDNFLVDIKGPNLAFLPVLSFEGGTRRNIPKFKIGTLIYARVVKANSIMNPELSCMDATGKAAKFGQLKDGYMFDTIKLAVTNVVKYANMSSSGGPWEKKLSFEIAVGINGRVWVNAPAASTVILVSNAIMRSESLSGIKQRAMVENLLERLS

SEQ ID NO: 16531 - protein, 671 aa, Zymomonas mobilis subsp. mobilis ZM4
MAETTTAEAKKNAGDAPLIDLNETSIRKFITQAKKRGYVTYDQLNEALPQDQMSSEQIEDIMSALSEMGINIVENEDSGEDGQQEEEDAAEELQGDGGTSPAPAITTKKETSDRTDDPVRMYLREMGAVELLSREGEIAIAKRIEAGRDTMILGLCESPITFDNIIEWSNALNEGTLQLREIIDLDAMLTQGPSPDQFEEDGDDNDNEISERNAGPTFKEDDDEDDDSEGELDENGQRIQRENMDEEDENTLSLAQMEEQLKPASLEKFAKIADLYRQFSVLQNARMRALGANEEFPEDQENAYQQLREELTAEVESVKFHNARIEFLVEQLYNYNSRLRTLNGQMLRLAERYKVPRDSFLNAYLGNEMEEGWVERVSKIDKKWANFTTSEAESIERIRSEVAEIAQVTGMTLKELRRIVTMVQKGEREARIAKTEMVEANLRLVISIAKKYTNRGLQFLDLIQEGNIGLMKAVDKFEYRRGYKFSTYATWWIRQAITRSIADQARTIRIPVHMIETINKLVRTSRQILHEIGREPTPEELAERLSMPLEKVRKVMKIAKEPISLETPIGDEEDSHLGDFIEDKNAIIPVDAAIQANLKETVTRVLASLTPREERVLRMRFGIGMNTDHTLEEVGQQFSVTRERIRQIEAKALRKLKHPSRSRKMRSFLDH

SEQ ID NO: 16532 - protein, 157 aa, Zea mays
MASPLRRSFPSLGRALLTPAPARMLSAEASDALVEIKPGEIGMVSGIPEEHLRRKVVIYSPARTAYQQGSGKVGRWKINFLSTQKWENPLMGWTSTGDPYANVGEAGLTFNSAESAKAFAEKHGWNYVVRKRHTPLLKPKAYAENFKWKGPPKAEQA

SEQ ID NO: 16533 - protein, 141 aa, Silicibacter pomeroyi DSS-3
MGDKTLTCLACGQLNRVPEARLTAGAKCGKCGDGLLTGQARDVDPAILEKAKKNDDLPLVVDFWAPWCGPCRMMGPEYAKAAGVLAGQARLVKLDTQKHQSTGGRYGIRGIPTMVAFERGKEKKRQSGAMQSGQIVGWVRG

SEQ ID NO: 16534 - protein, 128 aa, Arabidopsis thaliana
  misc_feature (91)..(91): Xaa can be any naturally occurring amino acid
  misc_feature (98)..(98): Xaa can be any naturally occurring amino acid
  misc_feature (100)..(100): Xaa can be any naturally occurring amino acid
MASSMLSSAAVVTSPAQATMVAPFTGLKSSASFPVTRKANNDITSITSNGGRVSCMKVWPPIGKKKFETLSYLPDLTDVELAKEVDYLLRXKWIPCVXFXEFEHGFCVVSTGNTLGTFTYDKCGKALE

SEQ ID NO: 16535 - protein, 278 aa, Geobacter metallireducens GS-15
MNGEALTIAAVPLLQDSSLELHGGVAVLTFQRDDVRNALTGTALVDDLVRTVQWANTSTEVSVLVITGAGAAFSSGGNVKEMQEKSGIFAGGPIDVQNQYRRGIQQVPLALHKAEIPVIAAVNGPAMGAGLDLACMCDIRIASDKALIGGTFINLGIIPGDGGAWFLPRLVGYQRAAEMLFTGRIMKAAEALQLGLFLEVVEPEELLPRARELAGQIAAKPPQALRLMKRLLKLAQRNDLPDFLDATACFQAMAHHSDDHLEAVTAFLEKRAPRYSGR

SEQ ID NO: 16536 - protein, 680 aa, Photobacterium profundum SS9
MYFAYRIVVRPLTLMSLAVSNFDDDKVPQRINLKGRRFDDEISTLTETYNSSVNRIRDHYDELELAREEAEEANRKKSEFLANMSHEIRTPMNGIIGLSSLLQEMDMPKDQKEYIQMLNISSLSLLDLINDILDFSKIEAGRLELEHTSLNLFELNKEVESIFLVKASEKSIAFQCSIDKRIPPMLLGDATQLRQVLNNLVSNAIKFTHTGYVHLHTQLETDTDTETTIRFEVIDSGIGVSADKHEAVFDKFQQADGSTTRKYGGTGLGLSICRQIVHLMGGEIKISSEVDKGSTFYFTITFEKNVLVSASLEDSKALSEISVLLVDDSMLNMRITSAQLNNFGAKSICCDDATQAIDIVKQAIANKNPFDLVIIDKIMPHLDGFELAQLLTKEFGLDCPRLMMISAGPQMGDDLKAKQVGILACLSRPYKESNLKWTVKRVIKMTSDEVIATPLNCKRSLNGTETSQALSNATSPVMTPEMTTPENFLQSVHHANMPQASEINFLPKSNAEVKKASSPEESGVITNDSTAALTRELDPEASTPRAKVLVVEDAVVNQKVAKMMLEKLGVEVMIASNGQIGVDMYQEHDFDMIFMDCQMPVLDGFGATKAIRNLEQNTSHIPIIALTANVVKEEKDKCYEAGMDDFVSKPVSKKVLSAVLEKHLAIVLLAKKDITIKNNI

SEQ ID NO: 16537 - protein, 401 aa, Catharanthus roseus
MPKSWPIVISSHSFCFLPNSEQERKMKDLNFHAATLSEEESLRELKAFDETKAGVKGIVDTGITKIPRIFIDQPKNLDRISVCRGKSDIKIPVINLNGLSSNSEIRREIVEKIGEASEKYGFFQIVNHGIPQDVMDKMVDGVRKFHEQDDQIKRQYYSRDRFNKNFLYSSNYVLIPGIACNWRDTMECIMNSNQPDPQEFPDVCRDILMKYSNYVRNLGLILFELLSEALGLKPNHLEEMDCAEGLILLGHYYPACPQPELTFGTSKHSDSGFLTILMQDQIGGLQILLENQWIDVPFIPGALVINIADLLQLITNDKFKSVEHRVLANKVGPRISVAVAFGIKTQTQEGVSPRLYGPIKELISEENPPIYKEVTVKDFITIRFAKRFDDSSSLSPFRLNN

SEQ ID NO: 16538 - protein, 116 aa, Methanosarcina barkeri str. fusaro
MKYIIAMIRPEKLDSVKKEIQKIGAHGLTVSSISGYGAQGGHLNVDRTKTEKYEANLLDKVKIEIAVKDEFLQTTVEAIERGSKDVDGYIGSGKIFVLPLENVMRIRTKETGNDAL

SEQ ID NO: 16539 - protein, 401 aa, Dicranella heteromalla
SDSGKDAGRLSAAWQMFKAQEDLVKVAQDHKVRLTMFHGRGGTVGRGGGPTHLAILSQPPDTINGSLRVTIQGEVIEQSFGEEHLCFRTLQRFTAATLEHGMHPPIAPKPEWRDLMDSMAVAATEEYRSIVFKNPRFVEYFRTATPELEYGRMNIGSRPSKRKPSGGIESLRAIPWIFAWTQTRFHLPVWLGLGGALKQAIEVDPRNMNTLARMYDQWPFFRVTIDLVEMVFAKGDPRIAELYDTLLVKESSQPFGEDLRRKYNETKNLLLQVPFPIPFKHFSVKFFSRRRNPECLQILMLQVLIPVTLQIARHTDILQGNPTLKQRLRLREPYITALNVQQACTLKKMREQRSQPQPESPKLSKTSELVTLNRATEFAPGLEDTVILTMKGIAAGMQNTG

SEQ ID NO: 16540 - protein, 311 aa, Neisseria meningitidis Z2491
MNPKKLVIASRESLLAMWQAKHIQGRLKALYPDCEVEILGMTTRGDQILDKTLSKVGGKGLFVKELEQALYDGRADLAVHSIKDVPMDLPEGFALAAIGERANPFDAFVSNQYARLEEMPEGAVVGTSSLRREAQLRARYPHLLIKPLRGNVQTRLSKLDNGEYDAIILAAAGLQRLKLDGRIRMILSESDSLPAAGQGALGIEIAAHREDLYEVLKPLNHGVTNACVTAERALARALGGSCQVPLAAYCTEENGLLTLRGLVGHPDGSVVLRADAQAPAEYADALGRAVAKKLADDGARELIGAVLNTEN

SEQ ID NO: 16541 - protein, 511 aa, Nepeta racemosa
ILIALLCTLPFLFFLKKWRRSYSGKTPPPSPPKLPVLGNLHQLGTFPHRSLQSLSRRYGPVMQLHFGSVPVLVASSPEAAREIMKNQDLNFSNRPNLSIPRRLLYDNHDVAFAPYGEYWRQIRSICVLQLLSNKRVQSFRRVREEETSIMVEKIMQLQKTTPTAAVNLTDLLTCLTNDVFCRIALGKKYGGTTTGDGEYHVRSLKKNLAEFYVLLGISPLWEYIPWLEWTRRFDGVDRRIEEVSRTFDEFLGKVIQEHRVRDKREDTTVVGDTVGLDFVDLLLQFQRENERSSSPVDDLTIKAVILDMFLAGTDTTVTALEWALSELIKNPRAMKILQKEVRGVAGSKGEIEESDLEKMPYLKAVMKESLRLHAPVPLLVPRESTRDTKVLGYDVASGTRVLINCWAIGRDSSVWEESETFLPERFLETSIDYRGMHFELIPFGSGRRGCPGATFAAAIDELALATLVHKFDFKLPNGVRVEDLDMSEGSGFTIHKKFPLLVVPTPHACTS

SEQ ID NO: 16542 - protein, 112 aa, Ralstonia metallidurans CH34
MKLIIAVIKPFKLDEVREALSDVGVSGITVTEVKGFGRQKGHTELYRGAEYIVDFLPKVKIEVAVPDEVVERAIEAVEKSARTGKIGDGKIFVAPIEQVIRIRTGETGGDAL

SEQ ID NO: 16543 - protein, 330 aa, Frankia sp. EAN1pec
MSAATMVQALNAALRDSLRADPDVHVLGEDVGALGGVFRVTDGLAAEFGTQRCLDTPLAEAGILGTAVGMAMYGLRPVVEMQFDAFAYPAFEQLASHVAKMRNRTGGAVSLPVTIRVPYGGGIGGVEHHSDSSEAYYAHTPGLHVVTPATVTDSYGLLRAAIASDDPVVFLEPKRLYWSTEDGLSPAEVARAEVGPIGRAAVRRPGTSATLLTYGPALPVCLRAAEAAVAEGWDLAVVDLRSLVPFDDETVCAAVRATGRAVVVHEAAGFGGVGAEIAARVTERCFHHLAAPVLRVTGFDIPYPPPMLEHHYLPSVDRVLDAVARLQWEQ

SEQ ID NO: 16544 - protein, 364 aa, Dendrobium loddigesii
SDSGKDAGRLSAAWQLYKTQEELVKVAKEYGVKLTMFHGRGGTVGRGGGPTHLAILSQPPDTILGSLRVTVQGEVIEQSFGEENLCFRTLQRFTTATLEHGMQLPISPKPEWRALMDEMAVVATNEYRSIVFQEKRFVEYFRLATPELEYGRMNIGSRPSKRKPSGGIESLRAIPWIFAWTQTRFHLPVWLGFGVAFKHVIEKDKNNLNILREMYNEWPFFRVTIDLIEMGFTKGSTGIAALYDKLLVSTDLLPFGEQLRANYEETKRLLLQVAGHKDLLEGDPSLKQRLRLRYPYITTLNVWQAYTLKRMRDPSYHPTAKPNLSNKIMNSSKPAAELVKLNPTSEYAPGLEDTLILTMKGIAA

SEQ ID NO: 16545 - protein, 531 aa, Synechocystis sp. PCC 6803
MNNQQLWQRYQDWLYYHGGLDFYLDVSRMGFSDALVEDLQPKFAKAFQDMVALEKGAIANPDEQRMVGHYWLRNPALAPNDGIRAEITEPLRQIKAFVADVHQGNIKPPTAPKFTDLLAIGIGGSALGPQFVAQALAPNFPPLAIHFIDNSDPDGIDRVLNCLKAQDKLKSTLVVTTSKSGGTPEPRNGLAETKAVFEAQGLHFADYAVAVTMPGSKLSQQAQTEQWLQAFPMQDWVGGRTSELSAVGLLPAALQGIDIQAMLDGAKTMDEATRVRELRQNPAALLALAWYYAGDGQGKKDMVILPYKDRLLLFSRYLQQLVMESLGKERDLDGNVVHQGIAVYGNKGSTDQHAYVQQLRDGVPNFFATFIEVLHDRQGPSLELEPGVTSGDYLSGFLQGTRQALFENQRDSITVTIPEVDATSVGALIALYERAVSFYGSLVNVNAYHQPGVEAGKKAAASILELQKAILSTLQNESGPIALEALATKVQAPEQVETVYKIVRHLAANDRGVTLQGDRQFPQRLQIQWRS

SEQ ID NO: 16546 - protein, 363 aa, Dendrobium crumenatum
SDSGKDAGRLSAAWQLYKTQEELVKVAKEYGVKLTMFHGRGGTVGRGGGPTHLAILSQPPDTILGSLRVTVQGEVIEQSFGEENLCFRTLQRYTTATLEHGMQLPFSPKPEWRALMDEMAVVATNEYRSIVFQESRFVEYFRLATPELEYGRMNIGSRPSKRKPSGGIESLRAIPWIFAWTQTRFHLPVWLGFGAAFKHVIEKDKKNLNILQEMYNEWPFFRVTIDLIEMVFTKGSTGIAALYDKLLVSADLLPFGEQLRANYEETKRLLLQVAGHKDLLEGDPYLKQRLRLRYPYITTLNVQVYTLKRIRDPNYHLTAKPNGSNEIRNSNKPAAELVKLNPTSEYPPGLEDTLILTMKGIAA

SEQ ID NO: 16547 - protein, 455 aa, Bacillus megaterium
TIKEMPQPKTFGELKNLPLLNTDKPVQALMKIADELGEIFKFEAPGRVTRYLSSQRLIKEACDESRFDKNLSQALKFVRDFAGDGLFTSWTHEKNWKKAHNILLPSFSQQAMKGYHAMMVDIAVQLVQKWERLNADEHIEVPEDMTRLTLDTIGLCGFNYRFNSFYRDQPHPFITSMVRALDEAMNKLQRANPDDPAYDENKRQFQEDIKVMNDLVDKIIADRKASGEQSDDLLTHMLNGKDPETGEPLDDENIRYQIITFLIAGHETTSGLLSFALYFLVKNPHVLQKAAEEAARVLVDPVPSYKQVKQLKYVGMVLNEALRLWPTAPAFSLYAKEDTVLGGEYPLEKGDELMVLIPQLHRDKTIWGDDVEEFRPERFENPSAIPQHAFKPFGNGQRACIGQQFALHEATLVLGMMLKHFDFEDHTNYELDIKETLTLKPEGFVVKAKSKKIPL

SEQ ID NO: 16548 - protein, 572 aa, Ashbya gossypii ATCC 10895
MYFSKLLSAVALCSSASALYVPGDADVNVQNKDQTPTALPEEPLNGTAYRPIMHATPSQGWMNDPNGLWYDTKEEVYHVYYQYNPADTVWGVPLYWGHLTSKDLQSWEDHGVAIRPPRNDSGAFSGSAVVDTNNTSGFFNDSIDPAQRVVAIWTYNTPESETQWISYSLDGGYTFIDYANNPVLDLNSTQFRDPKVIWHEESQKWIMTVVLSHKYAIQIYSSDNLREWTLESEFKNHGLLGFQYECPGLAKIPVSKPANCEMQLKDVSYPVKNNTDYVWVMFLAINPGGPQGGNFNQYFIGDFDGKKFTPFSEQTRFLDHGKDFYAFQGFYNSQFKDSFLGIAWASNWQYSAYVPTNPWRSSMSLARKLTVRPYNPTPESVQLVLNSEPVFVPEDMEFNSNFSSWKDLKLTSGKEEVFEFGSTPLGAFEFNLTFTANDTGLSKHSLGDFSIYLEGAKDPDEYLRLGYSTQAADFFFDRGNSKVSFVRENPFFTNKMAINMEPWEILAPGVKVFKVRAIFDVDILELFFNEGTAASTNTYFLTEENHPASLKFKTSVDNVFTVNELSLRQLTF

SEQ ID NO: 16549 - protein, 820 aa, Sinorhizobium meliloti 1021
MTETAREKLVIVGNGMAPGRMLEELFEKAPGRYAVTIFNAEPRVNYDRIMLSPVLSGEKEYEEIIIHGDGWYIKHGITLYKGHKIIAIDRDAKTVTSDHGVTESYDKLVIATGSVPFIIPVPGKELRGVITYRDLDDVQAMLLAAQSREKAVVIGGGLLGLEAAAGLQARGMDVTVLHVMPTLMERQLDPAAGYLLQKAVEERGIKVVTKANTKRILGEEKVEGIELDDGRIIPATLVVMAVGIRPNAGLAKEAGLAVNRGIVVDAGMQTSDGDIMALGECAEVGGMVYGLVAPLYEMARVAASHLAGDRRAAFAHSDTPTKLKVTGINLYSVGDFADADGREEIVLRDATAGIYKRLVLKDNRIIGTVLYGDTADGAWFNDLLKRGTDISEMRDTLIFGQAYQGGSPLDPTAAVAALPDDAEICGCNGVCKGKIVGAITSKGLTSLDDVRAHTKASASCGSCAGLVEQIMSLTLGDTYNPASVQPMCNCTDLGHDDVRRLIKAKKLKSIPAVMQELEWKTSCGCAKCRPALNYYLVCDWPDEYADDYQSRFINERVHANIQKDGTYSVVPRMWGGVTNSKELRAIADVVDKFNVPLVKVTGGQRIDLLGIEKEDLPAVWADLGQAGFVSGQAYAKGLRTVKTCVGSDWCRFGTQDSTGLGIRIEKFMWGSWTPAKLKMAVSGCPRNCAEATCKDVGVICVDSGFEIHFAGAAGLDIKGTEVLGLVRTEDEALEHIVALTQMYREQARYLERIYKWAKRVGLDEIRRQIMDDVEKRKAYFDRFVFSQKFAQVDPWSERVSGKDKHEFRPMATVGFNQAAE

SEQ ID NO: 16550 - protein, 364 aa, Dendrobium farmeri
SDSGKDAGRLSAAWQLYKTQEELVKVAKEYGVELTMFHGRGGTVGRGGGPTHLAILSQPPDTIHGSLRVTVQGEVIEQSFGEEHLCFRTLQRFTTATLEHGMQLPISPKPEWRALMDEMAVVATNEYRSIVFQESRFVEYFRLATPELEYGRMNIGSRPPKRKPSGGIESLRAIPWIFAWTQTRFHLPVWLGFGAAFKHVIEKDKKNLNMLREMYNEWPFFRVTIDLIEMGFTKGSPGIAALYDKLLVSTDLLPFGEQLRANYEETKRLLLQVAGHKDLLEGDPYLKQRLRLRYPYITTLNVWQAYTLKRIRDPSYHLPAKPNLSNEIMNSNKSAAELVKLNPTSEYAPGLEDTLILTMKGIAA

SEQ ID NO: 16551 - protein, 537 aa, Brassica rapa subsp. pekinensis
SFKDKTYEGNNNNLPEENSTTITHVSSVHSPTTEQDFPKEDNNNNNNKSPVLVLPVKEPFMRRNMDNQAYYVLGHKTPNIRDLYTLSRKLGQGQFGTTYLCTEVATGVDYACKSISKRKLISKEDVEDVRREIQIMHHLAGHKNIVTIKGAYEDPLYVHIVMEVCAGGELFDRIIQRGHYTERKAAELTKIVVGVVEACHSLGVMHRDLKPENFLLVNKDDDFSLKAIDFGLSVFFKPGQIFKDVVGSPYYVAPEVLLKHYGPEADVWTAGVILYILLSGVPPFWAETQQGIFDAVLKGDIDFESDPWPVISDSAKDLIRKMLCSNPSERLSAHEVMRHPWICENGVAPDRALDPAVLSRLKQFSAMNKLKKMALKVIAESLSEEEIAGLRAMFEAMDTDNSGAITFDELKAGLRRYGSTLKDTEIQDLMEAADVDNSGTIDYSEFIAATIHLNKLDREEHLVSAFQYFDKDGSGYITIDELQQSCVEHGMTDVFLEDVIKEVDQDNDGRIDYGEFVAMMQKGNAGIGRRTMRNSLN

SEQ ID NO: 16552 - protein, 382 aa, Leifsonia xyli subsp. xyli str. CTCB07
MIKVVGIGGGGVNAVNRMIELGLRGVEFIAINTDAQALLMSDADVKLDVGREITRGLGAGADPEVGRRAAEDHAEEIEEALAGADMVFVTAGEGGGTGTGGAPVVARIAKSIGALTIGVVTKPFSFEGKRRSQQADSGVQRLKEEVDTLIVVPNDRLLEISDRGISMLEAFSTADQVLLAGVQGITDLITTPGLINLDFADVKSVMQGAGSALMGIGSSRGADRAIKAAELAVASPLLEASIDGAHGVLLSIQGGSNLGIFEINDAARLVQEAVHPEANIIFGAVIDDTLGDEVRVTVIAAGFDGGEPSAKPAIDSRRSSFVEAGGEDAATGAAATAGAGEPDAPSAEAWHATGEPPATETAQKDPAFDDENDDLDIPDFLK

SEQ ID NO: 16553 - protein, 345 aa, Thermus thermophilus
MKVAVLPGDGIGPEVTEAALKVLRALDEAEGLGLAYEVFPFGGAAIDAFGEPFPEPTRKGVEEAEAVLLGSVGGPKWDGLPRKISPETGLLSLRKSQDLFANLRPAKVFPGLERLSPLKEEIARGVDVLIVRELTGGIYFGEPRGMSEAEAWNTERYSKPEVERVARVAFEAARKRRKHVVSVDKANVLEVGEFWRKTVEEVGRGYPDVALEHQYVDAMAMHLVRSPARFDVVVTGNIFGDILSDLASVLPGSLGLLPSASLGRGTPVFEPVHGSAPDIAGKGIANPTAAILSAAMMLEHAFGLVELARKVEDAVAKALLETPPPDLGGSAGTEAFTATVLRHLA

SEQ ID NO: 16554 - protein, 364 aa, Dendrobium farmeri
SDSGKDAGRLSAAWQLYKTQEELVKVAKEYGVKLTMFHGRGGTVGRGGGPTHLAILSQPPDTIHGSLRVTVQGEVIEQSFGEEHLCFRTLQRFTTATLEHGMQLPISPKPEWRALMDEMAVVATNEYRSIVFQESRFVEYFRLATPELEYGRMNIGSRPPKRNPSGGIESLRAIPWIFAWTQTRFHLPVWLGFGAAFKHVIEKDKKNLNMLREMYNEWPFFRVTIDLIEMVFTKGSPGIAALYDKLLVSTDLLPFGEQLRANYEETKRLLLQVAGHKDLLEGDPYLKQRLRLRYPYITTLNVWQAYTLKRIRDPSYHLPAKPNLSNEIMNSNKSAAELVKLNPTSEYAPGLEDTLILTMKGIAA

SEQ ID NO: 16555 - protein, 535 aa, Brassica napus
SFKDKTYEGNNNNLPEENSITITHVSSVHSPTTEQDFPKEDNNNNKSPVLVLPVKEPFMRRNMDNQAYYVLGHKTPNIRDLYTLSRKLGQGQFGTTYLCTEVATGVDYACKSISKRKLISKEDVEDVRREIQIMHHLAGHKNIVTIKGAYEDPLYVHIVMEVCAGGELFDRIIQRGHYTERKAAELTKIVVGIVEACHSLGVMHRDLKPENFLLVNKDDDFSLKAIDFGLSVFFKPGQIFKDVVGSPYYVAPEVLLKHYGPEADVWTAGVILYILLSGVPPFWAETQQGIFDAVLKGDIDFESDPWPVISDSAKDLIRKMLCSNPSERLTAHEVMRHPWICENGVAPDRALDPAVLSRLKQFSAMNKLKKMALKVIAESLSEEEIAGLRAMFEAMDTDNSGAITFDELKAGLRRYGSTLKDTEIQDLMEAADVDNSGTIDYSEFIAATIHLNKLDREEHLVSAFQYFDKDGSGYITIDELQQSCVEHGMTDVFLEDVIKEVDQDNDGRIDYGEFVAMMQKGNAGIGRRTMRNSLN

SEQ ID NO: 16556 - protein, 639 aa, Solanum tuberosum
MATQYHSSYDPENSASHYTFLPDQPDSGHRKSLKIISGIFLSSFLLLSVAFFPILNNQSPDLQSNSRSPAPPSRGVSQGVSDKTFRDVVNASHISYAWSNAMLSWQRTAYHFQPQKNWMNDPNGPLYHKGWYHLFYQYNPDSAIWGNITWGHAVSKDLIHWLYLPFAMVPDQWYDINGVWTGSATILPDGQIMMLYTGDTDDYVQVQNLAYPTNLSDPLLLDWVKYKGNPVLVPPPGIGVKDFRDPTTAWTGPQNGQWLLTIGSKIGKTGIALVYETSNFTSFKLLGEVLHAVPGTGMWECVDFYPVSTEKTNGLDTSYNGPGVKHVLKASLDDNKQDHYAIGTYDLTKNKWTPDNPELDCGIGLKLDYGKYYASKTFYDPKKQRRVLWGWIGETDSESADLQKGWASVQSIPRTVLYDKKTGTHLLQWPVEEIESLRAGDPIVKQVNLQPGSIELLHVDSAAELDIEASFEVDKVALQGIIEADHVGFSCSTSGGAASRGILGPFGVVVIADQTLSELTPVYFFISKGADGRAETHFCADQTRSSEAPGVAKQVYGSSVPVLDGEKHSMRLLVDHSIVESFAQGGRTVITSRIYPTKAVNGAARLFVFNNATGASVTASVKIWSLESANIRSFPLQDL

SEQ ID NO: 16557 - protein, 728 aa, Idiomarina loihiensis L2TR
MRCDIEGWQQDFIERLAQEDLPAPQSQHSNLNDSDLFALFHSQVLSRFIDIESRRLQRQGKSFYTIGSAGHEGNAAVAAALRVTDPAFLHYRSGAFFLQRAKQLEGSNSLYDLMLSFCASSEDPISGGRHKVLGSLALNIPPQTSTIASHLPKAMGTAYAIGLSKRLKQAGQWPDDAIVLCNFGDASANHSTAVGALNATGWSAYQGMPMPILYVCEDNGIGISTSTPRGWTAHQLQNYPAIRYYYADGANVSETYAVARQAAEYIRRTRKPAILHLKTQRFFGHAGADAEVAYRSNESIEQSFETDVLLQSAAQVIERELCTGIQLSEKAQCWLQRIRRVGTEASARPRLECAESVMASIVPKTLADDTQPLTSTQQQAVFAFDKRNFKKPQPLGKMINWALHEILARYQNTVVFGEDVGKKGGVYHVTHHLFDHFGANRVVNTLLDEQSILGLAMGMAQQGFLPIPEIQFLAYVHNAEDQIRGEAATLPFFSNGQYHNGMVIRIAGLAYQKGFGGHFHNDNSFAVFRDIPGVIVMCPSNGHDAVLMMRQAVQLAHCQKRLVIFLEPIALYMTRDLLAEGDKGWLHEFPSATAPLPALGEPSRYGEGDELVIITYGNGYYLSRQACSELALEKRIRILDLRYLVPLDIEKIVAAVGSAKHILVVDECRNRGSLSEELVTALYEHRRDWQRVDRITAKDSFIPLGSAAYKVLPGKEDIIHYLQEHLGQ

SEQ ID NO: 16558 - protein, 1003 aa, Burkholderia sp. 383
MPAKLKRLLAHAAAVGRKPFDPGRVRRQQQMLLYGGGSAVTAFIVVCAALVIRLDVQDSLGQARATFLQRGAELHANLQTADRALSAFGIRTEQLWDQGVQPPQDAVQSFSADHGRLLVRAAGGWEPFLAIAEVTPDRPAESYARYLGATLAQIDRSSHYPPSPASADLIGGYLIGLDGAFLGIVGSGNVARARSLPPDIDVPALIARLRPTGETKQKSDMLGGTFTLDRRYDPILGRTIVRFARRLDDAAGHPFAWLIFNGTSDLDDIMMPRSDDEDVAVVDARGRIVFGRQRDPAMIERAMNGTRASSGGHVVVRRVGTRFVISDRLPESGLTLITTFSWRSVASATAVGVSVTLAAALFAISMLWIAIVTFDLRALRPANRRAIRLIESEAFNRTLIRTAPAGLLLLSAADGETMVRNDAVLAYDDGVSGLPLGKRIWQACRERQRAGADERRFVMQQELAVERAGHDTTYLAAHVVRTKFRGVDVLLCTLTDVTARKLTEDKLREARVAADDANKAKSTFLATMSHEIRTPLNAIIGNLELMGRAELPPTEQRRLKTIVSSSDALLNIINDVLDLSKAESNQMALEHIPFDLRRVLQDVASIFRPLADAKGLSLECHVAAELADGYVGDPTRLRQLVSNLVGNAIKFTEHGGITIDARLARGDARAGCVEIAVRDTGVGIPGEALPTLFDVYMQADASIYRRFGGTGLGLPLCRRIARLMDGELTVESRLGEGSTFVATLPLTDAPAGCLDAASEPDAASVASTSPRRDDVPPLRVLVAEDHPASRALLRDQLDALGHDATIVENGMEAMRAYFAHPFDIVLTDLSMPQLDGFALANFLREQGANVPVIAMTAHATDEDRGRCRQVGVAEVVLKPLSIDSLDAALRRHGSRDGAVAGAVDSGVREVAPVMTGEMRRTLREATLRSLAAIEAALSGDDGEVLRVELHSMRGGFALAGDRAARDACAQMEAAVNTGGAAAFELHWAAFRQEMEHALERIDR

SEQ ID NO: 16559 - protein, 261 aa, Bradyrhizobium sp. BTAi1
MTDTVLLDITDRIALLTLNRPERLNALSYRLIDALMAMLDRIETDAGVRAIILTGAGDRAFSAGADIHEFAASVGDGRSVALRDFVRRGQAMTSRLEAFPKPIIAAVNGLAFGGGCEITEAVHLAVASTRASFAKSEIRLGMPPTFGGTQRLPRLVGRKRGLELLLTGDAIPAQRAAEIGLVNAVVPHDQMLPAARELAKRIIRHGPEAVTSVITAATRGLNMAIGEGLQVEGEQFGRLVGGRELEHGLAAWRERRPRASL

SEQ ID NO: 16560 - protein, 303 aa, Nocardia farcinica IFM 10152
MGTRWSPDYVGWGRGRVILARLSDGVVPVHRIECGGPMSEPVLVERHGATVVWTLNSPRARNPISEPETIAALESAVAAAEADPDVRVAILTGAGAAFSSGGNIKHMRDKAGMFAGGPADLRPGYRHGIQRIPKALYDCEIPTIAAVNGPAIGAGCDLALMCDMRIAAHSAVFAESFVKVGLIPGDGGAWLLPRAVGMARASEMAFTGDAIDAATALEWGLVSRVVPDAELLPAAHALADRVAANPPHVLRMTKRLIREGQHQRLESLLELSAAMQAIAHTTGDHHEAVAAMLDKRPPRFTGR

SEQ ID NO: 16561 - protein, 569 aa, Clarkia xantiana
MATPSLISETEAWKDLKAHLEGIKRTHLRELMGDTERCQSMMVEFDNIFLDYSRQQASPDTINKLYKLAEAAHLKQKIDRMYNGDHINSTENRSVLHVALRAPRNSAICSDGKNVVPDVWNVLDKIKDFSERVRNGSWVGATGKELKDVIAVGIGGSFLGPLFVHTALQTDPEASKNARGRELRFLANVDPIDAARNISGLNPETTLVVVVSKTFTTAETMLNARTLREWISSALGVSAVAKHMVAVSTNLPLVEKFGIDPNNAFAFWDWVGGRYSVCSAVGVLPLSLQYGFAVVEKFLQGAHSIDQHFSSAPFEKNIPVLLGLLSVWNVSFLGYPARAILPYSQALEKLAPHIQQVSMESNGKGVSIDGLPLPFESGEIDFGEPGTNGQHSFYQLIHQGRVIPCDFIGVVKSQQPVYLKGEVVNNHDELMSNFFAQPDALAYGKTPEQLKKENVSEHLIPHKTFTGNRPSLSILLPTLDAYRIGQLLAIYEHRVAVQGFVWGINSFDQWGVELGKSLATQVRKQLHASRVKGEPVEEGFNFSTKTLLTRYLEATSDVPADPSTLLPKI

SEQ ID NO: 16562 - protein, 677 aa, Mycobacterium leprae
MDDRRLRTLPNEAYWIAVCGLLAFVVASARADSRGSGGTNNILQADHSMARAVHLMRHRGPDELSTWSDPDIDGFSGGVAFGFNRLSIIDIAHSHQPLRWGPPETPNRYILVFNGEIYNYLELRDELVIRHGAAFATDGDGESIVAGFHYWGTEILTRLRGMFAFALWDTIAHELFCARDPFGIKPLFMATGTNGTAVASEKKCLLELAEVIRFDTQIDTRALQHYTVLQYVPEPETLHRGVHRLESGCYARIRPEQLDPATTRYFVPQFAATPITSSTEQTRYGEITAVLADSVAKHMRADVTVGSFLSGGIDSTAIAALAIRHNPRLITFTTGFEHEGFSEIDVAAASAEAIGARHIVKVVTPNEFVAALPEIVWYLDEPIADPALVPLFFVAREARKHVKVVLSGEGADELFGGYRIYREPLSLKPFDYLPGPLRRSMGKVSKSLPEGMRGKNLLHRGSLTLEERYYGNARNFSEAQLQAVLPRFHTGWTHTDVTAAVYAESVGWDPVARMQHIDLFTWLRGDILAKADKMTMANSLELRVPFLDPEVFAVASRLPMQAKITRTTTKYALRRALESIVPAHVLHRPKLGFPVPIRHWLRAGELLEWAYALVNSSQAEHLVNLAAVHRMLDEHRGGISDHSRRLWTVLIFMLWHAIFIEHSVVPQISEPQYPVQP

SEQ ID NO: 16563 - protein, 169 aa, Brassica napus
  misc_feature (70)..(70): Xaa can be any naturally occurring amino acid
MLEGPKFDMLAVGNHHNYDAFTQDFYQKLGEEGTNMSTDSMQTSNAGGSVSMSVDNSSVGSSDALIRRSXGHPGLKPMRHPYSLSVGQSVFRPGRVTHALNDDALAQALMDSSYPTQGLANYEEWTIDLRKLHMGPAFAQGAFGKLYRGTYNGEDVAIKLLERPENSPE

SEQ ID NO: 16564 - protein, 459 aa, Streptococcus pneumoniae
MSKIVVVGANHAGTACINTMLDNFGNENEIVVFDQNSNISFLGCGMALWIGEQIDGAEGLFYSDKEKLEAKGAKVYMNSPVLSIDYDNKVVTAEVEGKEHKESYEKLIFATGSTPILPPIEGVEIVKGNREFKATLENVQFVKLYQNAEEVINKLSDKSQHLDRIAVVGGGYIGVELAEAFERLGKEVVLVDIVDTVLNGYYDKDFTQMMAKNLEDHNIRLALGQTVKAIEGDGKVERLITDKESFDVDMVILAVGFRPNTALADGKIELFRNGAFLVDKKQETSIPGVYAVGDCATVYDNARKDTSYIALASNAVRTGIVGAYNACGHELEGIGVQGSNGISIYGLHMVSTGLTLEKAKAAGYNATETGFNDLQKPEFMKHDNHEVAIKIVFDKDSREILGAQMVSHDIAISMGIHMFSLAIQEHVTIDKLALTDLFFLPHFNKPYNYITMAALTAEK

SEQ ID NO: 16565 - protein, 187 aa, Gossypium herbaceum
PLQDLCVALNSTKHAVFVNGKLCKDPKLATADDFFFSGLDKPGNTSNAVGSRVTPVNVDQIPGLNTLGISLVRIDYAPNGGQNPPHTHPRATEILVVTKGTLYVGFVTSNPDNRLFTKVLKTGDVFVFPVGLIHFQFNIGKTNAIAFAGLSSQNPGVITIANAVFGSNPAINSEVLAKAFKLDKKMV

SEQ ID NO: 16566 - protein, 472 aa, Nocardioides sp. JS614
MTSIEELNPELKGIGRYEFGWADSDAAGATAQRGLNDAVVRDISAKKGEPQWMLDLRLKGLKLFDRKPMPSWGSDLSDIDFDNIKYFVRSTEKQATSWEDLPEDIKNTYDRLGIPEAEKQALVAGVAAQYESEVVYHQIRGDLEEQGVIFVDTDTALREHEDLFREYFGTIIPVGDNKFAALNTSVWSGGSFVYVPPGVHVEIPLQAYFRINTENMGQFERTLIIVDEGAYVHYVEGCTAPVYSSDSLHSAVVEIIIKKGGRCRYTTIQNWSNNVYNLVTKRATCEAGATMEWVDGNIGSKVTMKYPAVYLMGEHAKGETLSIAFAGEGQHQDAGAKMVHAAPHTSSSILSKSVARGGGRTSYRGLIQVNEGAHGSKSNVLCDALLVDQISRSDTYPYVDIREDDVSMGHEASVSKVSDDQLFYLMSRGMEQDEAMAMIVRGFVEPIAKELPMEYALELNRLIELQMEGAVG

SEQ ID NO: 16567 - protein, 394 aa, Eremothecium gossypii
MPATSLDLSDHSYLDSALSATLDSTDAFEGPEKLLEVWFYPSVSALPNAKGLRSISLDEWCSMLELVKCEVLSSKKTAHMDAFLLSESSMFVFEHKLTLKTCGTTTTLLCLPRLLAMVESHLGWVMKSPGSDKFHPYKVFYSRRCFMFPSKQHPIHRNWGDEVDYLNQFFLGGKSYVIGRSDQNDHWNLYITETNKTLASGLTSDERDETLEILMTGLDSGSARQFVADRTQSPSEEGLAACNAPGHVYGLEITKATGLDCVYDNQKSVPFVHDAFAFMPCGYSSNIIMDDKYYYTLHVTPEDGWSYASFESNVPVQDVSCGRQTQHDIVCRILDVFRPTDFCMTFFAKDLLSDRILQLMHLLDSLPNYVKRDKVIHELDEYQLIYLRYQRPAQ

SEQ ID NO: 16568 - protein, 294 aa, Hordeum vulgare subsp. vulgare
MAMASSTTASIAAASLRALAGASPAPLRKPFLVLLSPALPRRLGLGLRAARPRGPLAPLAASDSFETSAAVDVAEPEDEALEAVAEEEPAVAVAEEEFDVAAEEEVGEYVEPPEEAKVYVGNLPYDVDSERLAQLFEQAGVVEVSEVIYNRETDQSRGFGFVTMSTIEEAEKAVEMFHRYDVNGRLLTVNKAAPRGARVERPPRDSGSSFRIYVGNLPWQVDDSRLVELFSEHGKVVDAKVVYDRDTGRSRGFGFVTMASQEELDDAIAALDGQSLEGRALRVNVAEERPPRRF

SEQ ID NO: 16569 - protein, 419 aa, Streptomyces peucetius
MNRRIVITGIGVVAPGAVGTKPFWELLLSGTTATRAISTFDATPFRSRIAAECDFDPVAAGLSAEQARRLDRAGQFALVAGQEALADSGLRIDEDSAHRVGVCVGTAVGCTQKLESEYVALSAGGAHWVVDPGRGSPELYDYFVPSSLAAEVAWLAGAEGPVNIVSAGCTSGIDSIGYACELIREGTVDAMVAGGVDAPIAPITVACFDAIRATSDHNDTPETASRPFSRSRNGFVLGEGGAIVVLEEAEAAVRRGARIYAEIGGYASRGNAYHMTGLRADGAEMAAAITAALDEARRDPSDVDYVNAHGTATKQNDRHETSAFKRSLGEHAYRVPISSIKSMIGHSLGAVGSLEVAATALAVEYGVIPPTANLHDPDPELDLDYVPLTAREKRVRHALTVGSGFGGFQSAMLLSRLER

SEQ ID NO: 16570 - protein, 611 aa, Arabidopsis thaliana
MASLSGLYSSSPSLKPAKNHSFKALPAQSRDSFSFPHTSKPTNLPLTLSSARSVARDISHADSKKELLKDPDALWKRYLDWFYQQKELGLYLDISRVGFTDEFVAEMEPRFQAAFKAMEDLEKGSIANPDEGRMVGHYWLRNSKLAPKPTLKTLIENTLDSICAFSDDIISGKPPSSPEGRFTQILSVGIGGSALGPQFVAEALAPDNPPLKIRFIDNTDPAGIDHQIAQLGPELASTLVVVISKSGGTPETRNGLLEVQKAFREAGLNFAKQGVAITQENSLLDNTARIEGWLARFPMYDWVGGRTSIMSAVGLLPAALQGINVREMLTGAALMDEATRTTSIKNNPAALLAMCWYWASNGVGSKDMVVLPYKDSLLLFSRYLQQLVMESLGKEFDLDGNTVNQGLTVYGNKGSTDQHAYIQQLRDGVHNFFATFIEVLRDRPPGHDWELEPGVTCGDYLFGMLQGTRSALYANGRESISVTIQEVTPTSVGAIIALYERAVGLYASIVNINAYHQPGVEAGKKAAAEVLALQKRVLSVLNEATCKDPVEPLTLEEIADRCHAPEEIEMIYKIIAHMSANDRVLIAEGNCGSPRSIKVYLGECNVDDLYA

SEQ ID NO: 16571 - protein, 873 aa, Cryptococcus neoformans var. neoformans JEC21
MPLPSIHPLPPNPTTGHQPLASLGGTRSTIHPPPASTSSAGVSRETLKSLQDVYWSDDEDDPDCLLCAEPLDLSDLNFKPCQCGLQICQFCYNKLLSTDARCPGCRRTYDTKAVVFQPVDWEEVKKAKEKKAKKAKTIKQLTGIGRRHLLGVRIVMKNMVYVVGMKLPAIGDEALSVLRSNDYFGQYGKISKLYLADTKSSTSVPSLGSDNSDSTGIYIVYIRREDAARCITSLDGIPAPQGPPGAVLKASYGTARYCETFLKGAKCDNSNCHGLHEWGGESDTFTKEDMEIALTRPSEYDARQKQQSQAQPQQTIPSLSSKIAWPKPSGEDGHSVSSATGLPSAASWGKGIGAKISGRGSAGAIARPTKANGLFPLSKNNASFPLPTPSPTVPIIIKEKKEKKSATMARARSTDSTQSTTPSSNQTSPKRKANALPNLATTKSTTSSAPVPPLSRNIVPSASASVPVLAPSSPAPAPETEPVSEGTDGSADEHLSAESDAGPSSESPAPQTPAHIIENIPPPPVSSEPIIIHSPYPEPVIFPFPADDKDFAFVLGLDDRELQRMQAQAEGYEPSPFSKTLEGLAELGVHAPEIPDLFVAPTSPPVDHYSGLFRPFEADEPSPAMSNDTPGPSRISEDDHNAQRTESRFGFARGSVNVSAQSPFSNGRRSVADLNFRDGWYRNNDASLSSHAQHDANNGAFAAQMNNNFSSSYDSTAGVTENGWNGESVYSASPSLQRQNVATVGLHGYEVRPSGRLEQTLLQGQYMQKGIRDREEYDNTLLTMLQYGNPPQLFSSQHHQQQQQQQRVIFSPDSTSHALQEDGPFQSPMAFSQLQQAQQTPLQHHPDARQLMQMHQRRGQSPAPMAAHGYRRF

SEQ ID NO: 16572 - protein, 391 aa, Methanocaldococcus jannaschii
MRELNDVYDVVVVGAGPGGSMASYASAKNGAKTLLIEKSQEIGEPVRCAEAIPSIEEFGLKPEPEFVRNIIKGGILFSPSGKKVTVTQDKAQGYVVERKIFDKYLAIRAAKAGAKVAVKTTAIGLERDGDYWNVIVEFLGEEYVIKTKVVIAADGVESNIAEYAGLKAKKKPLEICSCAEYEMTNVELLDKNMMEFYFGNEVAPGGYVWIFPKGETANVGLGVRDKKKKAIEYLEEFIENGLAKDRLKDATPIEFKVGGAPVSGPIEKTYTDGLLVVGDAAGQISPLTGGGIYLAMDCGLIAGEVASKAIKLNDWSEETLKEYERRWKEKHYEYLMSHLKYRKILEKMSDDELDALAEALGESLDGIDLKKFVKRIITKKPSLLKYFKDLL

SEQ ID NO: 16573 - protein, 607 aa, Kluyveromyces lactis NRRL Y-1140
MSSKNTRIAIVSEDKCKPKKCRQECKRSCPVVKTGKLCIEVMPTSKIAFISENLCIGCGICVKKCPFDAIQIINLPTNLDSQVTHRYSANSFKLHRLPTPRPGQVLGLVGTNGIGKSTALKILAGKQKPNLGRFEDPPEWQEIIKYFRGSELQNYFTKMLEDDIKAIIKPQYVDNIPRAIKGPVQKVGELLKLRLEKSKDDAKRYIDILQLKNVLNREVSALSGGELQRFAIGMSCVQEADVYMFDEPSSYLDVKQRLNAALIIRSLLNPTTYVICVEHDLSVLDYLSDFVCIIYGVPSVYGVVTLPSSVREGINIFLDGHIPSENLRFRTEALQFRMADAGDELEADASRAFTYPDMKRTQGDFSLTVEAGEFSDSQILVMMGENGTGKTTLIKLLAGAIPADDGQDIPKLNVSMKPQKIAPKFTGTVRQLFFKRIRAQFLNPQFQTDVVKPLKIDDIIDQEVQHLSGGELQRVAIVLSLGMNADIYLIDEPSAYLDSEQRIICSKVIRRFILHNKKTAFIVEHDFIMATYLADKVIVFDGIPSKQAFARAPESLLTGCNKFLKNLNVTFRRDPTSFRPRINKLDSQMDKEQKSSGNYFFLDHNGV

SEQ ID NO: 16574 - protein, 187 aa, Gossypium hirsutum
PLQDLCVALNSTEHAVFVNGKLCKDPKLATADDFFFSGLDKPGNTSNAVGSRVTPVNVDQIPGLNTLGISLVRIDYAPNGGQNPPHTHPRATEILVVTKGTLYVGFVTSNPDNRLFTKVLKTGDVFVFPVGLIHFQFNIGKTNAIAFAGLSSQNPGVITIANAVFGSNPAINSEVLAKAFKLDKKMV

SEQ ID NO: 16575 - protein, 618 aa, Erythrobacter sp. NAP1
MRGKTAREKQDIDTMLMQTHEARLKALREELKRRGLDGFVVPISDEHMSEYVGDYAQRLGWLTGFGGSAGFAAVTLTHAAIFVDGRYTVQVRDQVDENLFEYRSIPGDSLGEWLKDVSEAGAKIAYDPWLHTWSWVEALEKTVEPAGITMIPAESNPIDAVWQDQPSPSDAQAIVHTEELAGRSSADKRAEVADWLCDEGLDAVVVPALDSIAWLLNIRGSDVSHTPVALSYVIAHKDGTAELFIAPEKVTPELTQHLGNAVTVRARDEFVGALGSMEGKKVSVDPDFGVVGIAQALRAGGAKFTFKQDPTILAKAIKNSAEVQGHRDAQARDGAAVSRFLRWLEVTAPAGEIDELAAAAKLEGFRRAHGDLRDTSFDTISAASGHAALPHYKVDEDSNILIPPGSIYLVDSGGQYPAGTTDITRTVWIDTPEGSEPTSEMRDRFTRVLKGHIQIDRAIFPQGTNGGQIDALARQYLWEAGVDYAHGTGHGVGSFLGVHEGPQRIAKPGGGQAGTSQELHAGMILSNEPGYYKAGEFGIRIENLVLTIEQDIDGAEGRFLGFEPLTFVPIDRRLIEKSLLTDSEIAWLDAYHARVREIVAPQLDGDDLAWLERETAPL

SEQ ID NO: 16576 - protein, 141 aa, Triticum aestivum
  misc_feature (58)..(58): Xaa can be any naturally occurring amino acid
  misc_feature (69)..(69): Xaa can be any naturally occurring amino acid
  misc_feature (91)..(91): Xaa can be any naturally occurring amino acid
  misc_feature (111)..(111): Xaa can be any naturally occurring amino acid
  misc_feature (117)..(117): Xaa can be any naturally occurring amino acid
  misc_feature (128)..(128): Xaa can be any naturally occurring amino acid
  misc_feature (131)..(131): Xaa can be any naturally occurring amino acid
MAPTVMASSATSVAPFQGLKSTAGLPVSRRSNGASLGSVSNGGRIRCMQVWPIEGIKXFETLSYLPPLXSTEALLKQVDYLIRSKWVPCLXSTSWVHLPVEHNASPGYYDXRYWTMXELLCFGCTDAXQVXNEVEEVKKDT

SEQ ID NO: 16577 - protein, 337 aa, Tropheryma whipplei TW08/27
MTVKIAINGFGRIGRGFFRALSSPSCIDGPEIDVVAINDLTSPEVLAHLLRRDTIFGRFPESVCHDGTKLLVGKREVAVFSEKDPSSIPWNGVDIVIESTGLFTDANIASGHITAGSKRVIISAPAKNEDATFVVGVNHTDYDPNKHSIVSNASCTTNCLAPLAKVFDDTFGIERGLMTTVHAYTADQRLQDAPHSDLRRARAAAMNLVPTSTGAACAIGLVLPNLKGKLDGFAIRVPVITGSITDLSLVSKTDVSAPEVNEAYRRAALGPLKGILCYSEDPLVSSDIVADGHSCIYDANLLRISGNMVKLSAWYDNEWAYSRRLVDLAKYMASVGL

SEQ ID NO: 16578 - protein, 768 aa, Arabidopsis thaliana
NLYLLCRFFYTTGLPSDIEIEVDDITFHLHKFPLMSKSKKLHQLITEQEQSKVYSHIKLGNFPGGSEIFEMVIKISYGFKVDISVSTAVPLRCAAEYLEMTEEYSPENLISKTEKFLSEFVFTNVQESIKALKACESVSSLAESLCITEQCIDSIVFQASSTDPSSFYGWPINNGGIFTVDRKKQSKDSKTELWFEDLTELSFPIFRRVILSMKSSVLSPEIVERSLLTYAKKHIPGISRSSSASSSSSSSSTTIASENQQRELLETITSDLPLTATTTRSLFGLLRAAIILNASENCRKFLEKKIGSNLEKATLDDLLIPSYSYLNETLYDIDLVERLLRRFLENVAVSSSSLTVVGRLIDGVLGEIASDANLKPEQFYNLAVLLPVQARVYDDGLYRAVDIYFKTHSWILEEEKEKICSVMDCRKLTVEGCTHAAQNERLPLRAVVQVLFLEQLQLRQVITGTLLTEEDGDKTVVDLGRWKEAVKENQVLRLDMDTMRTRVNQLEKECLYLKKVIAKIDKESLLKAKHGAGKWSIGKKFGCKFSAQVCDSQEATMSLKEEEKIMGRMDYLAMKTDDVDTVALVNSDMEELKVAAKKLFSDVSKLGGLGFGVSFLKFLASFAAIYLLILDRTNWKTKMLTSLLIPYIFLSLPSVIFNFLSGDVGKWIAFVAVVLRLFFPKHFPDWLEMPGSLILLLVVSPHFLAHHIRGTWIGTVISLFIGCYLLQEHIRASGGFRNSFTQPRGVSNTLGIILLLVYPVWALIVRVM

SEQ ID NO: 16579 - protein, 296 aa, Wigglesworthia glossinidia endosymbiont of Glossina brevipalpis
MGNIIMSILIDKNTKVICQGLTGKQGTFHCKLSLEGGTKIVAGVTPGKGGTNHIGIPVFNTMEEAVNNTGANASVIYVPAQFCKDSILESIDSNINLIVCITEGIPISDMIFVKNKLKRSNTIMIGPNCPGVITPKQCKIGIMPENIHTPGNIGIISRSGTLTYEAVKQITDVGLGQSTCVGIGGDPIIGSDFKDIIKLFNFDENTHAILIIGEIGGDSEESAAKFIKNNVKKPIFAYISGITAPIGKRMGHAGAIISNGQGTAISKITSLKNAGVKIIDNLSKIGLCIKENLDIN

SEQ ID NO: 16580 - protein, 319 aa, Bacillus thuringiensis serovar konkukian str. 97-27
MKRIGVLTSGGDSPGMNAAIRAVVRKAIFHDIEVYGIYHGYAGLISGHIEKLELGSVGDIIHRGGTKLYTARCPEFKDPEVRLKGIEQLKKHGIEGLVVIGGDGSYQGAKKLTEQGFPCVGVPGTIDNDIPGTDFTIGFDTALNTVIDAIDKIRDTATSHERTYVIEVMGRHAGDIALWAGLADGAETILIPEEEYDMEDVIARLKRGSERGKKHSIIVVAEGVGSAIDIGKHIEEATNFDTRVTVLGHVQRGGSPSAQDRVLASRLGARAVELLIAGKGGRCVGIQDNKLVDHDIIEALAQKHTIDKDMYQLSKELSI

SEQ ID NO: 16581 - protein, 263 aa, Mycobacterium tuberculosis H37Rv
MESGPDALVERRGHTLIVTMNRPAARNALSTEMMRIMVQAWDRVDNDPDIRCCILTGAGGYFCAGMDLKAATQKPPGDSFKDGSYGPSRIDALLKGRRLTKPLIAAVEGPAIAGGTEILQGTDIRVAGESAKFGISEAKWSLYPMGGSAVRLVRQIPYTLACDLLLTGRHITAAEAKEMGLIGHVVPDGQALTKALELADAISANGPLAVQAILRSIRETECMPENEAFKIDTQIGIKVFLSDDAKEGPRAFAEKRAPNFQNR

SEQ ID NO: 16582 - protein, 1208 aa, Arabidopsis thaliana
MVRGLVNFTGLSTRLLNICVDSLCKFRKLEKAESLIIDGIRLGVDPDVVTYNTLISGYCRFVGIEEAYAVTRRMRDAGIRPDVATYNSLIAGAARRLMLDHVLYLFDEMLEWGIYPDLWSYNTLMCCYFKLGKHEEAFRVLYKDLQLAGLNPDNALELFKEMQSRFKPELMTYNILINGLCKSRRVGTAKWMLTELKKSGYTPNAVTYTTILKLYFKTRRIRRGLQLFLEMKREGYTYDGYAYFAVVSALIKTGRTKEAYEYMQELVRKDGNLDAVDDLLGEIERRGMKADEYTHTIIVNGLLRTGQTRRAEEHFVSMGEMGIGLNLVTCNCLVDGLCKAGHVDRAMRYFESMEVKDEYTYTSVVHNLCKDMRFVCASKLLLSCYNKGIKIPTSARRAVLSGLRMSGCYGEARKAKAEMKLTLVIMGRVRLVTPSSSESEDERVTIIREADMNREEVAEENKFEDENCEQESPENLNEPEEENISEEGDNVEPMQSQGMEENPEEEEKEGEEEEESEGNQNPNFFSIQPKTYQRTWIWRDMRKIRRRRRFVVLFVGGSSSSEKREGEKKSFREKKGEEGNKERERKFSNSPVKLELKSPAKSELKSPAAKSEKITSEVVGENRGSNDRSIRMGLSWDRLVVVVGTDSFCDCQKRGQSLSFRASVSSYRVALMLITCLCILAVDFTIFPRRYAKTETYGTSLMDLGVGSFVLANAVVSRQARDVSSGNWITGIKATAPLLLLGFIRLVTTSGVDYQVHVTEYGVHWNFFFTLAAISILTSFVNIPAKYCGLLGFAVLAGYQTWLLSGLNTYLLSDERGTDIISKNKEGVYSILGKILTWLLGHVPSWRSLRIVTILFDNYVERISRRTALGIFMLSSYIPLNKLSSLEEAIDQNLLATFLLSDPNPSAWNQYINPRDCTQGLCSTFCPQWCTYINFSPPPISYEQFLNDGVASNPNLSPLVIAIFGIFATAFLLAAYYTLVSKYCANDTTNEAASESGRSDIILDVNSPERGDQDDPFALESSTAGLDDTLIKKIGFFKLKKHQNGFKINGTDCSICLGEFNEDESLRLLPKCNHTFHVVCIDRWLKSHSNCPLCRAKIIVPTTQQPEHHVVVMNLDRFTSNVGSAEGNVVVDDHREEVSVSISSHHPSWFSAADIVLRISRDGEEEEGNYDLENGNREKLVDLKRSFSSGGLVLGTQGRTRRSLNICP

SEQ ID NO: 16583 - protein, 446 aa, Lactococcus lactis subsp. lactis Il1403
MKIVVIGTNHAGIATANTLIDRYPGHEIVMIDRNSNMSYLGCGTAIWVGRQIEKPDELFYAKAEDFEKKGVKILTETEVSEIDFTNKMIYAKSKTGEKITESYDKLVLATGSRPIIPNLPGKDLKGIHFLKLFQEGQAIDEEFAKNDVKRIAVIGAGYIGTEIAEAAKRRGKEVLLFDAESTSLASYYDEEFAKGMDENLAQHGIELHFGELAQEFKANEKGHVSQIVTNKSTYDVDLVINCIGFTANSALAGEHLETFKNGAIKVDKHQQSSDPDVSAVGDVATIYSNALQDFTYIALASNAVRSGIVAGHNIGGKSIESVGVQGSNGISIFGYNMTSTGLSVKAAKKIGLEVSFSDFEDKQKAWFLHENNDSVKIRIVYETKNRRIIGAQLASKSEIIAGNINMFSLAIQEKKTIDELALLDLFFLPHFNSPYNYMTVAALNAK

SEQ ID NO: 16584 - protein, 1184 aa, Anabaena variabilis ATCC 29413
MKRDTTGKFVSNWDSEPKHRYSVSLTSTAWRSLDEEAHKQGISRSELIEHFARHLGSEQNLTDEVISVNAGNAEQQPILATVFNQDINNHQQLQLVTSPETECQVTTILESITDAFVAFDENWHYTYVNQAAVKILHKTPVELIGKHVWDEVFPELVGGVAYQELHRAVAEQVAVSWEEFGESVQCCLEANAYPFAQGVAVYFRDITERKKAEAERERLLHELETERTRFEAVLRQMPAGVMIADADSGKLVLTNEQAKQILRYNFEDSLELEEYVPVTPFAAFRCDGQPYTPYEYPLPRSLLTGEVISQEEMLLRWEDNSHIFISVNSAPILNSQGQIVAAAIVFQDITERKRLESELQQREQEFKMVAENAPDIISRVDREFRHLYVSPAVEAATGIPPEVFIGKTNTELGMPEEICTFWHENLQRAFDTGQKQVVEFSFPTPTGLRWYQSHLAPEFASDGSATTLVNIARDVTDYKRIEQALLDNEERLRLALTVAQAAQRQLATIFETSPVGIALLDSQQRFVAINQALAQINGLTRQEHLGRSITELFGESDPQVVQVFHDIYTTGEPFISPSFAVNLPGRSDRQPGYYNVYYLPTTNSNHQVEDVLVYVLDVTEQVRLERGLRFLSETSKVLASSLDYQTTLERLAQLAVPELADWCTVHMVAENGSVEEIAVAHVDPAKLAWAEEIRRKYPLNLNDPRGAALTLRTGQSDLLIDIPDELLVQAARDPEHLEILRQVGFKSAMTVPLRTQTRTLGVISFICAESGHKYDQSSMQLAEELAYRASLAIDNAHLYRLAQSDRTKAEAANRIKDEFLAVLSHELRSPLNPILGWSRILRTKQLSPTKVDQALETIERNAKLQAQLIEDLLDVSRILQGKMTLNVAPVNLAATITAALETVQLAAEAKNIHIQTTLKPIAGNVVGDQNRLQQVIWNLLSNAVKFTPSGGQIEVQLAQVNLYAQIQVKDSGKGIAREFLPYVFEYFRQEDGATTRKFGGLGLGLAIVRHFTELHGGTVHVSSLGQDLGATFTVRLPLNLVEQELPADDEQLKKVTDLTGTHILVVDDDADMRELAEFILIQFGAQVTTAASAVEALNIFSHFIPDLLLCDIGMPEMDGYSLMRQIRQWLPHEGGTIPAIALTAYAGEINQQQALAAGFHQHISKPVEPEELVQTIFQLLHPVQ

SEQ ID NO: 16585 - protein, 549 aa, Candidatus Kuenenia stuttgartiensis
MLNKINPIKTKSWNSLAEHFKDIQHIHMKTLFAKDPDRFKKFSIRFNDILVDYSKNIITDETLRHLIALARETGLEDAIEKMFSGNAINETENRAVLHTALRNRENTPIYADGKNVMPQVNAVLKKMEAFSRNVISGEWKGFSGRKITDIVNIGIGGSDLGPVMVTECLRPYAKKGLSVHFVSNIDGTHIVETLKTLNPETTLFMIASKTFTTQETMTNAFSAREWFLQCAKDHAHVARHFVAISTNTEKVEAFGIHRDNMFVFWDWVGGRYSLWSAIGLSIACFIGYENFSELLHGAFEMDNHFRTAPFEKNIPVILALIGIWYNNFFGAQTEAILPYDQYMHRFPAYFQQGNMESNGKSTDRSGDKVNYQTGPVIWGEPGTNGQHAFYQLIHQGTKLIPADFLAPAISHNPLGEHHNILLSNFFAQTEALLKGKTRDEVLEELKKECKSDNEIQRLAPHKVFEGNRPTNSILFKKLTPTVLGSLIALYEHKIFVQGVIWNIFSFDQWGVELGKQLAKKILPELTDNKPIATHDSSTNGLINAYKEMR

SEQ ID NO: 16586 - protein, 365 aa, Dendrobium fimbriatum
SDSGKDAGRLSAAWQLYKAQEDLIKVAKEFGVKLTMFHGRGGTVGRGGGPTHLAILSQPPDTIHGSLRVTVQGEVIEQSFGEEHLCFRTLQRFTAATLEHGMHPPISPKPEWRALLDEMAVVATEEYRSIVLQEPRFVEYFRLATPEMEYGRMNIGSRPSKRKPSGGIESLRAIPWIFAWTQTRFHLPVWLGFGTAFKHAIEKDIKNLHMLQEMYNEWPFFRVTIDLIEMVFAKGNPGIAALHDKLLVSDDLWSFGERLRTNYEETKNLLLQVAGHRDLLEGDPHLKQRLRLRDSYITTLNVCQACTLKRIRDPNFHVTVRPHISKDIIDSSNKRAAELVKLNPTSEYAPGLEDTLILTMKGIAA

SEQ ID NO: 16587 - protein, 436 aa, Ralstonia metallidurans CH34
MGLLDDRKSGLLPGGHAAFERIDLTVPGFLQGCLSLARALAVLAYHDDGDGLILCKTARPVGQVVEWRALRLRHVALGELGSVADIHHHRIALVDQLRGGGRIDAFSARAALDRRPGQQAARDHGDGDQGQVIVIGEEIHVGIPLGWVGGIIKYAVSCPRRYLSVASRPPPALRRIVRTAGHLLPGSSMYKLVLIRHGESTWNLENRFTGWVDVDLTDTGAAQAKQAGTLLKEAGFAFDVAYTSVLKRAIRTLWHVQDEMDLMWIPVRNEWRLNERHYGALAGLNKAETAKKYGDEQVLVWRRSYDTPPPALEPTDERASFGDPRYANVPRAEIPLTECLKDTVARVMPLWNESIAPDIKSGKRVVIAAHGNSIRALVKYLDQISDDDIVGLNIPNGTPLVYELDADLRPLRHYYLGDQEAIAASLAAVASQGKAR

SEQ ID NO: 16588 - protein, 364 aa, Dendrobium fimbriatum
SDSGKDAGRLSAAWQLYKTQEELVKVAKEYGVKLTMFHGRGGTVGRGGGPTHLAILSQPPDTIHGSLRVTVQGEVIEQSFGEEHLCFRTLQRFTAATLEHGMQLPISPKPEWRALMNEMAVVATNEYRSIVFEESRFVEYFRLATPELEYGRMNIGSRPSKRKPSGGIESLRAIPWIFAWTQTRFHLPVWLGFGAAFKHVIEKDKKNLNILREMYNEWPFFRVTIDLIEMVFTKGSPGIAALYDKLLVSTDLLPFGEQLRANYEETKRLLLQVAGHKDLLEGDPYLKQRLRLRYPYITTLNVWQAYTLKRIRDPSYHLTAKPNLSNEIMNSNKPAAELVKLNPTSEYAPGLEDTLILTMKGIAA

SEQ ID NO: 16589 - protein, 320 aa, Burkholderia xenovorans LB400
MTTQQQPLISGFGVETQPEEVMAGIDLHGKVAIVTGGHSGIGLETTKALVKAGAKVVVGARGVDKAMESLAGLENVDVVELNLADPDSVDNFATSYLRTHNSCDILVNNAGIMATPLTRDSRGYELQFATNHLGHFQLTVQLWDALAVAGSARVVALSSLGHRFSAINFDDLNYLTRPYDPWRAYGQSKTANALFAVHLDRLGKGAGIRGFAVHPGRIPTTNLSRHMTDEEKKAATQAVQVGPDYVPSPLKSIAQGASTSLWAATSAQLSGKGGVYCADCDISPIVADDSPDVRGVRRWAIDPDQAVRLWDVSLDLVARR

SEQ ID NO: 16590 - protein, 364 aa, Dendrobium delicatum
  misc_feature (146)..(146): Xaa can be any naturally occurring amino acid
  misc_feature (148)..(148): Xaa can be any naturally occurring amino acid
SDSGKDAGRLSAAWQLYKTQEEPVKVAKEFGVKLTMFHGRGGTVGRGGGPTHLAILAQPPDTIHGSLRVTVQGEVIEQLFGEEHLCFRTLQRFAAATLEHGMQLPISPKPEWRALMDEMAVVPTKEYRSIVFQEPRFVEYFRLATXEXEYGRMNIGSRPSKRKPSGGIESLRAIPWIFAWTQTRLHLPVWLGFGAAFKHVIEKDKKNLNILREMYNEWPFFRVTIDLIEMVFTKGSPGIAALYDKLLVSTDLVPFGEQLRANYEETKRLLLQVAGHKDLLEGDPYLKQRLRLRYPYITTLNVCQAYTLKRIRDPSSHLTAKPSLSNEIMNSHKPAAELVQLNPTSEYAPGLEDTLILTMKGIAA

SEQ ID NO: 16591 - protein, 421 aa, Corynebacterium crenatum
MALVVQKYGGSSLESAERIRNVAERIVATKKAGNDVVVVCSAMGDTTDELLELAAAVNPVPPAREMDMLLTAGERISNALVAMAIESLGAEAQSFTGSQAGVLTTERHGNARIVDVTPGRVREALDEGKICIVAGFQGVNKETRDVTTLGRGGSDTTAVALAAALNADVCEIYSDVDGVYTADPRIVPNAQKLEKLSFEEMLELAAVGSKILVLRSVEYARAFNVPLRVRSSYSNDPGTLIAGSMEDIPVEEAVLTGVATDKSEAKVTVLGISDKPGEAAKVFRALADAEINIDMVLQNVSSVEDGTTDITFTCPRSDGRRAMEILKKPQVQGNWTNVLYDDQVGKVSLVGAGMKSHPGVTAEFMEALRDVNVNIELISTSEIRISVLIREDDLDAAARALHEQFQLGGEDEAVVYAGTGR

SEQ ID NO: 16592 - protein, 149 aa, Synechococcus sp. WH 8102
MDVRFREVDPFNCWIWLRFASPPSQGERNYVDGIFDSWYVIGRLGGFNAENLQVHEEGADLSWMTYDNDEADSLMPALMHNMGQLEYQAEWGRCWVDMGTSDGVGIDVLINALRQLDTDVVQIEELVIGGVNEDWPVEDHPDSLFPSGG

SEQ ID NO: 16593 - protein, 458 aa, Bacillus megaterium
TIKEMPQPKTFGELKNLPLLNTDKPVQALMKIADELGEIFKFEAPGRVTRYLSSQRLIKEACDESRFDKNLSQALKFVRDFAGDGLFTSWTHEKNWKKAHNILLPSFSQQAMKGYHAMMVDIAVQLVQKWERLNADEHIEVPEDMTRLTLDTIGLCGFNYRFNSFYRDQPHPFITSMVRALDEAMNKLQRANPDDPAYDENKRQFQEDIKVMNDLVDKIIADRKASGEQSDDLLTHMLNGKDPETGEPLDDENIRYQIITFLIAGHETTSGLLSFALYFLVKNPHVLQKAAEEAARVLVDPVPSYKQVKQLKYVGMVLNEALRLWPTAPAFSLYAKEDTVLGGEYPLEKGDELMVLIPQLHRDKTIWGDDVEEFRPERFENPSAIPQHAFKPFGNGQRACIGQQFALHEATLVLGMMLKHFDFEDHTNYELDIKETLTLKPEGFVVKAKSKKIPLGGI

SEQ ID NO: 16594 - protein, 187 aa, Gossypium hirsutum
PLQDFCVALNSTKHAVFVNGKLCKDPKLATADDFFFSGLDKPGNTSNAVGSRVTPVNVDQIPGLNTLGISLVRIDYAPNGGQNPPHTHPRATEILVVTKGTLYVGFVTSNPDNRLFTKVLKTGDVFVFPVGLIHFQFNIGKTNAIAFAGLSSQNPGVITIANAVFGSNPAINSEVLAKAFKLDKKMV

SEQ ID NO: 16595 - protein, 421 aa, Frankia sp. EAN1pec
MEGDMTVPTDTAGHGRGIDVDALLLVSFGGPEGPEDVLPFLRNVTRGRGVPEARLAEVAAHYDRFGGRSPINDQNRALLAALRERLAPMPVYWGNRNWQPYLADAVARMRADGVRRAACFVTSAFASYSGCRQYREDLAAALEQVGPGAPDLVKLRLFFDHPGFVEPMVDHCVRALASLPAAVRDEARLVFTAHALPRSQAAASGPDGGAYERQLRAAAGVIAQRVAARAGTRHEWQVAYCSRSGPPSVPWLEPDVNDALAALADGGARAAVIVPVGFVSDHMEVVYDLDVEAVRTASERGLAVARAGTVGTDPRFVGMVADLVAERRFPEWERPALSGEGPSHDVCPLHCCDPGARRPAAAGVPADLCAHGPARSGATASQPGRPTNAERSRDGEPRNEATILVDERAGISRSDSHPAGE

SEQ ID NO: 16596 - protein, 187 aa, Gossypioides kirkii
PLQDFCVALNSTKHAVFVNGKLCKDPKLATADDFFFSGLDKPGNTSNAVGSRVTPVNVDQIPGLNTLSISLVRIDYAPNGGQNPPHTHPRATEILVVTKGTLYVGFITSNPDNRLFTKVLKTGDVFVFPVGLIQFQFNIGKTNAIAFAGLSSQNPGVITIANAVFGSNPAINSEVLAKTFKLDKKMA

SEQ ID NO: 16597 - protein, 161 aa, Glycine max
MLAPMAASALYSSPIFLPPLWHPKPMHPLCCFNPPPSISLSRSKFSGAAVAPQKLPRRVFRVRGLLGHDSGTAPQPETPNSEAGTSIDLNLPRRSLLVQFTCNLCGERTERLVNRLAYERGAVFVQCAGCLQHHKLVDNLGLITEYDFREKINIDSETDQV

SEQ ID NO: 16598 - protein, 331 aa, Glycine max
MRIQRELRLGMDGDGEELTAQETALYDRQIRVWGADAQRRLSKSHVLVYGMKGTVAEFCKNIVLAGVGSLTLVDDRAATEEMLSSNFLIPPDENVYSGKTLAELCCNSLKDFNPMVHVSVEKGDLSSFDVEFLSKFDVVVVSCCTLSAKKLANGKCRKLSKRVAFYAVDCRDSCGEIFVDLQDYKYSKKKQDETVECDLKYPSFEDALSVPWRALHRRMSKLYYAMRVIEKFEEAEGRSTGEVSIADFSGLLKLKKEICTAQSLNESQVPDSLLKRLVTNATEFPPVCAIIGGILGQEVIKAISGKGDPLKNFFFFDAFDGKGIIEDISPK

SEQ ID NO: 16599 - protein, 561 aa, Zea mays
  misc_feature (208)..(208): Xaa can be any naturally occurring amino acid
MIRAVRSNASDNVYCTLLAHSALHGAMAGYTGFTLLDLKDPFPAAANSGAKASSASKWATKKKLVGGDAGYVLEDVPHLTDYMPQLPSPILLVCHVGFLTTYPNPLQDNPAYSVVKQYFVNPDDTVTQKIVVHKTSARGTHFRRAGPRQRVYFQSDEVNAAIVTCGGLCPGLNTVIRELVCGLYDMYGVSSVVGIEGGYKGFYSKNTXVALTPKSVNDIHKRGGTVLGTSRGGHDTAKIVDCLQDRGINQVYIIGGDGTQKGASVIYEEVRRRGLKCSVVGVPKTIDNDIAVIDKSFGFDTAVEEAQRAINAAHVEAESAENGIGVVKLMGRNSGFIAMYATLASRDVDCCLIPESPFYLEGKGGLLEFVERRLKDNGHMVIVVAEGAGQDLIARSMNFVDTQDASGNKLLLDVGLWLSQKIKDHFKKKPSFPITLKYIDPTYMIRAVRSNASDNVYCTLLAHSALHGAMAGYTGFTVAPVNGRHAYIPFYRITEKQNKVVITDRMWARVLCSTNQPCFLSHEDVENMKHDDDEHHHMHNTQLLEGGSSPVSKCNGSAAAV

SEQ ID NO: 16600 - protein, 493 aa, Ustilago maydis 521
MMNTKLKDLSLLEASDFLKAPDSLDTSDNESFDVMDPGSGRPICRLTASNLKDVDYAIQAASQAFPSYSAIPARERAMLLLNFDKLIRDNLDDLAWILVYETGKPLEEARAEVQYALTFSWWYVGETERVQGQVVKSATNPSLRYLTVWQPVGPVAILTPWNFPVALFVRKAVSALAAGCTIVAKPSPETPLSTLAVANLLHRAGFPSGSVNIVLASYRNTPAIGQALCTDLRIKKLSFTGSTRVGRLLMQQCAPTLKKLTLELGGLGAYLIFDDADIEAAATALVANKLRHAGQTCISAQRTFVHESIVDRVLKCIIELLDRVTLGHGAQPSTTLGPLQTERSQQKVREHIEDARAKGATVYTSKAAVPSSGYFVAPTLIVGCTAEMLVFQEESFGPLISLTSFATEQEAVALANKTDMGLTSYVFTKDSARLWRMFEQLKAGNVGLNVGGSTTAAEIPFGGVDQSGFGKEAGIGAGLKEYMVEKSATMSIA

SEQ ID NO: 16601 - protein, 335 aa, Dehalococcoides sp. CBDB1
MVTRIGINGFGRIGRITLRTINQYHRGELEVVAVNDLADNKSNAHLLKWDSTYGKYAGTVESDDCSIIVDGKPIRVFSERDPMQIPWETAGVDLVIESTGLFTDASKAAAHLRGSVKTVVISAPAKGEDITIVMGVNEDKYNCNTHRIISNASCTTNCVAPLIKVLHDKFGVKKGFMTTCHAYTNDQKIQDMFHKDIRRARAAAVNVIPTTTGAAKAVALVLPELKGKLDGISFRIPSASVSLVDFVGELARDVTVEEVNAAFKEASQGKLSGILEYCEEELVSSDFKGNPASSIIDASSTMVLGGNMVKVLSWYDNEWGYSTRLGDLIAYIAKK

SEQ ID NO: 16602 - protein, 147 aa, Prochlorococcus marinus str. MIT 9312
MNIIFREVDPFNCWIWIRFSESPTQDEKNYLDGVFDSWYVLGRLGGFNSENLQTHEEGSDLSWMSYDNDQKNASLPALMHNLGIMEYQNLWGRCWVDFGTSDSISIDILINSLNEISNNYVKIEELIIGGENNDWSIEEHEDLVFKD

SEQ ID NO: 16603 - protein, 255 aa, Burkholderia sp. 383
MNEPLVLTERRGPILIVTINRPQAKNACDAATARAMNDAADLLDADDSLFVGIVTGAGGTFSAGADLRAVARGEAASTPERGGFGIFRRPPSKPVIAAVEGVAVGGGMELCMACDLVVAASDARFGLPEVRHNVLAIGGGLFRTVRRIPYNIAMEFLLTGEMQAADTMQRWGFVNRITEPGAALAGAIELAERMLVNGPTALAATKQAVRASIDWREDDAWTLQMPIANRALESEDRKEGVQAFLEKRKPVWKGR

SEQ ID NO: 16604 - protein, 404 aa, Zea mays
  misc_feature (261)..(261): Xaa can be any naturally occurring amino acid
  misc_feature (271)..(271): Xaa can be any naturally occurring amino acid
  misc_feature (286)..(286): Xaa can be any naturally occurring amino acid
MPSPIAACFRCAAAPSSGAGAAGPSLTTSVYETHLGLVALSWSRTSLGLSLRAVLRLSPPPSPGFSSASGAGYLDDDADEETLAFRVRPWLLWRWRGSKRFRADDRIVDLAWDLSRARFPGSGSPEPSSGFFVAVIIDGEMVLAVGDLSDAAYRRTRARRPSGPRPVLLSRREHVSLRDAGAGRGRSHTTCVTVQGKEREISVDLVARGLGTDRVAAGREKAKDRADVGMSVSVDGERVLHVRRLRWKFRGSERVDLGGGXGVQVSWDLHXWLFRPREPGSAEASXTPTPTPVFVFRFDVSSGGEDLGKDPCPDNATGRNTDVVWGGYLARWRQRDWSETGSNAERRKGRGRRLAKESSSSSASVASSTASWASGSTVMDWGSPEEAEMQRGDGLTLLIYAWKS

SEQ ID NO: 16605 - protein, 337 aa, Dechloromonas aromatica RCB
MPTLTLNDAIGLALAEEMRRDHKVIAFGEGIATKRHELVTEFGALRVRNTPLAEGIIAGTAAGAAAGGLRPVADLLFAPFLCYAMDELVNSAGKLRYMSGGQFSFPLVALAMTGAGWGVGAQHNHNVEAWFVHSPGLKVVMPSNPADARALLKTAIRDDNPVVFLLDIGLLYQPGEVPSEAVPIPLGQATTVRAGTDVSLISYGKTVHHCAQAAGSLAAEGIAAEVIDLRSLKPLDEAAILATARKTGRVVVVHEANRLCGVGAEIAALIAEQAFASLKAPVVRLGGPDAPVPSSFPLEQATVPQADAIAAAARQLCASRRALTHPPTENSKCALPH

SEQ ID NO: 16606 - protein, 331 aa, Nocardioides sp. JS614
MTVRVGINGFGRIGRNFFRAVVASGADIEIVAVNDLTDNKTLATLLKYDSILGRLEGDVTSTETEITAAGHTFRVFEERDPSALPWGELGADIVIESTGLFTDATKAKAHIDGGAKKVIISAPAKNEDVTIVMGVNEGDYDPAAHTIISNASCTTNCLAPMAKVLNDEFGIVKGLMTTVHAYTGDQNLLDGPHRDLRRARAAATNIVPTSTGAAKAIGLVLPELKGKLDGYALRVPVPTGSATDLTFEAGRETTVEEVNAVVKAAADGKILRYNEDPIVSSDITTDPASCIFDAPLTKVIGNQVKVVGWYDNEWGYSNRLVDLVDYVAASL

SEQ ID NO: 16607 - protein, 296 aa, Geobacter metallireducens GS-15
MSILINKDTKVITQGLGATGLFHAQGAREYGTQMVGGVTPGKGGTVVDGFPVYDTVRDAVNQTGATASVIYVPPPFAADAIMEAVDAGIELAICITEGIPVLDMVKVKQYMQGKKTRLVGPNCPGVITPGECKIGIMPGYIHKPGKVGVVSRSGTLTYEAVWQLTNVGLGQSTCVGIGGDPVNGTNHVDVLRMFEEDPDTEAVIMIGEIGGNSEEEGARFVKEYMTKPVAAYIAGMTAPPGKRMGHAGAIIAGGKGTATEKVAILEECGISVAQSPADMAKALLKVYKPDGLKIAV

SEQ ID NO: 16608 - protein, 490 aa, Bordetella parapertussis
MTISPLQLLNDPSLLRTDALVDGRWIAASQRFAVHDPATGRKLADVANLDAAHAREAIAAAQAAWPAWRARTVKERSAILRKWFDLLLANQDDLARLLTAEQGKPFGEARGEIAYAASFVEWFAEEAKRINGETLPAFDNNRRLLVLREPIGVCAAITPWNFPLAMITRKVAPALAAGCPVIVKPAEHTPLTALAAAQLAVRAGVPAGVLGVLPADGANSIAIGKELCANDAVRHLSFTGSTEVGRILMAQSAATVKKLSLELGGNAPFIVFDDADLDSAVEGAMQSKYRNAGQTCVCANRIYVQDGVYDAFVEKLADAVRALKVGPGFDEGVTQGPLIEPEAVDKIERHIEDAVSKGGRVVAGGRRLGGLFFEPTVLVDATSQMLCAREETFGPLAPVFRFHADEDAIAAANATEFGLASYLYSRDVGRIFRAAEALESGMVGVNVGILATEHVPFGGVKQSGLGREGGRHGIDDYVEIKYMCVGDILK

SEQ ID NO: 16609 - protein, 260 aa, Geobacter metallireducens GS-15
MGTENLLVDIKDGVALLTINRPKVLNALHTSVIAELQETFEALNANQAVKAVVITGSGEKAFVAGADIAEMAVMDAQQALVFARTGQKLVNYIGTMPKPVIAAVNGFALGGGMELALACDFIYASENAKMGLPEVTLGIMPGFGGSQKFARLLGRSRANELIFTGKMLTAAEAKEWGIVNAVLPLAELVGKALETAARIAGNGLLGVAHVKEAIRRGLDMTEPDGMDYESVLFASLFASRDQKEGMGAFVEKRKPNFTGS

SEQ ID NO: 16610 - protein, 144 aa, Pseudomonas fluorescens Pf-5
MSDPLLIPCPHCNGLNRIPADRLGDHPKCGRCKAEVLLSKPFDLKQGDYASQIKGDLPLLVDVWADWCGPCKSFAPVFQQAAAQLSGKCRLAKLDSEANPQLAGQLGIRSIPSLILFKNGREVARQSGALPLPQLLSWLRSQGI

SEQ ID NO: 16611 - protein, 713 aa, Oryza sativa (japonica cultivar-group)
MSSFVNGKGDFTLSRRWRQRPTGPHHNTLVRGTRIRCPRKYPRRVASRHHPPRPASRGTANLHRQPRPHPPTNSPLTPQPHHQLPTDSTTPPYPGGRDHPRVSTPPPPPSQIRTPHAIPRRRRRRTPSAPDPHCHNSQVATRASSRDNRSGGSRSPLGRLRGARLLLVRFCFLFKPNAPPHRLRSPPRLTQPPVAMGNRTSRHHRAAPEQPPPQPKPKPQPQQQQQQWPRPQQPTPPPAAAPDAAMGRVLGRPMEDVRATYTFGRELGRGQFGVTYLVTHKATGKRFACKSIATRKLAHRDDIEDVRREVQIMHHLTGHRNIVELRGAYEDRHSVNLIMELCEGGELFDRIIARGHYSERAAAALCREIVAVVHSCHSMGVFHRDLKPENFLFLSKSEDSPLKATDFGLSVFFKPGEHFKDLVGSAYYVAPEVLKRNYGAEADIWSAGVILYILLSGVPPFWAESEDGIFDAVLRGHIDFSSEPWPSISNGAKDLVKKMLRQDPKERLTSAEILNHPWIREDGEAPDKPLDITVISRMKQFRAMNKLKKVALKVVAENLSDEEITGLKEMFRSLDTDNSGTITLEELRSGLPKLGTKISESEIRQLMEAADVDGNGTIDYAEFISATMHMNRLEKEDHILKAFEYFDKDHSGYITVDELEEALKKYDMGDDKTIKEIIAEVDTDHDGRINYQEFVAMMRNNNPEIAPNRRRMF

SEQ ID NO: 16612 - protein, 129 aa, Zea mays
  misc_feature (42)..(42): Xaa can be any naturally occurring amino acid
  misc_feature (79)..(79): Xaa can be any naturally occurring amino acid
MSSLQEAISVPWNSIPMNTARSYSAMRVLEDHELSEGRNPGXTALSDIDAVLARRMDMRDKMSLNESRMTTTLEERLLXSGKTEHAPVCAILGGIVGHEAIKSISCKGDPCMNLFYIDVADGKSVIDDI

SEQ ID NO: 16613 - protein, 370 aa, Drosanthemum paxianum
SDSGKDAGRLSAAWQMYKVQEELVKVSKQFGVKLTMFHGRGGTVGRGGGPTHLAILSQPPETIHGSLRVTVQGEVIEQSFGEQNLCFRTLQRYTAATLEHGMNPPKSPKPEWRALLDQMAVVATEEYRSIVFKEPRFVEYFRLATPETEYGRMNIGSRPSKRKPSGGIESLRAIPWIFAWTQTRFHLPVWLGVGAAFRHVLEKDIRNHNMLRDMYNNFPFFRVTIDLLEMVFAKGDPEIAALYDKLLVSEDLQPFGARLRANYEDTKRRLLEVAGHRDLLEGDPYLKQRLRLRDPYITTLNVCQAYTLKRIRDPDFQVTERPHLSKEIMDMNKAAAELVKLNPTSEYAPGLEDTLILTMKGIAAGMQNTG

SEQ ID NO: 16614 - protein, 399 aa, Thermus thermophilus HB8
MEGIASVKELLEELKAGRPVILVDDEDRENEGDLIMAAEHVTPEWVNFMLKECRGLLCVALTEERAKALDLPLMVERNQDPQGTRFTVSVDARGTTTGISAFERAATIRLLADPEATAQDFRRPGHVFPLVARPGGVLRRAGHTEATVDLLRLAGLTPVGSLIEILKEDGTMARLPDLLAFARRHGLKVGTIADLIRYRLEKGDLYVRREAEALLPTRFGEFRILGYRDTLTGEEHAALVMGSWAPEEPVLVRMHSECLTGDALHSLRCDCGFQRDLALQRIAEEGKGVLVYLRQEGRGIGLVNKIKAYHLQDQGLDTVEANLALGFPPDLRDYGVGAQILYDLGVRKMRLLTNNPRKVRALSGFGIEIVERIPLRAGDNPHNERYLQAKKEKLGHWMD

SEQ ID NO: 16615 - protein, 368 aa, Dicranum scoparium
SDSGKDAGRLSAAWQMFKAQEDLVKVAKQYGVRLTMFHGRGGTVGRGGGPTHLAILSQPPDTINGSLRVTIQGEVIEQSFGEQHLCFRTLQRFTAATLEHGMHPPIAPKPEWREIMDVMAVASTKEYRSIVFQNPKFVEYFRAATPELEYGRMNIGSRPSKRKPNGGIESLRAIPWIFAWTQTRFHLPVWLGLGSALREALETDPRNIAILRRMYNQWPFFRVTIDLVEMVFAKGDPRIAALYDNLLVSDELKPLGEELRRKYSETRDLLLRVAGHEDILQGNPTLKQRLRLREPYVTALNVQQALVLKKMRDQSTQFCALQNGSEVKSPKRAAELVELNPTTEFPPGLEDTLILTMKGIAAGMQNTG

SEQ ID NO: 16616 - protein, 556 aa, Synechocystis sp. PCC 6803
MFDAIDAALADIKAGKAVVVVDDENRENEGDLICAAQFATPALVNFMAVEARGLICLAMTGDRLDELDLPLMVSKNTDSNQTAFTVSIDAAPHLGVTTGISAEDRARTIQIAINPVTRPEDLSRPGHIFPLRAKTGGVLKRAGHTEAAVDLSRLAGLYPAGVICEIQNADGSMARLPELVEYARKYDLKLISIADLISYRLQHDRFVQRETICEFPSQFGEFKLYAYRNLLDQTEHIAIVKGDPSEFGQQPVMVRMHSECLTGDALGSLRCDCRMQLQAALKMLENHGLGVVVYLRQEGRGIGLVNKLKAYSLQDLGYDTVEANERLGFPADLRDYGMGAQMLNDLGVKQIRLITNNPRKIAGLKGYGLEIVERVPLLIEANDYNSHYLTTKAEKLGHWLVKNYLLAIAIKFTPNVASAQQRYEKLEKIRALLQGTPLMVHEDNRPVAIALFGKNSLIFHVGLDQNLPSGQPWQKHDHSPYPALVKDFLVQLKQWPDLQALAFLIAQGKDPMETLQVSLDRENVSFADLTADALNQWQPQTVYTYSKQGSGEMTNR

SEQ ID NO: 16617 - protein, 364 aa, Dendrobium loddigesii
SDSGKDAGRLSAAWQLYKTQEELVKVAKEYGVKLTMFHGRGGTVGRGGGPTHLAILSQPPDTILGSLRVTVQGEVIEQSFGEENLCFRTLQRFTTATLEHGMQLPISPKPEWRALMDEMAVVATNEYRSIVFQEKRFVEYFRLATPELEYGRMNIGSRPSKRKPSGGIESLRAIPWIFAWTQTRFHLPVWLGFGVAFKHVIEKDKNNLNILREMYNEWPFFRVTIDLIEMVFTKGSTGIAALYDKLLVSTDLLPFGEQLRANYEETKRLLLQVAGHKDLLEGDPSLKQRLRLRYPYITTLNVWQAYTLKRMRDPSYHPTAKPNLSNKIMNSSKPAAELVKLNPTSEYAPGLEDTLILTMKGIAA

SEQ ID NO: 16618 - protein, 292 aa, Xanthomonas axonopodis pv. citri str. 306
MSEDDSSQSLETPEKRRSWLERLSAAFSGEPHTRDELVALLRTAEQDGLIAADTLRMMEGAISVSELTVGDVMISRSQMVSLPVEARFIDLMKQVVESGHSRFPVHGENKDEVLGILLAKDLLRGVVADNGPGNVRELLRPAVLIPESKKLNVLLKEFRLSRNHMAIVVDEYGGVAGLVTIEDVLEQIVGEIDDEHDDAEEENSLIAIQADGRYVVDALTPIEDFNERFGAEFPDDEYDTVGGLVTDAIGHLPETGEELTLGRFAFRVAKADARRVHAFHVTILPPDPQDDA

SEQ ID NO: 16619 - protein, 364 aa, Dendrobium thyrsiflorum
SDSGKDAGRLSAAWQLYKTQEELVKVAKEYGVKLTMFHGRGGTVGRGGGPTHLAILSQPPDTILGSLRVTVQGEVIEQSFGEEHLCFRTLQRFTTATLEHGMQLPISPKPEWRALMDEMAVVATNEYRSIVFQESRFVEYFRLATPELEYGRMNIGSRPPKRKPSGGIESLRAIPWIFAWTQTRFHLPVWLGFGAAFKHVIEKDKKNLNLLREMYNEWPFFKVTIDLIEMGFTKGSPGIAALYDKLVGSTDLLPFGEQLRANYEETKRLLLQVAGHKDLLEGDPYLKQRLRLRYPYITTLNVWQAYTLKRIRDPSYHLNAKPNQSNEIMNSNKPAAELVKLNPTSEYAPGLEDTLILTMKGIAA

SEQ ID NO: 16620 - protein, 469 aa, Ashbya gossypii ATCC 10895
MMVCPHMEQVIQTAKVGDAVVKECITVRYLIRNCDAKSRYLRAMRCSECFQINCGSSFMCLQCGFVGCWNESHFLHHSKKVGHIFGVNATNGLLFCFRCRDYISDNEFVHMDIMPKHWNEVLRRSSIPAPHRGEGLLGLVNMGSTCFMSSVIQTFLHLPHVLQYMLERLHYATCDVQDSLSCISCAVDEIVANLYGQVKEEAASGVAGPGASTQALSQSLSKQQQGFINLLTCSWKINRNLAGYSQQDAHEFWQFLLNQLHTDYIRIHGPPSKKSACGCILHMLFQGYLESSIVCSECHGNNKTTVDPIMDLSLGIQNKSTLHECLDSFHRRESLTDFNYCCKNCMSTSNPIRQLSMAKLPPVLMLQLKRFEHLINGTSVKINDYIFFSVDLNMKDYCKPMDDQHPVPNLTFKLSAIIPHQGTVDKGHYTTICRINGDVWAKFNDSMVTLISEEDMLKEQAYLLYYVIS

SEQ ID NO: 16621 - protein, 283 aa, Hordeum vulgare subsp. vulgare
MATSAMTLAMSAATEASLFHPAFAAQHKLAPASASLPLIFSRAPLLRSTRPRVPLTPLVTSSDAAEAGLDWADAEEAEETVTEEEPVVAASGGDAGYTAEPPEEAKVYVGNLPYDVDSERLAQLFDQAGVVEVAEVIYNKESGQSRGFGFVTMSTIEEADKAIETFNRYNISGRLLNVNRAAQRGSRVERPPRQFASSFRAYVGNLPWQAEDSRLVQMFSEHGEVVNATIVYDRETGRSRGFGFVTMASKEDLDSAISALDGQEMDGRPLRVNVAAERPQRGF

SEQ ID NO: 16622 - protein, 557 aa, Shewanella sp. ANA-3
MEPGQMIRGADAVIKVLAAHGVTTVFGYPGGAIMPIYDALYGSPVEHLLSRHEQGAAFAAVGYARASGKTGVCFATSGPGATNLITSLADALLDSVPVVAITGQVSTAVIGTDAFQEIDVLGMSLSCTKHSFMVTDVNDLIPTLYQAFEIAASGRPGPVLVDIPKDIQIAQLEYRTPLLAVTNEPQASASEIDAARALLAEAKQPMLYVGGGVGMAGAVDQLREFIKATGMPSVATLKGLGSIAHGTPGYLGMLGMHGGKAANLAVQDCDLLVVAGARFDDRVTGRLATFANKAKVIHLDIDAAELGKLRQPDVAIAGDLRQIFPALAMALNITPWQAEVEHLARKHQWDYQHPGSLIYAPAMLRRLANKLPEDSVVCCDVGQHQMWVAQHMWFRRPEDHLSSAGLGTMGFGLPAAIGAQVARPDATVVTVSGDGSFMMNVQELTTIKRRKLPVKILLIDNQKLGMVKQWQQLFFEERYSETDLSDNPDFVQLASAFDIPGRTIFSSDEVEEALTEMLAAKGPYLLHVAIDDAFNVWPLVPPGASNSDMMDEMEKQT

SEQ ID NO: 16623 - protein, 336 aa, uncultured archaeon
MMKVAINGWGRIGRLVFRAVLQDHSALDFVAINSRSADASWIEHLLTYDSVHGKQEGAIRAEKDTLFVDGKEIKILSESDPENLPWRDLGVDVVVESTGQFRDRKGASKHLKAGCKKVIITAPGKEPDVTLVPGVNDAMYNPATHNIISLASCTTNCLAPVAKVLEDEFGINRGFMTTVHAYTGDQKILDGRHKDLRRARAAAMSIVPTTTGAAAALGIVLPSLAGKMDGISLRVPTTNVSVVDLVAELGSEVTREAVNSAFEEASKTSLTGILAVSHLPLVSIDYNGSSFSAIVDAEYTTVVGGRLVKVLAWYDNEWGYSCRVLDMIKRLEAEGV

SEQ ID NO: 16624 - protein, 344 aa, Hordeum vulgare subsp. vulgare
MATAVVAFRSFLHPTATAAAIPLPPSHFNLNNFQGHCIGLRLFSSHRSHPILLPASASAASGQEFSSDGEYYSEEYVEEEGEEAEPEVEAVRGYYPPRNRPALGQEPGRIYVGNLPYTFTAAELTAAFSEAGSVDDVQIIYDKITDRSRGFAFVTMATAEEAAKAVQMFNGALLGGRTVRVNFPEVPRGGERAVASAAVARTSLRVVDDGTYKVYAGNLGWGVRADALKTAFEGQPGLVGARVIFERDTGRSRGFGFVSFHTIQDAKAALQAMDGVELDGRPLRLSLAAQNPPAGSTPSTAQSQQEKTASRGSEAEPQVDNNTITSGQFGGEMEKSNLQATASY

SEQ ID NO: 16625 - protein, 377 aa, Wolinella succinogenes
MAGSSNTPKRKLPKESYKIMKKYEIAIIKGDGIGPEIVDEAKKVLDAISYSHGFELSYHDYLMGGIAVDRAGVPLPDETIEGCLRADAVLFGAIGGEKWDSLPRELRPESGLLKLRKSLEIFANLRPTVVYDELIEASTLKESVIKGVDILVVRELIGGIYFGEPKGREGDKAFNTMVYSVPEIERIAHVAFKAAMRRQKRVCSVDKANVLDVSQLWRETVTRIAKEYPEVELSHMYIDNAAMQLIRNPKQFDVILTGNLFGDILSDEASMLSGSIGLLPSASIGGKAALYEPIHGSAPDIAGQGIANPIATIASASMMLRHSLGEVEAADAIDKAIVKTLKEGYRTKDIAAFGAKEICTTDEMGSIIANYAAKKGE

SEQ ID NO: 16626 - protein, 216 aa, Streptomyces coelicolor A3(2)
MKLHAQALLFDNDGTLVSSLESVRRCWTRWAVEYGITAEQFGQVELHGRPAAEIAADLLPTARVAEAVARIEQLEVEDVPGGGVRLLPGTRDFLDALPADRWAVVTSATRRLAEARLDAVGILPKTLVAADDITRGKPDPEPYLLGARALGVDPADCVVFEDAPAGLQAGRAAGMRTVALATTHRADELNADLVVTDLSALSALATEGGVEITVRG

SEQ ID NO: 16627 - protein, 220 aa, Oryza sativa
MVMNPDAVRNVVGIIGNLISFGLFLSPLPTFVTIVKKKDVEEFVPDPYLATFLNCALWVFYGLPFIHPNSILVVTINGTGLLIEIAYLAIYFAYAPKPKRCRMLGVLTVELVFLAAVAAGVLLGAHTYDKRSLIVGTKQVIATKSVEYMPFTLSLVSFINGICWTIYAFIRFDILITIPNGMGTLLGAAQLILYFCYYDGSTAKNKGALELPKDGDSSAV

SEQ ID NO: 16628 - protein, 378 aa, Arabidopsis thaliana
MSDLPLDLVEKILSRVPATSLKRLRSTCRRWNALLKDRRFTEKHFHKAPKESRVLMLKEYRVFPISVNLKVTPPSVDFKGALGYSHSNSEQVVITEVFHCDGLLLCTTNDDRLVVWNPCLGETKWIQLKVDYRRYVSIFALGYIQNNESCRSYKILWTWYSYDYNSSPPQRGLGFEIYEFSSDSSWRVLDDVNHDSVVNHNSIIRSGVSLKGNTYMLAYDIEENSKFLLMFDFTTERLKRLCLPHFQDVGEMDLSVREEQLSVLNWSRITSKMEIWITNNFDTEATLLWKRVHLDSQCNCVRIFSSLYFDEEKKVVLYCNVKDGETSKKVVYIIGEDDGHYIEIPFVKSIKIERLQLIHTTRWYSLIFNYVPSLFQIQ

SEQ ID NO: 16629 - protein, 592 aa, Blastopirellula marina DSM 3645
MSLIVQKFGGTSVADCDKIVAAARKAIRAQKEGHQVVMVVSAMGKNTDVLVDLAAQINERPPAREMDMLLSTGEQVSVALMAMAIHSLGAKAVSLTGAQIGIRTDSTHTKARIISIETERVKELLAAGNIVIAAGFQGIDENLNITTLGRGGSDTTAVALAAVLDADACEIYTDVDGVYTTDPRLLAEARRVLQISYDEMLELASLGAGVMHSRSVEFAKKFGVPIHVRSSFTDITGTMIVDQPESLTRPVSGAAMTKNEARITIEGVPDVPGISHELFHSIATKAISVDMVVQNIGADGRANISFTVPREELDQTLEAVRNAANILQYASVAHDEQVSKISVVGLGMAEQSGVADKMFRVLADANINIQMITTSEIKISVLVSREDAQRALAAVHSGFQLDVTPSDAPESVAAVPRECERDAAEVVSRLRTMEDLTIDSIVLDDSQSVIALRRIPDHPGIAARVFEAIAAEGILVDMIVQNVGRGDAANLSLTVPKEDCEQALVVAKKIGAELGAEEILCKADAAKLSVSGIGLRSHTGVGIRMFRALSDSGINVELINTSEVMVNVIVEGKQGQAGLAALNKAFADVLVS

SEQ ID NO: 16630 - protein, 372 aa, Arabidopsis thaliana
MMMSDLSLDLVEEILSRVPATSLKRLRSTCKLWNALFKNPGFTKKQFLKAPKESLVLMLKEYSVCPMIANLSVSAPSIEFKGALNLKNYPPYSEEVDIHEACHCDGLLLCTTMDYRIVVWNPCLGETRWIRWPKNIYSRFALGYEKNKYGRIYKILRCWDRHNSPTGRVDEFEIYEFSSDSWRVLDLVALDCHIASHIGVSFKGNTYWLASDKKDKYGLLLCFDFTTERFTRLCLPPSQDVSKMALSVVGGKQLSLLSQSDSTSKIMEMWVTNIIEDVLMWSKSFTVDIPIRGDYCPYLTSYLVDEEKKVAVCYNENFEKSNKKVYIIGEDNGYYTEIPLVESSYQVWGYPIIFNYVPSLVQIEEGGCIIKE

SEQ ID NO: 16631 - protein, 505 aa, Oryza sativa (japonica cultivar-group)
MTSLPGRGVSPSSSDPLCEGNAAPSSSSSSGQDLKQLKNSILSCVFSSPFSIFEAHQDSSANRSLKPHSGSYAWSRFLRRIACTGSMWRFLGASKALTSSDVWFLGKCYKLSSEELSNSSDCESGNAAFLEDFSSRIWITYRKGFDAISDSKYTSDVNWGCMVRSSQMLVAQALIFHHLGRSWRKPSQKPYSPEYIGILHMFGDSEACAFSIHNLLQAGKSYGLAAGSWVGPYAMCRAWQTLVCTNREHHEAVDGNGNFPMALYVVSGDEDGERGGAPVVCIDVAAQLCCDFNKNQSTWSPILLLVPLVLGLDKLNPRYIPLLKETLTFPQSLGILGGKPGTSTYIAGVQDDRALYLDPHEVQLAVDIAADNLEAGTSSYHCSTVRDLALDLIDPSLAIGFYCRDKGELLLPDKMLGHHLSSLQSWFSYLLCLSAYVDDFDDFCSRASELVDKANGAPLFTVVQSVQPSKQMYNEESSSGDGMDSINVEGLDGSGETGEEEWQIL

SEQ ID NO: 16632 - protein, 297 aa, Salinibacter ruber DSM 13855
MSGTVCVVTGANSGIGKATAAELARLGARVVMVCRDEGRGREAQAELRAEARTAHPSRADTIDLRIADLSVQEEVYHLGETLRADYDRLDVLVNNAGVFLESREETVDGVEATFAVNHLAPFLLTHLVLPRLRETAGRAGEARIVTLSSEAHRGVSMDFDDLNAETGYNPLQAYAQSKLANILFTHELSRRLQDEGVVANVVHPGIVNTNIWRGSGWISRIARLFSWLYKRPEEGARNVVYLAASPDVEGVTGQYFKETEVVNPSPEAYDEKAEARLWRISREMTGLAEVDEDGAPG

SEQ ID NO: 16633 - protein, 340 aa, Prochlorococcus marinus str. MIT 9312
MTLRVAINGFGRIGRNFMRCWLSRGAYTNIEVVGINVTSDPKTNAHLLKYDSVLGQLDGVDIQYTDDTFVINNKTIKCFSDRNPMNLPWKDWGVDLVIESTGVFNTDVGASKHLEVGAKKVILTAPGKGDGVGTYVVGVNADQYNHKDYDILSNASCTTNCLAPVVKVLDQNFGINKGLMTTIHSYTGDQRILDNSHRDLRRARAAATNIVPTSTGAAKAVALVYPEMKGKLTGIAMRVPTPNVSAVDFVFESSKSVTSEEVNNALKEASLGSMQGIIKYGDEPLVSSDYAGTNESSIVDSDLTMCIGDNLVKVLAWYDNEWGYSQRVVDLAEIVAKKWE

SEQ ID NO: 16634 - protein, 444 aa, Brassica napus
MRGVIPNYHHSYTFIFFVILVLFPHVFSTNTLSPNENLTISSNKTLVSPGDVFELGFFKTTTRNSPDGTDRWYLGIWYKTTSGHRTYVWVANRDNALHNSMGTLKISHASLVLLDHSNTPVWSTNFTGVAHLPVTAELLANGNFVLRDSKTNDLDRFIWQSFDYPVDTLLPEMKLGRNLIGSENEKILTSWKSPTDPSSGDYSFILETEGFLHEFYLLKNEFKVYRTGPWNGVRFNGIPKMQNWSYIDNSFIDNNEEVAYSFQVNNNHNIHTRFRMSSTGYLQVITWTKTVPQRNMFWSFPEDTCDLYKVCGPYAYCDMHTSPTCNCIKGFVPKNAGRWDLRDMSGGCVRSSKLSCGEGDRFLRMSQMKLPETSEAVVDKRIGLKECREKCVRDCNCTGYANMDIMNGGSGCVMWTGELDDMRKYNAGGQDLYVKVAAASLVPS

SEQ ID NO: 16635 - protein, 474 aa, Oryza sativa (japonica cultivar-group)
MTSLPGRGVSPSSSDPLCEGNAAPSSSSSSGQDLKQLKNSILSCVFSSPFSIFEAHQDSSANRSLKPHSGSYAWSRFLRRIACTGSMWRFLGASKALTSSDVWFLGKCYKLSSEELSNSSDCESGNAAFLEDFSSRIWITYRKGFDAISDSKYTSDVNWGCMVRSSQMLVAQALIFHHLGRSWRKPSQKPYSPEYIGILHMFGDSEACAFSIHNLLQAGKSYGLAAGSWVGPYAMCRAWQTLVCTNREHHEAVDGNGNFPMALYVVSGDEDGERGGAPVVCIDVAAQLCCDFNKNQSTWSPILLLVPLVLGLDKLNPRYIPLLKETLTFPQSLGILGGKPGTSTYIAGVQDDRALYLDPHEVQLAVDIAADNLEAGTSSYHCSTVRDLALDLIDPSLAIGFYCRDKDDFDDFCSRASELVDKANGAPLFTVVQSVQPSKQMYNEESSSGDGMDSINVEGLDGSGETGEEEWQIL

SEQ ID NO: 16636 - protein, 542 aa, Blastopirellula marina DSM 3645
MRKIEIYDTTLRDGAQGEGVSFSLQDKLSITERLDEIGVDFVEGGYPLSNEKDAEYFRRVQDLNLKHTKVCAFGMTRRKGINAADDPGMQALVSSGAPVVTIVGKTHDFHVTDVLRVTLEENLAMIADSVAYIVGAGREVIYDAEHFFDGWKANPEYAAETIRAAAKAGARMVVMCDTNGGSLPEEIAEYAAKAIAALTEFNVPVGIHTHNDGDLAVANSLAAVDAGAVQVQGTINGFGERCGNADLISVIANLGLKRKGYEVIGGAGYQHLTELSRFVYDTANVNRRNNQAFVGQSAFAHKGGMHVHAINRAASSYEHIDPQSVGNERRVLVSELSGRSNIVALTTKHNLQDDRELMDKILAEVVAKENQGFQFEAAEASFDLLVKRVAGVFEPHFEILKYHVEVEDLVEHKMVDLVTEATVKVSVDGEIRYEVGEGDGPVQALDVALRKSLNGCFPTLEEMHLVDYKVRVVNQEAGTAARIRVTIESADENDVWGTIGVSENIIQASWNALVDAIEYKLYKDEQRGKLPARASADSTAAK

SEQ ID NO: 16637 - protein, 326 aa, Rickettsia typhi str. Wilmington
MQITVREALRDAMQEEMLRDDKVFVIGEEVAEYQGAYKVTQGLLEQFGSKRVIDTPITEYGFAGLAVGAAFAGLRPIVEFMTFNFAMQAFDHIVNSAAKTHYMSGGQVKCPIVFRGPNGAASRVAAQHSQNYTACYSHIPGLKVVAPYSAEDHKGLMLTAIRDDNPVIFLENEILYGHSFDVPDIIEPIPFSKAKILKEGSNVTIVTFSIQVKLALDVVNILQNDNIDCELIDLRTIKPLDTNMIIESVKKTNRLVIVEEGWFFAGVGASIASIVMKEAFDYLDAPIEIVSGKDVPLPYAVNLEKLAMPSANDLIEAVKKVCYYTI

SEQ ID NO: 16638 - protein, 483 aa, Rickettsia typhi str. Wilmington
MAEFTPITIAYGDGIGPEIMDAVLYILRQAEARISLETIEVGEKLYKKHYTSGISEESWNVIQRTGIILKAPITTPQSGGYKSLNVTIRKTLQLFANIRPAVSFHPFTRTLHPNLNLTIIRENEEDLYSGIEYRQTHNMYESLKLISHTGCKKIIRYAFEYAVKNNRKKVTCLSKDNIMKFSDGIFHRVFNEIAKEYPQIDNEHYIIDIGTAKLATTPEIFDIIVTSNLYGDIISDVAAEISGSVGLAGSANIGQHYAMFEAVHGSAPDIAGKGIANPSGLLNAAIMMLVHIGQGDIASLIENAWKKTIEDGVHTFDIYSEHSSSKKVCTKEFAEEVIKRLGQLPMTLPKASYPLIVKKQESKIEYKIDTTEVKKLVGTDIFINIHVFSAHDIADKINKLDIGNFELKTISSKGLKLWPHDLRFEIISDHWCCRFMNKDGTEIKHLDIIILLQALSKANIDFIKVENLFEFDGVACYSLAQGE

SEQ ID NO: 16639 - protein, 421 aa, Bordetella pertussis Tohama I
MSLIVQKYGGTSMGSVERIKNVARRVAKWHAAGHKVVVVPSAMAGETNRLLSLAREISPQPDGRELDMIAATGEQASSGMLAIALQAEGVPARSYAGWQVPVRTDSSYTKARIKSIDDKRVLADLDAGRVVIVTGFQGVDDDGHITTLGRGGSDTSAVAVAAAIKADECLIFTDVDGVYTTDPRVVPEARRMAVVSFEEMLEMASLGSKVLQIRSVEFAGKYHVPTRVLSSLTDPLIPLEEEMRSGTLITFEEDEKMEAAVVSGIAFSRDEAKITLLAVPDKPGIAYSILGPVAAANIDVDMIVQNQSVAGTTDFSFTVNRNEYQRTLDLLKREVIPAVSARELVTDEKVAKVSIVGIGMRSHVGVASLMFQTLSQEGINIQMISTSEIKTSVIIDDKYMELAVRSLHKAFGLDQVPGDQV

SEQ ID NO: 16640 - protein, 1028 aa, Dechloromonas aromatica RCB
MVNCWLSIVAAVFWLLSGLSVAHGMEPAGTATEAKKPAKFAVLAYRPKAETEARWQPLIDYLNSIQPSQPITLVALNYPELEAAVRNKQIDFVLTQPAHYILLAKQEHLLSPLATLVEKEGGKALSSFGGVIVTRSDKTDIQQLADLRGKRIAASSMASLGGYQMQAFELLQAGIHLPNDARIIETGQPQDKAIQELLAGRADAAFVRTGLLEAMQMENKLDARQLRVINPQPPGDFPLVRSTRLYPEWPVAAMPWTENNLARQVAAAILSLPADGETARAMNIHGFTIPEDYRPVDELMRQLRLSPFDAPPKFTINDVFVQFGAVIAVIAILGISVLIAIVLALFRTIRRLKGERSRTKATMAQLSAAEARFRAIFDNVETLAIQGYLADGTVAYWNNASQTTYGYTAQEALGKSLLDLIIPPAMREDVRGAVQWMFSHKTGIPPGRLKLQRKDGSTVEVYSSHTVIDTADKGPMMFCLDINLTELVHTEQALIESESRQRMILQTLGEGVYGTDLDGVCTFINPAALDYLGLQEDEALGKNTHTLFHHHRADGTPLPLAECPLILTARDGQSRRLEDVFWRKNGECFPVRLTITAKLRDGVITGVVVSFADISENRRVAKELEQHHTHLEAQVRQRTEQLEIARQAAEAANRSKSAFLANMSHEIRTPLNAVLGMVHLLRRDAPTLEQIDRLDKIDSASQHLLAVINDILDISKIEAGKLVLDETTVDITSILKRVVSVLGDRARQKGLELRVLADDFPHTFIGDPTRITQCLINYAGNAVKFTEHGSITLKARRMADDSNGVLIRFEVEDTGIGISDDAIDRLFGIFEQADSSTSRKFGGTGLGLAITRRLAELMGGKVGVSSRVGAGSRFWFTAQLKPGDDAVDAMTSTFAGLTAKGVQNSLRGRHLLVVEDEAINREIALELLGEFGITADTAENGRHAVELIKIQHYDLVLMDMQMPEMDGLEATRRIRALPEQNAVPIIAMTANAFAEDRERCIKAGMNDFLSKPVEPDDLKMLLLRYLVH

SEQ ID NO: 16641 - protein, 100 aa, Glycine max
  misc_feature (25)..(25): Xaa can be any naturally occurring amino acid
  misc_feature (61)..(61): Xaa can be any naturally occurring amino acid
LLRVTLLLQDTYRKKLSSIKLYTIXNGPAISLQYHELLTFIGNFHETLAARTPRRTVIAAXTYDLIDPNTVHRVRITTSNLYSTALLHERNKHFGTSLST

SEQ ID NO: 16642 - protein, 323 aa, Symbiobacterium thermophilum IAM 14863
MPKIRKIGVLTSGGDAPGMNAAVRAAVRRGISLGAEVVGVRRGYAGLIAGEFVDLGVSSVGDIIHRGGTFLQTARSDHFLTPEGQAQALAKAREAGIEGLVVIGGDGSFRGALRLTELGLPAVGVPATIDNDIYGTDLTIGFDTAVNTCLDAIRKIRDTATSHERTFVLEVMGRHSGWIALAAGLAGGAESILLPERPMPMEEVVTRLKRGVERGKRHTLIIVAEGVGSGFEVGRQIREMTGYDTRVMVLGHIQRGGSPTALDAMLASRMGAKAAEVLLEEGRGGLFIGVENEQMVTRPLEQVLGRRKEIPDELVDLAEILAI

SEQ ID NO: 16643 - protein, 179 aa, Fusobacterium nucleatum subsp. vincentii ATCC 49256
MDNDKKLGRFISLILRHKPETIDLKLDKNGWANTKELIEKISKSGREIDFEILERIVNENNKKRYSFNEDKTKIRAVQGHSIDVNLELKEIVPPAILYHGTAFKNLESIKKEGIIKMSRQYVHLSADVETAKNVATRHSGKYIILEIDTEAMLKENYKFYLSENKVWLTDFVPSRFIKF

SEQ ID NO: 16644 - protein, 373 aa, Physcomitrella patens
MRKTLKKCCCFASLMELCVRASVEGRRAHHLVTLSSLFNKGTQPTIKANKPSVSYGQALQAKKEEDFVIVKTNCQRIPGDGSSTYDAFAVLDGHNGSAAGAFTKENLLNNVVNAVPSGLSRDEWLAALPRAMVAGFVKTDKDWRSKGIFSGTTVTLVIVDGYIVTCACVGDSRCVLDAQGIVTALTIDHRFDTNEEECERVVASGGQVARLHPYGCDIGPLRSWPGGICLSRTIGDVDAGEHIVPVPHVKQIKLSPGGGRLIIASDGVWDALTSEKAAKVCRGEKHPEVAAKNIVKEVIKVQGLRDDTTCLVVDIVPPGRASRSFAPAVRKQMMVMRFLRRTRSKKGSGSGAPMEELFEESSATLSERLRPVT

SEQ ID NO: 16645 - protein, 457 aa, Gibberella zeae PH-1
MALSYQQTKLIRGTIPALTDHGERITTIFYRNMLRDHPELNDYFNTVNQANGRQPRALTAVILSYANNINHITELIPKMERMCHKHCSLGIKPEHYAIVEKYLIAAFAEVLGPTMTTQIREAWTKAYWMLAKMLIGREAQLYRDFGKWQGYRKFRIEKKVEESDDIYSFYLVPVDGKRLPSFQPGQYVSVQIPIVDKGYVQSRQYSLSDAPRPDYYRVTVKRDEGIHMTRSGRYLGGDALNPGVVSNLLIDMKDEGDVVELAHPAGEFYLDMSNTSNVPIVLISAGVGVTPMMSILNTVSERQPHRPVSWIHGSRRSVPFYDQVRRIARNRSNFRTNIFKTHLAESDIFGVTYDHDFRMDLAKVSKDDLYLCHSSTEYYICGPEQFMLEMAEYLKAQKVDASRMHFELFSTGDMEFKVDNLSISSASKSPSIASAEQRCPSTGAVSADGATCPFSAV

SEQ ID NO: 16646 - protein, 338 aa, Streptomyces coelicolor A3(2)
MGESVLLTSTPPEHKESVIVSSAPQSRPWDVHRLPSAEGRNFLVTGGNAGIGYFTAEQLAATGALVVIGSRNPAKADAALASIRSRVPGARVRHLHLDLADLSTLKSAVDGLALDLGRLDAVVHNAGGALDDPPRRETEDGHELMFGTNHLGHYALTRWLAPLLSAAPAGRVVTVGSFAARSERLDLDDLQSTRDYRPKRTYGRSKLAQMCFGFELDRRLRAAGSTVLSAVAHPGGALDSLTPPRPPVGAPTPGERLRGLPAALMVQGKDAGAWPVVRAVLDSDVQGGQLWGPRVFGLRGQPRREPVPAHMADPAVAARLWAASAELTGTTDPHLGFR

SEQ ID NO: 16647 - protein, 1118 aa, Shewanella sp. MR-4
MGLKYMAFDWFSQFFISSQDSLLLNVYYNPLLVTISILIAIFSAFMAFQVTTQAVLSQSKSRQQIMLLTGSVVLGGGVWSMHFIGMLAFDLCSPVTYDFGLTALSLLPSIGASWVALNLLSKPSFKFSQVLISGILVGAGIGTMHYVGMAAMDMAPLLRYDPWIFALSIVVAVLLAIIALWVRTGLNQLIASNMSAITSNFIASIVMGLAISGMHYTGMAAARFVKPEGLELSEQSSEISFYLALGVSVTTVIIICLVLIVNVIFKYKDLSLLAKSNEDRMRAMMNTAVDGIITIDGQGIIVNVNKAVTTILGWSPAELLGENVKKIVPESIRPHHDGYLARYINTREAQIIGTGREVEAQHKAGHSVPVRLSIGHVMQGKAHYFVGFLSDLSLRNEMEQELKNNEAKFRSLITNIPGIAYRCKSTEGWPMVFISEAVLNITGYPAEDFELPHPKRFFSDLYYPDDIESIYAQAQPPTFSMEYRIIRADGEVRWLFEHGNYILDETSNEVWIDGFLMDITERKVMEQDLVTAKNNAEQAAAARAAFLANMSHEIRTPMNAIIGFSDILLESVLDTEQHKQLSTINRSAKSLMHLLNDVLDSAKLDKGKLELENRVFCLTDEIDTVISTLWLQAKKQRLSLEVDIAPSMAANFIGSPERIRQVLINLIGNAVKFTCEGKVTVSVFPQNDNLVTFEIIDTGIGMTPEQLNRVFEAFAQADASMSRKYGGTGLGTTISKQLVELMGGQLEAESTLGQGSTFRFTIPLQSSSEPLETERADHGSLPPLTLLVVDDIQQNIDLLSVWLTRQGHKVITARDGEQALLRMQKADIDITLMDLQMPVMDGLTAAKMRREQEAESQLPHMPIIALTASVLEQDKSAAEQAGMDGFANKPIDFALLTREIARVLQLNPPQAEAESLQPLGSQLVDEAKGVKLWGSKPQFIKELMKFIAQWPEKSQALQQAISEQDTATIKLLSHSLKGVSGNLGLLQWMSYFAQLEKLTQAESLSFEAMEAIIAKISDSLVEIGDYIESTTVSSASGSELAQSGTDDPAQLLAHIDALLASVVHHSFDESDLEALTARIDEHLRLSVTIITEALDNFDFDIAHNELLELRRIITANQE

SEQ ID NO: 16648 - protein, 109 aa, Carboxydothermus hydrogenoformans Z-2901
MAGNIIELNKDNFEEEVLKSELPVLVDFWGPRCVPCMGLMPVVEELAEIYAGKMKFTKLNTAENRRLAIQLKVMSLPTFQFYKNGELVDQLQGNFGREEIEEKIRAIIG

SEQ ID NO: 16649 - protein, 249 aa, Yarrowia lipolytica CLIB122
MVQPIIAPSILSSDFAKLGAQSRMMVDYGADWLHVDIMDGHFVPNISFGPTVVKCLRAELLKGEAFFDCHMMVTDPLRWVEPMADAGADQYTFHYEACYDHEEVIKAIKAKGMKAGIAIKPATSVEVVYPLVDQLDLVLVMTVEPGFGGQKFQQDMMPKVAALRERYPNLNIEVDGGLGPQTVDDAGAAGANVIVAGTSVYHSDSPPRTIKEMRDKLITYQKDIEMAAEHPEIVTIQQEILPVPAAASA

SEQ ID NO: 16650 - protein, 118 aa, Oryza sativa
MAALNFKAVAAVMVMAMVVAAPGASAAITCGQVGSAIAPCISYVTGRGGLTQGCCNGVKGLNNAARTTADRQAACRCLKTLAGTIKSLNLGAAAGIPGKCGVNVGFPISLSTDCSKVS

SEQ ID NO: 16651 - protein, 435 aa, Fusobacterium nucleatum subsp. vincentii ATCC 49256
MSAASKAKRIDKNLGITVYEMTDAISWGACGLPYYVGDFFSDSSIMVARTYEEFQKEGINIKIKHKVENIDFKNKKVFVRNLNENKVFEDNYDELVIATGASSVSPKDIKNLDAEGVYHLKTFNEGLEVKKEMLKKENENIIIIGGGYIGIEIAEAASKLGKNVRIFQHTDRILNRTFDKEITDVLEEHIREHKKVSLHLNESPVEVRTFENKVIGLKTDKKEYAANLIVVATGVKPNTEFLKNTGIELFKNGAIIIDRFGKTNISNVYAAGDCATVYHSVLEKNVYIALATTANKLGRLIGENLTGANKKFMGTLGSAGIKVLEFEAGRTGITEQEAKDNNINYKSVFVKGKDHTAYYPDREDVYIKLIYNADTKILLGAQVAGKRGAALRADSLAVAIQNRMTVQELANMDFLYAPPFSTTWDIINVAANVAK

SEQ ID NO: 16652 - protein, 364 aa, Dendrobium thyrsiflorum
SDSGKDAGRLSAAWQLYKTQEELVKVGKEYGVKLTMFHGRGGTVGRGGGPTHLAILSQPPDTILGSLRVTVQGEVIEQSFGEEHLCFRTLQRFTTATLEHGMQLPISPKPEWRALMDEMAVVATNEYRSIVFQESRFVEYFRLATPELEYGRMNIGSRPPKGKPSGGIESLRAIPWIFAWTQTRFHLPVWLGFGAAFKHVIEKDKKNLNLLREMYNEWPFFRVTIDLIEMVFTKGSPGIAALYDKLLVSTDLLPFGEQLRANYEETKRLLLQVAGHKDLLEGDPYLKQRLRLRYPYITTLNVWQAYTLKRIRDPSYHLNAKPNQSNEIMNSNKPAAELVKLNPTSEYAPGLEDTLILTMKGIAA

SEQ ID NO: 16653 - protein, 344 aa, Thermus thermophilus HB8
MLPKDLLEPLGLDALLVTRPENVRYLSGFPHPEDAQVLVTGEGAFLLTDPRYPEAERESRIPAKVLKREEREALLKTLKGRVGFEAEHLPYAALERLRELVPAEWVPTKGVVEKLRLRKTPEEVERIRKAQALAEEALAHVLPLLRPGVEEREIALEVEFFLKRRGAEGAAFPPIVASGERGALPHARASEKRLKAGELVTLDLGARLEGYHSDMTRTFALGRPKEELRRAYKAVEEALEAALAALAPGKTGKEVDAVARKALEAHGLDRYFVHSLGHGVGLAVHEGPSLSPYGEEVLEPGMVVTVEPGVYLPGLGGVRLEELVLLTESGVELLSRFPRDFQEL

SEQ ID NO: 16654 - protein, 259 aa, Dendrobium thyrsiflorum
  misc_feature (226)..(226): Xaa can be any naturally occurring amino acid
SDSGKDAGRLSAAWQLYKAQEDLIKVAKEFGVKLTMFHGRGGTVGRGGGPTHLAILSQPPDTIHGSLRVTVQGEVIEQSFGEEHLCFRTLQRFTAATLEHGMHPPISPKPEWRALLDEMAVVATEEYRSIVFQEPRFVEYFRLATPEMEYGRMNIGSRPSKRKPSGGIESLRAIPWIFAWTQTRFHLPVWLGFGTAFKHAIEKDIKNLHMLQEMYNEWPFFRVTIXLIEMVFAKGNPGIAALYDKLLVSDDLWSFGERL

SEQ ID NO: 16655 - protein, 364 aa, Dendrobium moschatum
SDSGKDAGRLSAAWQLYKAQEELVKVAKEFGVKLTMFHGRGGTVGRGGGPTHLAILSQPPDTIHGSLRVTVQGEVIEQSFGEEHLCFRTLQRFTAATLEHGMQLPISPKPEWRALMDEMAVVATNEYRSIVFQESRFVEYFRLATPELEYGRMNIGSRPSKRRPSGGIESLRAIPWILAWTQTRLHLPVWLGFGAAFKHVIEKDKKNLNILREMYNEWPFFRVTIDLIEMVFTKGSPGIAALYDKLLVSSDLLPFGEQLRANYEETKRLLLQVAGHKDLLEGDPYLKQRLRLRYPYITTLNVWQAYTLKRIRDPSYHLTAKPNLSNEIMNYNKPAAELVKLNPTSEYAPGLEDTLILTMKGIAA

SEQ ID NO: 16656 - protein, 375 aa, Funaria hygrometrica
SDSGKDAGRLSAAWQMFKAQEDLVKVAKQYGVRLTMFHGRGGTVGRGGGPTHLAILSQPPDTINGSLRVTIQGEVIEQSFGEEHLCFRTLQRFTAATLEHGMHPPIAPKPEWRELMDAMAVASTKEYRSIVFQNPSFVEYFRAATPELEYGRMNIGSRPSKRKPNGGIESLRAIPWIFAWTQTRFHLPVWLGLGSALKQALQTDPRNIATLRRMYNQWPFFRVTIDLVEMVFAKGDPRIAALYDNLLVSDQLKPLGEELRQKYNETRDLLLKITFHDEILQGNPSLKQRLRLREPYITALNVQQALVLKKMRDQSLQFCALQNSSSSKDQSELPTTPKRAAELVELNPTTEFPPGLEDTLILTMKGIAAGMQNTG

SEQ ID NO: 16657 - protein, 156 aa, Haemophilus influenzae
NRSNTPVLVDGKDVMPEVNAVLAKMKDFCQRIISGEWKGYTGKAITDVVNIGIGGSDLGPYMVTEALRPYKNHLNMHFVSNVDGTHIAETLKKVNPETTLFLVASKTFTTQETMTNAQSARDWLLKAAKDENEVAKHFAALSTNAKDVEKFGIDTN

SEQ ID NO: 16658 - protein, 374 aa, Zea mays
MAPTTATKDDSGYGDERRRELQAFDDTKLGVKGLVDSGVKSIPSIFHHPPEALSDIISPAPLPPSSSPSAAAIPVVDLSVTRREDLVEQVRHAAGTVGFFWLVNHGVAEELMGGMLRGVRQFNEGPVEAKQALYSRDLARNLRFASNFDLFKAAAADWRDTLFCEVAPNPPPREELPEPLRNVMLEYGAAVTKLARFVFELLSESLGMPSDHLYEMECTQNLNVVCQYYPPCPEPHRTVGVKRHTDPGFFTILLQDGMGGLQVRLGDGQNGGCWVDIAPRPGALMVNIGDLLQLVTNDRFRSVEHRVPANKSSDTARVSVASFFNTDVRRSERLYGPIPDPSKPPLYRSVRARDFIAKFNTIGLDGRALDHFRL

SEQ ID NO: 16659 - protein, 371 aa, Hypnum cupressiforme
SDSGKDAGRLSAAWQMFKAQEDLVKVAKQYGVRLTMFHGRGGTVGRGGGPTHLAILSQPPDTINGSLRVTIQGEVIEQSFGEEHLCFRTLQRFTAATLEHGMHPPIAPKPEWREIMDKMAVISTKEYRAVVFQTPKFVEYFRTATPELEYGRMNIGSRPSKRKPSGGIESLRAIPWIFAWTQTRFHLPVWLGLGSALKEVLQTDPRNIAILRRMYNQWPFFRVTIDLVEMVFAKGDPRIAALYDNLLVSDEIKPFGDELRRKYNETREYLLRVAGHEDILQGNPTLKQRLRLREPYLTALNVQQALVLKKMRDSSSQFCALQNGHSGEVPKSPRRAEELVELNPTTEFPPGLEDTLILTMKGIAAGMQNTG

SEQ ID NO: 16660 - protein, 369 aa, Pseudomonas syringae pv. phaseolicola 1448A
MAFDRIEDIIEDYRQGKMVLLVDDEDRENEGDLLLAADCCSAQAISFMAREARGLICLTLTDEHCQRLGLEQMVPSNGSVFATAFTVSIEATMGVTTGISAADRARTVQAAVNPHAVREDLVQPGHIFPLRARDGGVLTRAGHTEAGCDLARMAGFSPASVIVEVMNDDGTMARRPDLELFAEKHGIRIGTIADLIHYRLSTEHTIVRIGERDLPTVHGTFHLFSYEDRIEGGVHMAMVMGDIRRDDPTLVRVHVVDPLRDLVGAEYTGPSNWTLWAALQRVAQEGRGVVVVLANHESSQALLERIPQLTQPPRQYTRSQSRIYSEVGTGAQILQDLGVGKLRHLGPPLKYAGLTGYDLEVIENIPFPG

SEQ ID NO: 16661 - protein, 1425 aa, Eremothecium gossypii
MTAGHRDERPDREGGSERDEHLNRVVQSVSDATKRLSQISNSSTAHTKTGKRKNRDTVGPWKLGKTLGKGSSGRVRLAKNMQSGKLAAIKIVPKRNVRHNQKQVTALPYGIEREIIIMKLITHPNIMALYEVWENKSELYLVLEYVEGGELFDYLIARGKLPEQEAIHYFKQIVQGVSYCHNFNICHRDLKPENLLLDKKNKTVKIADFGMAALETTNRLLETSCGSPHYASPEIVMGQKYHGSPSDVWSCGIILFALLTGHLPFNDDNVRKLLLKVQHGRYQMPSNVSKEAKDLISKILVVDPEKRITVDKILEHPLLVKYDNPGKGGLACPLEKPEERPKVLDIHSIDDIDETILSNLQILWHGAPKEYLVDKLLQSGFTEEKLFYALLLRYQQRQSVEPTSVPSNMASTNGSGAFARASNNDQSVINAPKVTQKSQFSINSLLVSPKKTREGYVASSSRVFKHSVSRRSLHVSPSPMKSSTSCRSLKSSSSKRLQSPNPKAITQPVKVTSPQPRRRTLHNSASKRSLYSLTSISKRSLNLNEFLQEANEVKTPKLPSMPLQDQPRSEAPKTPTKTTYGADSHGGEKPTFISVLHDCPTVDSEGMVFKSSSGTPMIAANAPIIQPAFIFGVGAFPGTKQPSSNSLSKPSLNSQSSPKQAQEATANSMRETIRDRQTLVVEKRVPSKTESVPPAFPRVRPIMERKHGSDLTLVRDTRSVAKEKRSSLSLDPRRTAPEPPRGIETLLRRYSLKNSIKSRSSLKKKRDSGAWSITDKTIFQDLGQVPEDEEQEKDSEEKGNDTFISTTETSDTPSSKFKVTTSTPIKKDDATAISAENAAVGTEQSGSEDEATNFDSNAHSYPISTDLKTEDDLTPIKPQGQTDLLRMPSSFMNSSNTFANLNNFISNIDKEYSPENSDSGRIEKDEPAGKAQPEQITVKKRQRTLAPGGYLSPSIPRMESENSLNQELGSRISDLSDLSFANDMPTYTNTAHAVSISPGTRNVCSFSPLEPRSPQDVSNNGKMRSNLHIPLRQLSEDMCDKTITTQEGESVNIFEDAPEEEGSLTTSTSGSVPNIHQKAISIDTMNTSCALVPVSHVRTSIHMNGDSSVLDWSTSDGILSKARPLPTSNHVRKKSGNRLSNNLTLSKSMMSMFKNLDQINVTDIQDPMPVSDLLSKGVDPIEPIEPLKNDQVTLKAESIGAESDSINMDLADRKHVTIFHDNVSDKNFKSTRMENSDKGSLGSGAPQATHLFHTGNKDMKSHETLLSPITETPAAALSATSLTRKESISSDGKSVKDETKKSGKGNWFMRLIMSFTKPKKTVIQEHMTVLPFDDVNIITLQQFSYQGVEYEIRQMERRKDKQKVEYDCRLLDGDFKFKINIYGENSAATKVSVKQKGRSDELAFTKLNTDIEALIKAKENAANVK

SEQ ID NO: 16662 - protein, 963 aa, Arabidopsis thaliana
MAARNLEKMASIDAQLRLLAPGKVSEDDKLIEYDALLLDRFLDILQDLHGEDVREFVQECYEVAADYDGNRNTEKLEELGNMLTSLDPGDSIVVTKSFSNMLSLANLAEEVQIAYRRRIKKLKKGDFADEASATTESDIEETLKRLLQLNKTPEEVFDALKNQTVDLVLTAHPTQSVRRSLLQKFGRIRDCLTQLYAKDITPDDKQELDEALQREIQAAFRTDEIRRTPPTPQDEMRAGMSYFHETIWKGVPKFLRRVDTALKNIGINERVPYNAPLIQFSSWMGGDRDGNPRVTPEVTRDVCLLARMMAANLYFSQIEDLMFEMSMWRCNEELRVRAERQRCAKRDAKHYIEFWKQIPANEPYRAILGDVRDKLYNTRERARQLLSSGVSDVPEDAVFTSVDQFLEPLELCYRSLCDCGDRPIADGSLLDFLRQVSTFGLALVKLDIRQESERHSDVLDAITTHLGIGSYKEWSEDKRQEWLLSELSGKRPLFGPDLPKTEEVADVLDTFKVISELPSDSFGAYIISMATAPSDVLAVELLQRECGITDPLRVVPLFEKLADLESAPAAVARLFSIEWYRNRINGKQEVMIGYSDSGKDAGRLSAAWQLYKTQEELVKVAKEYGVKLTMFHGRGGTVGRGGGPTHLAILSQPPDTIHGQLRVTVQGEVIEQSFGEEHLCFRTLQRFTAATLEHGMHPPVSPKPEWRVLMDEMAIIATEEYRSVVFKEPRFVEYFRLATPELEYGRMNIGSRPSKRKPSGGIESLRAIPRIFAWTQTRFHLPVWLGFGGAFKRVIQKDSKNLNMLKEMYNQWPFFRVTIDLVEMVFAKGDPGIAALYDRLLVSEELQPFGEQLRVNYQETRRLLLQVAGHKDILEGDPYLRQRLQLRDPYITTLNVCQAYTLKQIRDPSFHVKVRPHLSKDYMESSPAAELVKLNPKSEYAPGLEDTVILTMKGIAAGMQNTG

SEQ ID NO: 16663 - protein, 736 aa, Archaeoglobus fulgidus DSM 4304
MQVQVSLSRDLSFFDITMIGIAGMIGAGVFALTGIAAGIAGPAIILAFFLNGIIATLTGLAYAELGSAMPQAGGGYLWIKEAMGDYAGFMAGWIDWAAHTIACALYAVTFGAFFAEMLVGFVGLPLPHVLTAKISSLAMVSFLAYVNYRGAKESGFLGSLVTVLKVLILLVFAGFGIIKMLSYPDWQSSFTPFFPTGFAGVLAAMGLTFIAFEGFEIIVQSGEEVKDPEKNIPKAIVVSLWVAVAIYILIAFSLLGAVRADVPSWMYLGQLAELSLVKVADSIMPLGGWMILAGGLISTISAMNATIYSSSRVIFALSRSGYLHRSLSAINERTKTPHYAIFFSYIIIAAASLAPIEAVASAASLMFIILFLAVNVTLIILRLRRPDIQSAFRLPLVPVLPAIAAALLAVVSYFLITQVEHGEGVFLITIAWMFLGSFFYFAYSEKELEKREEEEVMTVFTEKPVEKMEYTILVPVANPVIAKKLVRFAELIARKKKGAVVILNTVRLPQQTPISAPAKDVKKAKELVEGLMNLSVPSGGVVKVSHSVSEAILSTAEEWKANMIVMGWRGRTFRRDVVLGSTIDPVLLKAKCDVVVIRFEPGEKIPEFRDVLISTIGGPHAKLGYEIARALVEDKSGRIKLLYVGSSEKEREKAEKVFEEAMEILNGLNVEREFAISSSPSDVVAREAESFDLVIVGASERTFLKNFLTGLFPEKVVMKTSKTVAMTRKWVGLLNR

SEQ ID NO: 16664 - protein, 100 aa, Brassica napus
RTNQQSLAASNGSLDNHRSTSENGTLAKPTAKAAHSHVSTSNTLQKPPHKEESRTLAQKSKPGMSKPSQNNIVVDPGSKRTVSPNRDPSSNQVSCIVESS

SEQ ID NO: 16665 - protein, 115 aa, Brassica napus
  misc_feature (25)..(25): Xaa can be any naturally occurring amino acid
MERLTSPARLMIVSDLDHTMVDHHXPENLSLLRFNSLWEHAYRHDSLLVFSTGRSPTLYKELRKEKPLLTPDVTIMSVGTEITYGNSMVPDHGWVDALNHKWDLGVVKEETASSL

SEQ ID NO: 16666 - protein, 501 aa, Ustilago maydis 521
MPHMPQGIVKGGKEDVKLNNQSLWQTKAYINGVWTDADNKSTLKVFNKATGAEIGQVPDMGANETAAAISAADEAFKSWSKTTAKHRHDLLMKLYYAHQENAEDLAKIIVAENGKALPEAKGEISYSNGFLEWFAEEATRTYGHTVPSPLPGVRNVVQMQPVGVAGLITPWNFPAAMITRKAAPALAAGCTVVVKAPAETPFSALAFAHLAEKVGFPKGTINVVTCAKGDNEIAVGKQLCENPAVRKISFTGSTRVGKILMSQSASTLKKLSMELGGNAPFIVFEDADLDKAVEGAIACKFRGSGQTCICANRIYVHASIKDEFLQKLAAKVNDFKVGYGMDKGTTHGPLVSEAGLSKVEEHVNDSVKKGAKVIVGGKRGEGLFFEPTIITDLPEDVPTDREETFGPLAAVYTFTSEQEVVRKANNVDVGLAGYFFSKDTARCWRVAEELQVGMVGINTGLISQHAVPFGGVHESGFGREGGRTGIDEYLVQKLMVFGGVN

SEQ ID NO: 16667 - protein, 394 aa, Oceanospirillum sp. MED92
MSLNRYRLKHLVKKKHRGAKKASKLLERPDRLIGVILIGNNFVNILASAIATVIAVRLWGDAGIAIATAALTVVILIFAEVSPKTMAALHPEKIAFPASYLLSPLLKLIYPLVWIINGITNTFLKLFGINVTGDNNHHLSTEELRTLVHEAGALLPQNNQNMLLGVLELSEVTVNDIMIPRNEVIGIDLDDDIDTIISQLSRTEHTRLPVYQGELNKVVGLLHMRNLAQVFHEGQVSKAAILQVIREPYFIPESTPLQTQLLHFQSHNRRIGLVVDEYGDIQGIVTLEDILEEIVGELSSNNKEEDQEIFLQEDGSYFVDGSAYIRDVNKSLEWDLPTDGPKTMNGLITETLESIPDANVCLQLENYRIETLQISDNVIKTARIIALPKTEADD

SEQ ID NO: 16668 - protein, 314 aa, Shigella flexneri 2a str. 301
MLTSGGDAPGMNAAIRGVVRSALTEGLEVMGIYDGYLGLYEDRMVQLDRYSVSDMINRGGTFLGSARFPEFRDENIRAVAIENLKKRGIDALVVIGGDGSYMGAMRLTEMGFPCIGLPGTIDNDIKGTDYTIGFFTALSTVVEAIDRLRDTSSSHQRISVVEVMGRYCGDLTLAAAIAGGCEFVVVPEVEFSREDLVNEIKAGIAKGKKHAIVAITEHMCDVDELAHFIEKETGRETRATVLGHIQRGGSPVPYDRILASRMGAYAIDLLLAGYGGRCVGIQNEQLVHHDIIDAIENMKRPFKGDWLDCAKKLY

SEQ ID NO: 16669 - protein, 319 aa, Arabidopsis thaliana
MDGEELTEQETALYDRQIRVWGANAQRRLTKAHILVSGIKGTVAEFCKNIVLAGVGSVTLMDDRLANMEALNANFLIPPDENVYSGKTVAEICSDSLKDFNPMVRVSVEKGDLSMLGTDFFEQFDVVVIGYGSRATKKYVNEKCRKLKKRVAFYTVDCRDSCGEIFVDLQDYKYTKLEEMVECELNFPSFQEAISVPWKPIPRRTAKLYFAMRVIEVFEESEGRKHGECSLLDLARVLEIKKQLCEANSVSESHIPDILLERLITGTTEFPPVCAIVGGILAQVIKAVSGKGDPLKNFFYYDGEDGKGVMEDISDSFTS

SEQ ID NO: 16670 - protein, 298 aa, Zea mays
MSAELKRDYEIGEEIGRGRFGVVHRCTSRATGEAFAVKSVDRSRLGDDLDRELAQLEPKLAQLAGAGNPGVVQVHAAYEDEAWTHVVMDLCPGPDLLEWVGRRRGAPVPEPVAAAIVAQVAQALALCHRRGVAHRDVKPENILIDADDDAGSDEEDQAEAAPRARLADFGSAAWVGAGGLGRAEGLVGTPHYVAPEVVAGGEYGAKADVWSAGVVMYALLSGGALPFGGDSAAEVLAAVLRGSARFPPRLFGGVSPAAKDLMRRMICRDEWRRFTAEQVLAHPWIVSGGGARAMERPT

SEQ ID NO: 16671 - protein, 395 aa, Frankia sp. CcI3
MTGIDPTSTDPTSTDPTSIGATGTGATGTGADLLARFAGRRLRLGTRRSALALAQSGTVAATLRARVGCAVELVPIVTAGDRSSGEISQIGGTGVFVSALRDALLSGEIDLAVHSLKDLPTATPPGLVLAAVPPRADPRDVLVAPSGRRLAELRAGARIATGSPRRAAQLRALGLGLEVVTIRGNVDTRLKKAIDGEVDAVVLAHAGLARLDRLDAVTEILEPTVMLPAPGQGALAIECTGGAGLVVAGPARALVPAGPGSGPAVGQTGGETWSDGGQPVDTGLAELLRFVLDDASSSVAVRAERAFLAGIEAGCTAPVGALAELLPELAEGAAAEAGGAPPAGRLCLRAVVAAPDGSDVLRRDVTGSAVDPEALGQRLADDMLSAGAHSLMGTR

SEQ ID NO: 16672 - protein, 317 aa, Triticum aestivum
  misc_feature (244)..(244): Xaa can be any naturally occurring amino acid
MLPWIFSRKGASGFSWASTADQVTAGISAAGLTAIVTGASSGIGAETARVLAARGAHVVMAVRNLAAAEAVRQAVLAETPGGSVEVMELDLSSLASVRNFAADFAATGLPLNILVNNAGVMATPFSLSKDGIEMQFATNHVGHFLLTNLLLETMKKTSRESNVEGRIVNVSSEGHRFAYKEGIRFAKLNDEEEYSTIAAYGQSKLANILHANELARRFKEEGVNITANSLHPGAIITNLLRHHXSIIDALHRTLGKLVLKNAKQGAATQCYVALHPDAKGVSGKYWCDSNLYEPSDKAKDAELGKKLWDYTLDLVAA

SEQ ID NO: 16673 - protein, 358 aa, Aster yellows phytoplasma
GKTTLTAAITQVLSTRGLAKSRAYDQIDNAPEERERGITIKTSHVEYETEKRHNAHVDCPGHADYVKNMITGAAQMDAAILVVSGADSVMPQTREHILLARQVGVPKIVVFLNKCDLSPDEQILELVEMEVRELLSQYDFPGDEIPVIRGSALKALEGDAHYVAQLNELIETLDTYIEDPVREVDKPFLMPVEDVFTITGRGTVVTGRVERGKVKAGDEVEIIGLKETRKTIVTAVEMFKKDLDFAQAGDNVGALLRGINREDVKRGQILAKPGSVKPHSKFVAQVYVLTKEEGGRHTAFFSQYRPQFYFRTTDITGVVELQGDVKMVMPGDNTELVITLNNPIAIEEGTKFSIREGG

SEQ ID NO: 16674 - protein, 415 aa, Neisseria meningitidis Z2491
MSQRRVVITGLGQVSPVGNTVAEAWDTLLAGKSGIGAITRFDASDINSRVAGEVRGFDIGQYISAKEARRMDVFIHYGIAAALQAIADSGLDDVENLDKDRIGVNIGSGIGGLPSIEVTGKAVIEGGARKINPFFIPGSLINLISGHVTILKGYRGPSYGMVSACTTGAHAIGNSARLIKYGDADIMVAGGAEGAISTLGVGGFAAMKALSTRNDDPATASRPWDKGRDGFVIGEGAGILVLEELEHAKKRGAKIYAEIVGFGMSSDAYHITAPNEEGPALAVTRALKDAGINPEDVDYVNAHGTSTPLGDANETKALKRAFGEHAYKTVVSSTKSMTGHLLGAAGGVEAVYSILAIHDGKIPPTINIFEQDVEAGCDLDYCANEARDAEIDVAISNSFGFGGTNGTLVFKRFKG

SEQ ID NO: 16675 - protein, 553 aa, Parvularcula bermudensis HTCC2503
MVTDPSARAFSWKKLTALAAEGPPPLSDLFDHNPGRVAHFSLEAAGVYADYSKTPVNQTILDALYGLARACDFEARRDAMFGGQRINETEERAVLHVALRDTSDRIYTVDGQNVTTDIHAVKDRMKAFVEKVHDGRHDGYGGAPLDTVVNIGIGGSDLGPAMVSRALDPYTVDGRRTFYVSNVDGADIASVLRQIDPERTLFLIASKTFTTQETMTNAETARNWFLSSGGNEAAIAKHFVALSTNEAAVTDFGIDPENMFAFWDWVGGRYSLWSAIGLSIALQIGWSGFEDLLSGARGMDRHFETMPLEGNLPASLALIDVWHRSFLGYSARAVLPYDQSLARLPAYLQQADMESLGKRIDRSGQVVDYPTGAIVFGEPGTNGQHAFYQLLHQGTDVIPCDFIAAACGQVEVGDHHEKLLANFLAQPEALMAGRSVEAARSEALATGKNPETADRLAIHRSFPGDRPTISLLVERLTPEALGALLALYEHRIFVQSILWDINAFDQWGVELGKGLAKTILAELEGEVDVASHDPSTADLIRRIKRLRREGGVA

SEQ ID NO: 16676 - protein, 293 aa, Brassica napus
  misc_feature (223)..(223): Xaa can be any naturally occurring amino acid
  misc_feature (226)..(226): Xaa can be any naturally occurring amino acid
  misc_feature (291)..(291): Xaa can be any naturally occurring amino acid
ASVQWASSIVTSSFKPLAMADSSSSTIFSHPSLSIIYPRCSLLTNLPLSFSRVSLSLKAKTNLKKSPFVSFVAQNSDWEGEEGGDASASVAVEENDSEGEGDVSEGGDFPEPPEEAKLFVGNLAYDVDSQALAMLFEQAGTVEIAEVIYNREPDQSRGFGFVTMSTVEEAETAVEKFNRYDLNGRALTVNKAAPRGSRPERQPRVYEPAFRVYVGNLPWDVDXGRXEQVFSEHGKVVEARVVYDRETGRSRGFGFVTMSNETELNDAIAALDGQNMEGRAIRVNVAEERPXRF

SEQ ID NO: 16677 - protein, 518 aa, Bifidobacterium breve
MTDFTPETPVLTPIRDHAAELAKAEAGVAEMAAKRNNRWYPKYHIASNGGWINDPNGLCFYKGRWHVFYQLHPYGTQWGPMHWGHVSSTDMLNWKREPIMFAPSLEQEKDGVFSGSAVIDDNGDLRFYYTGHRWANGHDNTGGDWQVQMTALPDNDELTSATKQGMIIDCPTDKVDHHYRDPKVWKTGDTWYMTFGVSSEDKRGQMWLFSSKDMVRWEYERVLFQHPDPDVFMLECPDFFPIKDKDGNEKWVIGFSAMGSKPSGFMNRNVNNAGYMIGTWEPGGEFKPETEFRLWDCGHNYYAPQSFNVDGRQIVYGWMSPFVQPIPMEDDGWCGQLTLPREITLDDDGDVVTAPVAEMEGLREDTLDHGSITLDMDGEQVIADDAEAVEIEMTIDLAASTADRAGLKIHATEDGAYTYVAYDDQIGRVVVDRQAMANGDHGYRAAPLTDAELASGKLDLRVFVDRGSVEVYVNGGHQVLSSYSYASEGPRAIKLVAEFGNLKVESLKLHHMKSIGLE

SEQ ID NO: 16678 - protein, 230 aa, Candida albicans SC5314
MVKPIIAPSILAADFANLGCNCKRVVDTGDVEWLHLDVMDGHFVPNISLGPPIISSLRKQFPREGDKPIVFDCHMMVSEPDEWIEEIAKAGGDSYTFHFEATKDPARVIKKIKEHGLKAAMAIKPKTPVEEVFPYAEDLDMVLVMTVEPGFGGQKFMPDMMPKVETLREKYPNLDVQVDGGLGKDTIQPAADAGANVIVAGTSVFKPEDPKPVVQYLKQTVADAIQARNK

SEQ ID NO: 16679 - protein, 583 aa, Yarrowia lipolytica CLIB122
MIPFTKINLELLLLPLLIIPITLFLLVLNVQVNTVHRRYKEYRLKLARCPQQSTGLFGWWLIYAVVRCNRDRFYSAKVVDYFTKLRTFIVSLGGELVIYTSESENIKALLATQFSDYDLGKTRHALLFTLMGDGIFTLDGQGWAHSRALLRPQFSKETVSPLSSLETSLQQLMAIVKRRVALKGEVDIQELFFMLTMDTATNLLYGESVDSLGDCLKETKKETHVMTDGKRNLLQSRDHHSNVPNEWEPIYGTYEKKGLGIGSENSLQSGVSPRDSPVFEVSVSEDIRKAYPAALTTALEFSAMRSKLQRFYWIWGDVLYRQKFHSAVNTVHAFSNHFVNQALKLTPQELQMKSAEKYTFLYELAQRTRDPVAIRDQLINILIAGRDTTAALLSFVFLCLVANPEKLAKLREGIMTDFGTSTDSITFESLKRCVYLRYVINEALRLCPPVPINMRQANKDTTLPTGGGKNHDEPIFVAKNQIVTYSVLFMHHNQNIWGPDASEFRPERWGEPACPKGWEYLPFNGGPRICLGQQYALTEAAYVIVRLVQEFTEIEWRDRKGLPVLFKTHITMSLGEGLRVHMK

SEQ ID NO: 16680 - protein, 358 aa, Aster yellows phytoplasma
GKTTLTAAITQVLSARGLAKSRAYDQIDNAPEERERGITIKTSHVEYETEKRHYAHVDCPGHADYVKNMITGAAQMDAAILVVSGADSVMPQTREHILLARQVGVPKIVVFLNKCDLSPDEQILELVEMEVRELLSQYDFPGDDIPDIRGSALKALEGDAHYVAQVNKLIETLDTYIEDPVREVDKPFLMPVEDVFTITGRGTVVTGRVERGQVKAGDEVEIVGLKETRKTIVTAVEMFNKDLEFAQAGDNVGALLRGINREDVQRGQVLAKPGSVKPHSKFIAQVYVLTKEEGGRHTAFFSQYRPQFYFRTTDITGVVELQGDVKMVMPGDNAELVVTLNNPIAIEEGTKFSIREGG

SEQ ID NO: 16681 - protein, 133 aa, Zea mays
  misc_feature (78)..(78): Xaa can be any naturally occurring amino acid
MARTQSAVAVAVVAAVLLLAAAATTSEAAITCGQVSSAIAPCLSYARGTGSGPSASCCSGVRNLKSAASTAADRRAAXCNCLKNAARGVSGLNAGIAASIPSMCGVSIPYTISTSTDCSRVNYNLYHARRRCV

SEQ ID NO: 16682 - protein, 274 aa, Campylobacter lari RM2100
MHEAQKLIDKKRLFCNGNLVEEKNKFLDGLVELIVYENNPKGLEIVFENEDFAIVEKPSGVLTHPNGRNCTYSLCDEIWHLWGQNACVAHRLDKETSGLLLIAKHKNAQIELKTMFEKRLVQKSYLALVKGKTKEEFIVDKSMDLAKDYDAVKTRMHICENGKEALTQFYTLEYFENLDVSLILAKPLTGRQHQIRLHLFHVKHKILGEPLYGLEKTQIEQILDGKMSDIKRAHITGAKRLLLHSFSLEFIYKNQKFLIQSQKDVKGEFLKNLP

SEQ ID NO: 16683 - protein, 622 aa, Debaryomyces hansenii CBS767
MSEQQGSDNRHHHHHHHHNNHHGDHSGQHDGHNNKVHQPQPIDPKANPANRIGKYQVLKTLGEGSFGKVKLAQHTTTGQKVALKIINRKTLAKSDMQGRVEREISYLRLLRHPHIIKLYDVIKSKDEIIMVIEYAGKELFDYIVQRGKMPEDEARRFFQQIIAAVEYCHRHKIVHRDLKPENLLLDEQLNVKIADFGLSNIMTDGNFLKTSCGSPNYAAPEVISGKLYAGPEVDVWSSGVILYVMLCGRLPFDDEFIPALFKKISNGVYTLPNYLSQGAKDILTRMLVVNPLNRITIHEIIEDEWFKQNIEEYLLPPDLSKTKHKKIEVDEDVITALQSTMGYDRDEIVNVINKCNQHNAPQQQSNEIIDAYLLMRENRTLVKDLKNSKLNNMDTFLSQSPPPSWTNNANNNSNMNINVNHSTKAPGVQQSLTYQTLAAVPDLSTLPNSTIAILPSSLPSIHRAYMMESNMDTQLKIAPVSHKKLKTRWHFGIRSRSYPLDVMGEIYRALKNLGAEWSKPTEEELWTIRVRWKYGPCILPNEKSQEEQQKDIPDMMKMQIQLFQLEPNNYLVDFKFDGWENSSNKDVSIKQDVDEMSSFSAYPFLHLATRLIMELAVNSQTN

SEQ ID NO: 16684 - protein, 564 aa, Candida glabrata CBS 138
MSQAQSLSPSESAENSPVREVNVANSFKDDDFILEQKQTADVSAMSPEAEAPPKPISAYFTVICLCLMIAFGGFVFGWDTGTISGFVAQTDFKRRFGQQAADGSYYLSDVRTGLIVAIFNIGCAIGGLTLGRLGDMYGRRLGLMAVITVYVVGIVIQISSTTTWYQYFVGRIVSGLGVGGIAVLSPTLISETAPKHLRGTCVSFYQLMITLGIFLGYCTNYGTKTHTNSIQWRVPLGLCFAWALFMLVGMSMVPESPRFLVEKGRFEEARRSLARSNKVSMDDPIVTAEIENISAGVEAEKSAGNASWGELFSTKGKILQRVVMGIMIQSLQQLTGCNYFFYYGTTIFKAVGLEDSFQTSIILGIVNFASTFVALYVVDRFGRRKCLLWGSSTMAVCMVIFASVGVKSLYPNGKDQPSSTTAGNVMIVFTCLYIFCFATTWAPTAYVIVAETYPLRVKNRAMAIAVGFNWIWGFLIGFFTPFITTAINFYYGYVFMGCLVFSFFYVFFFVCETKGLTLEEVNEMYEEGVLPWKSAQWLPTTKRTSGYDVDAALHDDKPWYKRFA

SEQ ID NO: 16685 - protein, 316 aa, Bifidobacterium animalis
AHIEYQTAKRHYAHVDCPGHADFVKNMITGAAQMDGAILVVAATDGPMAQTREHVLLARQVGVPRILVALNKCDMVDDEELIELVEEEVRDLLDENGFDRDCPVVHTSAYGALHDDAPDHDKWVATVKELMDDVDDYIPTPVHDLDKPFLMPIEDVFTISGRGTVVTGRVERGKLPINTNVEIVGIRPTQTTTVTSIETFHKQMDEAEAGDNTGLLLRGINRTDVERGQVVAAPGSVTPHTKFEGEVYVLTKDEGGRHSPFFSNYRPQFYFRTTDVTGVITLPEGVEMVQPGDHATFTVELIQPIAMEEGLTFAVR

SEQ ID NO: 16686 - protein, 470 aa, Ashbya gossypii ATCC 10895
MPGNQVGTDGAGAVDVAALANAAWVGASSVLIWMMVPGAGLLYAGLSRRRHALAMLWASIMAVTVVSLQWFAWGYTLAFAPATRGNGFLGTLHYAGMYHVLDAAPKRALPTAADVLFQGMFAMVAGTLMIGGSGGHARLLPMLVFLFWWVTLVYCPVACWTWNADGWLARMGVLDYAGGGPVHLTSGHAALVYALILDSRRGRRARRPRKFRPHSVTMVVLGTVFMWFGWFGFNGGTAGSPTALAFYGCVSSNLAAGCGAIVWLFLDYFRYGKKWTVVGLCSGAISGLVAITPAAGYVPAWASVAIGAFAGFSCIFAVAIKIVLGIDDGLDVYAIHGVGGAVGSAMTGLFACKYVNASGAPYVRPIEGGWLERNWAQLGYQVVAILSISAWSAIVTALLLLLLDRIPYLRLRPAADEQEDVDIHGINLFVNDVHDRVAEKIGVTSHAASTSRDQEAAKPRETPELDAVVS

SEQ ID NO: 16687 - protein, 316 aa, Bifidobacterium animalis subsp. lactis
AHIEYQTAKRHYAHVDCPGHADFVKNMITGAAQMDGAILVVAATDGPMAQTREHVLLARQVGVPKILVALNKCDMVDDEELIELVEEEVRDLLDENGFDRDCPVVHTSAYGALHDDAPDHDKWVATIKELMDDVDEYIPTPVHDLDKPFLMPIEDVFTISGRGTVVTGRVERGKLPINTNVEIVGIRPTQTTTVTSIETFHKQMDECEAGDNTGLLLRGINRTDVERGQVVAAPGSVTPHTKFEGEVYVLTKDEGGRHSPFFSNYRPQFYFRTTDVTGVITLPEGVEMVQPGDHATFTVELIQPIAMEEGLTFAVR

SEQ ID NO: 16688 - protein, 534 aa, Streptomyces avermitilis MA-4680
MTETSELDDSFHVFDTTLRDGAQREGINLTVADKLAIARHLDDFGVGFIEGGWPGANPRDTEFFARAQQEIDFKHAQLVAFGATRRAGAKASEDPQVKALLEAGAQVITLVAKSHDRHVELALRTTLDENLEMVRDTVSYLCSQGRRVFVDCEHFFDGYRANPEYAKAVVRAAAEAGADVVVLCDTNGGMLPAQVQAVVATVLADTGARLGIHAQDDTGCAVANTLAAVDAGATHVQCTANGYGERVGNSNLFPVVAALELKYGKKVLPEGALREMTRISHAIAEVVNLTPSTHQPYVGVSAFAHKAGLHASAIKVDPDLYQHIDPERVGNTMRMLVSDMAGRASIELKGKELGVDISGDRELVGRVVERVKERELKGYTYEAADASFELLLRAEAEGKARTYFEVESWRAIVEDRPDGTHANEATVKLFAKGERIVATAEGNGPVNALDRALRVALEMIYPQLAKLELVDYKVRILEGKHGTSSTTRVLISTSDGTGEWSTVGVAENVIAASWQALEDAYTYGLLRAGVEPAE

SEQ ID NO: 16689 - protein, 323 aa, Burkholderia sp. 383
MTSGVGGLTVRVAAKREEAVGICSFELVSTDGQPMPAFSAGSHIDVAVPGGPTRQYSLCNAPEEGHRYQISILRDPNSRGGSAGMHDRVQVGDALAISVPKNNFPLAHDATRSLLMAGGIGVTPILCMAERLAAIGAPFEMHYCSRSRARTAFLDRISRATYARHVQFHFDDQPDTPAFDIAARLARPESGTHLYVCGPTGFMDAVLGAARAAGWPEAQLHYEFFAAGERVAADSDRFEVEVASSGQVVTVEEDESIVQALARVGIEIETSCEQGVCRTCETRVLAGEPDHRDVCLTPAERADNDRLMPCCSRSKSARLVLDL

SEQ ID NO: 16690 - protein, 313 aa, Escherichia coli
MLDNVLRIATRQSPLALWQAHYVKDKLMASHPGLVVELVPMVTRGDVILDTPLAKVGGKGLFVKELEVALLENRADIAVHSMKDVPVEFPQGLGLVTICEREDPRDAFVSNNYDSLDALPAGSIVGTSSLRRQCQLAERRPDLIIRSLRGNVGTRLSKLDNGEYDAIILAVAGLKRLGLESRIRAALPPEISLPAVGQGAVGIECRLDDSRTRELLAALNHHETALRVTAERAMNTRLEGACQVPIGSYAELIDGEIWLRGLVGAPDGSQIIRGERRGAPQDAEQMGISLAEELLNNGAREILAEVYNGDAPA

SEQ ID NO: 16691 - protein, 187 aa, Wolbachia endosymbiont of Drosophila simulans
MVKVKRALIGSKSRLIGPNCPGIITPEECKIGIMPGHIHKRGHIGIMSRSGTLTYEAVAQTTAVGLGQSTCIGIGGDPIHGMTFVDCMELFLKDNDTHGIVVIGEIGGNEEEDVSHFVKAEKTKKPIVGFVAGQTAPPGRRMGHAGAIISSSGGSAGAKLEVMRSAGIAIAETPAVIGKKVLEVMHH

SEQ ID NO: 16692 - protein, 379 aa, Mycobacterium leprae
MTPPHNYLAVIKVVGIGGGGVNAVNRMIEQGLKGVEFMAINTDAQALLMSDADVKLDVGRDSTRGLGAGADPEVGRKAAEDAKDEIEELLRGADMVFVTAGEGGGTGTGGAPVIASIARKLGALTVGVVTRPFSFEGKRRSNQAENGIAALRESCDTLIVIPNDRLLQMGDTAVSLMDAFRSADEVLLNGVQGITDLITTPGLINVDFADVKGIMSGAGTALMGIGSARGDGRSLKAAEIAINSPLLEASMEGAQGVLMSIAGGSDLGLFEINEAASLVQDAAHPDANIIFGTVIDDSLGDEVRVTVIAAGFEANGPGRTPVMGSTGGAHRIESAKAGALTSTLFEPVDAASAPLHTNGAALSIGGDDDDVDVPPFMRR

SEQ ID NO: 16693 - protein, 300 aa, Bartonella henselae str. Houston-1
MSILVNKDTKVLVQGLTGKTGTFHTEQALAYHGTQMVGGVNPKKGGETWEGSKGETLPIFASVAEGKEKTGADASVIYVPPAGAAAAIIEAVEAEIRLIICITEGIPVMDMVKVKARLEKSKSRLIGPNCPGILTPNECKIGIMPGSIFRKGSVGVVSRSGTLTYEAVFQTSHEGLGQTTAIGIGGDPVKGTEFIDVLEMFLADDETQSIVMIGEIGGSAEEEAAQFLQDEAKKGRKKPVVGFIAGRTAPPGRTMGHAGAVISGGKGGAEDKIAAMESAGIKVSPSPSQIGKTLMSVLKG

SEQ ID NO: 16694 - protein, 388 aa, Oryza sativa
MAMLTAKLTSPPAATTWLPGGGRRSAPPRRATVIRAAAVSYADELVSTAKSVASPGRGILAIDESNATCGKRLASIGLDNTEVNRQAYRQLLLTTAGLGEYISGAILFEETLYQSTTDGKKFVDCLKDQNIMPGIKVDKGLVPLPGSNNESWCQGLDGLASRCAEYYKQGARFAKWRTVVSIPCGPSALAVKEAAWGLARYAAIAQDNGLVPIVEPEILLDGDHAIERTLEVAEKVWSEVFFYLAQNNVLFEGILLKPSMVTPGAEHKQKATPEAIAKHTLTMLRRRVPPAVPGIMFLSGGQSEVEATLNLNAMNQEPNPWHVSFSYARALQNSVLKTWQGRPENVEAAQKALLVRAKANSLAQLGRYTGEGESDEAKKGMFQKGYTY

SEQ ID NO: 16695 - protein, 294 aa, Caulobacter crescentus CB15
MSVLIGSHTKVICQGITGAQGTFHTEQAIAYGTQMVGGVTPGKGGQTHIGLPVFDTVAEAKDRTGADASVIYVPPPFAADSILEAIEAEIPLIVCITEGIPVLDMVKVKKALQGSKSRLIGPNCPGVLTPKQCKIGIMPGSIFSEGSVGVVSRSGTLTYEAVFQTTNAGLGQTTAVGIGGDPVKGTEFIDVLEMFLADEATKSIVMIGEIGGSAEEEAAQFLKDEAKRGRKKPMVGFIAGRTAPPGRHMGHAGAIVSGGKGGAEDKIAAMEDAGIRVSPSPAKLGETLLEVLKG

SEQ ID NO: 16696 - protein, 502 aa, Burkholderia sp. 383
MLVDELHSRKNEVIDPSALRARLRDGALLETRAWLASGWQEGTDGRSFPVTNPATGDILARVASLGAAEVEQAIESSALAQQGWQKRTSHERAKLLRAWFDLILANADDLALIMTSEQGKPLAEARGEITYAASFVEWFAEEAKRVYGDVMPHPQGDKRILVIRQPIGVCAAITPWNFPAAMITRKVAPALAAGCSIIVRPADLTPLTALALAVLAERAGIPAGVLQVVCGPSREIGAVLTASPVVRKLSFTGSTEVGRVLMSQSSGTIKRLSLELGGNAPFIVFDDADLDAAIEGAMASKYRNSGQTCVCANRFLVQAGIHDRFVEALTRRVQALKVGNGIEPGVQQGPLIQKSACDHLNQLIDDAVSKGARIVTGGKGHPLGGTFFEPTVIADATPAMRLAREELFGPVGPVFRFDDEAEAIAMANDTEYGLAAYLYTRDNSRIWRVGEALEYGMVGLNTGVISNEVAPFGGVKQSGLGREGSRYGIEEYLEIKYMCSQV

SEQ ID NO: 16697 - protein, 443 aa, Blastopirellula marina DSM 3645
MTSRLFYWSLTSALAGFLFGFDTVVISGAEETIEKLWDLDKVTHGLAMSAALWGTVIGSLIGGWPTDAWGRRKTLLSIGVLYFISAVWSALANDVSAFMIARLVGGLGVGISTVVAPLYISEISPPERRGRLAAMFQFNIVFGILIAYASNALLAGIGPNSWRWMLGVEAFPAIIYTLMCFTLPESPRWLITKKNDREAGLRVLQMVAPERTPAEIDALANEIAEAATVEKQSLSSFWSAKMKTPIMLAFLVAFFNQMSGINAILYFAPRIFKEAGQSGEAALQTSVSIGIVNLIFTFAGLWLIDRLGRKTLLWIGSVGYIVSLVGCSWASWNDQYVVLAACVNIFIASHAIGQGAVIWVLISEVFPNRYRAMGQSLGSSTHWVFAALITALFPLFAEQLGMGAIFLFFCGMMVLQLIWVVTMVPETKGVPLEEMERKLGVTP

SEQ ID NO: 16698 - protein, 402 aa, Caulobacter crescentus CB15
MADINTPALGESVTEATVARWTKKVGEAVKKDEILVELETDKVSLEVASPADGVLSAIGAAEGATVVPGTVLGVVAEGATASAAPAAAPAPKAEAPKPAPAAPAPAAAPAAAPVSPAPARIAAESGLDLSKVAGTGKDGRVTKGDALAALEARASAPAPAAAAAAPRALHEREERVKMTRLRQTIARRLKEAQNSAAMLTTFNEVDMSAVMALRAQYKDVFEKQHGVKLGFMSFFVKAVVAALKAIPDVNAEIDGQDVIYKNHYDIGVAVGTDKGLVVPVVRDADALNLAGIEKTIGDLGKRARNGQLAIEDMQGGTFTITNGGIYGSLMSTPILNAPQSGILGMHAIKERPMVINGKIEIRPMMYLALSYDHRIVDGAGAVTFLVKVKEAIEDPQRLLLEL

SEQ ID NO: 16699 - protein, 637 aa, Bifidobacterium adolescentis
MSNTYSISVETGGYRQLDLFAERCGEGNAVVTVADGNGVAIAAHTMPIAERRHHFSIAVPQKSTVTVAASGLVVRFGYLSECDDLLDNGVRYVNMNPSDTDWPAQPTLEQIYNRFGRSGAHFEPFARWMNDPNGLCQFQGRYHLFFQLNPYGFGWDNMHWGHAVSRDLVHWTHLPVFLEPQPELHTDERIVGGAFSGSAVTVDEHDNPVAGNEANAIRLYLTRHLETRGDESSVTEYQTTCLCEDGVHVRVESPVALRANDDFGYDFRDPKVECGMGGEALDPDRAYMVTATNLPVSEFGADAADSAVPGISTQNTGGWFTYSPQGKPGVDQPNNATVPAMTLFSAKKPLKRNVTWRYEGPVLADFGHQIARTYECPDLFQVDGVTVAVGALMHYRDKQGRFQQVRWYAGDLVNTDNGPKLDVKASDWCDFGTGYYATQSFADDNGRRIVFGWFTDFPEMRVEQPCLANGMMSLPRELHVRDGRLYSKPVSEVYRELLGERLAVHGDGGDMVVTAPGNAYYANVHLADDADAIMVLAKGVNPQDGRPTELLLQRTDGVTRLVAKGTAVEDVDFDSGITDVRQVEVFFDRNVVEVFLNGGQTAGSMLFQGADGDGELRIASSGKIDAVDARALNGIWR

SEQ ID NO: 16700 - protein, 839 aa, Vibrio sp. Ex25
MNSPLTIPVKNALSHIVVVGNGMVGQHLVEQLVQKNAHLEHRITVIGAERFIAYDRVQLSSLFAGKSHDDLMLSNQEWYDMHGIQLVLGSQVTGIDREQKRILLDGEDVLGYDQLVLATGSYPFVPPIEGKDRDNVFVYRTLDDLSQIKKACEGAKTGAVIGGGLLGLEAANALKLLGLETHVIEFAPRLMPVQLDDGAGLVLKEKIEALGLTVHTSTGTERICDGETAKHRMVFKDKDPLEVDVIVFSAGIRPQDELARLAELEVGERGGIVINNQCQTSDENIYAIGECALWEQKIFGLVAPGYTMARTTADVLTGMPSEGFKGADMSTKLKLLGVDVASIGDAQMQTEGAQEMVLQDAVAGIYKKLVVDASGTQLLGAILVGDNSDYDALLQCYLNKTVLPEHAANLLFDTGMLDGEMPDSAIICSCHNVTKGDLVAEIQAGTTNLTDLKANTKAGTGCGGCSNMVKSVLDTQLAAMGVEVNNHLCEHFELSRQEMFHICQVEQIKDFDTLIALHGKGHGCDICKPTAASVFASLWNEHIMEPQHQSLQDSNDAFMANLQKDGSYSIVPRVPGGEITPDKLIVLGEVAQQYDLYTKITGGQRVDLFGAQLEQLPEIWQTLIDAGFETGHAYGKSVRTVKSCVGSTWCRYGVDDSVGLAIELENRYKGLRAPHKLKFAVSGCTRECAEAQSKDIGVIATENGWNLYVCGNGGMRPRHADLFASDLSKSELITMIDRVLMFYVSTADRLQRTSVWMENMEGDLDYLKQVILDDSLNLCDSLDEQMARVVDTYQCEWKSTLDNPQKLQRFRPFLNSTSGSKVLPYQRVRGQRIPVKQEV

SEQ ID NO: 16701 - protein, 191 aa, Zea mays
MATILENIQKARFLPTRPLKDELPTFQGGGKSKEESHLMGLRKRLSSFSGKIQPISSASAAEWAFRRSKSAPSLGAAFAAGGGSLRQWWQWGVGWLLSKKPGFAGDLEMNEEEVAALGRQSRGTWAHILFKMRSGVRRLVASAHSLPTTHKQQSLPSSSAAAAHSVQCKPAASFAYAQRQSFHHTGHAMAH

SEQ ID NO: 16702 - protein, 881 aa, Shewanella oneidensis MR-1
MTDMYASLRSNVSMLGQILGDTMRTHLGDSFLEKVEQIRKLAKDSRRGDEAAREQMLELLTALPDEELVPFAKAFNQFLNLANLSEQFHTISRNCDELVCVPDPVEQLLGRMLNGRVDQTKMLDCLKTLDIDLVLTAHPTEISRRTLIQKYAAIVDCLAEQENNQLSDRERQQINLRLRQLIAQIWHTNEIRRERPTPVDEARWGLSTIEESLWHAVPDFLRQLNDQVQERTGQQLPIDIAPVRFSSWMGGDRDGNPFVTAKVTQEVLDRNRHAAARLFLKDIVLLVGELSMEEANDELKAYTNNSCEPYRFVLRSLRQKLRDTIDYLNARIEGHNPEVDKSTLIWQESDLKAPLEMLYKSLYDCGMRLIANGLLLDILRRLACFGIHMLRLDIRQDAGRHCDVLAELTRYLGMGDFNHWDETEKQAFLLRELSNRRPLIPSNWQPSADVAEVLNTCRLIAKHPAKALGSYVISMASKPSDVLTVLLLLKETGCTHPMRVVPLFETLSDLNNAAACITDLLDIDWYRGYTKGMQEVMIGYSDSAKDAGVMAAAWAQYRAQEQLVAVCNQAGVKLTLFHGRGGSIGRGGGPAHKAILSQPPGSVDGRIRVTEQGEMIRFKFGLPKLAVQSLALYTSAVLEATLLPPPEPKQEWRNCMERIAEESVSAYRGIVREEPDFVAYFRAATPEVELGKLPLGSRPAKRRVDGGIESLRAIPWIFAWSQNRLMLPAWLGAGEALQAACQRGEIGLLQDMEREWPFFSTRISMLEMVYAKAEPNLARYYETCLVSTNLHHLGETLRQRLDLGIKVVLELTKSDTLMAHTPWNRESVKLRNPYIDPLNFLQTELLARTRKETSETPASEHVQLALMLTIAGVAAGMRNTG

SEQ ID NO: 16703 - protein, 106 aa, Arabidopsis thaliana
  misc_feature (42)..(42): Xaa can be any naturally occurring amino acid
  misc_feature (68)..(69): Xaa can be any naturally occurring amino acid
  misc_feature (85)..(85): Xaa can be any naturally occurring amino acid
MASSMLSSAAVVTSPAQATMVAPFTGLKSSASFPVTRKANNXITSITSNGGRVSCMKVWPPIGKKEFXXLSYLPDLTDRADLVKXGYLPFSKKVLVFEFVGTFFLW

SEQ ID NO: 16704 - protein, 190 aa, Saccharomyces cerevisiae
MIIVVLIPTHNRLRHHNDAPMPSDVASRTGLPTPWTVRYSKSKKREYFFNPETKHSQWEEPEGTNKDQLHKHLRDHPVRVRCLHILIKHKDSRRPASHRSENITISKQDATDELKTLITRLDDDSKTNSFEALAKERSDCSSYKRGGDLGWFGRGEMQPSFEDAAFQLKVGEVSDIVESGSGVHVIKRVG

SEQ ID NO: 16705 - protein, 369 aa, Dechloromonas aromatica RCB
MPPHPAIASTAEIVTELKAGRMVILVDEEDRENEGDLVMAAEHITPEAINFMAKFGRGLVCLTLTEARCKKLGLTQMARNNGTVYGTAFTVSIEAAEGVTTGISAADRARTIQVAVNKASTADDIVQPGHVFPITAREGGVLVRAGHTEAGCDLAGMAGLEPSSVICEIMNDDGTMARLPELIEFAKEHGLKIGTIADLIHYRASSETLVERVTSKTVSTAHGDFTLHAYVDRASGATHLAMVKGSLPAGGETLVRVHEPLSVLDFLDPASKRQAFSIDQAQAALAKHGHGVIVLMHRPEDGAALLSRLTGTAPTAPAKWDPRSYGIGAQILRDLGVTKMRLLSSPRKMPSMTGFELEVTGFVTSPAEL

SEQ ID NO: 16706 - protein, 323 aa, Mangifera indica
MESLSFPVINLEKLNGEERAATMEKIKDACENWGFFELVNHGIPIEELDTLERKTKEHYRKCMEQRFKELVASKALEGVQTEIKDMDWESTFYVRHLPQTNLKCTPDLDDEYRKVMKEFASKLEKLAEELLDLLCENLGLEKGYLKKTFYGSKGPTFGTKVSHYPPCPQPDLIKGLRAHTDADGIILLFQDDKVSGLPASERWAVDIDVPPMRHSIVVNLGDQLEVITNGKYKSVEHRVVAQRDGNGRMSIASFYNPGSDAVIYPAPPLLEPEAEEKKQVYPKFVCEDYMKLYARLKFQAKEPRFEAMKAVETTVNLGPIATA

SEQ ID NO: 16707 - protein, 652 aa, Oryza sativa
MAEYATAKTSVWWDIENCQVPRACDPNLIAQNMSSALAAAGYTGPVSISAYGDIGRIGNAVTHALSSTGISLNHVPAGIKDASDKKILVDMLFWAIDNPPPANYLLISGDRDFSNALHKLTMRRYNILLAQPPNVSQALTAAAKSVWLWKSLVAGEPPLAESPYVSSTASGNMVELDKSKNINSDSSDTTTDTNPQNGLQSDHQKGGNGKADKQSKVKQPRRNQSDNVSKPASNEENSVEVADNSKEYTTDHPTQSSMPSSSSSSSSESQDGAKVNQSSKPKVQPFSLPKKPAKSAHCHQKTAPHDFNSKKSGASAESAAKNGTPDSGNGGGYNPKHHKPHTSQSPRPQNSITHPHSGSEIFHHTLSSQRTNSCSPSAGHNGAPTAPLQSWPSAPPYHSPPVNYPDLNRINISGYPRGIHDNQGVNMNYHPNHSGSPHNVQPAYNSYRPPTPPSMPSNMQNAGQWGVNPGYPQPSSDPQGLIRNILGALEVLKTEKIPPIEQHISDCIRYGEANLPNFDVKKALELAIQHQAIVLKMLGPMSFYLGKNQNLWKCVNIMDINAKYPKDTFDAVHRFISSTSGSSAIKNSRSKYQAAIVLKNQCLKHLALGEVLQILYIIINTKKWFVPHSSGWQPLSFNIIVVDATTGAGGKA

SEQ ID NO: 16708 - protein, 350 aa, Zymomonas mobilis subsp. mobilis ZM4
MTDSKTNDQRKAELLSKQVEHIDIRSFDARPIIDAMGKMSFTSRDLARATDIYNQMLADPKCTIFLVIAGSTSAGGCMDAYAELLRSNMIDGVVATGASIVDMDFFEGLGHKHYQALEVPDDMTLRSLYIDRIYDTYIDEEQLQDCDNTIYKIAESLNPGGYSSRAFIREMGRYLSEHGKKENSLVKLAYEHDVPIFCPAFVDSSAGFGLVKHQVERIRDKKPYVMLDAAADFRELTDIKIKAGTTGLLMIGGGVPKNFVQDTVVCAEVLGHEDIEMHKYAVQITVADVRDGACSSSTLKEAASWGKVDTALEQMVYAEAGSVLPLLASDAWHRGFWKNREPRAWSKLFD

SEQ ID NO: 16709 - protein, 358 aa, Aster yellows phytoplasma
GKTTLTAAITQVLSTRGLAKSRAYDQIDNAPEERERGITIKTSHVEYETEKRHYAHVDCPGHADYVKNMITGAAQMDAAILVVSGADSVMPQTREHILLARQVGVPKIVVFLNKCDLSPDEQILELVEMEVRELLSQYDFPEDDIPVIRGSALKTLEGDAHYVSQVNKLIETLDTYIEDPAREVDKPFLMPVEDVFTITGRGTVVTGRVERGQVKAGDEVEIVGLKETRKTIVTAVEMFKKDLDFAQAGDNVGALLRGISREDVQRGQVLAKPGSVKPHSKFVAQVYVLTKEEGGRHTAFFSQYRPQFYFRTTDITGVVELQGDVKMVMPGDNAELVVTLNNPIAIEEGTKFSIREGG

SEQ ID NO: 16710 - protein, 118 aa, Brassica napus
MARMQKLAVATAAVVALVLLAAAATSEAAISCGQVASAIAPCISYARGQGSGPSAGCCSGVKSLNNAARTTADRRAACNCLKNAAAGVSGLNAGNAASIPSKCGVSIPYTISTSTDCS

SEQ ID NO: 16711 - protein, 338 aa, Aspergillus oryzae
MATPKVGINGFGRIGRIVFRNAIASGDVDVVAVNDPFIETHYAAYMLKYDSTHGRFQGTIETYDEGLIVNGKKIRFFAERDPAAIPWGSAGAAYIVESTGVFTTTEKASAHLKGGAKKVIISAPSADAPMFVMGVNNKEYKTNINVLSNASCTTNCLAPLAKVINDKFGLVEGLMTTVHSYTATQKTVDAPSAKDWRGGRTAAQNIIPSSTGAAKAVGKVIPSLNGKLTGMSMRVPTANVSVVDLTCRTEKAVTYEDIKKTIKAASEEGELKGILGYTEDDIVSTDLIGDAHSSIFDAKAGIALNEHFIKLVSWYDNEWGYSRRVVDLIAYISKVDGQ

SEQ ID NO: 16712 - protein, 297 aa, Thermoplasma volcanium GSS1
MKIKIGTRPSNLAVAQANMVASSLEAIGIDTEIVKHRSAGDIDTKNPIYSIGKTGVFVQDLNNMILRGEIDVAVHSAKDIPSEIENRLTIAATLKRGSFNDALVSKYDLRSLPISAKVGTSSIRRIFQLKYARQDLKFENIRGNIETRIAKMSELGLDAIVMAEAAIQRLGLNVEYSKLDENKFVPAPNQGIIAVVSKKEGTVRKILEEINDENTFEEMQIERSVVQQLKLGCSTPVGILSRPSGKGHKIIAQFFSMQGDDVSVFEQYLNDLSDVDSLVSYIRENIPREYGYIASEE

SEQ ID NO: 16713 - protein, 112 aa, Zea mays
MASALSFFTCLVLTVCIVASVDAAISCGTVTSNLAPCAVYLMKGGPVPAPCCAGVSKLNSMAKTTPDRQQACKCLKTAAKNVNPSLASSLPGKCGVSIPYPISMSTNCDTVK

SEQ ID NO: 16714 - protein, 136 aa, Glycine max
  misc_feature (31)..(31): Xaa can be any naturally occurring amino acid
  misc_feature (89)..(89): Xaa can be any naturally occurring amino acid
MAMAFPSVTSVTVENVTFPPTVKPPCSPNTXFLAGAGVRGLQIHHAFVKFTAICIYLQYDALSFLSVKWKTKSTHQLTESDQFFSDIVXVTMIKPLTGQQYSEKVAENCVAIWRSLGIYTDSEAEAIDKFLSVFKD

SEQ ID NO: 16715 - protein, 343 aa, Neisseria meningitidis Z2491
MGIKVAINGYGRIGRQVLRAIYDYQIQDQLQIVAVNASGSLETNAHLTKFDTVHGRFEADVSHDGGNLIVNGDKIPFFSTRNPAELPWKELGVDLVMECTGAFTSKEKAKVHLESGAKKVLISAPGGDDVDATVVYGVNDSILTADMTVVSNASCTTNCLSPVAKVLSESVGIVKGAMTTIHALTNDQTVTDVRHKDLRRARSGVENMIPTKTGAAKAVGLVLPELKDKLDGLAIRVPTVNVSLVDLNFQAARDTTIEEINALMKAASEAGALKGVLGYNTLPLVSMDFNHTTEASHFDATLTKVVDGNMIKVFAWYDNEWGFSCQMLNTARRMFGLEVRPLK

SEQ ID NO: 16716 - protein, 105 aa, Corynebacterium nephridii
ATVKVDNSNFQSDVLQSSEPVVVDFWAEWCGPCKMIAPALDEIATEMAGQVKIAKVNIDENPELAAQFGVRSIPTLLMFKDGELAANMVGAAPKSRLADWIKASA

SEQ ID NO: 16717 - protein, 635 aa, Rickettsia typhi str. Wilmington
MSNSNIDNDPAKIDSLLRKAKSKKIPVTYDDINKALPLNKNPSIRQLEEAILKFSDAGVDILESNEDDEIKLDIGIDEEFKLSTNVDNESEDEVEEENIGSTDDPVRLYLKDMGGVDLLTRENEVEIAKRIEEGRKTMTASLCRSPVAMRCFIVWYEDLVNEKMLLRDLIDLEANMLHDEVHENDEEHNSETEVEEHEDNHLSMSRVETQILHNIIDRMKKISFICEELLIEAKKCYEESFDPKVLQNSRKYNNNLELLIHEVSEIHFNSKRTEEILGKMYGINRDLINKETAFLKLAEKYGVTRQNFLDEYIGSVINAAWKEKMLKNKKVAWKELITKESDYIDQMINELSVIESNTGLLVNDFKKLVNTIQKSERQTLQAKKDMIEANLRLVISIAKKYANRGLQFLDLIQEGNIGLMKAVDKFEYRRGYKFSTYATWWIRQAITRAIADQARTIRIPVHMIETINKILRTSRQMLNELGYEPTATEIANRLSMPLDKVRKVMKIAKEPISLENPVGDDSDGGQLGDFIEDKNAVAPIDAAIQSNLREVTTRVLATLTPREERVLRMRFGIGMNTDHTLEEVGQQFKVTRERIRQIESKALRKLQHPIRSKKLNSFRNGGKRGDGNPSDLLEA

SEQ ID NO: 16718 - protein, 358 aa, Aster yellows phytoplasma
GKTTLTAAITQVLSTRGLAKSRAYDQIDNAPEERERGITIKTSHVEYETEKRHYAHVDCPGHADYVKNMITGAAQMDAAILVVSGADSVMPQTREHILLARQVGVPKIVVFLNKCDLSPDEQILELVEMEVRELLSQYDFPGDEIPVIRGSALKALEGDAHYVAQVNELIETLDTYIEDPMREVDKPFLMPVEDVFTITGRGTVVTGRVERGQVKAGDEVEIVGLKETRKTIVTAVEMFKKDLDFAQAGDNIGALLRGINREDVQRGQVLAKPGSVKPHSKFFAQVYVLTKEEGGRHTAFFSQYRPQFYFRTTDITGVVELQGDVKMVMPGDNAELVVTLNNPIAIEEGTKFSIREGG

SEQ ID NO: 16719 - protein, 573 aa, Pseudomonas syringae pv. phaseolicola 1448A
MSRRKRRLEKMTKTSRPLYISYAGPSLLEMPLLNKGSAFTPQERVEFNLIGLLPQNVETIEEQVTRVYSQYKQCASDLDKHIYLRSIQDNNETLFFRLLDSHLDEMLPIIYTPTVGQACQEFSKIYRTHRGLFISYPERDRIDDILRSATKDRIKIIVVTDSERILGLGDQGIGGMGIPIGKLSLYTACGGISPAYTLPIVLDVGTNNRELLDDPMYMGWRHERVSGKEYEDFIALFIDAVQRRWPDVLLQFEDFAQSNAMPLLEKYRDELCCFNDDIQGTASVAVGTLLAACKAKNETLGQQKVVFVGAGSAGCGIAEHIIAAMRIEGLSESEARKRIFMVDRFGLLTEGMDNLLDFQKRLAQKTADVSGWTAGTEAFPQLLDVVTNAGATVLIGVSGQRGLFTEQVIRELHKHCAKPLVMPLSNPTSKVEATPEEILRWTDGNALVATGSPFAPVEINGRTVHIAQCNNSYIFPGIGLGVVACKASRITDRMLMAASNALAECSPMVTGQGDAVLPPLKEIQQVSRKIALAVAKEAQAEGLALETSEEALLEAIERNFWLPGYRAYRRRSV

SEQ ID NO: 16720 - protein, 358 aa, Aster yellows phytoplasma
GKTTLTAAITQVLSTRGLAKSRTYDQIDNAPEERERGITIKTSHVEYETEKRHYAHVDCPGHADYVKNMITGAAQMDAAILVVSGADSVMPQTREHILLARQVGVPKIVVFLNKCDLSPDEQILELVEMEVRELLSQYDFPGDDIPVIRGSALKALEGDAHYVAQVNELIETLDTYIEDPVREVNKPFLMPVEDVFTITGRGTVVTGRVERGQVKAGDEVEIVGLKETRKTIVTAVEMFKKDLDFAQAGDNVGALLRGINREDVQRGQVLAKPGSVKPHSKFVAQVYVLTKEEGGRHTAFFSQYRPQFYFRTTDITGVVELQGDVKMVMPGDNTELVVTLNNPIAIEEGTKFSIREGG

SEQ ID NO: 16721 - protein, 112 aa, Triticum aestivum
GPGSVSPLKLTPSLGENKTPKNRVVALDPPARVVRTKVLQGGPVSAQLRTPFPEIRVEAPGEGACVPKVKVDYERLDGAPLAPEDEARLAQGYVPLVRMVEAYLVAPPDEFA

SEQ ID NO: 16722 - protein, 347 aa, Streptomyces avermitilis MA-4680
MARSINLAVIPGDGIGQEVVAQGLKVLSAALPSDVKLETKEFDFGARRYHATGETLTDADLDALKQHDAILLGAIGDPSVPSGVLERGFLLKLRFAFDHHVNLRPSKLLPGVETPLAGQPEIDFVVVREGTEGPYTGNGGTIRTGTPHAVATEVSLNTAFGIERVVRDAYARAQARPRKKLALVHKNNVLVHAGHLWTDIFNKVGEEFPDVTTEYMHVDAATIYLVTQPERFDVIVTDNLFGDIITDLAAAISGGIGVAASGNINPSGAYPSMFEPVHGSAPDIAGQGKADPSATILSVALLLRHLGYEAEAARIEEAVSADLAERVGKPARSTDEIGDALTVRVAG

SEQ ID NO: 16723 - protein, 316 aa, Oryza sativa (japonica cultivar-group)
MVVLVVATTSDAASATPAAAFLAMPGWTPGPSIPDGVESFANGAGVRLLRHARGIVEEDDLDLRWEAATGERVSEVVLLSRHTAVSNRPALTVHPIGVPHLRDGVDVPPQGGRPGWAAPPNPRIGPWLRLLRRIAADRGLVPEFEITLEGTHHGPVTNTPTLFVEIGSTEEYWGRQDAADAVALLLWKGLGLGEEESVGNWHGNGEKVLLGIGGGHYAPRHMDIVTKDGVWVGHLLSGYSLPMEEPKQMNGKNVADVGGMWKHSIKVSYEATKAAFPGGEIIAHIDQKSFKGWQKNAITSYLQELNIRVGKPNDFF

SEQ ID NO: 16724 - protein, 89 aa, Erwinia chrysanthemi
  misc_feature (46)..(46): Xaa can be any naturally occurring amino acid
MVDTILRIATRQSPLALWQAHFVQQRLEACHPGLRVELVPMVTRGXLLLDTPLAKVGGKGLFVKELELALLENRADIAVHSMKDVPVEF

SEQ ID NO: 16725 - protein, 1364 aa, Xanthomonas axonopodis pv. citri str. 306
MPKGRWDLRRTYGRRAFFGALLILSAGLVAAIVTGVWLQRQNELERQQRFDYVVRTLARNIGERMSTFEHGLRGARGAVIGAGSDIISRERFTLYSRSRDYPREFPGVLGYGYIHRVAPADEAAFLQAARADGAPDIHRRPLAPWDGERYMVLYFEPESSGNRPLGIDIASEPRRRAAALQAARSGEPVMTSPISLSGYRIPNESGFLVLLAVYREGMPLQTPQQRMLATSGWVYAPFSVEQMVRSALGERDDVALDLSDRNEPTHNFYRSGTPASDSALRPPVVRLLPIYGRTWVITAHPTAGFVASLNQSSPWLIGGLVMAASVLFAALLVLYFSNGLRREEVLRKQMELAALVSHSSEAIVAQTPDGRITHWNPAAEAMFGYTADEAIDQDLTTLLSPQPYAMSEVDHADAALAGNASAAQTMRHRDGHQVHVLASKAPIIESEGTLSGHSHFFRDISDRVRSHQRIIDLNASLEHQVAERTSELVKFSVLQRAILAHAGYAIIATDSGGFVTLFNPAAEKLLGYSAAEVIGRRKASQFVEQEELQERAHMLAEQTGTQVAHTLEAIAALTSLGRSDTSEWTYVSHDGRRLPVLLTLSTLRDDHDQVIGYLGVAVDLTEQKLHEKQLRLAMDAAKSANQSKSDFLANMSHEIRTPMNAILGMLYLLQRSELPGAAQDMVAKIDRSARTLLEIINDILDFSKIEAGRIDLECAPFDLNQLFDNIADLMRSSLSAKPVEMIVEPLPRDSRWLLGDALRINQVLVNLVGNAIKFTEQGEVVLSVRRFPSGDPNKFKLLFSVRDTGIGISKEKQSVIFSPFLQADTSTSRRYGGSGLGLTISRRLVELMGGELEVESVPGRGSEFYFVVTLEKSAPLQAQRELPVLPPEAMPRVLIADDHDAALNNLVRIATELGWRVDAVASGQAALQAIEHAAEPYDIFLLDWRMPDIDGVAIAREIRARATPGPHPVIVMVTAYERRLLEQHPEQQDLDAVMTKPVTGAALHRLVEQLLEERPGARPATPTFVARRLEGAHLLLVDDSDINCEVAQRILEGEGAMVTVAHDGEQAVSTLKRAPNLFHLVLMDVQMPVVDGYEATRRLRQIPALASLPVIALTAGAFRPQQEKALEAGMNGFIAKPFNVEELVTAIRHFLQPGTRRIPSLPHEAQAHAGPEWKYSDPELLDAARARSLWREREPYARYLIKLLRDNPDPGEIAAEHLRRNELPAIGAMAHKLRGAAGSLALPALAGAAGDLETRIEEGHDITGSLIALKDVMQRTAEAIRAFLQHGDSDVAADEDGAALDADSVQILTSAFASDDADRIDHALLICAPRLPHALQEALQRAVEDFDFRRAETTLREWQTTHPH

SEQ ID NO: 16726 - protein, 281 aa, Thermosynechococcus elongatus BP-1
MRTFQAQWGRSPGLAVLRVGNDPASAVYVRAKEQACSRVGIQSFGAHLPATITEAALLAKITELNQDERVDGILLQLPLPPHLDPRPLLYAIHPDKDVDGLHPENLGRLVRDEPGLRSCTPAGVMQLLAAYGIDVVGRSAVVVGRSILVGKPLALMLLSANATVTIAHSRSRELASITRSAEILVTAMGQPRRITADMIRPGAVVIDVGINRIQRPDGKSSLWGDVDYEAARAVASYITPVPGGVGPMTVAMLLHNTVWSYCRRHNWQQPLLSLTSMPPAP

SEQ ID NO: 16727 - protein, 331 aa, Kluyveromyces marxianus
MVSIAINGFGRIGRLVLRIALERKNIDVVAINDPFISVDYAAYMFKYDSTHGKYKGEVSHDGSNLIINGKKVAVFQEKDPATLPWGKLGVDIAVDSTGVFKELDSAQKHIDAGAKKVVITAPSKTAPMFVVGVNEDKYNGEKIVSNASCTTNCLAPIAKIINDEFGIEEGLMTTVHSITATQKTVDGPSHKDWRGGRTASGNIIPSSTGAAKAVGKVLPELQGKLTGMAFRVPTTDVSVVDLTVKLVKAATYDEIKAAVKKVSEGKLKDVVGYTEDAVVSSDFLGDTHSTIFDAAAGIQLSPKFVKLVAWYDNEYGYSTRVVDLVEHVAKN

SEQ ID NO: 16728 - protein, 434 aa, Nannochloris bacillaris
MNLSTRQPVLKAGLAIRANANLGSSTHMAGCPISRHSAAVSVPVIRQERILVAVPRASYSNANYGPMGGDARIKVVGVGGGGGNAVNRMINSGLQGVEFWAVNTDAQALEKHDALNKLQIGTALTRGLGTGGKPELGEEAAQESHQEIASALNGADMVFITAGMGGGTGTGAAPVVARLSKDMGILTVGVVTYPFQFEGKRRASQATDGIDTLKKNVDTLIVIPNDRLLDVVGESTPLQDAFLLADDVLRQGVQGISDIITIPGLVNVDFADVKAIMCNSGTAMLGVGVSSGKNRAEEAAMAATSAPLIERSIERATGIVYNITGGKDLTLAEVNRVSEVVTSLADPSANVIFGAVIDDAYEGEIHVTIIATGFEQTFEENLLAGRVPAARAVGGEAMPRVTGVNGNGVPPSPKPAAGKEAAGAGGFLGRSWIS

SEQ ID NO: 16729 - protein, 173 aa, Glycine max
MGASLSVSEKSIHEFMVKDAKGRDGRDVNLSIYKGKVLLVVNVASKCGFTNTNYTQLTELYSKYKDRGLEILAFPCNQFLKQEPGSSQDVEEFACTRYKAAYPIFGKVRANGPDTAPVYKFLKANKSGFLGSRIKWNFTKFLVAKEGNVLRRYGSTTSPFSIENDIKRALGEA

SEQ ID NO: 16730 - protein, 497 aa, Pseudomonas putida KT2440
MSIVQHLIHGELVTKGERTADVFNPSTGQAVRKVELASRATVQEAIDSAKAAFPAWRNTPPAKRAQVMFRFKQLLEQNEAKISQMISEEHGKTLEDAAGELKRGIENVEFACAAPEVLKGEYSRNVGPNIDAWSDFQPLGVVAGITPFNFPAMVPLWMYPLAIACGNAFILKPSERDPSSTLYIAQLLLEAGLPKGILNVVHGDKEAVDALIEAPEVKALSFVGSTPIAEYIYAEGTKRGKRVQALGGAKNHAVLMPDADLDNAVSALMGAAYGSCGERCMAISVAVCVGDQVADALIAKLEPQIKALKIGAGTSCGLDMGPLVTAAARDKVVGYIDDGVAAGAKLVVDGRGFRVAGNEDGYFVGGTLFDKVTPEMRIYKEEIFGPVLCVVRVNSLEQAMQLINDHEYGNGTCIFTRDGEAARLFCDEIEVGMVGVNVPLPVPVAYHSFGGWKRSLFGDLHAYGPDGVRFYTRRKAITQRWPQRASHEASQFAFPSL

SEQ ID NO: 16731 - protein, 421 aa, Bacillus halodurans C-125
MDSIALMDNVWIMLCAVLVLLMQGGFILLEAGSTRMKNAGHIAGKTIFTVGIASLVYWAVGWGFTYGEGNAFIGLSDFFFGDYSTAEEGLVGSVDFFFQLMFAAIALTIAFGGFAERAKLSVYILFAVLFSAFVYPIVAHWIWGDGWLADLGKQDFAGSTVVHLTGAMGALAATILLKPRLGKYNKDGSMNDIQGHNQVYTALGVLLLWVGWFGFNAGSTLEVADAFFGYVALNTQLAAAAGAVAAMFIAWALSGKADVPTTLNGALAGLVAITASCAFVAPWAAVVIGIVGGLIVYFSMKFFDKAKIDDPIFALSVHGVAGVWGTLSTGFFATPELAEMNGGQAGLFYGGGFAQLGVQTLSVVACGVFAFIASYVLLLVCKSVLGGLRVTEEEEIIGLDLSEHGSYGYPESMPGSEKSGA

SEQ ID NO: 16732 - protein, 570 aa, Burkholderia sp. 383
MMLKNPATKYRPFTPVNLPNRMWPTRTITQAPIWMSTDLRDGNQSLFEPMDATRKMRMFKMLVAIGFKEIEVAFPSASETDFNFVRELIEGGHIPDDVTIEVLTQARDDLIERTFDSVRGAKRAIVHLYNATAPEFRKIVFGLDRDGVKELAVNAARTIKRFADAATDTHFTLQYSPETFTATELDFAKEVCDAVFDVWQPTPEHKAIVNLPATVEVGTPNFYADQIEWMHRNLARRDALIVSVHPHNDRGTAVAAAELAVMAGADRIEGCLFGNGERTGNVDLVTLALNLYSQGIDPGLDFSQINEVARTAEECTQLPIHPRHPYVGDLVFTAFSGSHQDAIKKGFAVQRPDAVWEMPYLPIDPSDVGRTYDSIIRVNSQSGKGGIAYLLEQSYGVALPRRLQVDFSAAVQRLTDDSGLEVTSAQIWSLFQQEYVEGDAPLRYVGHELTERDGRETIVLTADVHGERRVLRGEGNGPLDALMHALRTPLRIQHYEERALSQGADAKAIAIAELAGTGVRGSAFGVGIDANLTTASIRAVISGINRAYARADEAAQATFFGAQPAVKAVA

SEQ ID NO: 16733 - protein, 634 aa, Gladiolus hybrid cultivar 'Traveler'
MEGCDCIEPQWPADELLVKYQYISDFFIALAYFSIPLELIYFVKKSSFFPYRWVLIQFGAFIVLCGATHLINLWTFTMHSKTLALVMTVAKVSTAVVSCATALMLVHIIPDLLSVKTRELFLKNKAEELDREMGLIRTQEETGRHVRMLTHEIRSTLDRHTILKTTFVELGRTLDLAECALWMPSRTGLNLQLSHTLHNQIPVGSTVSINLPTVNQVFNSNRAVRIPHTSPLARIRPLAGRYVPPEVVAVRVPLLHLSNFQINDWPELSARSYAVMVLILPSDSARKWHVHELELVEVVADQVAVALSHAAILEESMRARDLLMEQNVALDLARREAEMAIRARNDFLAVMNHEMRTPMHAIIALSSLLLETELTPEQRIMVETMLKSSNLLATLINDVLDLSRLEDGSFELEKSSFNLHTVFREVINLIKPIAAVKRLSVSVSLAPDLPLCAMGDEKRLMQTILNVAGNAVKFTKEGHISITASVSRPDSFRDPQVHEFYPVFTDGHFYLCVQIKDTGCGISPQDIPFLFTKFAHTQNGGNKGYSGSGLGLAICKRFISLMEGHIWLESEGLGKGCTATFIVKLGICESQNGHQQQMIPTNRLLLGGADFPGPGALLKEDNKAIPSKLRYLSV

SEQ ID NO: 16734 - protein, 376 aa, Dehalococcoides sp. CBDB1
MSKKVYVPSGAKIKVIGCGGAGSNAVTRMVRDNIQGVEFIAVNTDAQHLAITEAATRIQIGERCTRGLGAGGNHTMGKAAAEESLSELKENIIGADMVFVTAGMGGGTGTGSAPVVAKIAKESGALTIAVCTKPFCFEGAHRMQTAEEGINNIVDSVDTLIIIPNDRLLDMVDQKTGVDGAFKLADEVLCNGVKAIAEVITVPGIINLDFADVKAVMKDAGPAWMSIGKGAGQNRAADAARAALASPLLDIAVDGAMGVIYNVCGGEDLSLMEVNSAADVIRQAVDPQANIIFGVSTDPRMGKEVQITLIATGFATKESMLSNNHEKEMTRMMKGLRSKTQEELEVPSFMRYRSAQPSIRKPAPAAHQAPPRFLSR

SEQ ID NO: 16735 - protein, 313 aa, Gladiolus hybrid cultivar 'Traveler'
MEGCDCIEPQWPADELLVKYQYISDFFIALAYFSIPLELIYFVKKSSFFPYRWVLIQFGAFIVLCGATHLINLWTFTMHSKTLALVMTVAKVSTAVVSCATALMLVHIIPDLLSVKTRELFLKNKAEELDREMGLIRTQEETGRHVRMLTHEIRSTLDRHTILKTTFVELGRTLDLAECALWMPSRTGLNLQLSHTLHNQIPVGSTVSINLPTVNQVFNSNRAVRIPHTSPLARIRPLAGRYVPPEVVAVRVPLLHLSNFQINDWPELSARSYAVMVLILPSDSARKWHVHELELVEVVADQTFPGLKMEALS

SEQ ID NO: 16736 - protein, 415 aa, Salinibacter ruber DSM 13855
MSSSPSSSSPSSEKPFDTIEDALATIRDGGLAIVVDDEDRENEGDFIGAAEAMTPDLVNFMTKEGRGLLCTAIPPERAEELDLDLMVDANSSLYSTPFTVSVDYRQGTSTGISAADRAKTIRALADPDASPYDFARPGHVFPLRARTGGVLRRAGHTEAAVDLARLAGLEPAGALVEIMNEDGSMARVPQLRERAQALDMPLITIQDLIAYRMQNERLIERAAEVDLDTAFGTFQVVAYEETLTGDVHLALLKGDWAEDEPVLVRVHSQNVLGDVLAARRESYSEELAEALLQVEHEGTGAILYMMQSNHGQGLLSKLKDLERHQNQDDGAPTDVSLEMDHRDYGIGCQILRDLGIRKLRLLTNNPRKRIGLAGYGLELVEQTPIELPTEARDHLSTVAADRLTPLLMELIDAGT

SEQ ID NO: 16737 - protein, 404 aa, Xanthomonas campestris pv. vesicatoria str. 85-10
MATEVKVPVLPESVSDATIASWHKKAGEAVKRDENLVDLETDKVVLEVPSPVDGVLKEIKFDTGSTVTSNQILAIIEEGAVAAAAPAEEKKADAPAPAAAAPAAAPAPAAAAAPAAASKSAADALPPGARFSAITQGVDPSQVEGTGRRGAVTKEDIVNFAKAGGVGKASGARPEERVPMTRVRKTIAKRLMESKNSTAMLTTFNEVNLAKVSAARKELQDEFQKAHGIKLGFMSFFVKAAANALQRFPLVNASIDGDDIIYHGYSDISIAVSTDKGLVTPVLRNVERQSFADVEQGIADYAAKARAGKLGLDDLQGGTFTITNGGTFGSLLSTPIINPPQSAILGMHAIKERPIAENGQVVIAPMMYLALSYDHRIIDGKDSVQFLVDIKNQLENPGRMLFGL

SEQ ID NO: 16738 - protein, 294 aa, Arabidopsis thaliana
SFSSSSTDFRLRLPKSLSGFSPSLRFKRFSVCYVVEERRQNSPIENDERPESTSSTNAIDAEYLALRLAEKLERKKSERSTYLIAAMLSSFGITSMAVMAVYYRFSWQMEGGEISMLEMFGTFALSVGAAVGMEFWARWAHRALWHASLWNMHESHHKPREGPFELNDVFAIVNAGPAIGLLSYGFFNKGLVPGLCFGAGLGITVFGIAYMFVHDGLVHKRFPVGPIADVPYLRKVAAAHQLHHTDKFNGVPYGLFLGPKELEEVGGNEELDKEISRRIKSYKKASGSGSSSSS

SEQ ID NO: 16739 - protein, 370 aa, Triticum aestivum
  misc_feature (271)..(271): Xaa can be any naturally occurring amino acid
NKFVQKSRLVPVRNSRDIVDPRVREEMSADPSVFLMGEEVGEYQGAYKITKGLLDKYGPDRVLDTPITEAGFTGIGVGAAYQGLRPVVEFMTFNFSMQAIDHIINSAAKSNYMSAGQISVPIVFRGPNGAAAGVGAQHSQCYAAWYAHVPGLKVLTPYSAEDARGLLKAAIRDPDPVVFLENELLYGESFPIKAEVLDSSFSVPIGKAKIEREGKDVTFTAFSKMVGYALQAAEILSKEGISAEVINLRSIRPLDRAAINASVRKTSQIGXPVEGGFPPHGVGAEICMSVVGGHFEYLDAPVERIAGADVPMPYAETLKDWNSTVEELRANDLLQSPWGRQSICSGSLVLSKNSDNPNRQESHHVRKKKK

SEQ ID NO: 16740 - protein, 294 aa, Triticum aestivum
  misc_feature (159)..(159): Xaa can be any naturally occurring amino acid
  misc_feature (164)..(164): Xaa can be any naturally occurring amino acid
  misc_feature (194)..(194): Xaa can be any naturally occurring amino acid
  misc_feature (217)..(217): Xaa can be any naturally occurring amino acid
  misc_feature (247)..(247): Xaa can be any naturally occurring amino acid
  misc_feature (272)..(272): Xaa can be any naturally occurring amino acid
  misc_feature (281)..(281): Xaa can be any naturally occurring amino acid
MPATENAAGEAWDRRRELQAFDDTKAGVKGLVDAGVTALPPIFRHSPESLEGITSSNHDAAAIPTVDLSAARREDTVALVRRAAATVGFFQVVNHGVPAELMAGMLEAVRRFNEGPAEAKQAIYSRDQARKVRFASNFDLFSSAAANWRDTLFFHLAPXPGTSXELPRAVRDVVTEYGKAVTKVALSVLELLSXESLGLSSDHLRDMGCAENLNAVXCQYYPPCPEPYLTWGTKRHTDPGFLTVLLXDGMGGLQGARPITRLVDVLPFPGAXIINIGDFFXLSTIHLRRLTPVL

SEQ ID NO: 16741 - protein, 485 aa, Bordetella parapertussis
MTSSPDIGAYAYIGGRWAQTPAARTFRTALPHDTRQSGREFGCATPADAEAAVARATAAAAPWAAVPALQRAEPLRKAAALLLERLDELTRLLALEAGKPLQEARGEVSAAAGFLHAYAGWPAWGGQGAVKRNGALRIVQEKFPRGVAAIITPWNYPLSNPCQKIGAALIGGNPVIWRPSVSTPAVSLALIEIMHQAGFPDGVFNALIEDGDAVSRALVASEAVAAVSFTGSTRVGLQVAAAAAGRGAAVQCEMGGKNAAVVMPDADLDLAAERIAFGAFGFAGQKCTAVSRVLVHRHVADAFLKRLLDIVRDLRPGLPHQEESCLAPLISARQHDLLVDAIAQARERGARLIEGGAPIEQAPYAHGNYLSPALIQVHDLDDPLWTDEYFGPVLALRVCDDLDQAIAEVNATRYGLGAALFSHDARAIGRFTDQVQAGVVKINDVPPGLYPHVSTGGWKASGLGPNELSEDGVDFFLHKKSVYLA

SEQ ID NO: 16742 - protein, 390 aa, Cryptococcus neoformans var. neoformans B-3501A
MASTITRSIPRALRARTAPLSTAARLVARNALLTTAAPTVPRSPARFLLAEGQRRAASSDEGVTMMTVRDALNQAMEEEMIRDETVFIIGEEVARSPRDCWTSLERTGSSTVQTPITEAGFTGMAVGAALAGLRPVCEFMTWNFAMQSIDQIVNSGGKTHYMSGGNVPCPVVFRGPNGAAAGVGAQHSQDYCAWYGSVPGLKVISPWSASDCKGLLKSAIRDSNPVCFLENELLYGVQFPMTKEELSEDFLIPIGKAKIEKAGSDVTIVAHSKMVTHSLEAAELLEKEEGIKVEVINLRSIRPLDIETIITSVKKTKHLITVEGGFPAFGVGSEILAQICESTAFDFLDAPPERITGADVPTPYAESLETMAFPDTPLIAKVIRRHLYRQ

SEQ ID NO: 16743 - protein, 307 aa, Fusobacterium nucleatum subsp. vincentii ATCC 49256
MEKIYDVVIVGAGPAGLTAGIYAGRGNLSTLILEKEGIGSMIMSHQIDNYPGFHIGASGKEIYDTMKKQALDFGCEIKPATVLGFDPYDEIKIVKTDAGNFKTKYIIIATGLGKIGAKKVKGESKFLGAGVSYCATCDGAFTKGRVVSLVGKGDEIIEEALFLTRYAKEVNIFLTSDDLDCNEELKEAVLSKENVKITKKVKLLEIKGEEFVTELDLEIDGNKETVSTNFVFLYLGTKNNIELYGEFVNLSEAGYIITDETMKTRTDKMYAIGDIREKEVRQVATATNDGVIATTFILKEILKSKKK

SEQ ID NO: 16744 - protein, 1486 aa, Cryptococcus neoformans var. neoformans B-3501A
MSNPTSPTDPPDAGPPAPAIASSSKTGRRSVRLFAPDEEDSSDEDGLIGVPAETTFNDDEVPPSNTRSASYPGPPAHTSPTSKISSIVSSASAAQPKLARSITYVAPSAISSRPAYPLHPAGPETLHASYETWRKTRYTLESFSRAKADGKNAAQRGRSYTDPDVGYFSPDAGDDGWGSDDEDELRSPGWGISHHNMDSGGKTDGSPQLPIKPADVTEDEGQERLDWQGMLESVLNSDVLKVEEQRIYNSMPTDSFREEIGKTLWWQIRAKLRGRTEAEEKKRVQERRARVVDPVLEEINEFKYDPKNNPEGEEDSDADPQDATSTAAPQSKALNQVNTILAKLHAVKGLYPNLAAMRADKSLYTDENFRKRADALTSWSIIVSSLQTQLKLLQKWTGSDELDITKPNTTHEKALVGKYKYHHSIDSKGTPGRDAADDSSFLDRVIKEDNLQRTFERRAFVDMINLVRNAKETVINYLPQFQEQNLPDFQYEIVRLIGFPGRLIIEAVKVRLDAASRLLDPNPMVVEDFIENLRLSISLAVLIRKQYDEIMAPDAEGRWKIPHCLPTEYNDVLLDALRTFFKLLHWRLRGVGKASYYKETEVLEEEAPFLYEAAEAIVGGDMVVAEQYCALSNKLLIRSANYLDQQLRVPIHSHSRDKERGGDKERDGSSSSQRDRNRDGSLAGPPKHMKVEELFSWYSKLLDSARMRHRKTQRFCRKLTQRFDNSAEYSIEETDVDMLVETLQDTGHFLVYTGKFEANGTYIVADGSLWGQPDDVRHLLKRVFSVTIPGSRVRPRQTTSQVSGGGGVLANGQVAAAQPDPADPYPEADDFDDEALAAYILLISPRQNFVWSGAVMTLDVDYIDYELADNRVRLIADGPTKRLALCKHYFTQALIHPDTGETIDLPCVVEAQAHLPTIQKQLVKIAKSSYRLSECIVQSAPLVRNAFRGKPGSQELVENWYSFATEHGTRVLVHIEPSAWDRFNRLLMRLAISWISFISQECNPTDRKTFRWTVAALTYAFNMTRGSNILALDRSEFSLLRRYVGVCVSLLVSHFDILGARSSMEAKKEADRIEAMRRLQRLQENLDDEFLPRTPTESGGQPRIDRSIRLTVEERLRLIAELEARRSELAPAPVGQVLDEEVSEDRALVFLAASKSNISMRWQQGAYIGGGASGSVYLGYSLQDNTVFAVKILPTVDLQSSPALYESIKRESDVMSLLSHPNVVGFLGLEVHRNRVCLFQEYCEGGSLAGMLEYGKIDDEEVVGAFTIQLLRGLEYLHTNRIEHRDLKPENILIGANSVLKLADFGTAKIIKSNKTLARTRGGAHAKMEGLEGTPMYMAPEMIKNQRTGKLGACDIWGLGCIVLQMITGRKPWSFLDFDNEWAIMFHLGATKEPPPLPDPNEMSDQGIEFIDQCLSLDPEARPVASELLQDEWLVPMLEQMAELEQEYPDVLAMGQSDSLVPPPENASLTSNAPTLQDDITPPPLE

SEQ ID NO: 16745 - protein, 409 aa, Arabidopsis thaliana
MSVMFILIDLKLDGGGRPQDKKMVRKLELKYLSLYSFFQHFLPSCQRKRDTMAGNYDRAGEVKAFDQMKIGVKGLVDAGITKVPRIFHHQDVAVTNPKPSSTLEIPTIDVGGGVFESTVTRKSVIAKVRAAVEKFGFFQVINHGIPLEVMESMKDGIRGFHEQDSEVKKTFYSRDITKKVKYNTNFDLYSSQAANWRDTLTMVMAPDVPQAGDLPVICREIMLEYSKRMMKLGELIFELLSEALGLKPNHLKELNCAKSLSLLSHYYPPCPEPDRTFGISSHTDISFITILLQDHIGGLQVLHDGYWIDVPPNPEALIVNLGDLLQLITNDKFVSVEHRVLANRGEEPRISSASFFMHTIPNEQVYGPMKELLSKQNPPKYRNTTTTEMARHYLARGLDGTSPLLHFRI

SEQ ID NO: 16746 - protein, 358 aa, Aster yellows phytoplasma
GKTTLTAAITQVLSARGLAKSRAYDQIDNAPEERERGITIKTSHVEYETEKRHYAHVDCPGHADYVKNMITGAAQMDAAILVVSGADSVMPQTREHILLARQVGVPKIVVFLNKCDLSPDEQILELVEMEVRELLSQYDFPGDDIPVIRGSALKALEGDAHYVAQVNKLIETLDTYIEDPVREVDKPFLMPVEDVFTITGRGTVVTGRVERGQVKAGDEVEFVGLKETRKTIVTAVEMFKKDLEFAQAGDNVGALLRGINREDVQRGQVLAKPGSVKPHSKFIAQVYVLTKEEGGRHTAFFSQYRPQFYFRTTDITGVVELQGDVKMVMPGDNAELVVTLNNPIAIEEGTKFSIREGG

SEQ ID NO: 16747 - protein, 224 aa, Glycine max
EGSDEIFGGYLYFHKAPNKKELHEETCQKIKALHLYDCLRANKSTAAWGVEARVPFLDKEFINVAMSIDPEWKMIRPDLGRIEKWVLRNAFDDDKNPYLPKHILYRQKEQFSDGVGYSWIDGLKDHANKQVTDATMMAANFIYPENTPTTKEGYLYRTIFEKFFPKNSAKATVPGGPSVACSTAKAVEWDASWSKNLDPSGRAALGVHAAAYDGAVDTTKNGPL

SEQ ID NO: 16748 - protein, 358 aa, Aster yellows phytoplasma
GKTTLTAAITQVLSTRGLAKSRAYDQIDNAPEERERGITIKTSHVEYETEKRHYAHVDCPGHADYVKNMITGAAQMDAAILVVSGADSVMPQTREHILLARQVGVPKIVVFLNKCDLSPDEQILELVEMEVRELLSQYDFPGDDIPVIRGSALKALEGDAHYVAQVNELIETLDTYIEDPVREVDKPFLMPVEDVFTITGRGTVVTGRVERGQVKAGDEVEIVGLKETRKTIVTAVEMFKKDLDFAQAGDNVGALLRGINREDVQRGQVLAKPGSVKPHSKFVAQVYVLTKEEGGRHTAFFSQYRPQFYFRTTDITGVVELQGDVKMVMPGDNAELVVTLNNPIAIEEGTKFSIREGG

SEQ ID NO: 16749 - protein, 315 aa, Treponema pallidum subsp. pallidum str. Nichols
MDARLIDGKQAAHECTARLATRVQALRAAVGTAPFLAAVLVGDDPASCTYVAAKQRALARAHLRGETHRLPAHASHAQVLELIARLNEDARVHGILIQLPLPAHLDAARVCRAVAPEKDVDGFHPLNCGALFLAQPGFVPCTPAGIVHLLRRAQVPLAGARVVIVGRSAIVGRPLAVLLASPGCDATVTLCHSHTRGLADICVQADILVAALGKARFIGAPFVRTGAVVIDVGIHHVPDATAPRGRRLCGDVDFDAVAHKVQAITPVPGGVGPMTIAMLLHNTLCAAEYAAGMIPPFRAALYADLDGRAAGDVPH

SEQ ID NO: 16750 - protein, 161 aa, Bacillus cereus ATCC 10987
MTVYDFSAKTITGEEKSLKDYEGKALLIVNVASKCGFTPQYKGLQEVYDKYKEQGLEILGFPCNQFGGQEPGTEADITSFCELNYGVNFPMFAKIDVKGDKAHPLYTYMTEQAPGLLGMKAVKWNFTKFLIGKDGKVVGRFAPQTKPVDLEVEIEKVLGNN

SEQ ID NO: 16751 - protein, 67 aa, Brassica napus
MATTSTSTGDIKKTKSVEVKKKLNVLIVDDDTVIRKLHENIIKSIGGISQTAKNGEEAVNIHRDGNA

SEQ ID NO: 16752 - protein, 358 aa, Aster yellows phytoplasma
GKTTLTAAITQVLSTRGLAKSRAYDQIDNAPEERERGITIKTSHVEYETEKRHYAHVDCPGHADYVKNMITGAAQVDGAILVVSGADSVMPQTREHILLARQVGVPKIVVFLNKCDLSPDEQILELVEMEVRELLSQYDFPGDDIPVIRGSALKALEGDAHYVAQVNELIETLDTYIEDPVREVDKPFLMPVEDVFTITGRGTVVTGRVERGQVKAGDEVEIVGLKETRKTIVTAVEMFKKDLDFAQAGDNVGALLRGINREDVQRGQVLAKPGSVKPHSKFVAQVYVLTKEEGGRHTAFFSQYRPQFYFRTTDITGVVELQGDVKMVMPGDNAELVVTLNNPIAIEEGTKFSIREGG

SEQ ID NO: 16753 - protein, 615 aa, Acidobacteria bacterium Ellin345
MAQEFKLPELGENIASGDLVRVMVKPGDTVKEGQPVIELETDKAVIEVPSTVSGKVQEVKVQKGQKLKVGAIIFTYGDGAAAAPVQPAAPAKTEDKPKAEPKAEAPKQAAPSAAKPAASTGTKQTIEFKLPELGENIKQGQLVRIIAKQGASVSDGQPILELETDKAVIEVPATLTGTIKEVHVKEGDKIGVGQTIFTVETTEGNTQPPHPHTNTEGNTQPPTGGGASSNTEGNTQPPHPHSNTEGNPQPPTGGGGSSSATAARDFELSGQQLARLQFELALRSEGKTEREAHPPDVRDLGVRVSLTPLTPGRPTVAASPTVRRLAREIGVDIVQVKGTGPGGRISEGDVKLFAKQLIVRLQHEAATAKAAPKVVLPDFSKWGSIEKEQMRSIRRKTAERLTQAWTTIPHVTQHDRADITELEKLREKFAKQAEAAGGKLTVTAIALKVIAAAMKKFPKFNASIDIDREEIIYKKYVHIGVAVDTEAGLLVPVLRNVDQKNVYQIAAEMNELSKRARERKLKPEEMEGGTFTITNLGGIGGTSFTPIVNLPEVAILGLSRGRTEPVWVNDHFEPRTMLPLSLSYDHRIIDGADAARYLRWVADALEQPVLLLLQG

SEQ ID NO: 16754 - protein, 358 aa, Aster yellows phytoplasma
GKTTLTAAITQVLSTRGLAKSRAYDQIDNAPEERERGITIKTSHVEYETEKRHYAHVDCPGHADYVKNMITGAAQMDAAILVVSGADSVMPQTREHILLARQVGVPKIVVFLNKCDLSPDEQILELVEMEVRELLSQYDFPGDDIPVIRGSALKALEGDAHYVAQVNKLIETLDTYIEDPVREVDKPLLMPVEDVFTITGRGTVVTGRVERGRVKAGDEVEIVGLKETRKTIVTAVEMFKKDLDFAQAGDNVGALLRGINREDVQRGQVLAKPGSVKPHSKFVAQVYVLTKEEGGRHTAFFSQYRPQFYFRTTDITGVVELQGDVKMVMPGDNAELVVTLNNPIAIEEGTKFSIREGG

SEQ ID NO: 16755 - protein, 406 aa, Candida glabrata CBS 138
MTETISVHPVSFPPEVLARISPDLTLQRHLSLGIRPSLRKFDEFRDVQINEETLSRYSEQCQFDANDTSNGILGSNVLKSGNTMVITTITGGIIEDAYNNEFGDLDIGEQELLHLEDAPADSLSNYTSIYPVVEVERGRVGACTDEEMTISQKLYQSLLYSRVLPKSSLKVKPGVRSTDENGISTITYPDGNVNDDEMSNVVQIKKKWSYVLYAKITVFGRTGPVFDLCWNSLIYALQSTKLPMTFIDEKATDLRVSIRTKGRSTTVKETYEIFADPKRYSDLVIKKERIAYSSNFGIIELNPEEQILNGEESSENSATPDGTDATDVEMDVVRPEPETVLLADIDTEAEEATINSTVNILTDEQGKMCHFSINGGGAIITPELIRNCLTLANERSSDLSRKCLRN

SEQ ID NO: 16756 - protein, 360 aa, Oryza sativa
MVPGGGVPQGAEGGRAMAAAETAATAAAAGERAPGTEVDAFRRQVEDLVSKTDQLERRVNEVVGFYDGKKHGSGGRKAGRKDSSLSKGMPDLMRQFGTIVRQITSHEWAEPFLKPVDVVGLQLDDYYKIITKPMDFSTIQKKMEGKDDNKYNNVREIYSDVRLIFANAMKYNDERHDVHIMAKSLLEKFEEKWLQLLPKVENEERKQKDEESNGVPKVNISPEEAIAKLAKDTDNELIEINKQLEELRQMVVQKCRKMTTYEKRKLGAGLCHLSPEELTKALEMVAQDNPSFEAKGDELELDMDAQSETTLWRLKFFVREALERQANVASGRTDENAKRKREICNALARTASKRVKQQPN

SEQ ID NO: 16757 - protein, 362 aa, Schizosaccharomyces pombe 972h-
MSATRRIVLGLIPADGIGKEVVPAARRLMENLPAKHKLKFDFIDLDAGWGTFERTGKALPERTVERLKTECNAALFGAVQSPTHKVAGYSSPIVALRKKMGLYANVRPVKSLDGAKGKPVDLVIVRENTECLYVKEERMVQNTPGKRVAEAIRRISEEASTKIGKMAFEIAKSRQKIRESGTYSIHKKPLVTIIHKSNVMSVTDGLFRESCRHAQSLDPSYASINVDEQIVDSMVYRLFREPECFDVVVAPNLYGDILSDGAASLIGSLGLVPSANVGDNFVMSEPVHGSAPDIAGRGIANPVATFRSVALMLEFMGHQDAAADIYTAVDKVLTEGKVLTPDLGGKSGTNEITDAVLANIHN

SEQ ID NO: 16758 - protein, 510 aa, Polaromonas sp. JS666
MSLSPSASAPQAIGHYLNGRITAGASGRSQEVFNPATGAVSGHVALASPADVDTAVAAAQAAFPAWADTPPIRRARVMFRFLELLNANKDKLAHMITAEHGKVFTDAQGEVSRGIDIVEFACGIPQLLKGDFTDQVSTGIDNWTLRQPLGVVAGITPFNFPVMVPMWMFPVAIAAGNSFILKPSPIDPSPSLFMAELLKQAGLPDGVFNVVQGDKEAVDALLVHPDVKAVSFVGSTPIANYIYETGARHGKRVQALGGAKNHMVVMPDADLEQAVDALIGAGYGSAGERCMAISVAVLVGNVADKLIPMLQARAKTLVVKNGVNLDAEMGPIVTAAAHQRITGYIDQGVKEGAKLLVDGRTFTGASAGPGCDQGFWMGGTLFDHVTPDMRIYKEEIFGPVLGCVRVKDFGEAVNLINAHEFGNGVSCFTRDGHVAREFSRRIQVGMVGINVPIPVPMAWHGFGGWKKSLFGDMHAYGEEGVRFYTKQKSIMQRWPESIGKGAEFVMPTAK

SEQ ID NO: 16759 - protein, 228 aa, Schizosaccharomyces pombe 972h-
MVQAKIAPSLLAGDFANLEKEVGRMLKYGSDWLHVDVMDAQFVPNLTIGPIVVKAMRNHYTKEEAFFDCHLMVIEPERYIDQLADAGASLFCFHYEATEKHEEIISRAHEKGMLVGCALKPKTPVEVILPFVEKLDMVLVMTVEPGKGGQSFMPECLPKVEFLRKKYPTLNVEVDGGLSLKTVDAAADAGANVIVAGTAVFHAQSPEEVISGLRNSVMKAQETKPWFK

SEQ ID NO: 16760 - protein, 275 aa, Glycine max
MAFFGRIGNLLRQTASRQVSSKLRSPPSFFQAIRCMSSAPSTKLFIGGVSYSTDEQSLREAFSKYGEVVDARIIMDRETGRSRGFGFITYTSVEEASSAIQALDGQDLHGRPIRVNYANERPRGYGGGGGGFGSYGAVGGGGYEGGGGSGYRGNVSDGYGGGNYSRNDGGGYGYGAGSYGSGGNYGDSGPGNNYSGGYSGSNSGHFGDAGSVGNHESSTGFAGNGYDGSVVDGGVGAGSEFGSSGQLDSKTSSNGDEGFGDYRDDNDADNFAKRA

SEQ ID NO: 16761 - protein, 399 aa, Candida albicans
MDDFDRDLDNELEFSHKSTKGIKVHRTFESMNLKPDLLKGIYAYGFEAPSAIQSRAIMQIISGRDTIAQAQSGTGKTATFSIGMLEVIDTKSKECQALILSPTRELAIQIQNVVMHLGDYMNIHTHACIGGKNVGEDVKKLQQGQQIVSGTPGRVIDVIKRRNLQTRNIKVLILDEADELFTKGFKEQIYEIYKHLPPSVQVVVVSATLPREVLEMTSKFTTDPVKILVKRDEISLSGIKQYYVQCEREDWKFDTLCDLYDNLTITQAVIFCNTKLKVNWLADQMKKQNFTVVAMHGDMKQDERDSIMNDFRRGNSRVLISTDVWARGIDVQQVSLVINYDLPTDKENYIHRIGRSGRFGRKGTAINLITKDDVVTLKELEKYYSTKIKEMPMNINDIM

SEQ ID NO: 16762 - protein, 618 aa, Zea mays
MSSFFAVAVALVLSSLIHGTTMATASSEESFFQKCPASSCSEGGPEIRFPFRLATSPLSCGAPGMELVCSKADTVLVHPNLGLCKVTAIWYGGSTITIVPLAVAAEHKCPFQKIISTNLSTDVYRPYGDRATLVSCSAEFIVPSHPASLAGPISCLTNASRRFAYLVPSFRPMDFLPLDCTVLSNSISVPYPASVNAGFNETARGAITFGETMLEWRVPNITDVCRDCEAEGRLCGFSSESRQAFCKSKDHSSRLKVIAVTTPVATVLVLSAMAGAALLHLALKSKYDDEIHRKVEMFLETYRTLKPRRYTFSEVRKMTRRFSSRLGQGGFGSVYKGELPNGGVPVPVAVKMLEDSTGEEEFISEVATIGTIHHANVVRLLGFCSERSRRALVYEFMPNASLEKYIRCSSQEQSSLITASKMLEIATGIARGIEYLHQGCDQRILHFDIKPSNILLDYNLNPKISDFGLAKLCARDQSVVALTAARGTMGYIAPELYSRNFGTVSCKSDVYSFGMVVLEMVVVSAKRRKYSPAETEDQNDDVCVPEWIYEEIVTGQEPREMARGERDMVRKLAIVALWCIQWNPPNRPSMTTVVNMLTDSLQSLKIPPKPFVSSFVGQ

SEQ ID NO: 16763 - protein, 220 aa, Dehalococcoides sp. CBDB1
MKDVKVVPAILTDDPAAFESMIKQSEGFAPVAQIDIMDGQFVPSLSIPPEVLGRYKPSFASEIHLMTLNPEEYLTYCKQHGARRVIFHFEATPRPEYVISRIKEMGFKVGLAVNPETSVAEFAHLVPQVDMVLFMSVIPGFYGAPFIPEVLLKVKEFKRRFPETEIGLDGGAKQSNIPEIVAAGVNDICVGSAIFRQSDPQSSYLYLDKLAKNSAKEAGL

SEQ ID NO: 16764 - protein, 625 aa, Blastopirellula marina DSM 3645
MSDQRQRIHLTGACKAILDFPLWESDDGRRRQRIRHYNIVGWDQIIVQPVCLARRTKSNNYLTDKIETIEGQMGSQCDVAFPVLDDEQMSAVLEHGKLVRFAADEVMFQQGVKDYPFFVIKSGEVRIVENHHGVEQQVTVHGCGEFTGDVDMLTGRAAVIGAIAKGPVEAYQLCGVRLRKLLNDCPAFSDKLLEAFQVRRKLLESSGFVGVSIIGDVSCLRTARLREFFYKNHVPHSFFEAHGEAGRKLLQELDAVNAELPVIHCNRHTVHNPSLPELAECIGISRRVHGESFDLVIVGSGPAGLAAAVYAASEGIRTLVIDSMGPGGQAGSSSKIENFLGFPSGISGSDLANRGYLQALKFGAQFIAPITVQSIETLESGEHQLTLCTAQMVKARCVLVASGVTYRQLGVSNTRHFEGAGLYYAATSVESRICENSTAVVVGGGNSAGQAAMFLAQTAQAVKIVIRGDDLGKSMSAYLCGRVLNHPKIEVLTESEIVAIQGARCVESIDLIHRPSERVTTLACAALFCFIGAQPHTKWLPESVLLNDAGYVLTGAAIPPDKLTAQWTADRPPCDLETSVPGILAAGDVRAGSTKRCGFAVGDGSMAITCVHRVLSTFGQRVTTV

SEQ ID NO: 16765 - protein, 639 aa, Magnaporthe grisea 70-15
MPICLWHGYAPSSAQRLLNSSIYLPKCSLGQFNTMAPRNQKRKAASPAGSHGSDSKKIKTESVEPISTSDPLRRPHTFYKESEENGIVLREFYPHEMSNERARAYNNDEIPRPIEDLYQAMSQTHPIRQKVKVKGAVVHWFKMDLRVADNTALRLASEKAKSAGVPLIALYTVSPKDWEAHLRAPVRVDFTLRSLEVLRQDLAKLDIPLHVETVDDRRAMKQRVLSLMEEWDASHLYANMEYEVDELRREANLVRLLAENGKSMEVVHDTCVVPPGKLQTGTGRQYAVYSPWYRAWLKHLSGDPELLEPMEPPHKNPASAREKFSHLFDGKIPAAPKSKQMNEEEQQRLAAMWPAGEHEARKRLDAFIKRRIDGYAAKRNFPADDGTSSISVHLAAGTLSARTAVHLAHKASGTRKLDGGSQGIQTWISEVAWRDFYKHVLVNWPYVCLTSAGSCPHSMNKPFKPEYSNIAWSYDMEHFAAWCEGRTGFPIVDAAMRQLRGTGWMHNRCRMIVASFLAKDFLIDWRMGERYFMENLVDGDFASNNGGWGFAASVGVDPQPYFRVFNPLLQSEKFDPNGEYIRKWIPELKGIKGKAIHDPYGRGCGVEAKKKGYPKPLVDHKGCRERALKAYKEGISKEI

SEQ ID NO: 16766 - protein, 484 aa, Dechloromonas aromatica RCB
MNLQNTELLRSTNLIGGIWARADDGAQLAVINPATGEKLADVPLCGATETRRAIDAANAAWPAWRALTARRRSQLLQAWFSLIIKNADDLAQLVTAECGKPLQEAKGEVIYGASFVEWFAEEGKRTYGESIPSPAANTRLLVIKQPIGVCAAITPWNFPLAMITRKVAPALAAGCPVVVKPAEATPLTALALAVLAEQAGFPAGVFNVVTGKPAEIGGELCANPIVRKLSFTGSTGVGRLLMAQCAPTIKKLSLELGGNAPFIVFDDADVNAAVDGAIAAKYRNTGQTCVCANRFLIQAGIYDEFAAKFAEKASALKVGAGIEADVAQGPLINAAGLSKVEAHVADAVGKGARVLCGGARHERGGNFFQPTVLADVTTAMMVAREETFGPVAPLFRFETEEQAIAMANDTEFGLAAYFFTRNVGRCWRVGEALEYGMVGINTGMISNEVSPFGGIKQSGLGREGSKYGIEDYLEIKYLCFDVNT

SEQ ID NO: 16767 - protein, 522 aa, Mycoplasma mycoides subsp. mycoides SC str. PG1
MKWNWYSEKQKEKEVIMTKFNNKSELKKIASFNDFLDYTVSFANKNNNEISSEDVLEVFANIFPNASDNESEKILDVLQQKGIVFSDLVDDDIEQEELEEVEEEIEDLNLEELEELENLEYLDDLDFDLDSTSNNLDDYDENANDDLDEFKEAKSAAIKGRKSAKSSNHMKYRVGGISNETKIQDIIKTYFYKIGQAPILTKEQEIIYAKMAVSDDPEDVQEGRNKLIESNLKLVISVARKHLNRGLDFADLIEEGNIGLMKAVDKFEYEKGFKFSTYATWWIRQAITRAIADQARTIRIPVHMVETINKLARVERQLTQELGREPNADEIANRVGEGITGDKVIEIKKLSIEPVSLEKPFGDEDDTHFGDFVEDKDMVSPNEYTEKKILKEVMDKVFEDMPPREEKVIRMRYGIVPTRLRTLLRLTQECNDTNAKELKQAIEELDIHLDTPIEKVRKFNNQIINNNLAKYDSARTLEEVGKELNVTRERIRQIEAKTIRKLKQPSPNNKSGKTLKEFYKGY

SEQ ID NO: 16768 - protein, 142 aa, Glycine max
MASSFVGTLLPNHFTQTKHSAVPASRSGAPRRRRVHLATTRAETMTTVIEKLGIKIERNPPESKLTQLGVRQWPKWGCPPSKFPWTYEAKETCYLLEGKVKVFPSGSNESVEIAAGDLVVFPKGMSCTWDVSVGVDKHYNFE

SEQ ID NO: 16769 - protein, 109 aa, Medicago truncatula
MAMTKFFASLILALIAISMLQTLVMAGNDQGGHLYDNKSQYGPGSLKSYQCPSQCSRRCGQTQYHKPCMFFCQKCCRKCLCVPPGYYGNKAVCPCYNNWKTQQGGPKCP

SEQ ID NO: 16770 - protein, 71 aa, Brassica napus
TLHTRLCLLVQVAQKRWRVELNFTQDGVLMLSSMNMPDGSQRRRTSVDELNMRNIFVEHDVVCVSLIILFF

SEQ ID NO: 16771 - protein, 262 aa, Bordetella parapertussis
MTYQDILFELAGGVARLTLNRPDKLNSFTARMHGEVADALGRIEREGARVLVLTGAGRGFCAGQDLSERRPTADGAPPDLGETVEKFYGPLVRRLAALPLPVVVGVNGVAAGAGANLALAGDIVIARESASFIQSFCRLGLIPDTGGTFALPRLVGRARAAGLALLGNKLSARQAQDWGLIWQCVADDEFDSALDGLAAHFAQAPTKGLAFTKRALQASLGNDLSTQLDLERDMMRELGRSADYAEGVAAFLDKREPQFKGK

SEQ ID NO: 16772 - protein, 163 aa, Dechloromonas aromatica RCB
MTFKTPDLCDEFESELGKTVRVVTPMFQRYGGRTSFSGQIVTLKIFEDNSLVREVFGEDGKGKVLVIDGGGSLRCALVGDQLAILANKNGWEGVVVYGCIRDSGDINGIDIGVRALNTHPQKTLKKGVGDKNVAVTFGGVTFNPGEYLYADEDGVLVSGKALT

SEQ ID NO: 16773 - protein, 185 aa, Xanthomonas campestris pv. vesicatoria str. 85-10
MLLNRLLALVLTGFFATSAFAAGTPVLDVEYRPLAGKTPINLNRTYGGKVVMVVNTASKCGFTPQYEGLEALNQRFGSRGFTVLGFPSNDFQGQEPGSEKQIQEFCTLTYGVKFPMFEKVHVLGAQATPLYQRLTQATGVAPGWNFHKYLISRDGRVVAQFPSKIKPDDPSVLAAIERELKAPAH

SEQ ID NO: 16774 - protein, 156 aa, Brassica napus
  misc_feature (4)..(4): Xaa can be any naturally occurring amino acid
VGEXYSVALTNNYQQADTGTKMIHKGKNTKSRIISKGISAGNSRNCYRGLVQVQSKAENAKNTSVCDSMLIGDKAAANTYPYIQVKNPSAKVEHEASTSTRPEDQLFYFQQRGIDHERALAAMISGFCRDVFNKLPDEFGAEVNQLMSIKLEGSVG

SEQ ID NO: 16775 - protein, 176 aa, Glycine max
SNMAVRQRAVSALPTLLRTLRKEPLKPRNHAHVNALPSLRRAFSLYDQINLIDQVPEDQLRFQGYNDTGFTVNGVEYEGSLLCVGNLLMSWKPKKFSEITADSLSIFQIVRPIPEILIIGCGKNIQHVDPELRRFIRSTGIKLEAVDSRNAASTYNILNEEGRIVAAALLPHGVSS

SEQ ID NO: 16776 - protein, 364 aa, Pseudomonas syringae pv. tomato str. DC3000
MNNKKLRIAAIAGDGIGLEVLPEGVRVVQAAAARHGLELQFEYFEWASCDYYLEHGKMMPDDWFDQLKSFDAIFFGAVGWPDKVPDHISLWGSLLKFRREFDQYANIRPVRLFPGVPCPLANRKPGDIDFVVVRENTEGEYSSLGGIMFENTDNEFVLQESVFTRRGVDRILKFAFEMARKRERKHVTSATKSNGMAISMPYWDKRTEAMASHYPEISWDKQHIDILCARFVLQPERFDVVVASNLFGDILSDLGPACAGTIGIAPSANLNPERRFPSLFEPVHGSAPDIFGKNIANPIAMIWSGALMLEFLGQGDKRFTAAHDEIIMAIEQAIASGEVTPDLGGQRSTQEVGAAIAGRVGAAR

SEQ ID NO: 16777 - protein, 335 aa, Oceanobacillus iheyensis HTE831
MAVKIGINGFGRIGRNVFRQSLKNNEVEVVAINDLTDANMLAHLLKYDSVHGKLQEEVTVNGSNLVIDGKEIKVLSERDPAELGWGDLGVDIVIESTGRFTNKEDAEKHIQAGAKKVIISAPAKGEDLTIVMGVNDDQYDPSEHNVISNASCTTNCLAPFAKVLNDNFGIKRGLMTTIHSYTNDQQILDLPHKDYRRARAAAENIIPTSTGAAKAVGLVLPELNGKLNGNAVRVPTPDGSLTDLVAELDKNVTIEDVNNAMKEAAEGPLKGILEYSEEPLVSSDIVGNNHSSIFDALSTIVMEDNMVKVVSWYDNEMGYSARCIDLAIFMNNKGL

SEQ ID NO: 16778 - protein, 485 aa, Paenibacillus polymyxa
MNVIRQEKYRPSYHFSPKSGWMNDPNGMVYYEGRYHLFYQHHPFGTTWGPMHWGHAVSTDLMNWEEQPIALEPDELGTIFSGSAVVDEQDTSGFFGGKPGLVAIFTHHASLPGTEQVRQCQSLAYSTDSGKTWIKYTGNPVLEDKECIDFRDPKVFWHKPTEQWVMVLACGQTIRIYHSPNLKEWTFASEFGHGIGSHDAVWECPDLFPLYIDEKREQVKWVMLVSIGDVPEIREGSRTQYFTGEFDGTTFVADAESEKVRWLDYGRDNYAGVCWSDIPAEDGRRLFMGWMSNWRYANQTPTERWRGAMSIPRELALETRKGTVALVQRPVRELEGLRTPVLSLTEPSWEEVRNALSALQLDCYELVAEFATTGDFGFKVRVSDEQETLVGYTSATQEVYVDRKRSGRSDFHEDFAGKHGASLTILPDRMDIRIYVDRSSIEVFFDRGQVAITDLIFPDAEAKGLEIFSAEEQITVFSLELYALK

SEQ ID NO: 16779 - protein, 136 aa, Triticum aestivum
  misc_feature (57)..(57): Xaa can be any naturally occurring amino acid
  misc_feature (75)..(75): Xaa can be any naturally occurring amino acid
  misc_feature (90)..(90): Xaa can be any naturally occurring amino acid
PILPIFEVGLNTLFCQPQKGWLRGEEPGSGWSPWWPLCSFVASDAAISCGQVNSALXPCISYARGNGAHPPAACXSGVRSLGGARAAEAXRQAAACKCIKSAAGGLNAGKAAGIPLKCGVSVPYAISSSVDCSKIR

SEQ ID NO: 16780 - protein, 321 aa, Corynebacterium diphtheriae
MILTFTPNPSIDKTLQLDSVLTRGAVQRLSGVQTVAGGKGINVAVALAKAQADTVALYPAHPEDPFNKLIRESQIPAQRVTIRGEVRINTTVTEPDGTTTKLNIQGPQIHEDELQALQKNLLERTARCSWAVLAGSLPPGVPTDWYVHLTKLLNARHPSLRIAIDTSDVPLQKVGESFGNCALSLIKPNGMELGQLVGLDGYVLEKEAAQGNFDPVVSAARKAILQGVENVLVTLGAAGAVLVTKDHAWKATPPPITVLSTVGAGDASLAGFILASEDGLPPEKCLAQAVAYGAAAASFAGTHMPYPHQIDVNHTPVTLLS

SEQ ID NO: 16781 - protein, 1333 aa, Paenibacillus polymyxa
MRKAKGRKCWISGMVIWAMVLQLVVPGISVASENRTVAGETLVPKNDVKSSVTDAIYQIKNIPKNDMGLSVTDSVYQIRNPGFETGDLTGWTVVKGEAFGPNSVTDETTWWAEKIPYNQEGAYHLNGWKYDESATGIIHSSTFELGGSGWISFRLGGAKNPDKVFINIVEIDTGQVIARYGNSAFADVGFPDPALGMRLANMVQYKADLSTYLGKKLYVEVVDNATSDWGVIFADAFSMYHESEPAEGIVATDIKPDFKRYEIDNPSFETGNLDGWTVEGDAFEVTNEAHVSKEGNFFAKSSMQGKGSIASSTFTLQGTGTINFTILDILKPENAYVALYDANSNTLLMKTGNVSANEKISWKVQEHYNNKLYVKVVDHSNEASIAVDSFQASGKGTIFHLNLDEGAGKKALEKVHNLRHDVNYVFSNARYMASKDPRWTPRGIKGGALLFDGYSNYIEVNANDTVPVSDALTIEAWVAPRSYEWGDGNKLSAIVNQSDQDKAEGFSLGMYRHGTWSMQVGIGGQWIQVWVKDHPLEKYKWNYVAATFSKEDGKIKLYLNGEEVASQATPVNVPITPSTESLIIGKNNKPVELAGVFSFNMFSGLLDEVKLHNKALTNQEILAGYESVKALHGGSIPKILNADIDEDPSVFDGDQHRPQYHAMPPQNWMNEAHAPIYYNGKYHLFYQHNPQGPFWHQIHWGHWVSDDMVNWENVRPALAPEAGTLDPDGTWSGSAAYDRNGNPVLFYTAGNDSLSPNQRTGLATPADLSDPYLEKWVKYPKPVTEQNGKGIHNEFRDPFVWYDKEVDKWYQLVTSGLPDFSSGTALVYVSDDMYNWEYKGPLYVSDRSRYPELGTVWELPVLLPLGTDSTGKQKYIFMINPHEKPEHVPPANDVQRDVEVFYWIGTWDRDNFKFIPDQEAPSKMDVGDGYLTAESGLVTPDGRTVVFSMVQNVRTPQAEYQSGWAHNLSLPVSLSLDKHDKLHIEPIKELQSLRGKKWVDFSDKNLESANQLIKNVKGDILEIVMEIDPREAQKFGLKVRRSEKGQEETLIYYDKKNGTFNVDRTKSSIDPDVRVDGIQGGYVDLKGENLKLHIFLDRSVIEAFANYKKKLTTRVYVGRYDSLGLQIWADGDINIKSMQVWDMNALTGKPAAPVYVPDKWDNSVYKDITELPNHDFATGDLTGWITEGDAFQNVHVTNTQFFWDNIYFNPSHKIPGGYHLWGFNEQAGGDSLTGALRSQNFVLGGNGKINFLISGGRDIDRLYVALVRASDGKELFKETATNYEEYQRKIWDASDYIGEELYIKVVDQSKGGFGHINVDDFNVPVQVKKKTNN

SEQ ID NO: 16782 - protein, 553 aa, Aspergillus oryzae
MTTAIVTGTGRRSSIRQSDLQPPATDFISQSMTTSPIDKFPQFKDDLYEIAAGPRESHSNFATKYTPNDRWEPRKENNFASEYTNGTIRHSKHKPRKSISEAISTIRTRNASVSANAQELAQALRAPVSYKLISLCLIWYMTSALTNTSSKSILNALPKPITLTIVQFAFVSIWCLLLSYLSKILPWLRNSIPALKNGIRYPSRDVIMTALPLAVFQLAGHILSSMATSQIPVSLVHTIKGLSPLFTVLAYRVFFRIRYASATYLSLVPLTLGVMLACSTGFSTNFFGIICALVAALVFVSQNIFSKKLFNETARGESETQVSAQRKLDKLNLLCYCSGLAFILTLPIWVLCEGYPLLSNVLRDGSISLSGKENSLDHGALLLEFVFNGVSHFAQNILAFVLLSMISPVSYSVASLVKRVFVIVVAIVWFGNSTTGMQAIGIALTFIGLYLYDRNSHDDLADQRANADHFHTKENVLPLNIRSTTKTWDSNGYVFPPGKTSERQFLDETHSFPNDLKKDDDRPGRVRPRGSSNTRAWLPPGTKQETTWQPSDS

SEQ ID NO: 16783 - protein, 400 aa, Candidatus Kuenenia stuttgartiensis
MAKEVFQRTKPHLNIGTIGHVDHGKTTLTSVITHVLSKQGLAKDRPFDSIDKAPEERERGITIAISHVEYETKKRHYAHVDCPGHADYVKNMITGAAQMDGAILVVSAPDGPMPQTREHILLSRQVGVPRIVVFLNKVDMLEDQELLELVEMEIRELLSKYDFPGDEIPVVKGSALKAAQCGCGGAECASCGPILKLMDAVDTYIPDPVREIDKPFLMSVEDVFSIKGRGTVGTGRVEKGRVKVGDEVDVVGIKPDIKKSVVTGVEMFNKTLDEGQAGDNLGLLLRGVEKNDLERGQVLAKPGSITPHTKYEAEVYILTKEEGGRHTPFFNGYRPQFYFRTTDVTGVVTLTGGAEMVMPGDNVKINVALVTPIAMDEGLRFAIREGGKTVGAGVVTKIVE

SEQ ID NO: 16784 - protein, 580 aa, Streptomyces avermitilis MA-4680
MAKQNVAEQFVDILVRAGVNRLYGVVGDSLNPVVDAIRRNSAIDWIHVRHEGTAAFAAGAEAQITGKLAACAGSCGPGNLHLINGLYDAHRSMAPVLALASHIPSSEIGLGFFQETHPDQLFRECSHYSEMISNPKQMPRLLQSAIQHAVGQSGVSVVTLPGDVASEPAPDKAVETALVTSRPTVRPGDTEIDKLVALIDAADKVTLFCGSGTAGAHAEVMEFAEKIKSPVGHALRGKEWIQYDNPYDVGMSGLLGYGAAYEATNECDLLILLGTDFPYNAFLPTDVKIAQVDVRPERLGRRSKLDLAVWGDVRETLRCLIPRVKPKENRRFLDKMLKKHADALEGVIKAYTRKVEKHVPIHPEYVASVLDELAAEDAVFTVDTGMCNVWAARYISPNGRRRVIGSFSHGSMANALPMAIGAQFTDRNRQVVSMSGDGGFAMLMGDFLTLVQYDLPVKVVLFNNSSLSMVELEMLVAGLPSYGTTNKNPDFAAVARACGAYGVRVEKPKQLAGALKDAFRHKGPALVDIVTDPNALSIPPKISAEMVTGFALSASKMVLDGGVGRMVQMARSNLRNVPRP

SEQ ID NO: 16785 - protein, 479 aa, Anabaena variabilis ATCC 29413
MSATVKTLVNQPYKYGFVTDIEADTIPRGLSEDVVRLISAKKNEPEFMLEYRLKAFRQWQKMTEPTWPSVKYPPIDYQNIIYYSAPKQKKAKLNSLDEVDPTLIETFEKLGIPLSEQKRLANVAVDAIFDSVSVATTFKEKLAKDGVIFCSISEALQEHPELIKKYLGSVVPIADNYFAALNAAVFSDGSFVYIPKGVKCPMELSTYFRINSGDTGQFERTLIVAEEGSYVSYLEGCTAPMYDSNQLHAAVVELIALDNAEIKYSTVQNWYAGDANGKGGIYNFVTKRGLCQGVNSKISWTQVETGSAITWKYPSCVLVGDNSVGEFYSVALTNNMQQADTGTKMIHVGKNTRSTIISKGISAGQSSNSYRGLVKINPTATGARNYSQCDSMLIGDNAHANTFPYIQVQNNTGKVEHEASTSKIGEDQLFFFAQRGISSEDAISMMISGFCKDVFNQLPMEFAVEADKLLSLKLEGSVG

SEQ ID NO: 16786 - protein, 468 aa, Bacillus cereus ATCC 10987
MKQKRNSLYIFSITLVAAIGGLLFGYDTAVISGAEESLKVYFIDSLGLGSLAHGVTVSSALIGCIIGGVISGYCASKFGRKRSLIIAAILFIVSALGASYPEFLFFTKGEPTIVLLLAFNLYRIIGGIGVGLASAICPIYIGEIAPADIRGRLVSFNQFMIIFGMLVVYFVNWGIANGETLEWINDVGWRYMFASGVIPAIIFAILLLFVPETPRYLAIQHQDKKALAILTKINGPLEAKAILDDIKQTMAINVSSEKLFSYGKLVIIVGVLLSVFQQFVGINVALYYAPRIFESMGAAKDSSMMQTIIMGLVNVIFTVIAILTVDRWGRKPLLIVGSIGMAIGMFGVASMAFANIIGIGTLIFIIVYTASFMMSWGPICWVLISEIFPNKIRGQAVAIAVAAQWAANYFISSTYPMMMEYSGGLTYSFYGLMSVLSALFVWKLVPETKGKTLEQMENTWKKQTEYIS

SEQ ID NO: 16787 - protein, 141 aa, Acinetobacter sp. ADP1
MIVVCPSCGAKNRVPENKLAEQPQCGQCHAKLLPLAPIELNEQNFSHFITYSDLPVLIDLWAEWCGPCKMMAPHFAHVAAQNPQVIFAKINTETSPRLSQAFHVRSIPTLVLMNKTTEIARISGALRSTELQQWLDQQLHS

SEQ ID NO: 16788 - protein, 490 aa, Erwinia carotovora subsp. atroseptica SCRI1043
MQLKQSISLKQQVLFRQHCLIDGEWQDSQSGERLNVTNPATGEVLGTVPLVTVSQTEQAIAAAEQALVEWRKKTGKERAALLQAWARLIMDNQDDLAVLLTAEQGKPLAEARGEIAYATSFIDWFAEEAKRIEGSVLQSPQGQQRLMVIKQPIGVCAAITPWNFPAAMITRKVGPALAAGCTMIVKPAEQTPFTALALAELAQQAGIPRGVLQVIVGDAQSVGKVLCDSPVVRKLSFTGSTEVGRILMAQSAPTVKKLSLELGGNAPFIVFDDADVDQAVKGILASKFRNSGQTCVCANRIYVQNGIYPTLVERLIEEVRKLNVGDGTQPGVTQGPLIDDDAVSKVEQHIADALSHGATLLLGGQRHERGGTFFTPTIVGDVTREMRFAREETFGPVAPLFRFSDEAEVIAMANDTEFGLAAYVYTRDAIRQWTVPEALDYGMVGINTGLISNEVAPFGGVKQSGLGREGSRFGIEDYLEMKYLCVDLSR

SEQ ID NO: 16789 - protein, 113 aa, Gracilaria tenuistipitata var. liui
MHVLEVMDASFNEEVIKSSYPVLVDFWAPWCGPCRMVAPVVNQIAHEYKDKLKVVTLNTDKNPSTAAEYGIRSIPTLIIFIEGQRVHTVVGAIPKSTLISTLNKHLSNTNMQQ

SEQ ID NO: 16790 - protein, 699 aa, Oryza sativa
MDLESRIVASEDIGRQVLTYGERKPIEYFLKTVEEITLNDISSTAKKIISSPLTLASWGDVACCVFVQTHANIVLPVLHFNIESDVMASWLSHLPIHRCQLSFPAAQASYATPGIDSALLLDVDDMAGGDAGLNEGLKKQAKPRLRLPKPAAKRSESEFLRSRPLALLMASSHIILPPDDDDEEQRRLEEEEDEDPWARSGPPPAAPEHAMKAALPFSATCVRISRDSYPNLRALRNASSVSLADAAYVKISEGDFGYVLDDVPHLVDHLPDAPTYPNPLQDHPAYSTVKQYFVNEDDTVPQKVVVQKNSRRGVHFRRAGPRQKVYFESDEVKACIVTCGGLCPGLNTVIRELVCGLAHMYNVSKIYGIQNGYKGFYSSNYLTLTPKSVDDIHKRGGTVLGTSRGGHDTKKIVDNIQDRGINQVYIIGGDGTQKGAYEIFKEIRKRGLKVSVAGIPKTIDNDIAIIDKSFGFDTAVEEAQRAIDSAHVEACSAENGIGLVKLMGRYSERRLKENKHMVIVVAEGAGQDLIAKSLSTSEQQDASGNKLLLDIGLWLTHKIKDHFKSKKMEMTIKYIDPTYMIRAIPSNASDNVYCTLLAHSAIHGAMAGYSFTVGNVNGRHAYIPFYRVTSTRNKVKITDRMWARLLSSTNQPSFLSQKDIDEAKENDRTANKPPLPTGLSHHVANSFDQSASSSSNSQI

SEQ ID NO: 16791 - protein, 107 aa, Allochromatium vinosum
  misc_feature (17)..(17): Xaa can be any naturally occurring amino acid
  misc_feature (38)..(38): Xaa can be any naturally occurring amino acid
  misc_feature (42)..(42): Xaa can be any naturally occurring amino acid
  misc_feature (55)..(55): Xaa can be any naturally occurring amino acid
  misc_feature (58)..(58): Xaa can be any naturally occurring amino acid
  misc_feature (60)..(60): Xaa can be any naturally occurring amino acid
  misc_feature (72)..(72): Xaa can be any naturally occurring amino acid
  misc_feature (107)..(107): Xaa can be any naturally occurring amino acid
SDSIVHVTDDSFEEEVXKSPDPVLVDYWADWCGPCKMXAPVXDEIADEYAGRVKXAKXNXDENPNTPPRYGXRGIPTLMLFRGGEVEATKVGAVSKSQLTAFLDSNX

SEQ ID NO: 16792 - protein, 834 aa, Bradyrhizobium sp. BTAi1
MTDMKIDRRQMLKLEAAAIAAAAAGMPSTSLAANLVTEREASELKWDKAACRFCGTGCSVMVATKDNRVVATHGDIKAEVNRGLNCVKGYFLSKIMYGHDRLTHPMLRKTNGKYDKNGEFTPVSWDEAFDIMALKFKDALKKRGPSGVGMFGSGQWTIWEGYAASKLFKAGFRTNNIDPNARHCMASAVAGMMRTFGIDEPAGCYDDIEAADAFVLWGSNMAEMHPILWTRVTDRRLSAPHVKVAVLSTFEHRSFDLADIGMVFKPQTDLYLLNAIANHIIKTGRVNKDFVQAHTVFKKGQTDIGYGLRPEHPLQKKATGAAKANDATDISFDEYAKFVSDYTLEKAAEMSGVPLNRLEALAELYADPKTKVVSFWTMGFNQHTRGVWCNNLVYNIHLLTGKIAEAGNSPFSLTGQPSACGTAREVGTFSHRLPADMVVTNKEHRTKAEHIWQLPEGTIPDKPGYHAVLQSRMLKDGLLNAYWVQVNNNLQAGPNANEETYPGFRNPDNFIVVSDAYPSVTALAADLILPTAMWVEKEGAYGNAERRTQFWHQLVSAPGEARSDLWQLMEFSKRFKIEEVWPEELIAKKPDVRGKTLFDVLYKNGQVDKFPLDQIEAGYANDESKAFGFYVHKGLFEEYAAFGRGHGHDLAPFEAYHKERGLRWPVVDGKETRWRFREGSDPYVKAGTGVQFYGFPDGKARIFALPYEPPAESPDKDYPFWLSTGRVVEHWHSGTMTRRVPELYKAFPEAVCFMHPDDAQEANLRRGDEVKVASRRGFIRARVETRGRDKPPRGLVFVPWFDESKLINKVTLDATDPISLQTDYKKCAVRIERV

SEQ ID NO: 16793 - protein, 261 aa, Medicago truncatula
MMKKMKGVSASMNPPPDVYMDHRSMMRHQSLLQDYEDLNKETEAMRRKLEAVKQKKLILSAEVRFLRQRYKYLLKHPLPKPQPNQEVLKPQKLKIKEPKIAKGRNYNRKESTLRPHAASKLNPKERVFNGRAVEDTLQKTSHVFDLNQNGRSLNKKDASFHSSAAPVLDSNHKDRVQSGKEAAKKSVTPFFDLNQISREEEELEGDNQSMWIEEQKKNAQRVVNEEQINDIKLSVCRNIGEGSSRAGKRKITWQDQVALRV

SEQ ID NO: 16794 - protein, 376 aa, Clostridium thermocellum ATCC 27405
MVITNEKEGGLKLLEFDIDMEQFAQIRVVGVGGGGNNAVNRMIDAGLRGVEFIAINTDKQALYLSKANTKIQIGDKLTKGLGAGANPEIGEKAANESRDEIAQAIKGADMVFVTAGMGGGTGTGAAPVVAEIAKEMGILTVGVVTKPFMFEGRKRMQHAERGIENLKNTVDTLVTIPNDRLLQVAEKKTSIVDAFRIADDVLRQGVQGISDLIAVPGLVNLDFADVKTIMQNTGLAHMGIGRASGDNRAEEAARQAIQSPLLETSIEGARGVLLNITGGADLGLFEVNTAAELVQKSADPDANIIFGAVIDENLKDEILITVIATGFDKVPSIRKSDKSAVADKAPSATSGEKASASQFGADELEIPTFLRRNRFK

SEQ ID NO: 16795 - protein, 327 aa, Vibrio harveyi
MSISNTVTKVEEFEYDNAQSEGISNGLEKPSNGTKTAAREEFDASSKSLDATQLYLGEIGFSPLLTAEEEVLYARRALRGDEAARKRMIESNLRLVVKISRRYSNRGLALLDLIEEGNLGLIRAVEKFDPERGFRFSTYATWWIRQTIERALMNQTRTIRLPIHVVKELNIYLRTARELSQKLDHEPTAEEIAAQLDIPVEDVSKMLRLNERISSVDTPIGGDGEKALLDIIPDANNSDPEVSTQDDDIKSSLIHWLEELNPKQKEVLARRFGLLGYEPSTLEEVGREIGLTRERVRQIQVEGLRRLREILIKQGLNMENLFNVEDD

SEQ ID NO: 16796 - protein, 271 aa, Zea mays
SDRWLDGGCIKDFAPAVVSKFGKNIVSTRTVAQAIENCHWNSDILTPLSWVGIQQFLLLWDAVRRVVLAQEVDKHIWLHTSSGQFSTKSCYKAFFIGSINFEPWKRLWKSWAPPKCKFFLWLAIRNKCRTSDRLERRGLDHPESCLLCDQSQETIQHILCTCVFARQFWHTIVLPLGFGNLSLSGDEISFADWWRKVCKRIHKSKRKGINSVIILGAWCLWIHRNKAVFNEENPSLGTIKCVFVDEMVCWIKVGAKHLENLGLEVALNMHM

SEQ ID NO: 16797 - protein, 544 aa, Triticum aestivum
MAASASASTSLFGPCALTARLGAGRPSGGPRRRVDARGRGRLSVVAVQTGPQKPSPSPSPSSPAADEAEALQNLLKREYKYGFVSDFESFSIPKGLSEATVRRISELKAEPAWMLDFRLAAYRRFLTMAEPTWSDNVYSPVDLQSLCFYSAPKTKPKLNSLDEVDPELLKTFDRLGIPLGEQKRLSNVAVDAVIDSTSIATTHREALMAKGVIFCSISEAIREYPDLIKRYIGSIVPPGDNYYAALNSAVFSDGSFCYVPKDTVCPMEISTYFRINDKETGQFERTLIVADERSTVSYLEGCTAPAYDSNQLHAAVVELVCEEGAEIKYSTVQNWYAGDEEGKGGIYNFVAKRGRCKGRGSKISWTQVETGSAITWKYPSVELVGDDTVGEFYSVALPKDYQQADTGTKMIHKGKNSRSRIISKGISAGKSRNCYRGLVQMNSGAENAYNSSQCDSLLIGDNAAANTYPTIQVGCTSGRVEHEASTSKIGEDQLFYFQQRGIDHEKAVAAMIGGFCRAVFEHLPYEFAQEVDALMNLKLEGSVG

SEQ ID NO: 16798 - protein, 411 aa, Spiroplasma kunkelii CR2-3x
MDNFDNYEQVASIKVIGIGGAGNNAVNRMIEAGVQGVEFIVANTDAQIISVSKSKNKIVLGKETSKGLGAGANPDVGRQAAIESAEEIKDALKGADMVFVAAGMGGGTGTGAAPIIAKLAREQGALTVGIITTPFSFEGRARNSYAIQGIEELRKHVDSLIIISNDRLLEVIGGVPLKDSFKEADNILRQGVQTITDLIAVPSLINLDFADIKTVMKNKGNALFGIGIGSGKDKAIEAANKAIISPLLEASIRGARDAIINVTGGNTLTLNDANDAVDIVKQAIGGEVNIIFGTAVNEHLDDEMIVTVIATGFDEEQNFTNPDNDYRASMEEYEASAPRPTRYAEVSDDNDKDVARKRPSYFTNLSENAERETANANRRINAWREHVNNNQVVEHDDDDDDDLPPFVRRSW

SEQ ID NO: 16799 - protein, 186 aa, Cicer arietinum
MAASESKESPANNPGLHTTIDEATKGYFMQQTMFRIKDPKVSLDFYSRVLGMSLLKRLDFPEMKFSLYFMGYEDTTEAPSNPVDRTVWTFAQKATIELTHNWGTESDPEFKGYHNGNSDPRGFGHIGITVDDTYKACERFQNLGVEFVKKPDDGKMKGIAFIKDPDGYWIELFDRKTIGNVTEGNA

SEQ ID NO: 16800 - protein, 480 aa, Prochlorococcus marinus str. MIT 9312
MVNENLVKDVVKEPYKYGFVTDIETEKIAKGLNEDIIRLISEKKEEPKYLLDFRLKAFKKWQKMEEPNWAELGYKEINYQDIIYYSAPKQKEKISSLDEVDPKLLETFDKLGIPLTEQKKLTNVAVDAVFDSVSIATTFREELAEHGVIFCSISEAVKNHSDLIEKYLGTVVPAGDNYFAALNSAVFSDGSFVYIPKGVTCPMDLSSYFRINSGDSGQFERTLIIAEESSSVSYLEGCTAPMFDTNTLHAAVVELIALDDAAIKYSTVQNWYAGDEKGVGGIFNFVTKRGKCLGKRSKISWSQVETGSAITWKYPSCLLLGEESVGEFYSVALTNNLQQADTGTKMIHIGPKTKSTIVSKGISAGNSINSYRGLVKMGTKAIGSRNYSQCDSMLIGDQASANTFPYIKSQQPNSEIEHEASTCRISEDQLFYLQSRGIEFEEAISMMVSGFCRDVFNQLPMEFAAEADKLLALKLEGSVG

SEQ ID NO: 16801 - protein, 523 aa, Bordetella pertussis Tohama I
MPENAQPHAVIPAADLQLSAQSPQWRVFAAAAAGAPLVARPLRVIEAAGIYVDLSMQRHSSALAQAGLALLQARDVLGARAALFAPGAQDAAHGRYPVLRAGYGAHPEEQCDIEVEIEYARMLEFVRELDRGGAYPAVLYLGGGAGQWALRLALQAFGGPAQRRQLRLVSGGDAAALHEALAGLDPRRTLVVAASRGFEPSETLDNARAAIDWLRRAGIDDVSAHLVAVTGNESAARALGVAAARVFRLPSWLQPRHELWSVGALPVALALGVDMLKALRSGAAAMDQHFLQAASAVNAPMQMALAAVANTSAMHWPTHALAVYSARLAALPACVQQLEMTLAGRAPASLPAYPVVWSPAGAPGPGAFFEWLHRAPAGAPVDFIAGLDEYPASPPAHRALLANCLAQREALLRGLPAGPGQPAAGGGRPSTLVVLRQVDPRAVGALLALYEHKAFVQAALWGAALGGADEAQACQRLAQDIARQLAVPPEAGPVDWGHDSSTAFWIDRYREQGGAGAAAGRTA

SEQ ID NO: 16802 - protein, 504 aa, Glycine max
MASDLNSGLSKKTFVFGLKVWVLMGIIVGLFIIIILVVLSICLTLRKKFRRVNGKLPLSHVISVSDEIKEIKVDQVPANNHPQNGVFTSLNDKFGDRESEKVLNQTKNGDNSSQSGSSNHLEKDANGSQSGEDSGVKSVSAYRSSSHPITAPSPLSGLPEFSHLGWGHWFTLRDLELATNRFAKDNVIGEGGYGIVYHGQLINGNPVAIKKLLNNLGQAEKEFRVEVEAIGHVRHKNLVRLLGYCIEGTHRLLVYEYVNNGNLEQWLHGAMRQHGFLTWDARIKILLGTAKALAYLHEAIEPKVVHRDIKSSNILIDEDFNAKISDFGLAKLLGAGKCHITTRVMGTFGYVAPEYANSGLLNEKSDVYSFGVLLLEAITGRDPVDYSRPAAEVNLVDWLKMMVGCRRSEGVLDPNIETRPSTSALKRALLTALRCVDPDAEKRPRMSQVVRMLESEEYPILREDRRRRRSQAGNMEVETQRENSDTDKSDNPDYKPSGRRNQRM

SEQ ID NO: 16803 - protein, 461 aa, Kineococcus radiotolerans SRS30216
MVEPTERPASREPIDFTVESLGPRTVDSPLAPRLLARRTTHHYIEETDRVLFDDTLSKVSRRDGDLEDLPSLEPTGPRKKIFFDPSKTRVGIVTCGGLCPGINNVIRGLVSELTNHYGVRRIYGFKNGYQGFIPSYGHDVVDLTPESVSDIDGEGGTILGTSRGQQDAVEVVDCLERMGISILFVIGGDGTMRGAQKISAEIKARDLKIAVVGIPKTIDNDIPFIDQSFGFQSAFSEATRSIRSAKVEARTAPNGVSIVKLMGRHSGFIACYAALAQNDADFVLIPEVPFTLAGPGGFLEKLREKVASQGHALVVAAEGAGQELFDDDGLKDASGNKKLQDVGRLLRQAITDDFAAHDLELNMRYIDPSYVIRSVPANPYDSVYCIRLAHAAVHAAMAGRTNMVVGRWRRRFVHIPIALAVSARNQVDPHGDLWWSVLEATGQPWSFGDFAPEHVSAFGGQ

SEQ ID NO: 16804 - protein, 480 aa, Geobacter metallireducens GS-15
MKEYRLFINGEWVPSSTGTMADDINPATGDVYAKVHQASRDDIEQAIASAYRARVDWGKTVPAQREAILIKAAAILEERIPEFAEVLIEEGGATFGKAMFESSFVVTLLRSAAGECRRIFGETIPSDAPGLFSMSVRRPLGVIAGISPFNFPFLLAMKKVALALAAGNTFVLKPASPTPVIGLKIAELFEAAGLPKGVLNVIPVKGSTLGNTLVEDPRIRMVTFTGSTDVGKQLAEVAGRHQKKITLEMGGKSPLIVLKDADIDYAVDAAVFGIFLHQGQVCMANSRLIVEADIYDRFCEKLTAKVKGLKMGDPHKPDTVIGPLIDAKQCAFIDSQVHDALADGARVLSGGRSEGAFYQPTIVADVTRKMRIFDEESFGPVVCVIKAANSEEALALANDSSFGLSAGLITNDLQKAFDLSLRLESGMVHINDSSIFDEPHVPFGGVKDSGVGREGGHYSMEEMTEVKWITVQMGKRQFPF

SEQ ID NO: 16805 - protein, 321 aa, Frankia sp. CcI3
MLIVGAGPAGLYGAYYAGFRGMSVALMDSLPEAGGQVTAMYPEKVIYDIAGLPAVRGRELIDALLIQANQFSPTYLLGQQAAELAHKPDAVVVTSSQGLRVRAKVVVITGGLGTFAPRPLPTGTAHLGRGLVYFVPKLDVHTGQDVIVVGGGDSAFDWALALEPIARSVTLVHRRDRFRAHMSTVERVEASSVEILTFTEVAMVHGEEWIEKVELVQTRTGDRHVRPAQAVVAALGFTADLGPLTRWNLTIDKRHIVVDPTMATGVERIFAAGDITEYPGKVRLIATGFGEAATAVNNAAPLVDPSAKIFPGHSSDDGTGG

SEQ ID NO: 16806 - protein, 227 aa, Triticum aestivum
MNDTDVSKQIQQMVRFIRQEAEEKAGEISVSAEEEFNIEKLQLVEAEKKKIRQEYERKEKQVDVRKKIEYSMQLNASRIKVLQAQDDLVNKMKEDAMKELLNISSNHHEYRNLLKELVVQGLLRLKEPAVLLRCRKEDHHNVESVMHSAKNEYASKADVHEPEILVDHTVYLPPSPSHGDEHGQICHGGVVLASRDGKIVFENTVDARLEVVFRKKLPEIRKLLVAA

SEQ ID NO: 16807 - protein, 144 aa, Zea mays
MAASTVASLSVPVTTTTFAAAAAAGGADVLIVVPRRAGAGRVWFPAAARRGGGSGRLVAVRSSGPATPPEISDKVSESIKQAEETCADDQKGDAECAAAWDEVEELSATASHARDSLKETNANDPLEKYCKDNPDSEECRIYDN

SEQ ID NO: 16808 - protein, 411 aa, Arabidopsis thaliana
MNALAATNRNFRHASRILGLDSKIERSLMIPFREIKVECTIPKDDGTLVSYIGFRVQHDNARGPMKGGIRYHPEVDPDEVNALAQLMTWKTAVADIPYGGAKGGIGCSPRDLSLSELERLTRVFTQKIHDLIGIHTDVPAPDMGTNAQTMAWILDEYSKFHGHSPAVVTGKPIDLGGSLGREAATGRGVVFATEALLAEYGKSIQGLTFVIQGFGNVGTWAAKLIHEKGGKVVAVSDITGAIRNPEGIDINALIKHKDATGSLNDFNGGDAMNSDELLIHECDVLIPCALGGVLNKENAGDVKAKFIVEAANHPTDPDADEILSKKGVIILPDIYANAGGVTVSYFEWVQNIQGFMWEEEKVNLELQKYMTRAFHNIKTMCHTHSCNLRMGAFTLGVNRVARATQLRGWEA

SEQ ID NO: 16809 - protein, 550 aa, Schizosaccharomyces pombe
MSFCLASTLPAWEVVQTHYESVGKHLVLKELFAKDSSRFEKFSFTFNGLKEEDGPILFDFSKNLITEETVELLVKLAKEANVEGLRDALFAGEHINFTEDRAVFHPALRNVSEKPMKVNGQDVMPGVRKVLRHMKEFSDAVRSGAWKGYTGKPIKSIVNVGIGGSDLAPVMVTEALKPYGQENLELHFVSNIDGTHLSEALKKCDPETTLFLIASKTFTTAETCTNAKSAKDWFLASAKDPSHVAKHFVALSTNEKEVTAFGISAQNMFEFSDWVGGRYSVWSAIGLSVALYIGYENFEAFLSGAHAMDEYFCSTPLEKNIPALAALISIWYSDFFGAQTHLVAPYDQYLHRFPAYLQQLSMESNGKAITRSGDMVNYTTGKILWGEPGTNSQHSFFQLIHQGTKLIPADFLIPIESHNPIDNNKHHRMLFSNFAAQTEALMLGKTPAEVKAEGTPDEIVPHKTFVGNRPSNSIIAKKITPASLGALIAFYEWVTFTEGAVWNINSFDQFGVELGKKLVKNVLAQLETKGDVENHYSSTNGLINLFKNGF

SEQ ID NO: 16810 - protein, 393 aa, Triticum aestivum
MGVKKPQPAPEKPKPEPQVLVPPVFDFPPLAARTRMLVPAYELMFGKLARRSLFDDYLHSGGVDAQIVLKQLGDSHADLTATMSTNGGEAHFRWQRDLKDPNTFVDFLVSTSKPTMRLSSSIYYPKYRIGAFGTFPLNMANRACPEDYGVMGLRYGSENLPIGASFVPFPSPGEVPYGAWLVGRKGNLSAGVQYKPIGGSKHPMPFTDLMNWNCAIGYGVGSSSPLSPSFNFALELVRSSQLVASFYQHHISAKVLNYRGGDETLNYIDLGLELATRVDKDKPTDDAGNSSFQVAASWQLHTDLLVKGKLGPSKSSAALAFENDHSKGTRSYGLGIRVEDFREARYQTLNRECTVLKQHEIDVDGKKRTLEFDFGPGNYDNLPTELKPIDKVL

SEQ ID NO: 16811 - protein, 346 aa, Rickettsia typhi str. Wilmington
MLGYMKKRIAIVLFNLGGPEDIEYVKPFLFNLFYDKAIINLPNPLRYVIAKIISIVRERKSQKIYSLIGRKSYLIQETEKQKLAITKKLKEILKEDFIIFISMRYSTPFAKEVICQIKEYNPSEIILLPLYPQFSSTTTGSSVKNFLQNIDIDIPIKTICCYPIEEDFIKAHVSIIKEKLYDKNFRILFSAHGLPKRIIKAGDPYSFQIKETVNKIVKELNIKDLDYKITYQSRVGPIEWLKPSTEYEIELAGKLKKDIIIVPISFVSEHVETLVELDIEYKFIADKYNIQYTRIPTLGTNKIFINSLTNILIRFINKTDTNLVMSSSSKRICPNKFTKCLCNLIN

SEQ ID NO: 16812 - protein, 845 aa, Aspergillus nidulans FGSC A4
MANPERSYLSRFFSSQFSKLPYPSQSFKDAVILVTGGNTGLGLEAARHFVRLQAATVILAVRDLKKGEQAKLSIEESTKVQGVVEVWQVDLEDVRSVQSLAAKASSLPRLDVVVANAGISTNKWALVGDMERTIQVNVLSTFLLILALLPKMQEQDIEGQIRARPRVVVVSSEGHETTAFAERKAARIFDALRDQRQANMDERYDTSKLIQLYLVRALAERLSRSDKPPVTLNAVSPGLCKTGLLRETPLVARLLTGPVMAILARNAEEGSRTLVHAAAANDGETNGKYLRDYLQRFYLAFRLISSSEQEGPTVHGTTNSSPSPCILSRYGKFYGAANESKAFLAYNNLTRCIRTLHDTKPRNKLRKNMGWQYIVAQPLKVDATICNISLAVQLCTAMRYEELDEACRSLEHLASDAEAEGEDAPLIPDPPGAVSPPTSLSGKAVLQVILLCASATLTLDIGLTVVRAPKIRLFESILCQAYYRTHGNPLPVPMQNIPESQCKTKEIQSGVARLIGWQTVFDGIPGGGPAVATAVLEATIADVVPDDKRSTIYFQLQATVLISDILANPLSSVLMAHNAWTPCFLGVGIQALATVLLIALPETLDFAKGSRPSDASIYGCKEEEPTLRGCLAKNFRSIVSDRNVAGLVFSLLILTVSAESLDFLLQYVSQRYGWSIAQSAMLLSLRAVVEFGLLLVVGSLLLFTQSSGLRNPRQRDLLIARLSLGLIVAGLLILSLSPTVAPAILVYTLGAGFQPAIMSLLASLWKASNPSNLGSLYSTVAIILAVGGVISGPLISLMYRIGLSLGHGWVGLPYFVASGLCAGIAGVLLSVKLPEQEQKPRRRET

SEQ ID NO: 16813 - protein, 463 aa, Listeria monocytogenes str. 1/2a F6854
MTKVNSFFRKKSFHNPATDKHHLNKSLGAFDLTMLGVGAVVGGGIFILPGQVASVIAGPGIIISFIIAGIACCLAALCYSEFASKLPVAGSAYTYSYHVFGEGVAWILGWSLILEYGLAVAAIASGWSSYMKSLLAGFDLHIPTAISSAYDPSAGTYFDLLAFVVVMVIGILLSFGIRESTRVNNIMVLVKIAVVVLFILVGAFYVKPNNWTPFLPFGVQGVITGASTVFFAYIGFDAVSSAAEEVKNPQKNMPIGIISSLAVCTLLYILLSAVLTGVVPYTDLVDVSAPVAFALQAINQNWIAGLLSVGAIVGMTTVVLVMSYGGTRLLFAMGRDGLLPKSFSKISKNDTPVRNTMIFATVMGLIASTVPMADLAQLINIGTLFAFAMVSIGIFFLRRNPDLNQKGFKTPFYPVVPALSFLLCVYLMINLSKTTWIAFGIWFVIGILVYTFYGRKHSALRIK

SEQ ID NO: 16814 - protein, 912 aa, Thermosynechococcus elongatus BP-1
MTLGLTPKFVKIFLFVGLMLLSTSLAVIFPLNSVEGLGSGVTKTVLDNGLTVLIKEIPTAPVVSLQVWYRVGSRHEPKGENGIAHQLEHLMFKGTQSRPVQFGQLFYALGSSSNAFTSYDMTAYHHTVRADQLEPLLILEADRLRHTLITPDALESEKRVVISELQGYENSPEYRLSRAVMAALYPKHPYGLPVGGTASDVEQLTLAAVKSFYQQYYRPDNAVVVIAGNVRAARALELVKSTFGAIPQPPEPLISPPLPPPGAVSGQRIRLREPGSAPLLQILVPIPGITHPDQAALDVLDMLLSGGRSSYFYQELMETGQASSAYSYVAALQEGGWFEMGAIASPDQSLETIEQSIGKMLQQLAERPLSLAELQRAKQQLKANFILRNRDIDAQASQLANDETLTGDYRFSDRHLAAIEKVTAADVQRVVQTYFGRDRWIVGEFIPSEFADVELSGRPAVQTTAHNLIGEPVDPQTIAAYLPQGSAQAAPAVKNNGVETFTLENGLRVLLLVDRSTPTVTLAGRIDAGTAYDLLTQPGVANLTAANLLNGTRTKTALTLAQTLEDRGISLEFSAFRDGVDVEGYALASELPTLLATLGEVLQEATFPEAEFKLSQQRYLTALGLEADDPVRWGRRVLQETLYPAHHPLHPFATPESVQAIQRQDLLNFYRAAYRPDRTILTLVGDFDPLAVRSRLKDIFGPWQPPTAPLSLTFPAVSPPPQTLFRNAVIAGKSQAITYLGTPGIDRRHPRFYAAMLMNHILGGDTLASRLGTEIRDRQGLTYGIYSFFTASRQAGPFMIQLQTAPEDTAKAIQATLQLLREARRQGFTAAELEAAKRSLSNTYLVELANVDVVARTLLANASVDLPPQELQQFSDRLQQVSLAEVNQALRELIDPERLVIVTAGPAVSFSP

SEQ ID NO: 16815 - protein, 104 aa, Rhodospirillum rubrum
  misc_feature (21)..(21): Xaa can be any naturally occurring amino acid
  misc_feature (35)..(35): Xaa can be any naturally occurring amino acid
MKQVSDASFEEDVLKADGPNXVDFWAEWCGPCRQXAPALEELATALGDKVTVAKINIDENPQTPSKYGVRGIPTLMIFKDGQVAATKIGALPKTKLFEWVEASV

SEQ ID NO: 16816 - protein, 407 aa, Pseudomonas syringae pv. phaseolicola
MRRVVITGLGIVSCLGNDKETVTANLRANRPGIRFNPEYAEMGLRSQVSGSIDLNLEELIDRKIFRFVGHAAAYAYLAMKDAITDSGLTEEQVSNVRTGLIAGSGGASTLNQMEALDTLREKGVKRVGPYRVTRTMGSTVSACLATPFKIKGVNYSISSACATSAHCIGNAVEQIQLGKQDIVFAGGGEEEHWSQSFLFDAMGALSTQYNETPEKASRAYDAKRDGFVIAGGGGMVVVEELEHALARGAKIYAEIVGYGATSDGYDMVAPSGEGAIRCMQMALGDINSGDIDYTTLIPTAPRVGDAKEMEGVREVFGAKAPAISSTKSLSGHSLGAAGVHEAIYCLLMMENNFIAGSANIDELDPVVADMPILLKTREDAKLDLVMSNSFGFGGTNATLVLKRWAGK

SEQ ID NO: 16817 - protein, 379 aa, Jungermannia leiantha
SDSGKDAGRLSAAWEMFKCQEDLVKVAKEFGIKLTMFHGRGGTVGRGGGPTHLAILSQPPDTIHGSLRVTVQGEVIEQSFGEEHLCFRTLQRFTAATLEHGMHPPRAPERKWREVMDEMAKVATEEYRNIVFKHPKFVEYFRAATPETEYGRMNIGSRPAKRKPSGGIESLRAIPWIFAWTQTRFHLPVWLGFGGAFKHVLAKSNSNVVLLREMYNEWSFFRVTIDLIEMVFAKGDSRIAALYDELLVSDELKPLGEHLRAMYAETRELLLKIAGHEDVLAGNPTLKQRLRLREPYITILNLIQASTLCKIRDQNFHITEQPTTPRAGDSSSQPTTPRAGGKHSAELVTLNRTTEYPPGLEDTLIITMKGIATGMQNTG

SEQ ID NO: 16818 - protein, 461 aa, Shigella flexneri 2a str. 301
MAINSPLNIAAQPGKTRLRKSLKLWQVVMMGLAYLTPMTVFDTFGIVSGISDGHVPASYLLALAGVLFTAISYGKLVRQFPEAGSAYTYAQKSINPHVGFMVGWSSLLDYLFLPMINVLLAKIYLSALFPEVPPWVWVVTFVAILTAANLKSVNLVANFNTLFVLVQISIMVVFIFLVVQGLHKGEGVGTVWSLQPFISENAHLIPIITGATIVCFSFLGFDAVTTLSEETPDAARVIPKAIFLTAVYGGVIFIAASFFMQLFFPDISRFKDPDAALPEIALYVGGKLFQSIFLCTTFVNTLASGLASHASVSRLLYVMGRDNVFPERVFGYVHPKWRTPALNVIMVGIVALSALFFDLVTATALINFGALVAFTFVNLSVFNHFWRRKGMNKSWKDHFHYLLMPLVGALTVGVLWVNLESTSLTLGLVWASLGGAYLWYLIRRYRKVPLYEGDRTPVSET

SEQ ID NO: 16819 - protein, 885 aa, Wolinella succinogenes
MTSEKMHQEVQFVFEKMLELLDEVASALKPQFLGLREVFTQGKLDKERVKSLLSSSPLKEQIPELVKAFSLYNMLLNIVEERHSVDSDAMGLIEGMIKELKAEGYERDDVLEVLEELRFYPVFTAHPTESRRRTFLESHHEISTDLERIFHQGDAKEAHEHLRYRLMLLWKSHLVRNEKIEVLFELDNLLYIIESSMLKSAVKVCSEVERLVEAPLKRSPIRLGSWIGGDRDGNPYVTNEVMTRVMKIQHEMIISHYIGKIERLIRELSIASDLCEPSLGLLESLERESSELENSAAKLHKNEPFRAKLILMKKKLQNRLIFVNYASDMEFVYKTPKELIEDIDLVLESLDSLSGKYLREFRNLVLLTGFHLMKLDFREHRDAIRDAISEIFSLLGYSDSDFGQLPPSKRAEILDRALSLPRLNLNALLGRVSHQSEEIISAFLRIEWAKGNISEEIIDSFIISMTQDSTDLLAVLWLAKQSGLWREGQRTRISISPLFETIEDLQKAGMIMEELAKNPHYALYLRDHQGIQEIMIGYSDSSKDGGIFTSNFSLNRAVYHLTELEEKLGIKFRLFHGRGGSVSRGGGTLESALMASPAKSVAGVLKTTEQGEVISSKYLNPLICDFNFSSTIAALLKKSVYDRFGKRIDCGKSDRFTSVMQGVSEASYKAYRRLVYETEGFMDYFKEATPIGFIQKLNIGSRPSKRKETHRVEDLRAIPWVFAWTQNRSIIPAWFGVGSGLESVALAGGEEILKECYGECPFFKTTLDNIAQALLKVDLDVASLYNEFVEDGEVRERIWGMIQEEYQKTLHWILYVRGERELLENERVLRESILLRRPYLTALNLFQIELIKKYRASSYEKQQERIIEQISSTIVGIAQGVRNTG

SEQ ID NO: 16820 - protein, 279 aa, Saccharum officinarum
DACEKWGFFEILNHGISTELMDEVEKLTKDHYKRVREQRFLEFASKTLKDAQDVKAAENLDWESTFFVRHLPESNIAEIPDLDEDYRRAMRQFTGELEALAERLLDLLCENLGLDRGYLARAFAGPRTGAPTFGTKVSSYPPCPRPDLVSGLRAHTDAGGIILLFQDDALGGLQLLKDGAWVDVPPLRHSIVVNLGDQLEVITNGRYKSVMHRVVAQPDGNRMSIASFYNPGSDAVIFPAPALVKAEEAAAGAYPRFVFEDYMKQYVRHKFEAKEPRFE

SEQ ID NO: 16821 - protein, 545 aa, Prochlorococcus marinus str. MIT 9312
MTEVSVININSPFLDQKPGTSGLRKSTLKFQQKNYLEIFIEAILQSLEDLQVSTLVVGGDGRYGNIEAIEKIVQICVAHKVQKVIVPKCGLLSTPATSHLIRKENAIGGIILSASHNPGGIDGDFGVKLNISNGGPAPEMITNKIFKASQLLTSYKICKIQLPNFTEYGAYSFGETTLEIIDGLKDYSDLMEEIFDFDQISDFLKKDFSLIFDAMNAVTGPYATNIFVEKMGLSNDCVMNGTPLKDFGGLHPDPNLTYASHLADLLLNKKSYSFGAACDGDGDRNMILGSGCFVNPSDSLAVITANTKCVPGYKDGITGVARSMPTSSAVDNVARALNIPCFETPTGWKFFGNLLDSNLITLCGEESFGTGSNHVREKDGLWAVLYWLQVLAEKNCSVSDLIQSHWKQFGRNYYSRHDYEAIPSNIANQIFGDLTSRLENLKGSNFAGHLVQVADNFSYLDPVDDSISENQGLRLILDDNSRIIVRLSGTGTKGATLRLYFEKFFNSKQNLSLNPQVALKPLIDNLDDLLNISKLTQMQTPTVIT

SEQ ID NO: 16822 - protein, 590 aa, Oryza sativa
MQALLIFAILAVLAGVVQGQQWCQPFSCGHLSNISHPFWRRGDPHRCGVSSYELECSSGKATIQINTGTYYVTSINYNDSSFWVVDANLQDANSNCPLPRSNHRPFIWGIPGPSYTRELTLQGIWWATFVNCSQAVKNNNKYIHVDCQNTSSSFVYVLNVAPYYALMENLEPSCGYLAMIPVSWTPASGKKYQYFAELMRKGFSVRFPFVLDHPTAFELIKQCLNRSIRFVLAPLALLTFLAQRYWKTRITIDAVEKFLRMQLMLGPTRYTYTDIIAMTSHFRDKLGQGGYGSVFKGVILPGDVYVAIKMLDNYNCNGEEFISEVSTIGSIHHVNVVRLVGFCAEEMRRALVYEYMPHGSLDKFIFAPEKSFSWDKLNEIALGIARGINYLHQGCDMQILHFDIKPHNILLDSNFVPKVADFGLAKLCPRDNNYVPVSAARGTVGYIAPEMISRSFGVISSKSDVYSFGMLLLEMAGGRRNSKQNMSSSTQVYYPSLVYNQLIQQEMGEITNTLNMHELERKLCVVGLHCIQVKPPDRPTMSEVIEMLEGDVDGLQLPSRPFFCDDEPLPLLVDSYRFSSELTEISEEDG

SEQ ID NO: 16823 - protein, 444 aa, Arabidopsis thaliana
MAAETSIRKLPSLSGLRHRRNPLEDNPYFHPSNGFYITPSDVILAQVAYDHSAHSQSRVAYHRAGPRREIMYEPSAVKAAIVTCGGLCPGMNTVIRELVVGLWELYGVREIYGIPAGYRGFYSMKAVKLDPKAVHDWHKKGGTVLATSRGGFHLQKIVDAIHLNGYNQVYIIGGDGTMRGAVEIFKEISLRKLEVGITVIPKTVDNDVGIIDRSFGFQTAVEMAQEAISAAHVEAESAVNGIGLVKLMGRSTGHIALHATLSSRDVDCCLIPEMDFYLEGKGGLFEFLEKRLKERGHAVLVVAEGAGQEMIPRNESQKQERDESGNAVFLDVGVWFKSVLKAWWEREHPDELFTVKYIDPTYMIRAVPANATDNLYCTLLAHSAIHGVMAGYTGFVPGPINGNYAYIPLEEVAQTKNQVNTRDHKWAWVRSVTNQPDFETNVKG

SEQ ID NO: 16824 - protein, 549 aa, Shigella flexneri 2a str. 301
MKNINPTQTAAWQALQKHFDEMKDVTIADLFAKDGDRFSKFSATFDDQMLVDYSKNRITEETLAKLQDLAKECDLAGAIKSMFSGEKINRTENRAVLHVALRNRSNTPILVDGKDVMPEVNAVLEKMKTFSEAIISGEWKGYTGKAITDVVNIGIGGSDLGPYMVTEALRPYKNHLNMHFVSNVDGTHISEVLKKVNPETTLFLVASKTFTTQETMTNAHSARDWFLKAAGDEKHVAKHFAALSTNAKAVGEFGIDTANMFEFWDWVGGRYSLWSAIGLSIVLSIGFDNFVELLSGAHAMDKHFSTTPAEKNLPVLLALIGIWYNNFFGAETEAILPYDQYMHRFAAYFQQGNMESNGKYVDRNGNVVDYQTGPIIWGEPGTNGQHAFYQLIHQGTKMVPCDFIAPAITHNPLSDHHQKLLSNFFAQTEALAFGKSREVVEQEYRDQGKDPATLDYVVPFKVFEGNRPTNSILLREITPFSLGALIALYEHKIFTQGVILNIFTFDQWGVELGKQLANRILPELKDDKEISSHDSSTNGLINRYKAWRG

SEQ ID NO: 16825 - protein, 539 aa, Arabidopsis thaliana
MAYASRIINHSKKLKDVSTLLRRENAATIRYYSNTNRAPLNREDTFNSRLGYPPLERISICSTSTLPVSIIFSTTRSNLSSAMGRPIFGKEFSCLMQSARGFSSGSDLPPHQEIGMPSLSPTMTEGNIARWLKKEGDKVAPGEVLCEVETDKATVEMECMEEGYLAKIVKAEGSKEIQVGEVIAITVEDEEDIGKFKDYTPSSTADAAPTKAEPTPAPPKEEKVKQPSSPPEPKASKPSTPPTGDRVFASPLARKLAEDNNVPLSDIEGTGPEGRIVKADIDEYLASSGKGATAKPSKSTDSKAPALDYVDIPHSQIRKVTASRLAFSKQTIPHYYLTVDTCVDKLMALRSQLNSFKEASGGKRISVNDLVVKAAALALRKVPQCNSSWTDDYIRQFKNVNINVAVQTENGLYVPVVKDADRKGLSTIGEEVRLLAQKAKESSLKPEDYEGGTFTVSNLGGPFGIKQFCAVVNPPQAAILAVGSAEKRVVPGNGPDQFNFASYMPVTLSCDHRVVDGAIGAEWLKAFKGYIENPKSMLL

SEQ ID NO: 16826 - protein, 200 aa, Nostoc punctiforme PCC 73102
MIGLTDNQIVLGKHSGRNAFRTRLKELGFELSDTELNKAFVRFKEVADKKKDISDWDLEAIVNDEIQQAPDLFRVELVQVSCGSNARPTATVTLRTPKGEELTDAAIGTGPVDAVYKAINRVVNVPNELIEFSVQSVTAGIDAIGEVTIRLRYESKVFSGHAANTDIIVASAQAYVNALNRLYASLQTQEKPEEVTAQKV

SEQ ID NO: 16827 - protein, 358 aa, Dechloromonas aromatica RCB
MKICVIPGDGIGVEICAEAVRVIDALKDIHGLKIEYEYGLLGGAAYDQTGRPLPVETLRLADEANAILLGAVGGPKWDKLPAESRPERGLLGIRKYLGLNANLRPIKVYPELANASTLRPEVVSGLDMMIVRELTGDIYFGQPRGIRTSGFERVGYNTMEYSESEIALIAEMAFRIARQRSGKVMSVDKMNVLECMQLWRDVVTKVGERFPDVTLDHMLVDNAAMQLVKNPKQFDVLLTGNMFGDILSDEAAMLTGSIGMLPSASLNVEDKGMYEPCHGSAPDIAGQGVANPLGMILSAAMMFRYSLGRPDMADAIESAVQTVLTNGARTRDIFQAGDRLVSTSEMGGLVEAALRRIS

SEQ ID NO: 16828 - protein, 282 aa, Zea mays
MSAVVCGKRSSSIFADELLPPSPTSPHSSHQPAPKRSRRSPSHRGSSDGHRREALVHHLLLLFPDMDPQLLEKALEASGDDLDSAIKSLNLLRLESAEAILSSTGFKPENGQHTAIQPPVEGIPNGGVDTTTEHHPTVDNYQTSKNGSEWVELFVREMTNASDIDDARARASRALEALEKSIVERAGAEATQNLHKENMMLKEQLTVVLRENAVLKRAVAIQHERQKEFDERSHEVQSLKQLVLQYQEQVRTLEINNYALTMHLKQAQQSSSIPGRFNPDVF

SEQ ID NO: 16829 - protein, 97 aa, Triticum aestivum
  misc_feature (80)..(80): Xaa can be any naturally occurring amino acid
KALHQYDCLRANKATSAWGLEVRVPFLDKEFIDVAMSMDPEWKLYDADLGRIEKWVLRKAFDDEKEPYLPRHILYRQKEXFNDGVGYNWIRRLKRFY

SEQ ID NO: 16830 - protein, 498 aa, Arabidopsis thaliana
MSGAITCSAADLATLLGPNATAAADYICGQLGTVNNKFTDAAFAIDNTYLLFSAYLVFAMQLGFAMLCAGSVRAKNTMNIMLTNVLDAAAGGLFYYLFGYAFAFGGSSEGFIGRHNFALRDFPTPTADYSFFLYQWAFAIAAAGITSGSIAERTQFVAYLIYSSFLTGFVYPVVSHWFWSPDGWASPFRSADDRLFSTGAIDFAGSGVVHMVGGIAGLWGALIEGPRRGRFEKGGRAIALRGHSASLVVLGTFLLWFGWYGFNPGSFTKILVPYNSGSNYGQWSGIGRTAVNTTLSGCTAALTTLFGKRLLSGHWNVTDVCNGLLGGFAAITAGCSVVEPWAAIVCGFMASVVLIGCNKLAELVQYDDPLEAAQLHGGCGAWGLIFVGLFAKEKYLNEVYGATPGRPYGLFMGGGGKLLGAQLVQILVIVGWVSATMGTLFFILKRLNLLRISEQHEMQGMDMTRHGGFAYIYHDNDDESHRVDPGSPFPRSATPPRV

SEQ ID NO: 16831 - protein, 364 aa, Cryptococcus neoformans var. neoformans B-3501A
MSLWSNIWLWIRYQVNVIIHCGFPCFFWVQPTWSIDKIENQEGKVVLITGGNSGTGYATALALYNAGATVYIACRNLTRAKEAAEDIKKGGERGIWGVTYPSKELDKAGGNKKGRVEIIQLDLTDLASVEKCAEEFLNKEKKLDLLFANAGIMATPEGQYTKQGYTLQLGTNTLGHHRLITLLLPLLLSSPPSLPSRVILTSSAGHSMAPKGGVNIKSVVRDPSDTGSGQGKYELDKWTEYAQSKWGNIASAKYLEDTYGKEGRLIAVAVHPGLVATNLTNHLPFVGIFYRWVPWLRHLFTRDPSTGALNQLYAATLPLPDAWFLNGEYVVPYNTVGICRSDLLDKKRIEEVWNWCDEQGKKFA

SEQ ID NO: 16832 - protein, 259 aa, Vibrio angustum S14
MLANWTNTHPISLICIDKWQETDDTVSIKLATKNTTITFDFKPGQFVNLGVMINGKKEFRAYSISSIPHVSYLQLTIKRVDGGAVSNFIIDHLGIGDALDILTPTGDFNCVDHPPKNKKAVLISAGCGITPVYSMAKTWLTHDSKFDVTFIHAAKSPQQTIFFNQLEQLADKYPLFSLQLLLKDKQESNYAQGRLNKEWLLNLAPDLLERSVYLCGPNQFMEDVKSYLIELGFDMTQFNSESFTPNQNNETATKQDNDI

SEQ ID NO: 16833 - protein, 124 aa, Zea mays
MAVVSRKTSTMVAAVAVVVALLLASASSASAAITCGQVGTALAPCIPYATGRASALPSSCCSGVRSLNGQARSSSDRQAACRCLKSLANSVKSVNMGTVATIPGKCGVSVPFPISMSTDCNKVS

SEQ ID NO: 16834 - protein, 484 aa, Rhizobium sp. NGR234
MKLKDKELFRQAGVIGGEWIGAASGDVVEVFDPASQAVLGTVPDMGTAETRAAIEAAETAFGPWKKKTHAERAALLERWHALMIEHLEDLALILTLEQGKPLDEARGEIRYGAAFVKWFAEEARRIGGHTIPSPTPDRRIVVLKEAVGVCAIVTPWNFPNAMITRKVAPALAAGCTVVIKPSEFTPFSALALGVLAERAGIPAGVVNIVTGMPTAIGNEIMANETVRKISFTGSTRVGSLLMRGAADSVKRLSLELGGNAPFIVFDDADLDLAVEGAIASKFRNGGQTCVCANRILVQSGVYDAFAEKLAARVNAMKVGPGTEPGVAIGPMINAAAIDKIDRHVEDALAKGAKIAARGRSLPVGRQYTAPLVLTGATTEMLLASEETFGPVAPLFCFETEEEAITIANGTPFGLAAYFYTENLKRSWRVAEALEFGMVGLNTGAISTEVAPFGGVKQSGLGREGAQVGIEEYLELKSFHIGGLA

SEQ ID NO: 16835 - protein, 347 aa, Rhizobium sp. NGR234
MKSYSIALIPGDGIGQDVTDAAWQVLSTVARHSGFTLTATPFPWSCAFYKETGAMMPPDGIETLRRFDAILLGAVGWPAEVPDSVSLHGLLLPIRKAFVQYANIRPHRLLSGVKGPLKAEGFDILCIRENTEGEYSGAGGRVHQGTADEVAVETSIFTRTGVERILRFGFDQARQRRRKLASVTKSNAQKYSMVLWDEITRELAAEYPDVEVTSYHIDAMAARMVMAPESLDVVVASNLFGDILTDLGAAIQGGLGFAASANINPDRSAPSMFEPVHGSAPDIAHLGIANPIAAIWSGAMMLDHLGQARAARKVIEALERTTARGIGTVPGKNRTETITAAVLAALD

SEQ ID NO: 16836 - protein, 978 aa, Synechococcus sp. WH 7805
MTLLDQRTAASKTVQPISPFVRRHIGPEPQAVDQMLQALGFADLDAFIQAVVPGDILDPEPPCADLPEGVDEAPALAELRTIASCNQLSRSLIGLGYFETVTPALIQRQVLENPSWYTAYTPYQAEIAQGRLEALLNFQTLISELTGLPIANASLLDEATAAAEAMSMSFGVCKREGANRFLVDAAVLPQTLAVLRTRCEPIGVQLDVAEPEAFRWGDDVFGVLLQLPGRCGRLWDPRACIERAHTHGALVTVSVDPLAQVLLEPVGALGADIAVGSAQRFGVPMGGGGPHAAFFATRDAYRRQVPGRLVGQSRDAEGRPALRLALQTREQHIRRDKATSNICTAQVLLAVMASFYAIHHGPEGLETIANRIVMLRSRLELGLAALGFPVPGGVRFDSVDVHCPQAPLVHRLAAREGYNLRVLPDGVPADEAHGFGISLDELSDEAEIQSLLSICAEVVQTVPPVSSQPSSPAEVMAGVPLRQRPWLQQSVFHRYRSETELMRYIQRLVSKDLSLVHGMIPLGSCTMKLNAAAELAPVSWREFAAVHPFAPVAQQEGFQALIRDLERWLAALTGFAGVSLQPNAGSQGEYAGLLVIRAWHRSRGEAQRDVCLIPTSAHGTNPASAVMAGLRVVAVACDEEGNVDVGDLRSKAREHADVLAALMVTYPSTHGVFETRIREICSLVHEHGGQVYLDGANLNAQVGLCRPGAFGADVCHLNLHKTFCIPHGGGGPGVGPIGVAAHLQPFLPGHPLMPCGGNQPISSVSAAAWGSAGILPISWMYLRMMGAEGLRTATAVALLSANYLAHRLHAHYPVLFRGEGGLVAHECILDLRGLKRSAGLEVDDLAKRLMDYGFHAPTVSWPVAGTVMVEPTESESLEELDRFCDAMIAIREEVSRIESGESDRDNNPLKRSPHTLAAVTDDHWERPYSRQEAAFPLPGQQQNKFWPAVARIDNAFGDRNLICTCPSVAELAESLPVR

SEQ ID NO: 16837 - protein, 120 aa, Triticum aestivum
MAAPRGAAVMLAVVLAAMVVAPPATVHAISCSTVYSTLMPCLQYVQQGGSPARGCCTGIQNLLAEANNSPDRRTICGCLKNVANGASGGPYITRAAALPSKCNVALPYKISPSVDCNSIH

SEQ ID NO: 16838 - protein, 305 aa, Nicotiana tabacum
MGLDYYDVLKVSRNASEEDLKRSYKRLAMKWHPDKNSQNKKEAEAKFKQISEAYDVLSDPQKRQIYDVYGDDALKSGQFASASPTSAGSNGRGFRFNTRDAEAIFAEFFGGSDSNSAAGVGRKAAPVENKLPCSLEELYKGSRRKMKISRILLDDSGKPTTVEEVLAIHIKPGWKKGTKITFPEKGNYEPGATPGDLIFVIDEKPHAVFKRDGNDLVINQKISLLDALTGKTISLITLDGRELTIPITDVVKPGHEHIIPNEGMPISKERGKKGNLKIKFDIKFPSRLSADQKSDIRRVLCRNSD

SEQ ID NO: 16839 - protein, 300 aa, Brassica rapa
MAAGLSTTVTFNPLHRSFSSSSSVRLHHPRSLTGLPSSLRFRGFSVCYVVEEQRQSSPVDNDERPERTNVIDPELLALRLAEKLERKKSERFTYLIAAVMSSFGITSMAVMAVYYRFSWQMEGGVIPMSEMFGTFALSVGAAVGMEFWARWAHRALWHASLWNMHESHHKPREGPFELNDVFAIINAVPAIGLLSYGFFNKGLVPGLCFGAGLGITVFGIAYMFVHDGLVHKRFPVGPIADVPYLRKVAAAHQLHHTDKFDGVPYGLFLGPKELEEVGGDEELDKEISRRIKLYKKSSSS

SEQ ID NO: 16840 - protein, 118 aa, Glycine max
  misc_feature (102)..(102): Xaa can be any naturally occurring amino acid
WPECNDGLSYDDVVRASDAGATLIEFYSTKYKSSAPLQGWLQRIKSGQITVDGGVVTDSNTVLRVGSKLIYHRLPWKEPDAPHMIDVLYEDDDMIALNKPSXLQVLPGGLYQQRTILT

SEQ ID NO: 16841 - protein, 445 aa, marine gamma proteobacterium HTCC2207
MYIFDQSNTQDWTLGGASRWWLHHALQSLDKSLDGKLNIFSGDALAILSELSASMSAKAVYWNRCYEPQSIERDANIKTRLKEAGLDVQSFNGSLLWEPWQVLKKDGTPYKVFTPYYRRGCLQKVAPRQPLPVPKTLDLVKADNSLTVEDLSLLPAIDWDKKLHGDWDISEDGAKDRLDDFVFNGIQDYREGRNFPNKKNVSRLSPYFHFGQMSVNTAWYAANDAAALIDNESNLDTFLSELGWREFSYYLLYHFPKLPTDNLQQRFNVFPWAKNTDAELKAWQKGKTGYPLVDAGMRELYGTGYMHNRVRMVVGSFMVKNLLIHWHSGERWFWDCLVDADLAANSASWQWIAGCGADAAPFFRIFNPITQSEKFDKQGDYIRRHVPELAEMPAKYIHAPWLAPADVLAAAGVEIGTDYPAPIIDIKESRERALAAFKMTKNDVL

SEQ ID NO: 16842 - protein, 829 aa, Vibrio sp. Ex25
MKMTRRAFVKANAAASAAAVAGVTLPASAANLIASSDQTKITWDKAPCRFCGTGCSVLVGTQNGKVVATQGDPEAPVNKGLNCIKGYFLSKIMYGQDRLTQPMLRMKDGKFHKDGEFTPISWDDAFDIMAEKWKASLEKKGPTSVGMFGSGQWTVMEGYAASKLMKAGFRSNNIDPNARHCMASAVVGFMRAFGIDEPMGCYDDFENADAFVLWGSNMAEMHPVLWTRITDRRLSHPHVKVNVLSTYYHRSFELADHGYIFNPQSDLAIANFIANYIIENDAVNWDFVNKHTNFTQADTDIGYGLRDDDPLQKAAKNPNSGKLTSISFEEYKKSVAPYTAEKASEISGVEKEKLIELAKQYANPNTKVMSLWTMGMNQHTRGVWMNNLVYNIHLLTGKISTPGNSPFSLTGQPSACGTAREVGTFAHRLPADMVVANPKHRKIAEDIWKLPEGTIPPKPGFHAVLQDRMLNDGVLNCYWVQCNNNMQAGPNINTERLPGYRNPENFIVVSDPYPTATAQAADLILPTAMWIEKEGAYGNAERRTQAWYQQVGTVGQAKSDLWQLMEFSKRFKMEEVWPEELLAKAPQYRGKTMYDVLYRNGNVDKFPIEEARELNDDAHHFGFYVQKGLFEEYATFGRGHGHDLAPYDRYHEVRGLRWPVVDGKETQWRFKEGSDPYAKEGSGWDFYGNADGKAKIISAPYEAPPEVPNDEFDMWLCTGRVLEHWHTGTMTRRVPELYKAVPDAVCYMHPEDAKARNVRRGEEVLMANKRGEVRVRVETRGRNRPPKGLVFVPFFDARILINKLILDATDPLSKQTDFKKCPVKITKIA

SEQ ID NO: 16843 - protein, 711 aa, Oryza sativa
MEAAALSTVLYVLALVVADADHHVVRVQGRRHQCQPFSCGHLQNVSYPFRRRGDPRSRRCGFRSYELDCSSDDGKATIRINTGKYYVSSINYTASIFWVVDANLQDDANSSCPLPRSDQLPYVGLGIPGSHDSWDLGLDDMITWVGFVNCSQELITNSSSKYLYVYHPVDCLTTALSFVYYMLPFFGSLVPSVEDIEPSCGYLAMTPIGGGWNSVNLPEYTSYAEVVKSMRGGFAVKFPTPWLNWFGLIKKCLNKSVSHRTMSTNGGLEHLDSLFAANSLLPIPPTSPPFAGTRRTSSAVQLPRDLLCLGQSYMAGLVVRRGQGPSAAWRRGEGPPLVAGGGGDVDRAGDDGGGEGDGQATKSTMDGVRRLRMAKVCVRTVGRDDFSYSQGQGGYGSVYKGVFLPGDVHVAIKMLDGNSNCNGEDFISEVATIGRIHHINVVRLVGFCSEEMRRALVYEYMPRGSLNKYIFSSERSFSWDKLNEIALGIARGINYLHQGCEMQILHFDIKPDNILLDDNFVSKVADFGLAKLYPREKSFVSDRALRGTVGYMAPEMVSRSFGVISDKSDVYSFGMLLLEMAGGRRNADPNANSNASRAYYPAWVYDQLIADQQVDEISNVADMHELERKLCLVGLWCIQMKSHDRPTMSEAIEMLEGDVDALQVPLRPFFCDGDGIGNGMPPPQVMDSYFHSSELTAISEEDDGIAELASS

SEQ ID NO: 16844 - protein, 355 aa, Gibberella zeae PH-1
MSRANPPNAAGSRKISFNVSEQYDIQDVVGEGAYGVVCSAIHKPSGQKVAIKKITPFDHSMFCLRTLREMKLLRYFNHENIISILDIQKPRSYESFQEVYLIQELMETDMHRVIRTQDLSDDHCQYFIYQTLRALKAMHSANVLHRDLKPSNLLLNANCDLKVCDFGLARSAASQEDNSGFMTEYVATRWYRAPEIMLTFKEYTKAIDVWSVGCILAEMLSGKPLFPGKDYHHQLTLILDVLGTPTMEDYYGIKSRRAREYIRSLPFKKKVPFRTLFPKTSDLALDLLEKLLAFNPVKRITVEEALKHPYLEPYHDPEDEPTAPPIPEEFFDFDKHKDNLSKEQLKQLIYQEIMR

SEQ ID NO: 16845 - protein, 268 aa, Azoarcus sp. EbN1
MNDDILYRQKGHVVTLTMNQPEQRNPLTGNRIVEGFLDAIDRIQQDQSVRAVIVTGAGSAFSCGGNIKEMERQASGEIGGMDIRQGYRSGIQRLPLALFTLEVPVIAAINGSAIGAGLDVACMCDIRIASTQAKFAESFVKLGLIPGDGGAWLLPRVVGLSRAAELTFTGRTIDAEQALAWDLVSRVVPADELLTAAHELAAQIAANPPHAVRLAKRLMREALHTRLDTLLEMSAAFQVLAHQAPDHKEAVAAFLEKRAPVFGMAKED

SEQ ID NO: 16846 - protein, 180 aa, Arabidopsis thaliana
MASSMLSSATMVASPAQATMVAPFNGLKSSAAFPATRKANNDITSITSNGGRVNCMQVWPPIGKKKFETLSYLPDLTDSELAKEVDYLIRNKWIPCVEFELEHGFVYREHGNSPRYYDGRYWTMWKLPLFGCTDSAQVLKEVEECKKEYPNAFIRIIGFDNTRQVQCISFIAYKPPSFTG

SEQ ID NO: 16847 - protein, 135 aa, Oryza sativa
SVQCERNPWAPRLLAISCLTLAAKMQRAAAISAADIQRGEEFMFDEAKIQRMEQMVLNALEWRTRSVTPLAFLGFFLSACFPQPRHPALLDAIKARAVDLLLRVQPGTSKPPPRPMPPSSPLDSARTVALGVALV

SEQ ID NO: 16848 - protein, 397 aa, Propionibacterium acnes KPA171202
MAKAKFERTKPHCNIGTIGHIDHGKTTLTAAISKVLHDKYPELNEESPFDQIDKAPEERQRGITISIAHIEYQTEKRHYAHVDCPGHADYVKNMITGAAQMDGAILVVAATDGPMPQTREHVLLARQVGVPAIVVALNKCDMVDDEELIELVEMEVRELLTSQEFDGDNCPVVRISAFQALQGDEKWTQSILDLMDAVDEYIPQPERDLDKPFLMPIEDVFTITGRGTVVTGRVERGVVKTGEEVEIVGIHEKTQKTTVTGVEMFRKILDEGRAGENVGVLLRGTKKEDVVRGMVLSKPGSTTPHTDFEGQVYVLKKDEGGRHKPFFSHYSPQFYFRTTDVTGTVELPEGTEMVMPGDNTDMTVHLIHPVAMEDQLKFAIREGGRTVGAGRVTKIIK

SEQ ID NO: 16849 - protein, 473 aa, Pseudomonas syringae pv. tomato str. DC3000
MSSSSTTAAADTQGRQNASPNRLIFISVLVATMGALAFGYDTGIIAGALPFMTLPADQGGLGLNAYSEGMITASLIVGAAFGSLASGYISDRFGRRLTLRLLSVLFIAGALGTAIAPSIPFMVAARFLLGIAVGGGSATVPVFIAEIAGPSRRARLVSRNELMIVSGQLLAYVLSAVMAALLHTPGIWRYMLAIAMVPGVLLLIGTFFVPPSPRWLASKGRFDEAQDVLEQLRSNKDDAQREVDEMKAQDEQARNRPKAKELLRQRWVIKLLLIGIGLGFTAQLTGVNAFMYYTPIILKNTGMGTNAALTATIGNGVVSVIATLLGIWAIGRYGRRHLLMTGLVMVILMQAALGCVLQFMPQNLTQSYTALACILVFLLFMQMCISPVYWLLMSELFPMQVRGLLTGTAVSMQWLFNASVAFTFPIAVDTIGNPTFFIFAAINVGSLIFVFLCLPETKGKSLEQIEKHLKKEL

SEQ ID NO: 16850 - protein, 233 aa, Oryza sativa
  misc_feature (85)..(85): Xaa can be any naturally occurring amino acid
  misc_feature (108)..(108): Xaa can be any naturally occurring amino acid
MDAGDAWGRSSSSSSSAAAAARRLQARYDLYMGFDDADAAGVEEVEARGGGEAYNCPFCGEDFDFVAFCCHVDDEHAVEAKSGAXVRKISSGSHSLLSLLRKDLRDGXLPVAEPSKDLHSDSSDNNFLLNKFPDDKTAERAEPSLSEKDQKERAQRSKFVRGLVLSTIFEDDNFAATPPHAWTHRLRLDLLLPYARRRHGRRRCHRCNDDEDDLYDDGEDMRWESMFQDLKPT

SEQ ID NO: 16851 - protein, 304 aa, Brucella melitensis 16M
MCWHKFARYWDVEIREIPMEPGRLFMGPEQMLEAVDENTIGVVPTFGVTYTGNYEFPEPLQDALDKLQKTKGLDIDIHVDAASGGFLAPFCAPDIPWDFRLPRVKSISASGHKYGLAPLGCGWVVWRDKEALPEELIFNVDYLGGQVGTFAINFSRPAGQVISQYYEFMRLGREGYTKVQQAAYRVAQYIAREIEPLGPYEFICAGEEKGGIPAVCFRIREGEDPGYSLYDLSERLRLTGWQVPAFALSGKASDITVMRVMCRRGFEMDLAALFIRDFKAGIEFFKSHPSPKITPSMGTGFHHT

SEQ ID NO: 16852 - protein, 167 aa, Brucella melitensis 16M
MKITLEVIMTGSNYPARDLIASVFGTEALQEIAASRGFREKEMQANAVYQIIHDELFLDGNARQNLATFCQTWDDDYVHKLMDLSINKNWIDKEEYPQSAAIDLRCVNMVADLWNAPKFADNATGTNTIGSSEACMLGGMAMKWRWRKKMQEMGKPTDKPNFVCGPV

SEQ ID NO: 16853 - protein, 213 aa, Arabidopsis thaliana
MNSFSAFSEMFGSDYEPQGGDYCPTLATSCPKKPAGRKKFRETRHPIYRGVRQRNSGKWVSEVREPNKKTRIWLGTFQTAEMAARAHDVAALALRGRSACLNFADSAWRLRIPESTCAKDIQKAAAEAALAFQDETCDTTTTDHGLDMEETMVEAIYTPEQSEGAFYMDEETMFGMPTLLDNMAEGMLLPPPSVQWNHNYDGEGDGDVSLWSY

SEQ ID NO: 16854 - protein, 315 aa, Oceanobacillus iheyensis HTE831
MSEEKMYDVIIAGAGPAGMTAAVYASRANLDTLMLERGIPGGQMANTEDVENYPGFDNILGPDLSNKMFEHAKKFGAAYAYGDIKEVEDHGEYKLIKAGSKEYYTRSLIIATGAQYKKLGIEGEEALSGRGVSYCAVCDGAFFKNRNLVVIGGGDSAVEEGIYLTRFANKVTIVHRRDNLRAQKIIQDRAFDNEKIDFIWDTVAETINGTDGKVSSVTLKNTKTNEVNNFDAEGVFIYIGMVPLNQAFLSLGITNDEGYIATNENMETSIPGIFAAGDIRDKELRQIVTATGDGSIAAEAAIKYVEDLEEKIKSK

SEQ ID NO: 16855 - protein, 103 aa, Triticum aestivum
  misc_feature (52)..(52): Xaa can be any naturally occurring amino acid
  misc_feature (68)..(68): Xaa can be any naturally occurring amino acid
VHKRAVFDVHPAALARLFLIDWYRERINGKQEDMIGYSDSRLDSARLSPTWXMYNGSEDLVKVALSIXVKLTMIHGRGGTVGRGGGPTHAAISPQPHDTSNGS

SEQ ID NO: 16856 - protein, 345 aa, Marinomonas mediterranea
MRGFFVTATNSAVEMLIANSNTFFILLGAIMVFAMHAGFAFLEVGTVRSKNQVNALVKIMTDFAISALVYFFIGYQIAYGINFFESAATLAEQSGYALVKFFFLMTFAAAIPAIISGGVAERARFYPMLISAAVIVGVAYPFLEGLIWNGNYGFQDWLETQFGAPFHDFAGSIVVHGFGGWVALAAIILLGTRNGRFRGDKLVAFAPSNIPFLALGAWILCIGWFGFNVMSAQTLDGISGLVAVNSLMAMVGGIIAAMILGKNDPGFIHNGPLAGLVAVCAGSDIMHPIGALATGLVAGALFTWLFTLIQQKFQHIDDVLGVWPLHGICGAWGGIAAGIFGLESL

SEQ ID NO: 16857 - protein, 379 aa, Acidobacteria bacterium Ellin345
MGHQSFIIVGAGPSGTAAAYDLAKAGHSVLLLDRSEFPRVKPCGGGLTVKTLKALRYSVTPVVRIVAKGLQVTNNLAEPIELRGKHPICFMTVRAEFDDFCLRQTLEAGARFQKISEITGVEEFPDHVVLRTRDGEFHAEYLLGADGANSKVRLLLGAQPWFRRAIAVEAHAPVHKNAKAMEIDFGVVPRGYAWSFHKGDHLNVGLCTESAEVVKLSRDLLANYLKRKFGSDEYSHFVGHYLGIGGMRYEPKHKRIFLVGDAAGMTDPLSGEGIYNAIKSGQAAASALLQNSEAPHVSYAQALADVRDDLEFCERAIGKFYGHLNAGFAMLKVPGMKKSILKGYAMGLTLSEIRGSIHKLPFASVDDTHTAEYSNHAEA

SEQ ID NO: 16858 - protein, 402 aa, Bacillus cereus ATCC 10987
MLSEKTIEIVKSTVPLLQEKGVEITTRFYEILFSEHPELLNIFNHTNQKKGRQQQALANAVYAAATYIDNLEVIIPVVKQIGHKHRSLGIKAEHYPIVGTCLLRAIKEVAGAPDEVLNAWGEAYGVIADAFISIEAEMYEEAAHKEGGWKDFRNFVVVKKVKESDVITSFYLKPEDGGKVSSFIPGQYVTVQINIEGETYTHNRQYSLSDAPGKEYYRISVKKEKGVDTPDGKVSNYLHDHVKEGDMLPVSAPAGDFVLNMDSTLPVVLISGGVGITPMMSMLNTLIEQDSKRNVCFVHAALNSNTHAMKEHVEALDNEYEQVKAYTCYSAPTEKDLEMKNFDKEGLIEAEWLQTIIPTTEAEFYFCGPVAFMKHINATLTDLGVKQEHIHYEFFGPAASLQ

SEQ ID NO: 16859 - protein, 185 aa, Arabidopsis thaliana
MISCGEDTSQGLCELPDLGSLQSGQQLLDKAFYECEQDLMMKSAMESPFSDVLDIKNISVVTTINENQDMQKSVSSGNLSSMDWSHAQQETVMIQNFPDFDFGYGMRRAFSEGDIQKLGAGLVQSPLDRIIVSCTSEDRREKLSRYKNKKSRRNFGRKIKYACRKALADSQPRVRGRFAKTEERK

SEQ ID NO: 16860 - protein, 372 aa, Triticum aestivum
  misc_feature (304)..(304): Xaa can be any naturally occurring amino acid
  misc_feature (320)..(320): Xaa can be any naturally occurring amino acid
  misc_feature (324)..(324): Xaa can be any naturally occurring amino acid
  misc_feature (327)..(327): Xaa can be any naturally occurring amino acid
  misc_feature (332)..(333): Xaa can be any naturally occurring amino acid
FSSLPRPPTPKNPQPDPEKVREKEEGRDREKVREKDGSRDREKVREKEREGRDKLMERDNGRERRSRSRSERRRGEEEEMVRELQRERERSDRHRDYRDRDFRRKKDDGTEPEVDPERDQRTVFAFQLSLKADERDVYEFFSRAGKVRDVRLIMDRNSRRSKGVGYIEFYDVMSVPMAIALTGQPLLGQAVMVKPSEAEKNLAQSNATSGGAASGGARKLYVGNLHSNITEDQLRQVFEPFGQVELVQLPVDPLTGLCKGFGFIQFARLEDAKAAQEFKWPTLILLGRVIKVSAVTDQGGVQLXAQLLGILDDDEGGGFXLNAXPKXFRSGXXRNGRNNLTGGIGAPDHLDAPANAGAPETLLCKPLNTSHR

SEQ ID NO: 16861 - protein, 151 aa, Lemna gibba
MAEMRDEPTSSATPSAPRRWARASRPADTARGQARPRRIRCGAAGRRIRCGQQAGGYGAGQQAGGYGAGQQAGQQELRRSGSSSSSSSEDDGMGGRRKKKGIMEKIKDKMPGQKSEQHHHEPGYAHQRPTHVEPEKKGIMEKIKEKLPGHN

SEQ ID NO: 16862 - protein, 173 aa, Lemna gibba
MMVSTAAVARVRPAQTNMVGAFNGCRSSVAFPATRKANNDLSTLPSSGGRVSCMQVWPPEGLKKFETLSYLPPLSVEDLAKEVDYLLRNDWVPCIEFSKEGFVYRENNASPGYYDGRYWTMWKLPMFGCTDASQVIAEVEEAKKAYPEYFVRIIGFDNKRQVQCISFIAYKPT

SEQ ID NO: 16863 - protein, 403 aa, Arabidopsis thaliana
MATTISNLPRELIEEILSRVPLRAMKAMRLTCKSWNNLSKSESFMKMHIGKAATREEKTMMVAVMPHTLALVSVVVDGVNPSTELKGQFSFLDKEFFIYRVIHYEGLLLCILKDATRIVVWNPYLGQERWIQIRYSHRPHGVDHFKYAVGYADKVSCRSVKLLRFLDYFHKASDKPFFWYEIYDFDSCLWTTLDITPHWGISWTYPRVSLKGNTYWPAREMNTKGFQDHIICFDFTSERFGPLLPLPRAQGCHVSLSCVKEEKLAVLLKHRLHHDSYEYEFEIWITTKIDVEMVSWSKFLRMDMRPKIKLPLSFYVDEEKKVFMGFDHGEYPKLFLNIIGETGFLRKLDLGVHEGHRSPCSYVPSLVQIKHPAGDKMIKQSSLEDRRFAQNSLRLAAIEKLIN

SEQ ID NO: 16864 - protein, 1423 aa, Ashbya gossypii ATCC 10895
MAFLKRLNVSSHSRSSSGSSGRTPQNTSGGSKATAVKPLPQIPVEMGGIESEVIKNGEGGQSVVILCDDVGSGSYTSVLLSPSDPHMFSADGQRLSVEEQAEKTLYSWDVTDPEQWTMQRVMSWFKAHDFDEQWILFFKRNHISGKKFLQLLAHDNFNKYESFLSATKNSSYNRFQHLLKRTLEENVSNSHRRQRSNKSNDSKGSADCSLRYRRRRSVASEQRTLTAAEGVTPRKTVEVADDRAGSSKNHRKAKSASVLYRRSFISLRSSSSSNIKNDVDDDCKTLPAMKISIPPRPFSSIERSTSSSPASTLKSQSSPLSPGNHNMFRKDHKSSSSDSSLFNNLFGSADEITKAVGGTAPQGEQIAVKKYNDTLPSPMRVSPRHIDDKSTIWDKLKKRALPSTEQYTPSRIKQLTSGRNSSYIQTLQESPDECSANNEDPPATATLEAPIIDDLVLEEKHYPSQKQDSSAQYVLVTKDNRIFLPLNIAPYKTTQELKDGMTAFLGISSKAYTIHLTDLGCDPGVSLSDDVIAAIGQRKLNTRHLKFYVKDATRMHLRLKNDSFTSDHNITTEMSRSKGSLRSAASSFISSNDDTNSFSDITSIDEHGNITGRRVYPQTPSHYYDQSAATHSPEVDYWNIKERLSEGTSPMNISLLRSTTKAASLPSSIDEIKKSSFKVIRKASVTDIDFNKGRESPYIRPKLAPKREAPRPPRTSSQVSLASSSSIQSSLVEQKSISNSPTKPQRQHAGTYVKNKTRPPPPPSIGSTMTVDTKVMTSVSDSPVSNEPPNRPYGPFSTQKLVPQGFKGVGVHPGTRKVEEQMHTNPVTQYIQKQRSRNSISKMGNNPSLYSPPRLKKRISTRRMVSSTSAADIFDENEISFADAPDLSDYDSENSESSDDIIWSTTNTTSLDASKISVSDSTTGDDSNFSVASSVELQSSIKNDAKTSEDSIVDSIKEEGDSVCNLVGRKMTLRPTTEVVYQNLEMFFPGTDLDKPILEGLTPPASPDSEANKMPDQDLTPLSKVSTISSESSMRQSTPRLLITKKSDSPQPMPVRNLKPPKRTKTIRSIAREASEARKKSLYNNLKRQNTKMWGTRVVEVTDKRMVSINKSKNSKGEYREFAWIKGEMIGKGSFGAVYLGLNVTTGEMMAVKQVEVPKFGSQDETTVNNAEALISEVSTLKDLDHLNIVQYLGFENKNCIYSLFLEYVAGGSVGSLIRLYGHFDEQLIRFLTTQVLEGLAYLHLRGILHRDMKADNLLLDNDGVCKISDFGISRKSNNIYSNSEMTMRGTVFWMAPEMVDTTQGYSAKVDIWSLGCVVLEMFAGKRPWSNLEVVAAMFQIGKSKSAPPIPEDTLPHISQDGRAFLDDCFMIDPEERPTADTLLSHPFCQVPKEFNFRDTDLYNFIKQNDKLNNSKLTRNSQR

SEQ ID NO: 16865 - protein, 116 aa, Brassica napus
MAAPKLATLALAVLLAATVVAPPAAVRAAMSCSTVYSTLMPCLPFVQMGGAMPPQPCCGGIRSLLQQANNTPDRRTICGCLKNVANGANGSGTYISRAAALLSKCGVALPYKISTN

SEQ ID NO: 16866 - protein, 462 aa, Zymomonas mobilis
MAIELKMPALSPTMEEGTLTRWLVKEGDSIKAGEILAEIETDKAIMEFEAVDEGVITKILIPEGSENVKVGTAIAYLGTDANDVTLDGASAETKAEESAPVASPAKTEAAAVEEAATPSLGKVINSAPEIPEGTEFFQQTLREALRDAMAEEMRRDDRVFVMGEEVAEYQGAYKVTQGLLQEFGARRVVDTPISEYGFSGIGVGAAMEGLRPVIEFMTMNFSMQAIDHIINLRPKRIICPAAKCRCPIVFRGPNGAAPPVGEQHTQNFGPWYAAVPGLVVLAPYDAIDAKGLLKAAIRSDDPVVFLECELLYGKTFDVPKMDDFVLPIGKARIIREGKDVTIVSYSIGVSFALTAAEALAKEGIDAEVIDLRTLRPLDKETILQSLAKTNRIVTVEDGWPVCSISSEIAAIAMEEGFDNLDAPVLRVTNADTPTPYAENLEKKGLVNPEAIIEAVRKVCYRK

SEQ ID NO: 16867 - protein, 550 aa, Arabidopsis thaliana
MADVMEQNLLQTAVLNRTSFHFQPQRNWLNDPNAPMYYKGFYHLFYQNNPLAPEFSRTRIIWGHSVSQDMVNWIQLEPALVPSESFDINSCWSGSATILPDGRPVILYTGLDVNNKQQVTVVAEPKDVSDPLLREWVKPKYNPVMVPPSNVPFNCFRDPTEAWKGQDGKWRVLIGAKEKDTEKGMAILYRSDDFVQWTKYPVPLLESEGTGMWECPDFFPVSITGKEGVDTSVNNASVRHVLKASFGGNDCYVIGKYSSETEDFSADYEFTNTSADLRYDHGTFYASKAFFDSVKNRRINWGWVIETDSKEDDFKKGWAGLMTLPREIWMDTSGKKLMQWPIEEINNLRTKSVSLDDCYEFKTGSTFEISGITAAQADVEVTFNLPFLENNPEILDADQVDDATLFDRDSSVGCVYGPFGLLALASSDLSEQTAIFFKVIRRGNGYAVVMCSSEKRSSLRDNIKKSSHGAFLDIDPRHEKISLRCLIDHSIIESYGVGGKTVITSRVYPKLAIGEAAKLYVFNDGENGVIMTSLEAWSMRNAQINSNPTY

SEQ ID NO: 16868 - protein, 511 aa, Clostridium thermocellum ATCC 27405
MRRIRIFDTTLRDGEQTPGVNLNIQEKVDIAKQLARLGVDVIEPGFPLTSPGDFEAVQRIAREVEGPYICGFSRAIIRDIDETWKAIKDAQKKCFHIFISSSDIQIKHQLGKTEKDVLEIVKSTVYHAKQYTDEVEYSPMDASRTRLEFLYEVIEAAIDNGATVINIPDTVGYATPIEFGELIQKIRKNVRNIDKAIISVHCHNDLGMAVANSIVAAMNGAQQIECTINGVGERAGNAALEEVVTHIAARKDYLGFETGIDLSQLYKTSKIVSRYMGIPIPVNKPIVGKNVFTHESGIHQDGVLKERSTYEVIDPRLVGRDDSVILLGKHSGRHALKVEAEKLGYDLDEERLNKLFNDFKKLTDVKKNVTTADLESLIIESAAKAVEEAYVLEKIRVVSGNIETPSAKVVIKDSKGNLLEAEQTGNGPVDAVFKAINSVIKETENLTLYKYSVSAVTEEMESLGEVSVTLREKEKLYTGIGTHTDIITSSAIAYIDAINKAIAANARAQKN

SEQ ID NO: 16869 - protein, 101 aa, Bartonella henselae str. Houston-1
MIARIYSPAKTAMQSGRGNTGFWILQYEPIKAKMLEPLMGYTATSDMNNQVKIRFNKKEEAVAFARKNAIPYRVEKMHKPIRRVVSYSDNFRSDRQQSWTH

SEQ ID NO: 16870 - protein, 162 aa, Triticum aestivum
  misc_feature (10)..(10): Xaa can be any naturally occurring amino acid
VPASRKNFSXYLGAGYSCAVVPGGLREMRYMDHESDSEVAFIRSRKGFVRIAIQTGCPLVPVFCFGQDRVYNWWRPGSNLLVKIAGLLKAPAIVFWGKFGTFIPFRLPMHVFVGRPIEVTKNNQPTMDEINEVHEKFVMALQELFNKHKYKVGCPNLQLQVI

SEQ ID NO: 16871 - protein, 838 aa, Nocardioides sp. JS614
MSPKHRRTLLVAGHGMVGHRFVQAAIERGLTETHDIVVVGEERRPAYDRVALTSFFEVGADELSFLPSGEYDDPRVRLLLGTSVDGFDPATRTVVLSDGQEIAYDELVLATGAMPFVPPVPGHDLEGCFVYRTIEDLEAIRAAAATAEVGAVVGGGLLGLEAANALAQLGLVTHVVEMAPRLMAVQVDEAGGATLARHIERLGLTVHTGATTQRILGADRVEGLALAGEEPIPADLVVFSAGIRPRDQLARDAGLDVAERGGVLVDERCRTSDPHVWAIGECAAPGGRMYGLVAPGYAMAEVVVDALLGGSGAFTGADLSTKLKLLGVDVASFGDAFAATEGALELVYADAVTGVYKKLVLSADGRQLLGGILVGDASAYGVLRPMVASGIALPDNPEDLILPTGRGVLEIGLPDEAQVCSCNDVTKGDILAAAAAGTSTRAGATCGSCKAQTKRIIEDYYASQGKVVDRSLCEHFALTRQELFDVVAVHGYTRFDDIVAGHGRGRGCDICKPAIASILASQLNGHVLDGPNRTLQDTNDAYLANIQRNGTYSVVPRIPGGEITPEKLIVIGEVAQEFGLYTKITGGQRIDLFGARMEQLPAIWRRLVDSGFESGHAYGKSLRTVKSCVGSTWCRYGVQDSVQLAIDLELRYRGLRSPHKLKGGVSGCARECAEARAKDFGVIATEKGWNLYVGGNGGATPAHARLLAGDLDRETLVRYLDRFLMYYVRTADRLQRTASWIDSIDGGLDRVREIVVDDALGLGSELEAAMARHVAGYFDEWRATLDDPAKLARFVSFVNAPGTPDPHITFRSERDQAVPEESSGPVDLGATIPVGAPR

SEQ ID NO: 16872 - protein, 363 aa, Neisseria meningitidis Z2491
MSHISPIPEILADIKVGKMVIITDAEDRENEGDLLMAAQFVTPEAINFMIKHARGLVCLPMDGEMVEKLGLPMMTQKNGAQYGTNFTVSIEAAHGITTGISAADRALTIQTAVSPTAKPEDIVQPGHIFPLRAQKGGVLVRAGHTEAGVDLAQMNGLIPAAVICEIINDDGTMARMPELMKFAEEHKLKIGTITDLIEYRSRTESLLEDMGNAPVQTPWGEFQQHVYVDKLSGETHLALVKGTPSADTETLVRVHEPFSVMDFIQANPRHSWSLPKALERVQQAESGVVILLHRTEDGASLLDRTLPKGANQAYKWDSKSYGIGAQILAGLNVKKLRVLGQPSSFTGLTGFGLEVVGFEEAEK

SEQ ID NO: 16873 - protein, 460 aa, Nocardioides sp. JS614
MRVVVVGAGMAAARLADGLHDHDVTLLGDEPHPPYNRILLSAVLEGTHDPTAIAMPLRGDVDLRLGTRVVEIHREDRDVELADRSRVPYDRLVLATGSIPTLPPIRGLVRMDGRLDERVHAFRSLEDCRRLDVAVPAAHRAVVVGGGLLGLQVARALAVRGVATEVVEGGDHLLRSQVGPRAGAILARDLGRLGTRVYTGARAVRLTDEGLRLDNGYTLATDLVVLTAGGRPSTALARRAGLEVRRGIVVDERLRTSDHRIHAIGDCAQHGTQVTGFVPPAWEQAGLLARQLRGEDVTYAGSRSVARLRATGLEVAVLGEPERAEGQVVEVANPVTGTHRKLVVRDGVIVAATLVGDLSRIGLITQHYDRGTVLGASEPGDLLIGDRPAAQVDLPDDAEVCACAGVSAGAIRACASLADARETTRATTGCGGCAAAVRQLLAARLSPGPSLGTTLEGTPR

SEQ ID NO: 16874 - protein, 331 aa, Shigella flexneri 2a str. 301
MTIKVGINGFGRIGRIVFRAAQKRSDIEIVAINDLLDADYMAYMLKYDSTHGRFDGTVEVKDGHLIVNGKKIRVTAERDPANLKWDEVGVDVVAEATGLFLTDETARKHITAGAKKVVMTGPSKDNTPMFVKGANFDKYAGQDIVSNASCTTNCLAPLAKVINDNFGIIEGLMTTVHATTATQKTVDGPSHKDWRGGRGASQNIIPSSTGAAKAVGKVLPELNGKLTGMAFRVPTPNVSVVDLTVRLEKAATYEQIKAAVKAAAEGEMKGVLGYTEDDVVSTDFNGEVCTSVFDAKAGIALNDNFVKLVSWYDNETGYSNKVLDLIAHISK

SEQ ID NO: 16875 - protein, 343 aa, Burkholderia mallei ATCC 23344
MAFNVTLKQSGRQFQVEADETVLAAALRQNVHLPYGCKNGACGSCKGTIVQGQFEQGPHSASALSNDERTRGLALLCCSKPQSDLEVDVREIAGVDGVQVKKLPCRVAALERRADDVIVLKLQLPANERLQYLAGQYIEFILKDGARRSYSMATAPHEEGPIELHIRHMPGGKFTDHVFGPMKERDILRFEGPLGTFFLREDSDKPIVLLASGTGFAPIKAIIEHAHHVKLERPMTLYWGARRKKDLYLLDAAEQWAKEIPNFKFVPVLSEPDASDAWTGRTGFVHRAVIEDLPDLSGHQVYACGAPVMVESAQRDFTQHHRLPADEFYADSFTSAADLAHTV

SEQ ID NO: 16876 - protein, 260 aa, Xanthomonas campestris pv. vesicatoria str. 85-10
MSNHVILIADHASVRTITVNRPDKLNALNRQTMQALDQAFQDAANADDIRAVILTGAGPKAFVAGADIAEMSDLSAIQGREFSLLGQQLMRRIERMPKPVIAMINGFALGGGLELAMACHLRIAAATARLGQPEINLGLIPGFGGTQRLLRLTGRAAALELSLLGLPIDAARALQLGLVNRVVEADALHEETLALAQRLATAAPLALRGILDAVVFGGECAIEEGLQLETAQFALLFATDDMREGTRAFLDKRPAQFHNR

SEQ ID NO: 16877 - protein, 396 aa, uncultured marine alpha proteobacterium HOT2C01
MAKEKFDRSKPHCNVGTIGHVDHGKTTLTAAITKVLSESGGAEFTAYDAIDKAPEEKERGITISTAHVEYTTDARHYAHVDCPGHADYVKNMITGAAQMDGAILVVNAADGPMPQTREHILLARQVGVPAIVVYLNKVDQVDDAELLELVEVEIRDILNEYEFPGDTTPIVKGSALAAVESRDDEIGKNSIVELMKAVDDHIPQPERDKDKPFLMPIEDVFSISGRGTVCTGRVESGIVKVGEELEIVGIKETQKTTCTGVEMFRKLLDTGEAGDNIGALLRGIERDQVERGQVLAHVGSITPHTKFKCEAYVLKKEEGGRHTPFFTNYRPQFYFRTTDVTGVCKLPDGTEMVMPGDNIAMEIELIAPIAMDKGVRFAIREGGRTVGSGVVTEIIS

SEQ ID NO: 16878 - protein, 853 aa, Mycobacterium tuberculosis H37Rv
MPTAGSSRAPAAAREIVVVGHGMVGHRLVEAVRARDADGSLRITVLAEEGDAAYDRVGLTSYTESWDRALLALPGNDYAGDQRVRLLLNTRVTQIDRATKSVVTAAGQRHRYDTLVLATGSYAFVPPVPGHDLPACHVYRTFDDLDAIRAGAQRTLDGGHTDGGVVIGGGLLGLEAANALRQFGLQTHVVEMMPRLMAQQIDEAGGALLARMIADLGIAVHVGTGTESIESVKHSDGSVWARVRLSDGEVIDAGVVIFAAGIRPRDELARAAGLAIGDRGGVLTDLSCRTSDPDIYAVGEVAAIDGRCYGLVGPGYTSAEVVADRLLDGSAEFPEADLSTKLKLLGVDVASFGDAMGATENCLEVVINDAVKRTYAKLVLSDDATTLLGGVLVGDASSYGVLRPMVGAELPGDPLALIAPAGSGAGAGALGVGALPDSAQICSCNNVTKGELKCAIADGCGDVPALKSCTAAGTSCGSCVPLLKQLLEAEGVEQSKALCEHFSQSRAELFEIITATEVRTFSGLLDRFGRGKGCDICKPVVASILASTGSDHILDGEQASLQDSNDHFLANIQKNGSYSVVPRVPGGDIKPEHLILIGQIAQDFGLYTKITGGQRIDLFGARVDQLPLIWQRLVDGGMESGHAYGKAVRTVKSCVGSDWCRYGQQDSVQLAIDLELRYRGLRAPHKIKLGVSGCARECAEARGKDVGVIATEKGWNLYVAGNGGMTPKHAQLLASDLDKETLIRYIDRFLIYYIRTADRLQRTAPWVESLGLDHVREVVCEDSLGLAEEFEAAMQRHVANYKCEWKGVLEDPDKLSRFVSFVNAPDAVDSTVTFTERAGRKVPVSIGIPRVRS

SEQ ID NO: 16879 - protein, 409 aa, Methylomonas methanica
MNKPKKVAILTAGGLAPCLNSAIGSLIERYTEIDPSIEIICYRGGYKGLLLGDSYPVTAEVRKKAGVLQRFGGSVIGNSRVKLTNVKDCVKRGLVKEGEDPQKVAADQLVKDGVDILHTIGGDDTNTAAADLAAFLARNNYGLTVIGLPKTVDNDVFPIKQSLGAWTAAEQGARYFMNVVAENNANPRMLIVHEVMGRNCGWLTAATAQEYRKLLDRAEWLPELGLTRESYEVHAVFVPEMAIDLEAEAKRLREVMDKVDCVNIFVSEGAGVEAIVAEMQAKGQEVPRDAFGHIKLDAVNPGKWFGEQFAQMIGAEKTLVQKSGYFARASASNVDDMRLIKSCADLAVECAFRRESGVIGHDEDNGNVLRAIEFPRIKGGKPFNIDTDWFNSMLSEIGQPKGGKVEVSH

SEQ ID NO: 16880 - protein, 288 aa, Oryza sativa
MVGGGGGGEAAMSPPSGGGKRGRDPEEDVYVDNLHSHKRYLSEIMASSLNGLSVGDSLVDNIMESPARSENTSYFRDEIISQYSPMSEDSDDYRCYDTQLPNGSQTDAMVSPSTSPMSSPHRFQKPQSGLLSANPYPLPSCSLSSVVCSNPRRGSENEGRFPSSPNDMCHGGDLRKTALLRSVQMRVQGPHAYELSFCGRQEQEHAHDHEDEHQHEHLEGLEGAERSSSHRETISDGVSYQMPENSYGRPEHDIDYIEDCTPHGCLSDLKFKQEDKDCSKLTSMDKNR

SEQ ID NO: 16881 - protein, 471 aa, Mycoplasma mycoides subsp. mycoides SC str. PG1
MYKFKALLDGKLFDNNRILEIINPVDFSVAGQVVSLTKQDINDAFIAAKSSQKAWENTDLEKRISILDKWKQLIDQNKEELAQIIMSETAKPYKDCLTEVIRSVEYIDQTFYEVRNLKTLIIDGAKYGAKNKIGTFMRVAKGVGVAISPFNYPINLAVSKIFPCLVTGNTIVFKPATQGSLIGAKLGELAYQANLPKGIFNVVTGRGREIGDDIITNKLADFISFTGSVEVGKRLLEISSTKDVVLELGGKDPAIVLDDLDLEKYAKEIISGAFSYSGQRCTAIKRVITTDKIADQLVPLLKEKINKLTVGLPKDNCDITPLIDQKTADFVYGLIDDAKKKGAKIIIGDKQEKNLIYPTLVDHVTSDMRLAWEEPFGPVLPIIRTNSVDQMIELANKSNFGLQASVYTKNLDQALTIAQKLEVGTVNINGKSQRGPDVFPFLGVKDSGFGVQGIVDTLLFLTRYKGIVINN

SEQ ID NO: 16882 - protein, 354 aa, Oryza sativa (japonica cultivar-group)
MPLAAAVAASAVVPPRPPPPPPRRARPLRSFTGLILTRDLAALTVARCAPSPPAPAAEAEAEAVAVDEAPPAKPRPRRYPRQYPGEAVGVAEEMRFVAMRLRNPKRTTLKMDDTGAEEEVGDGVSEDASASEEEEEEEDDDDVVEEEEEGAGLEGEWMPSMEGFVKYLVDSKLVFDTVERIVAESTDVAYVYFRKSGLERSARITKDLEWFGGQGIAVPEPSTAGSTYATYLTELAESNAPAFLSHYYNIYFAHTTGGVAIGNKISKKILEGRELEFYKWDSDVELLLKDTREKLNELSKLVSPELQLSICRRRLPHKRGDEMVSRLMIGPRHVGLALLPIAMAMAAEAWGLGP

SEQ ID NO: 16883 - protein, 363 aa, Shewanella sp. MR-4
MLTLIIIVLVAVGVSFLCSVFEAVLLSVTPSYIASLEQTDSAAAARLRKLKENIEAPLVSILTLNTIAHTVGAAVAGAQAAKVFGDDMLGVFSGVLTFIILFFSEIIPKSVGANHWRRLAPSVSIAITWMKRVTKPLIWMSQQVTRLLGKGEEGQYIRQEMSAMAKIGHESGELDEQESKILTQMLKVRDVPVTAIMTPRTVMFSLPVSLTQNEFVQEYRDKPFTRIPVYDQDHDDIIGYITRTDVLLAERYSPNAPIGELKRSLFVVPETAKILPLFERMIKRNTQIAMVVDEYGSSQGIVTQEDIIESLLGLEIVDVNDPATDMQQLARKLWTKRMKQKGIRLSDDGDFEAAAEDDEARSG

SEQ ID NO: 16884 - protein, 159 aa, Brassica napus
LFSPSSLTLSHSDPGKSSWRCNDNLIVIRFPISSNEDMDLFCGECSSGESTAEFSSEEVESWPDDSIASCIEDERHFVPGLDYLSRFHSQSLDASAREESVTWILQVQAFYSFQPLTAYLAVNYMDRFLYARRLPETSGWPMQLLAVACLSLAAKMEEV

SEQ ID NO: 16885 - protein, 591 aa, Brassica napus
MPTWWVRKSSKNKDDSHLLQTQTRSVSDKSIRRISADNSKSSPDPVTPSRCTPRCSREFAGASGFSDEKKCHPLPLPSLSNDQVNGSVSGSGSVSSVSSSGSGEDQSQPTAPRKSNAAAASPKAGARPTSPLHNRFSGMTLESSSTGRNDDGRSSEYHPLPLPPGSPTSPSVVLPCSPTSPSSGVQGSWVVGGSEKEISKWKKGRFIGSGTFGKVYQGFNSEEGRICAIKEVKVISDDKNSKECLKQLNQEINVLSQLCHPNIVQYYGSELSEETLSVYLEFVSGGSIYKLLTEYGAFTEPVIQNYTRQILYGLAYLHGRNTVHRDIKGANILVDPNGEIKLADFGMAKHVTAYSTMLSFTGSPYWMAPEVVMHKNGYTLAVDVWSVGCTILEMATAKPPWSQFEGVAAIFKIGNSKDMPEIPDHLSNDAKNFIRLCLQRNPTVRPTAAQLLEHPFLRVHSPRVANTSMHKDVPPRPYDGSSSMPTREPPYSGRHPVFHPIKSPSRENVRAITSLPVSPCSSPLRQLGPAYKSCFLSPPHPSYAFPVQESGYNHQAEFAASPFRFKKDTSLIEPSSYRAQAPSSPFRSRLV

SEQ ID NO: 16886 - protein, 460 aa, Streptococcus mutans UA159
MKNRDYAFGFHDDVKPLYSTGKGLTEEVVRDISEIKNEPQWMLDYRLRCLELFYKLPMPKWGPDLSGINFNDVIYYQKLSGQPSRSWDDVPDDIKKTFERLGIPNAERQFLSGAVAQYESEVVYHNMKEEFEKMGIIFTDTDTALQEYPDLVKKYFASVVSPAEHKFAALNGAVWSGGTFIYVPKGVQCQIPVQTYFRINGENAGQFERSLMIIEEGASIQYIEGCTAPTYSTNSLHAATVEIIVKRDASFRYTTIQNWSDNVYNLVTERGTVEENGTLEWIDGNLGSKVNMKYPCSILNGRQARTSVLSMSFANYGQHLDAGCKVYHNAPRTSSTLISKSVAKDGGKTDYRGSVTFGKNSAGSKSHIECDTILMDGESSSDTIPFNEIHNSDVSLEHEAKVSKVSEEQLYYIMSRGISEEEATAMIINGFMDPITKELPMEYAVELNALINMSMEGSVG

SEQ ID NO: 16887 - protein, 358 aa, Rhizobium sp. NGR234
MMREYSIATIPADGIGPEVIAAGRTVLATLEKRLGDVKFTVENFDWGSDYYRKHGVMMPSDGLEQLKKFDAIYFGAVGAPDVPDHITLWGLRLPICQGFDQYANVRPTKILPGITSPLRNCGPGDLDWVIVRENSEGEYSGHGGRAHRGLPEEVGTEVAIFTRVGVTRIMRYAFKLAQSRPRKLLTVVTKSNAQRHGMVMWDEIAAEVAEEFPDVTWDKMLVDAMTVRMTLKPQSLDTIVATNLHADILSDLAGALAGSLGVAPTANIDPERRFPSMFEPIHGSAFDITGKGIANPVATFWTAAQMLDHLGEQDASARLMRAVERVTGARILTPDVGGTATTREVTEAVCDAIHSSNV

SEQ ID NO: 16888 - protein, 851 aa, Arabidopsis thaliana
MRGLPNFYHSYTFFFFFLLILFPAYSISANTLSASESLTISSNNTIVSPGNVFELGFFKPGLDSRWYLGIWYKAISKRTYVWVANRDTPLSSSIGTLKISDSNLVVLDQSDTPVWSTNLTGGDVRSPLVAELLDNGNFVLRDSKNSAPDGVLWQSFDFPTDTLLPEMKLGWDAKTGFNRFIRSWKSPDDPSSGDFSFKLETEGFPEIFLWNRESRMYRSGPWNGIRFSGVPEMQPFEYMVFNFTTSKEEVTYSFRITKSDVYSRLSISSSGLLQRFTWIETAQNWNQFWYAPKDQCDEYKECGVYGYCDSNTSPVCNCIKGFKPRNPQVWGLRDGSDGCVRKTLLSCGGGDGFVRLKKMKLPDTTTASVDRGIGVKECEQKCLRDCNCTAFANTDIRGSGSGCVTWTGELFDIRNYAKGGQDLYVRLAATDLEDKRNRSAKIIGSSIGVSVLLLLSFIIFFLWKRKQKRSILIETPIVDHQLRSRDLLMNEVVISSRRHISRENNTDDLELPLMEFEEVAMATNNFSNANKLGQGGFGIVYKGKLLDGQEMAVKRLSKTSVQGTDEFKNEVKLIARLQHINLVRLLACCVDAGEKMLIYEYLENLSLDSHLFDKSRNSKLNWQMRFDIINGIARGLLYLHQDSRFRIIHRDLKASNILLDKYMTPKISDFGMARIFGRDETEANTRKVVGTYGYMSPEYAMDGIFSMKSDVFSFGVLLLEIISSKRNKGFYNSDRDLNLLGCVWRNWKEGKGLEIIDPIITDSLSSTFRQHEILRCIQIGLLCVQERAEDRPTMSLVILMLGSESTTIPQPKAPGYCLERSLLDTDSSSSKQRDDESWTVNQITVSVLDAR

SEQ ID NO: 16889 - protein, 222 aa, marine gamma proteobacterium HTCC2207
MTDFLIAPSILSANFARLGEEVDAVLEAGADVVHFDVMDNHYVPNLTIGPMVCKALRDHGVTAPIDVHLMVQPVDDLIRMFADAGATYITFHPEASNHVDRSLQLVRDLGCKAGLVLNPATSLETVRWVMDRMDMLLLMSVNPGFGGQKFIPATLDKLAEARKLIDSSGHDIRLEIDGGVTVNNIREIAAAGADTFVAGSAIYGADDYTDVIAKMRSELAKA

SEQ ID NO: 16890 - protein, 95 aa, Brassica napus
  misc_feature (37)..(37): Xaa can be any naturally occurring amino acid
  misc_feature (50)..(50): Xaa can be any naturally occurring amino acid
TGKLQHYFQNLDSAKKSGFGEDMDSLTFPKGLSGEPXRLNLNLKGQAGWXLDFRFKAYARFLTFKEPNWPANGYLPIDLTNMCYFSAPKRKPPFN

SEQ ID NO: 16891 - protein, 427 aa, Pyrobaculum aerophilum str. IM2
MAHISGVYINSAFLENTLYTIKRGIELSGLPVEFYEIITKPKRIHIVYIPVKMDSGRIEVFEGYRVQHNDALGPFKGGIRFHPEVTLADDVALAILMTLKNSLAGLPYGGAKGAVRVDPKRLSQRELEELSRGYARAIAPLIGDLVDIPAPDVGTNSQIMAWMVDEYSKIAGRNAPAVFTSKPPELWGNPVREYATGFGVAVVAREMAKRLWDGIEGKTVAVQGLGNVGRWTAYWLAKLGAKVVAVSDINGVAYKKEGLNVDIIANNRGLGGPALLEAFVSKDGAQYVKDPDAILAVDVDIFIPAAIENVIRSDNAGRVKARLVVEGANGPTTPEAERVLYQRGVVVVPDILANAGGVIMSYLEWVENLQWLSWDEEETRKRLEAIMVNNVARVYQRWQKEKWTMRDAAIVTALERIYKAMKLRGWI

SEQ ID NO: 16892 - protein, 217 aa, Wolbachia endosymbiont of Drosophila simulans
MSKIEEFRSFMHEINVDAFMLHTKDEYLNEYSEELTKLCGFTGTNGLLIVTKDNKCPFFTDGRYITQARNQLDRGNFQVYNIQEEDPREWIKANLTSTASLGYYLQYFTIEDIRKYENICKLIPCLAGKKSDYRKQAVVLHSIEHAGESSKDKCEKVAKSIDKEAEAVLLTDPNSISWLLNLRNENAKYTPCILGRAILYKSGNVDLFIQDKEHSTI

SEQ ID NO: 16893 - protein, 1362 aa, Ustilago maydis 521
MNPSYTERRASAHPTMSSSAHHASSTPSAASIDPTTSHAISSGIPITSPAALSYFAAHPRRQQVHFGNYLLLQTLGEGEFGKVKLGVHKEWGEEVAVKLIKRDKVANDAAPLHLDDSAQKDPAKMSKVEREIQVLKDVRHPNIVRLYEVIESDRYIGIVLEYASGGELFDHILAHKYLKEEHACRLFAQLISGVSYLHHKKIVHRDLKLENLLLDRNRNVIITDFGFANNFEHKRNDLMATSCGSPCYAAPELVVQDGLYAGSAVDVWSCGVILYAMLAGYLPFDDDPANPDGDNINLLYKYILATPLSFPEYITAQPRDLLSKMLVPDPTRRATLEQVMQHSWLRHYRELFKFSVDDLERAAMEQQTKKRQMYRQQMMYQQQLQEQQRRQQMERSQSVRHNVSHLPVGTAYTANTAVSAVSAANVAHRQTLPISATVPDRLYEPIGSASRGADHSVTPQRAPTASSHQPPVAPTASADAAIAPLPRASTHNNVAAAADAAAAVAAAPSPVDPVTALGNARGEPRTRLDDAVPTIAAAYETEPRQLAAQKVQRHTIQLEYGGDERPRKESAPGSRQASQTQRNASASSTSSKLAEIERTKTAADKPAANANAIVPPSVLQSTSVQVPATSVVVPESEKANISKAGAPDMMRSVSASAASRVSVPPPIMEQTQPSVSAHRSTQPTSSSRVRAPSSASRNNADSGSTGHATRIPTSASQRVVSTSSAASEPVGFPSSATERTIPSADADAAAGRISASRRASNGAEITEPSHRSPSATRHATADNAPVTSASASARHRKGMSTDKFFLSRLLGSNSANQPNGAGVAGDKVSANGSDAAGDKTKRDSMNRPAPERAPSSSSTGKNGRRKAMSLVVGHASGEASSAAADRNRALKAGMPHSATRATFGTQVSGKADDSVSSAQKQRKGSASLASQTTSTSRAAQSSTRPQPLQPSLQQQQQQQDKAFNDGSTIASSSTAGPSSNAAKKVMDWFRKKSLSRGTFNEQPPLGLFERSPTSSYMHGSASQTPSVIVTSAPNGTSRHAEAPSGGSSVPSSRSTSGTHSENSEATEMTQLTNLSDASHQEGDGLKSSASTVQQQATPKASLSAVSNVSDASAAGSLVSTRSQQQQRPQPRVATATSASTTPARFNEARLRYHLGAVDQSALTSRSPIEVLKEVQRVLYEMGIDVRTEKDEDFKLECVRRKRAKTLMSATHGFGMSIRSSVFPPTQADVERSSRMSHRDSLTPSASSPGGGSLRSFLKRSSLQPGATSPKMGSSTLPSSATVTSNLGGAVHDENQPPPLYGDASVDGGQEIRFSVEVTRIKNLTGLYSLDIRRMKGNLWAYKFVYQALLDRCQLGSSTAAVG

SEQ ID NO: 16894 - protein, 356 aa, Gracilaria tenuistipitata var. liui
MFEFNIIIVTILKDKVRPVFPFTAIVGQEEMKLALLLNVIDPKIGGVMIMGDRGTGKSTTIRAIADLLPKIEVVQDDLFNSHPSDYDLMSDSVKSQIESSNHLPTRFIDVPMVDLPLGATEDRVCGTIDIEKALSEGVKTFEPGLLAKANRGILYVDEVNLLDDHLVDILLDAAASGWNTVEREGISVRHPARFVLVGSGNPEEGELRPQLLDRFGMHAEIRTVKEPSLRVQIVEQRSKFDSDPYICLEEFRDKQDELKLSIIAAQKRLPDVKIDYDLRVKISEVCGTLDVDGLRGDIVTNRAAKAFAAYKNKTKVEINDIKTVITLCLRHRLRKDPLETIDSGYKVQQVVNSILN

SEQ ID NO: 16895 - protein, 676 aa, Kluyveromyces lactis NRRL Y-1140
MALGRYSALLFMVPRIFALPIFKRSVLSVLQKEAPPAEDEATFTTFLVISMILVLLGGIFAGLTLGLMGQDEVYLKVMQTSGTASEKYHANRVLSLLNRGKHWVLVTLLLSNVITNETLPIVLDRCLGGGWQAVVMSTVLIVIFGEIIPQSVCVRFGLQVGSLFSPFVLFLMYAMYPIAYPIALLLDWLLGEDHGTIYKKSGLKTLVHLHRTMGMERLTLDEVTIISAVLDLKEKKVSEIMTPIDAVFTLSADKILDEKTVEDIFNSGFSRIPIYLPGQPTNYIGMLLVRVLISYDPDDCLPVSHFPLATLPETAPQTSCLNILNYFQEGKSHMCVVSRDPGSSSGAIGLVTLEDVIEELIGEEIVDESDVFVDIHQRIMRDQPGPLSKRHITSYLHSLYTRKPSETQPLVNENAESSEASGKNETTNYLSVGATNFQPANPAANPLDIKKPFVTIKRQSYGGMSRTPPRLSSEPISPATSVIETTSPIRREPDAISPVGSAPTTDEKRKYVSHHNHRHRSNSSRRSNSAMVQQQQPRPTSNKSNDKLITTIPAQNDKDHQTVISSSYKSTRNGIVESIITVKGVSKTIIEPASDWDDSKKVTINETENIAEEHNESSSIDSNTTNTHAHPRSPSSRRGSRFSLWSSKSSQNDQDSNAKQLSKSQESFNLESRSKD

SEQ ID NO: 16896 - protein, 254 aa, Bifidobacterium longum DJO10A
MALIVQKYGGSSVADTESIKRVAKRVVETEKKGNKVAVVVSAMGDTTDDLIDQALSIDSNPPEREMDMLMTAGERISMSLLAMAIHAEGSRAHSFTGQQAGFFTDARYGAAHIKAVRPDRVKNALSLGDIAIVAGFQGINAKGDATTLGRGGSDTSAVALAVALGADICEIYTDVDGIFTADPRIVPSARRIPSIDYESILEMASCGSKVLALRCVEYAQRFNMPLHVRSSFSRRPGTLVVPDGIDPRTLPNLD

SEQ ID NO: 16897 - protein, 378 aa, Burkholderia mallei ATCC 23344
MTLASTPDIIAELKAGRMVILVDEEDRENEGDLVLAAEFVTPEAINFMARYGRGLICLTLTQERCKQLNLPLMTYRNGTQYGTAFTVSIEAAEGVTTGISAADRARTIATAVAHDVRPEHIVQPGHVFPIMAQPGGVLVRAGHTEAGCDLTALAGLTPAAVICEIIKDDGTMARLPDLLEFGKEHGLKIGTIADLIHYRSRTESIVERVAERTMQTAHGPFKTVLYRDHPTGSPHIALVRGTPTPNDETPVRVHEPLSVLDLLETGVSTHSWTLDAAMKEIAARELGVIVLLNCGDTKEHLVDVFLAFDEKEKAAELKRRPVDFKTFGIGAQILRDVGVGRMQVLSNPRKLGSMSGYGLEVTGFAPMPGSAAPASGAA

SEQ ID NO: 16898 - protein, 957 aa, Pseudomonas fluorescens PfO-1
MSQLPSLSQLRDPHAFLRRHLGPDAAEQQAMLDSLGLGSRVELIEQTVPPGIRLNRELDLPPALDEQAALARLRGYAEQNQVWTSLIGMGYHGTLTPTVILRNVLENPGWYTAYTPYQPEIAQGRLEALLNFQQLTIDLTGLELANASLLDEATAAAEAMALAKRVAKSKSNLFFVDENCHPQTISVVQTRAEGFGFELIVDAVDNLKQHQVFGALLQYPDTHGEIRDLRPLIDHLHAQQALACVAADLLSLLLLTPPGELGADVVFGSSQRFGVPMGYGGPHAAVFASREEYKRAIPGRIIGVSKDARGNVALRMALQTREQHIRREKANSNICTAQVLLANIASFYAVYHGPEGLKRIAQRVHRLTCILAAGLERHGIQRLNQHFFDTLTLDVGGAQTAIIESAQAAQINLRILGRGQLGLSLDEACDENTVARLFDVLLGADHGLSIDDLDAETLASGIPEMLQRSTSYLRHPVFNAHHSETEMLRYLKQLENKDLALNQSMIPLGSCTMKLNATSEMIPITWPQFANLHPFVPREQAVGYTLMIEELERWLCAITGFDAICMQPNSGAQGEYAGLLAIRKYHESRQQGGRDICLIPSSAHGTNPASAQMAGMRVVIVECDDAGNVDLEDLKAKASEAGAKLSCLMATYPSTHGVYEEGISEICEVIHKHGGQVYMDGANLNAQVGLARPADIGADVSHMNLHKTFCIPHGGGGPGMGPIGVRAHLAPFVANHPVVPIDGPQPQNGAVSAAPWGSASILPISWMYIAMMGPQLADASEVAILAANYLAQHLSGAFPVLYTGRNERVAHECILDLRPLKAATGISEEDVAKRLMDYGFHAPTMSFPVPGTLMVEPTESESKAELDRFIGAMLSIRAEITEVQNGNWPAEDNPLKRAPHTMADITGVWERPYSIEQGITPDAHTKAHKYWPAVNRVDNVYGDRNLFCACVPVDDYR

SEQ ID NO: 16899 - protein, 351 aa, Arabidopsis thaliana
MGLDYYDILKVNRNATEDDLKKSYRKLAMKWHPDKNPNTKTEAEAKFKQISEAYEATKQNVSPQAYEVLSDPQKRAVYDQYGEEGLSDMPPPGSTGNNGRAGGFNPRNAEDIFAEFFGSSPFGFGSAGGPGRSMRFQSDGGGGMFGGFGGGNNGSENNIFRTYSEGTPAPKKPPPVESKLPCSLEELYSGSTRKMKISRSIVDANGRQAQETEILTIVVKPGWKKGTKIKFPDKGNEQVNQLPADLVFVIDEKPHDLFTRDGNDLITSRRVTLAEAIGGTTVNINTLDGRNLPVGVAEIVSPGYEFVVPGEGMPIAKEPRNKGDLKIKFDVQFPARLTTEQKSALKRVLAG

SEQ ID NO: 16900 - protein, 348 aa, Acidobacteria bacterium Ellin345
MTYKITLIPGDGIGPEVTSAAVRVLEATGLKFEWESFAAGAEAYEKYKEYIPKELNESIERTRIGLKGPVTTPIGGGFSSINVELRKRFELYANVRPIRNLPGVHTRYPGVDLVVVRENTEGLYSGIEHEVVPGVVESLKIITEKASTRISKFAFNYARKMGRKKIHSIHKANIMKMSDGLFIRCSRNISKEYPEIIYGEHIVDNTCMQLVMNPYQYDILLLENLYGDIVSDLCAGLVGGLGLAPGANIGERASIFEAVHGSAPDIAGKNIANPTAVIRSGILMLRHLDEQDAANRVKAAVHHVYREGKHLTRDMGGTTSTSEFADKVVEAIHSKDLVVPAPPVQSPA

SEQ ID NO: 16901 - protein, 858 aa, Vibrio sp. Ex25
MTTTSKTRKRRSLSTLITKIIILVLAPIILGIFVQSYYFSKQIIWQEVDRTKQQTSALILNIFDSHFAAIQIHHNSNSKSDVVLDFYTERDEEALNYFFMSIDQSDPSHTPEFRFLTDHQGIIWDDGNAHFYGINNLILNDLASQVTFSNNWYYLPSHTPMGTRHLLLRRVPVLQPKTGEVMGYSYNVVVLDNNFGLMERLKNEGNVDNVVLVANDTPLASSLVGDEAYKIFDVLKRRESQQKLDQLLIIKTPIEVNAATTDLCLLTVQDNQSVVTLQIQHLLAMLASVIGMVMIALMTKEWIENRVVEELGSLMAYTRSAREEKGFERFGGSDIEEFDHIGSTLENTFEELEAQKRSFRDLFNFALSPIMVWSESGVLIQINPAARKELVMENDIETMHPVFKGFKEKLMPHLRMAAQGATLTGVNVPIGDKVYRWNLSPIRVDGDISGIIVQGQDITTLIEAEKQSNLARKEAEKSAQARADFLAKMSHEIRTPINGILGVAQLLKDSVETEEQNNQIDVLRHSGEHLLAVLNDILDFSKIEQGKFNIQKHPFSFTDTIRTLENIYRPICENKGVNLVIENKIDPNVEIFTDQVRLNQILFNLVSNSVKFTPSGSVRLHAELEQFYGAENSVLVVEITDTGIGIEPDKLDQMFEPFVQEEATTTREYGGSGLGLTIVKSLVDMLEGDVQVRSQKGLGTTFVITMPVKDRERVLTPLDSSLRVKPGELFAESLKVLLVEDNHTNAFILKAFCNKYKMQVDWAKDGLEAMEFLKDHTYDLILMDNQLPHLGGIETTKEIRQKLKLGTPIYACTADTAKETSDAFMEAGANYVLLKPIKENALHEAFVDFKQRFLIERT

SEQ ID NO: 16902 - protein, 110 aa, Brassica napus
  misc_feature (6)..(6): Xaa can be any naturally occurring amino acid
  misc_feature (21)..(21): Xaa can be any naturally occurring amino acid
  misc_feature (44)..(44): Xaa can be any naturally occurring amino acid
  misc_feature (46)..(46): Xaa can be any naturally occurring amino acid
  misc_feature (49)..(49): Xaa can be any naturally occurring amino acid
  misc_feature (61)..(63): Xaa can be any naturally occurring amino acid
  misc_feature (65)..(65): Xaa can be any naturally occurring amino acid
  misc_feature (89)..(89): Xaa can be any naturally occurring amino acid
  misc_feature (91)..(91): Xaa can be any naturally occurring amino acid
  misc_feature (99)..(99): Xaa can be any naturally occurring amino acid
MSGVWXFKNGVIRLVENPNQXGSDTNSRRKVMVYLPTGEVISSXSXLEXILRSLGWERYFXXXDXDLLQFHKRSSSDLISLPKDFTKFXSXYMYDIVVXNPNYFHVRDSN

SEQ ID NO: 16903 - protein, 373 aa, Oryza sativa
MARRSAPLLRRILSSPAPAPAHHGGAGARRTVTYMPRPGDGNPRAVTLIPGDGIGPLVTGAVQQVMEVMHAPVYFETYEVRGDMPTVPPAVIESIRRNKVCLKGGLATPVGGGVSSLNMQLRKELDLYASLVNCSNFPGLPTRHQDVDIVVIRENTEGEYSGLEHEVVPGVVESLKVITKFCSERIAKYAFEYAYLNNRKKVTAVHKANIMKLADGLFLESCREVASKYPGIQYNEIIVDNCCMQLVAKPEQFDVMVTPNLYGNLVANTAAGIAGGTGVMPGGNVGQDHAVFEQGASAGNVGNENILEQKKANPIALLLSSAMMLRHLQFPSFADRLETAVKRVIAEGKYRTKDLGGTSTTQEVTDAVIANLD

SEQ ID NO: 16904 - protein, 490 aa, Zymomonas mobilis subsp. mobilis ZM4
MSETKNEAALEALARNDRYEWGFSSAVDQEFAPKGLNEDIVRFISAKKGEPEWMLEWRLEAYKRWLEMEMPHWAKLKLPEIDYQDAYYYAAPKAKPKIESLDEIDPEIRKTYEKLGIPIEEQKVLAGVSGAREVAVDAVFDSVSVATTFREKLQEVGVIFLSISEAIKTYPELVKRYLGRVVPVRDNYFSALNSAVFSDGTFVYIPEGVRCPMELSTYFRINAANTGQFERTLIVADKGAYVSYLEGCTAPQRDENQLHAAVVEIFVHEEAEVRYSTVQNWYPGDENGKGGIYNFVTKRALCDGARSKVSWTQVETGSAITWKYPSCILKGEESVGEFYSVALTNNYQQADTGTKMIHIGKNSRSTIISKGISAGHSDNTYRGLVKVGGAAENVRNFTRCDSLLIGDKCGAHTVPYIEVRNPSAKVEHEATTSKISDDELFYARQRGLNEDEAVALIVNGFARDVLQKLPMEFAIEAQKLLGISLEGAVG

SEQ ID NO: 16905 - protein, 188 aa, Zea mays
MSSSSSFPTSRFPFAAGARAPGGRGGGGGSSVRPWGSTGGTSVSSSGKRIQKELLDLNASDCSAGPKGDNLYHWLSTIFGPQGSPYERGIFFLDIVFPPDYPFKPPMVTFKTRIYHCNIDSTRKVHLDILKDGWSPAFTISKVLLAIKDIINNPDPYTPLVMSISRQYLTDRAKHDETAAEWTMRFAR

SEQ ID NO: 16906 - protein, 377 aa, Fusobacterium nucleatum subsp. vincentii ATCC 49256
MRTLKFMKPEKQQSISKETLDIYAPLAHRLGMAKVKSELEDLAFSYLHHDEFLEIKKLVDNTKEERKDYIENFIRTMIRTLSELGIKAEVKGRFKHFYSIYKKMYQKGKEFDDIYDLMGVRVIVDDKATCYHVLGIVHSQYTPVPGRFKDYIAVPKSNNYQSIHTTIVGPLGKFIEIQIRTKDMDEIAEEGIAAHWNYKENKKSSKDDNIYGWLRHIIEFQNESDSTEDFIEGVTGDIDRGTVFTFSPKGDIIELPVGATALDFAFMVHTQVGCKCVGAKVNGRMVTIDHKLKSGDKVEIITSKNSKGPSIDWLDIVVTHGAKGKIRKFLKDENKETVTKIGKDNLEKEASKLGMTLKEMKMTLHLKNIWKKIIYLV

SEQ ID NO: 16907 - protein, 491 aa, Cryptococcus neoformans var. neoformans JEC21
MCPPADEPINAGADQDMVAIETNTPHISTSSANQVNGTTGTAEAQPPAVKTHKGLYGRASDFLSNTSNWKIIESTLREGEQFANAFFTLETKIKIAKMLDEFGVEYIELTSPAASPESRAHCEAICNLGLKRTKILTHIRCHMDDARLAVETGVDGVDVVIGTSSFLREHSHGKDMTWITKTAIEVIEFVKSKGIEIRFSSEDSFRSELVDLLSIYRTVDKIGVNRVGVADTVGCADARQVYELVRTLRGVVSCDIETHFHNDTGCAIANAYAALEAGATHVDTSILGIGERNGITPLGGLIARMMVADPEYVKSKYNLTMLRELENFVAEAVEVQVPFNNYITGFCAFTHKAGIHAKAILANPSTYEILNPADFGMTRYVSIGHRLTGWNAVKSRVEQLNLKLNDEQVKDATAKIKELADVRTQSMEDVDMILRIYHTGIQSGDLKVGQSAVLDRLLEKHMPSRDNSPSGRSSNADGTPAKRQRVGEPSA

SEQ ID NO: 16908 - protein, 298 aa, Pediococcus pentosaceus ATCC 25745
MGVRMRYQFKNNLEEIISAKKVLQRSGMSQRLLQRIQNEGRLIDENENDVEFSDKLMPFEPIWIELPDEEQDQNVAISDGPLDIIFEDKNWLLVNKPAGLTAVPGPSDREDTLVNRIKGHWQAIESKNMMPHLVTRLDRFTSGITLVARHQVSNSLLSEQVAHHKIKKIYLAMVDGVVQAEKGTFNQSLGLAADGIHREVRDDGQQATTSFKVLKRFENQTLVQIHLKTGRTHQIRVHFANAGHPLVGDQLYDGPMDRGIKRQALHASSIRFFDPFIDEKVSFTAELPDDLKQIGMEE

SEQ ID NO: 16909 - protein, 358 aa, Zea mays
MSRRLYQHAAVMSAWAPAAYTLVLLLHLLAGAVVTAKTNNGVDPGPRQQEPSMPVDSSGDEALSALTWMATGSEASKAAEAVVDWHKHDSKRMLHAVYRVGDLDRTIKYYTECFGMKLLRKRDVPDEKYTNAFLGFGPENTNFAVELTYNYGVDKYDIGTGFGHFAIANDDVYKLAENIKSKGGKITREPGPVKGGSTVIAFAQDPDGYMFELIQRADTPEPLCQVMLRVGDLERSIKFYEKALGMKLLRKKDVPDYKYTIAMLGYADEDKTTVLELTYNYGVTEYSKGNAYAQVAIGTNDVYKSAEAVDLATKELGGKILRQPGPLPGINTKIASFVDPDGWKVVLVDNTDFLKELH

SEQ ID NO: 16910 - protein, 1186 aa, Cryptococcus gattii
MSVARPTPNLRTPRFPLDHRASLSDGHTNTSSSSRDDALSSHSTGTAFHKFQSYSSFAPHYLNAPPGLAFKTYLDKWGPEQVMGFLAIHGCEHHSGIFIKHSIDGKLLLDFDMSVLTSLGITKVGERIRLMGGIKCLRQRVAHEAKKHNIRSARICDGSLGTDQAKVMIHPKRSASLYAHCQNPFDSDGQSTACRSRLTPSSPADRESDPSPMQRSMNRSIITTFSRRQIIGSLPSEQIHNQSVDSSPTSSLCPPALQRLSPRSTGVSYSDITPKGTPPLITQSTNGAFDHTFSVTGPRDTTSPLGGHLHRPNFFYSTNDISQTCNRPANNTISEQPQRDRESSPSERKENGVICEDEAMGDNSLFAPTFANHPFAISITESNVLEYPRNLSIKNCLPLTSFPSPDKPAAEDTSVMNPSAPSLDDLRRQLIKFVNADDGTTRTVNVMEVTSGAEVLERALKKFGKTGSGRASFLDEDIYGDGKHEGFLCIDGWGVFAENLSGEEMGPMTEGDLLDICSSLRSGAAIQRDALVLRQTSKPQKRKDMRLYLGNTSVLPTPVNLPISFSSPYSGQFVQNSTLQYPAQHQPLLSTNRSRASMMSIMSGLGVSHPGIEKPTDESVQSSTSVTMPSSKKKSMYNFFGHRPPSELISSHLADYFPSAKKRDVAKARGSMLRLNTSHSTEGDPRDVETRPMIEVDDIFFPSTEESSTERRDHYFDPSTFQQRDTSSPRHVGNFTSNRGGSSKGNCKPHSDQKALSTLKTQELHSVNSVTPLLGASPPEVPLTYQPAWLTDFDRDPSFSQLQPLQHSSASSSKQPSSSNRRTMDEITAEMQHRQTSLSCDRPPSKVDSDISAPPSDSETSLGHSSDASDVLESSSGYSDDRSSVSSEDSEEDMAVHTRAFTSNGSKRNIKWIKGALIGAGSFGSVFLGMDAHSGLLMAVKQVELPRGIAKMEARRRDMLSALEREIELLKDLQHDNIVQYLDSSTDANHLNIFLEYVPGGSVAALLSNYGAFEEALAGNFVRQILTGLNYLHKRDIVHRDIKGANILVDNKGGIKISDFGISKKVENSLLNGLHPNRPSLQGSVFWMAPEVVKQTSYTSKADIWSVGCLVVEMLTGTHPWARLTQMQAIFQIGSMGQPEIPSDISVHAADFLSCTFALDYRMRPSAASLLEHTFIIHDGRLNQEM

SEQ ID NO: 16911 - protein, 123 aa, Glycine max
  misc_feature (56)..(56): Xaa can be any naturally occurring amino acid
  misc_feature (81)..(81): Xaa can be any naturally occurring amino acid
LPPLSNPNTSTYAFMTSRDKLDNDRHVAKLGFDIIEALLHAASMNYCKIVKMIVQXVGPAGHDGYGPAICGLSHCNEIDIXTACEADKYSKRSRIHTHIASNALHMEYTLRMSKDKVVNITRN

SEQ ID NO: 16912 - protein, 903 aa, Photobacterium profundum SS9
MSAFFTMSRYRDLEHQLISTGSSIIEPLAISSEYGMTDKNREAVRRLISYTHRKNSQIIRSIAVFDANNQLFVTSNFHRNFETLMYPTGQPIPLLLETRLSDNSLILRAPILAEGQFGSNNSNSYQGKALGYIALELDLSALRLQQYQEVFTALMVLLFGLTLSSLFAYRLMQDVTRPISHMVSVVDRIRRGHLDIRIEGQLLGELDTLKNGINAMAISLSEYHIEMQQSIDQATSDLRETLEQLEIQNVELDIAKKRAQEAARVKSEFLANMSHELRTPLNGVIGFTRQMLKTRLSSSQHDYLLTIEKSANNLLTIINDILDFSKLEAGKLLLENIPFDFTESLDEVMRLLAPSAHEKGLELTLKVDDRIPAGLIGDPLRIQQVVTNLIGNAVKFTERGNIDVSVELKASKDESIELQFTVRDTGIGISERQQAQLFQAFSQADASISRRYGGTGLGLVITQKLVTQMGGEISLTSRLHQGSTFWFSLSMLKTDLPVSQPIDTTALVGQKVLLIEPNMQAASIVQQRLIKAGMFVTYRSTMPEEVEHHQFALICLPPGQQPPIAILLDRVFKAEQVTDKVIISLPTTELALSERLINAGVSACLGKPLSHRKLFEVLNNKPDDIFEPELLSLPETAQKIEPLTVMAVDDNPANLKLISALLSERVETVITATGGRKAVEYAHQKAFDLIFMDIQMPEMDGVTACEAIHKTELNHSTPVIAVTAHAMPGERERLINAGMDDYLTKPIEEHILQQILAKWNQPPENEHNQNTIIDLEPDVISTQQHPIQDNKDISWDWDLALKQAAGKEDLAKDMLQMLLDFMPEVEMLVNEALDGKDIELWPPIHKLHGSCAYSGVPRLKSLCYTIETQLKANATVADIEPELFELMDEMNHVVKASKAFRNR

SEQ ID NO: 16913 - protein, 263 aa, Azoarcus sp. EbN1
MTTANEHVKIERQGAVALVTLNRPEALNAINDDIRGSLPQMLREFDADVEIGAIVIAGSGERGFSVGADIKESRPNDSPIATRRRLVPTTWIEALDATCKPVIAAIHGFCLGGGMELALACDVRVVAKGAEFALPETALGLMPGGGGTQRLPRLIGLSRSLDLLLTGDRIGAEEAYRIGIATRLAESPEAALAEAMRVAELIAARPRVAVAYVKEAARAGLDMDLANGLKLEKSLFALLTSSADRIEAARAFREKRQPNFIGA

SEQ ID NO: 16914 - protein, 476 aa, Sphingomonas paucimobilis
MTAYPSLHMIIDGEAVTGGDRRTQTIVNPATGETLGELPLADTADLDRALETAQRGFQRWRNSTPQERAAVLSGAARLLMERQETLARIATMEQGKTLAESRIEVMMVAGLFNFYAGEVFRLYGRALVRPAGTRSTVTYEPVGPLAAFSPWNFPLGNPGRKLGAPIAAGCSVIMKSAEETPASALGVLQCLLDAGLPSDVAQAVFGVPDEVSRYLLASPVIRKLSFTGSTVVGKHLAKLAADDLKRTTMELGGHGPVLVFNDVDVDRVLEVMVGHKYRNAGQVCVSPTRFIVQEDVYETFRDGFAERAKALRVGNGLEDGIQMGPMANARRPDAMERLNRSAVDAGATLNAGGERIGNQGFFYAPSVLSDVPLDAEIMNEEPFGPVALINPYRTADEMIAEANRLPYGLAAYSWTNDVKMQRRIAREVETGMLGINSVAIGGADSPFGGVKWSGHGHEDGPEGVQACLVTKAVHEG

SEQ ID NO: 16915 - protein, 322 aa, Thermus aquaticus
MKRIGVFTSGGDAPGMNAAIRAVVRQAHALGVEVIGIRRGYAGMIQGEMVPLGVRDVANIIQRGGTILLTARSQEFLTEEGRAKAYAKLQAAGIEGLVAIGGDGTFRGALFLVEEHGMPVVGVPGTIDNDLYGTDYTIGFDTAVNTALEAIDRIRDTAASHERVFFIEVMGRHAGFIALDVGLAGGAEVIAVPEEPVDPKAVAEVLEASQRRGKKSSIVVVAEGAYPGGAAGLLAAIREHLQVEARVTVLGHIQRGGSPTAKDRILASRLGAPAVEALVGGASGVMVGEVEGEVDLTPLKEAVERRKDINRALLRLSQVLAL

SEQ ID NO: 16916 - protein, 406 aa, Nicotiana plumbaginifolia
MMQQQRLKQQQQQALMQQSLYHPGLLAPPQIEPILSGNLPPGFDSSTCRSVYVGNIHPQVTEPLLQEVFASTGPLEGCKLIRKDKSSYGFVDYFDRRSAALAIVTLNGRHLFGQPIKVNWAYASAQREDTSNHYNIFVGDLSPEVTDATLFACFSVYTSCSDARVMWDQKTGRSRGFGFVSFRNQQEAQSAINDLNGKWLGSRQIRCNWAAKGAGAVGEQNSDAKSVVELTSGTSDDGQEKVVNEDAPENNPQYTTVYVGNLAPEVTSVDLHRHFHALGAGVIEDVRIQRDKGFGFVRYSSHAEAARAIQLGNARLLFGKPVKCSWGSKPTPPGSSSNPLPPPAIGQIPGLSAMDLAAYQRQLALAKMAGAQAFMQPQGQRIGAPGQGIYDGGYGGIASTQPPMYF

SEQ ID NO: 16917 - protein, 604 aa, Trichodesmium erythraeum IMS101
MLIVQKYGGTSVGSVERIKAVAQRIAKTASDRSVVVVVSAMGKTTDTLVKLANDISPNPCRREMDMLLSTGEQVTIALVSMALQELGVPAISLTGAQVGIVTEAQHSRARILHIQTERIEEHLQLGEVVVVAGFQGISQTRHQEITTLGRGGSDTSAVALAAALQAQRCEIYTDVPGILTTDPRIVPEAQLMSEITCDEMLELASLGAKVLHPRAVEIARNYGMPLVVLSSWSDAPGTRVVSAIPKRPALQDLELTKPVDAVEYDTNQAGISMLRLPDRPGVAAQLFSGIALQNIDVDLIIQSIHESNTNDIAFTVSKDVLKQAAAVADAMLPALGKNAHPSLGEPEVKTEERPIAKVSLVGAGMIGRPEVAAKMFEALAAAGVNIIMISTSEVKVSCVVDAEDCKKTVNSLCQAFDVDVADISSSSTAGESEEVPPPVRGVALDIKQARLAVRQVPDHPGMAAKIFGLLAQQNISVDMIIQSQRCHSVDGVLTRDIAFTVSQPEGETAYQILANTAADFGWGEVVLESSIAKVSVVGSGMISHPGVAAQMFEALAASQINILMITTSEIKISCVVEEEDGVKALQAIHKAFCLSANEVVKVPA

SEQ ID NO: 16918 - protein, 745 aa, Burkholderia mallei ATCC 23344
MTADSASTAAAPSLDDVLAFVREHAGDARLSSGERLADHAAGTSTIMQRLNVDPPATQAAALFALAPYLSDPDKQIAEHFGDEVAHLVADVRKLLRLGTVSLRAVQSAPVDAGRDAQAERRAQIEALRKMLLAFAQDIRVVLIRLASRLQSLRYYAAAKIEPPPDVARETLEIYAPLANRLGIWQLKWELEDLAFRFEDPVTYKRIAKLLDEKRVEREAYVAGAIERLQHELAAAHIQAEVSGRPKHIYSIWRKMRGKELDFSELYDVRAFRVIVPDIKDCYTVLGIVHHLWQPVPKEFDDYISRPKPNGYKSLHTVVIGDDGRAFEVQIRTQEMHRFAEYGIAAHWRYKEAGARGYGGQFSASEKYDEKIAWLRQLLAWKDEIADGGGAEVSGQQAWAQLREATLDDDHIYVLTPQARVIALPQGATPVDFAYHLHSELGHRCRGARVDGAMVPLNTQLANGQTVEIVAVKEGGPSRDWLNPQLGYLHSSRARQKVRAWFNAVDQQENVAHGRALVEKTLQREGKTSVNLEHLAAKLGFKSPDELFSVVGKEEFSLRNVEQALSDAPAPEPEPEAPANFEKRASGANVAHGASAGVLVVGVDALLTQLARCCRPAPPDPISGFVTRGKGMSIHRSDCATFRRMAERAPERVLQTTWSADVLGGRGASVYPVDLMIEATDRQGLLRDISEVFAREKMNVIGVKTQSRRNAAFMQFTVEVSSASQVQRACTLLGEIQGVVRAARKA

SEQ ID NO: 16919 - protein, 212 aa, Zea mays
MQVLHPQSMRPAREGDIPVRVKNSYNPKAPGTLITRQRDMDKVVLTSIVLKSNVTMLDIVSTRMLGQYGFLARVFAIFEDLCISVDCVATSEVSVSVSLDPSKIWSRELIQQELDHVVEELEKIAIVRLLQQRAIISLIGNVEQSSLILEKTGRVLRKSGVNVQMISQGASKVNMSLIVHDSDAKALVEALHQAFFEDDVLSQVEAENLLVG

SEQ ID NO: 16920 - protein, 358 aa, Coxiella burnetii
MSKEKFVREKPHVNVGTIGHVDHGKTTLTAALTKVLSEKYGGEKKAFDQIDNAPEERARGITIATSHVEYQSDKRHYAHVDCPGHADYVKNMITGAAQMDGAILVVSAADGPMPQTREHIVLAKQVGVPNIVVYLNKADMVDDKELLELVEMEVRDLLNSYDFPGDETPIIVGSALKALEGDKSEVGEPSIIKLVETMDTYFPQPERAIDKPFLMPIEDVFSISGRGTVVTGRVERGIIKVGDEIEIVGIKDTTKTTCTGVEMFRKLLDEGQAGDNVGILLRGTKREEVERGQVLAKPGSITPHKKFEAEIYVLSKEEGGRHTPFLQGYRPQFYFRTTDVTGQLLSLPEGIEMVMPGD

SEQ ID NO: 16921 - protein, 309 aa, Shigella flexneri 2a str. 301
MVRIYTLTLAPSLDSATITPQIYPEGKLRCTAPVFEPGGGGINVARAIAHLGGSATAIFPAGGATGEHLVSLLADENVPVATVEAKDWTRQNLHVHVEASGEQYRFVMPGAALNEDEFRQLEEQVLEIESGAILVISGSLPPGVKLEKLTQLISAAQNQGIRCIIDSSGEALSAALAIGNIELVKPNQKELSALVNRELTQPDDVRKAAQEIVNSGKAKRVVVSLGPQGALGVDSENCIQVVPPPVKSQSTVGAGDSMVGAMTLKLAENASLEEMVRFGVAAGSAATLNQGTRLCSHDDTQKIYAYLSR

SEQ ID NO: 16922 - protein, 547 aa, Mesorhizobium loti MAFF303099
MDKSAFQKQLAALRDHRSAAPASMRQAFAADPQRFQAFTATDGDLLLDWSKCAVDATTMDLLEKLAAAADLEGRRAAMFAGKKINITEDRAVLHTALRNLSGTGVTVDGQDVKADVLSVLDAMGAFADAIRSGKALGATGKKITDIVNIGIGGSDLGPAMATLALAPYHDGPRAHYVSNIDGAHIHDTLKGLSAETTLFIVASKTFTTVETMTNAQTARDWVQKALGKQAVGKHFAAVSTALDLVAKFGIEADRVFGFWDWVGGRYSVWGAIGLPVMIAVGPRNFRAFLDGAHEMDQHFRTAPLAGNLPALLGLVGWWHRVICGYPARAVIPYDQRLSRLPAYLQQLDMESNGKGVTLDGTPVATPTGPLVWGEPGTNGQHAFFQLLHQGTDFIPVEFLAAAVGHEPELKHQHDLLLANCLAQSEALMKGRTLDEARAQMLAKGMKPADVDKIAPHRVFSGNRPSLTILYRKLDPRTFGRLIALYEHRVFVEGTLFNINSFDQWGVELGKELATGLLPVVEGKESAANRDASTRGLVERIHQLRGSE

SEQ ID NO: 16923 - protein, 351 aa, Ananas comosus
MASKVQLVFLFLFLCAMWASPSAASRDEPNDPMMKRFEEWMAEYGRVYKDDDEKMRRFQIFKNNVKHIETFNSRNENSYTLGINQFTDMTKSEFVAQYTGVSLPLNIEREPVVSFDDVNISAVPQSIDWRDYGAVNEVKNQNPCGSCWSFAAIATVEGIYKIKTGYLVSLSEQEVLDCAVSYGCKGGWVNKAYDFIISNNGVTTEENYPYLAYQGTCNANSFPNSAYITGYSYVRRNDERSMMYAVSNQPIAALIDASENFQYYNGGVFSGPCGTSLNHAITIIGYGQDSSGTKYWIVRNSWGSSWGEGGYVRMARGVSSSSGVCGIAMAPLFPTLQSGANAEVIKMVSET

SEQ ID NO: 16924 - protein, 682 aa, Magnaporthe grisea 70-15
MLRTVGRKALRGSSKGCSRTISTLKPATATIAKPGSRTLSTPATATATAPRTKPSASFNARRDPQPLVNPRSGEADESFIGKTGGEIFHEMMLRQNVKHIFGYPGGAILPVFDAIYNSKHIDFVLPKHEQGAGHMAEGYARASGKPGVVLVTSGPGATNVITPMADALADGTPLVVFSGQVVTSAIGSDAFQEADVIGISRSCTKWNVMVKSVDELPRRINEAFEIATSGRPGPVLVDLPKDVTASVLRRAIPTETSIPSISAAARAVQEAGRKQLEHSIKRVADLVNIAKKPVIYAGQGVILSEGGVELLKALADKASIPVTTTLHGLGAFDELDEKALHMLGMHGSAYANMSMQEADLIIALGGRFDDRVTGSIPKFAPAAKLAAAEGRGGIVHFEIMPKNINKVVQATEAIEGDVASNLKLLLPKIEQRSMTDRKEWFDQIKEWKEKWPLSHYERAERSGLIKPQTLIEELSNLTADRKDMTYITTGVGQHQMWTAQHFRWRHPRSMITSGGLGTMGYGLPAAIGAKVARPDALVIDIDGDASFNMTLTELSTAAQFNIGVKVIVLNNEEQGMVTQWQNLFYEDRYSHTHQRNPDFMKLADAMDVQHRRVSKPDDVVDALTWLINTDGPALLEVMTDKKVPVLPMVPGGNGLHEFITFDASKDKQRRELMRARTNGLHG

SEQ ID NO: 16925 - protein, 442 aa, Oryza sativa
MAAATTSRRGPGAMDDENLTFETSPGVEVISSFDQMGIRDDLLRGIYAYGFEKPSAIQQRAVLPIISGRDVIAQAQSGTGKTSMISLSVCQIVDTAVREVQALILSPTRELAAQTERVMLAIGDFINIQVHACIGGKSIGEDIRKLEHGVHVVSGTPGRVCDMIKRRTLRTRAIKLLILDEADEMLGRGFKDQIYDVYRYLPPELQVCLISATLPHEILEMTSKFMTDPVRILVKRDELTLEGIKQFFVAVEKEEWKFDTLCDLYDTLTITQAVIFCNTKRKVDWLTERMRSNNFTVSAMHGDMPQKERDAIMGEFRSGATRVLITTDVWARGLDVQQVSLVINYDLPNNRELYIHRIGRSGRFGRKGVAINFVKKEDIRILRDIEQYYSTQIDEIPRRRCWRPSSTPHACWISSTRTTKMHTLIQVRSRIQYTPSTSSLFN

SEQ ID NO: 16926 - protein, 283 aa, Fusobacterium nucleatum subsp. vincentii ATCC 49256
MLMDGRELAKDIKAKIKAEIDDIKRIYNVNPTVASILVGDNQASQVYLNSQIKSYQDLGIGVQKYFFSKEISEAYLLNLVDKLNKDTEIDGIMINLPLPPQISATKVLNRIKLIKDVDGFKAENLGLLFQNNEDFISPSTPAGIMALIKGYNIDLEGKDVVVVGRSNIVGKPVAALVLNSHGTVTICNSHTRNLAEKTKNADVLISAVGKPKFITEDMVKEGAVVIDVGINRVNGKLVGDVDFENVQKKVSYITPVPGGVGALTVAMLLSNILKSFKANRGII

SEQ ID NO: 16927 - protein, 979 aa, Nostoc punctiforme PCC 73102
MVLNAPILKSNEQQVLNQKSQKLSSFAPRHIGPNSDDIQQMLKVLGFPSLDALIDKTVPQTIRLKQPLKLPEAESEYAALASLKKIAAKNQVFRSYIGMGYYDTITPLVIGRNILENPGWYTAYTPYQPEIAQGRLEALLNFQTLIIDLTGLEIANASLLDEATAAAEAMSLSYGVSKNQANAYFVSHDCHPQTIDVLQTRAKPLGINIIVGDHQTFDFDRAIFGAVLQYPASDGTIYDYRAFIEKAHAKGALVTVAADPLSLTLLTPPGEFGADIAVGSTQRFGIPLGFGGPHAAYFATKEEYKRLVPGRIVGVSKDAQGKPALRLALQTREQHIRREKATSNICTAQVLLAVMASMYAVYHGPDGLKQIAENIHQLTLMLAAGLKHLGYKISSEHFFDTLRVELGTRSLEVILEACQARNINLRIFDDTAVGISVDETTTADDLIELFEIFAAPDSLLFGFKEIGDLIAARRKSSLQNSTFARTSNYLTHPVFNRYHSETELLRYLHKLESKDLSLTTSMIPLGSCTMKLNATAEMIPVTWEEFGKIHPFAPASQTQGYQILFQQLEAWLAEITGFAGISLQPNAGSQGEYAGLLVIRQYHENRGEAHRNVCLIPTSAHGTNPASAVMCGMKVVAVACDSQGNIDVDDLKAKAEKHSHELAALMVTYPSTHGVFEEPIQEICAVVHSHGGQVYMDGANMNAQVGICRPGDIGADVCHLNLHKTFCIPHGGGGPGMGPIGVASHLVPFLPGHPVVTINDSTQHSHIGAVAAAPWGSASILVISWMYIAMMGADGLTQATKVAILNANYIAKKLESYYPVLYQGKNGLVAHECILDLRSLKKSAAIEIDDVAKRLMDYGFHAPTVSWPVGGTIMVEPTESESKQELDRFCDALIAIRQEIAEIEVGKVDAQDNVLKNAPHTAESLITGEWQHPYSREQAAYPAPWTREYKFWPAVGRIDAAFGDRNFVCSCLPMDAYSS

SEQ ID NO: 16928 - protein, 593 aa, Oryza sativa (japonica cultivar-group)
MALAGLPLSVFAIAVHFCLVFSSSSSPPVCPANGHRDRTAYHFQPAKNWQNGPVYYNGMYHLFYQYNPHGALWDVGNLSWGHSVSGDLVNWAALDNALDPTAPFDANGCASGSVTILPDGVPVVMYSGIDARRRQVQNVAFPKNPRDPLLREWTKPGYNPVIPVPADVSPDNFRDPTTAWLGSDGLWRFAISAVADGVGATLVYRSADFLRWERNAAPLHASRDAVMAECPDLFPVAEHGEDGLDLDASAIGGAGAGVRHVLKVSMPDTLEDYYMVGRYDDADDTFTVPPEDLEAHGDDYRRWRRIDHGHLYASKTFYDAGKKRRVLWAWVNESDSEADDVTKGWSGLQSFPRAVWLDEGGRQLVQWPVEEIETLRRKRGVLLGGNEVEAGGLREIGGIAGSQADVEVAFEIASLAGADRLEPDHLRDPDALCGENGAAVHGGIGPFGLLVMASGDLRERTAVFFRVFRLSHGYTVLMCTDLTRSTSRAGVYKPSHGGFVDIDIEKDRAISLRTLIDHSIVESFGGGGRTCMTARVYPEHVATGSSHLYVFNNASDAVKVSKLEAWELATASVNAGDDGLISYGGPVCAAQVQ

SEQ ID NO: 16929 - protein, 313 aa, Oceanicola granulosus HTCC2516
MTDTPTPDRPLKIGTRGSPLALAQAHETRDRLAAAHGLPGEAFEVVVIRTTGDRVVDRPLKEIGGKGLFTKEIEEAMLSGAIDIAVHSMKDMPVAQPEGLVLDCYLPREDPRDAFVSLLHAGIKALPDGATVGTSSLRRKAQLLHRRPDLHVVEFRGNVQTRLRKLESGVAVATFLAVAGLNRLGADDVPQAPIAPEDMLPAVAQGAIGIERRASDEGLGEMLAAIHDRATGERLAAERAFLAALDGSCETPIAGLAELIGDGRLRLRGEILAHDGSRCLADEAEAQIADGAALGTDMARRLLAQAGPGFFDS

SEQ ID NO: 16930 - protein, 308 aa, Cryptococcus neoformans var. neoformans JEC21
MSSYRTCTTMATAGPSRRPDGRTPAQLRPLHLSIGELDRADGSARFAFGSNAVLASCSGPIEVRLREELPDKATFEVNHRPLEGVGATPSRALVTTLETIFPPILSLEKHPRSLVQLVVQSLVPSTGRVVYGSVFGAEGVGAEQNTWPATDKDDYAYIPESRKDAARISPAAGYTFTARAASINASTLALLSAGTISILALPVAVALVVTTKGRVMLDPEADEEKQAKARLGFGWAWGAVFGTANEENNMGVAGQNDGGAELVWIESEGSFTRQEWSEALQMSKTASKAILEFIRIQLDAHLSSHQLS

SEQ ID NO: 16931 - protein, 255 aa, Vibrio vulnificus CMCP6
MAISSRLFVGNVRHRRFTPVEHSLNYQLFMPAIDLDELTQLEKEVWGFGTRWWHWARFKRSDYVGKGCLKRAVQEKITELTGESVSGRVIAVCHLRYLGLYFSPVNFYYVFDEKEHWRYLLAEVSNTPWNERHYYAISADEHDSSFGWKQTKAFHVSPFNPIEQSYIWRLKPLSEKLHIHLECHKENKQFDATMAMSAEPFSSSNLLKRLIVTPIQTVKVLVGIYWHAFKLWKKGAPFYSHPKYRSPANRTENNN

SEQ ID NO: 16932 - protein, 352 aa, Spinacia oleracea
MTATIAPSRVESLASSGIESIPKEYVRLNEELTSMGNVFEEEKKDDGYQIPTIDIKDIASKDQEVRDKAIQELKRAAMEWGVMHLVNYGISDELIHRVKVAGETFFELPVEEKEKYANDQASGNLQGYGSKLANSASGRLEWEDYYFHLCFPEDKRDFSIWPKTPADYIPAVSEYSKELRSLATKILSALSLALGLEEGRLEKEVGGIEELLLQFKINYYPKCPQPELALGVEAHTDVSALTFILHNMVPGLQLFYEGKWVTAKCVPNSIIMHIGDTIEILSNGKYKSILHRGLVNKEKVRISWAVFCEPPKEKIVLMPLPDLVSGEEVARYPPRTFAQHVQYKLFRKTQDP

SEQ ID NO: 16933 - protein, 358 aa, Phytolacca americana
MVGEISPSRVETLATSGIQSIPKEYVRPKEELTSIGNVFEEEMKDGGPQVPTIDIRDIASDDREVRDRAILELNRAAMEWGVMHLINHGIPNELIDRVKAVGGAFFELPIEEKEKYANDQATGNVQGYGSKLAENASGQLEWEDYFFHLIFPEDKRDLSIWPTTPSDYICAVSEYAKELRALATKILSALSLALGLEEPRLEKEVGGLEELLLQLKINYYPKCPQPELALGVEAHTDVSALTFILHNMVPGLQLFYEGKWVTAKCVPNSIIMHIGDTIEILSNGKYKSILHRGLVNKEKVRISWAVFCEPPKEKIILKPLTELLTEEEPARFPPRTFAQHIQYKLFRKTQDVQAPVSN

SEQ ID NO: 16934 - protein, 658 aa, Candida glabrata CBS 138
MFLFRKPSIRSCQRINSLCSLLELQRGYATTTRENTLYPPHADTSSPHKTPVGEAAKEYLKQKKRKLQEKGTPKSTRLTVEGVIECPLESFQLLNSPLFNKGSAFTQEEREAFNLEALLPPQVNTLDEQLERAYKQLCYLKTPLAKNDFMTSLRVQNKVLYFALVRKHIRELVPIIYTPTEGDAIASYSHRFRKPEGVFLDITEPNSVEKRLAVYGEAKDVDYIVVSDSEGILGIGDQGVGGVRIAISKLALMTLCGGIHPGRVLPVCLDVGTNNKKLARDELYMGNKFSRIRGKQYDDFIDSFIQAVKKLYPSAVLHFEDFGVKNARRILDKYRYDLPCFNDDIQGTGAVVTASLLAALKHTDRELKDTKVLVFGAGSAGLGIADQITNHMVTHGLTPEEARSNIYLMDRRGLILESMEENSTVAQHRYAKPDEDWDDIDTTKLFNVVSKMKPTCLVGCSTQAGAFTKEIVQEMYKYNPRPIIFPLSNPTRLHEAVPSDLMEWTNNDALVATGSPFAPVNGYRISENNNCFSFPGIGLGAVLSRATAITDTMISAAVDQLAALSPLKPGDSRPGLLPPLEDITNTSAKLATAVILQSLKEGTARIEDEEVPGSPGEKVTVPRDFDQCLEWVKSQMWEPVYRPMVKVNYDPEVHTNQM

SEQ ID NO: 16935 - protein, 108 aa, marine gamma proteobacterium HTCC2207
MSDAIVHTTDSSFESDVLQSDIPALVDFWAAWCGPCKMIAPLLDELSTEYAGRVKICKVDVDASPETAAKFNVRGIPTLLVFKNGTVEATKVGALSKAQLVEFVDSIL

SEQ ID NO: 16936 - protein, 207 aa, Candida albicans SC5314
MISMTNIFTPIEEALEAYKNGEFLIVMDDEDRENEGDLIMAAELITQEKMAFLVRYSSGYVCVPLSEERANQLELPPMLANRSDRHGTAYTITCDFAEGTTTGISAHDRALTTRSLANPNSKPQDFIKPGHILPLRAVPGLLKKRRGHTEAAVQLSTLAGLQPAGVICELVRDEDGLMMRLDDCIQFGKKHGIKIININQLVEYISK

SEQ ID NO: 16937 - protein, 500 aa, Colwellia psychrerythraea 34H
MSITEVPLIINGEKVRSQTTEWLDVLNPATQEVVARVPIATAEEIELAVQSAQTAFKTWSKTSLTNRMRIMVNFAHLVRENTQELAELVTLEHGKTLPDAEGEVGRALEAIENASSVTRLQLGDMGNNVATGVDTYTLHKPLGVGLGITAFNFPLMLAAFMFPPAIACGNTFVLKPSEQAPSSTVRFVELAIEAGLPAGVINVVHGGPDAVNALIEHEHVKAVSFIGSTHVGTHIYNHASKHGKRAQSMMGAKNHMVIMPDANKDRAINDLLGSAFGAAGQRCMANPVTILVGKSRDWLPEIVERAKLMKVGPGSQRDADLGPVVSPQAKKRIISLLDSGVEQGATMLIDGRNCQVEGYPNGNFVGPTLFTNVTTDMDIYTQEIFGPALCVLEAETLEEAIAIINANPNGNGTSIFTSSGWNARLFENEIDVGQVGINVPIPVPVAFFSFTGSRASKLGDLGPNGKQTVSFWTQTKSVTARWFEPDHEDGLNVHTTISMK

SEQ ID NO: 16938 - protein, 372 aa, Oryza sativa (japonica cultivar-group)
MGEAVKGPVVVTGASGFVGSWLVMKLLQAGYTVRATVRDPSNVGKTKPLLELAGSKERLTLWKADLGEEGSFDAAIRGCTGVFHVATPMDFESEDPENEVVKPTVEGMLSIMRACRDAGTVKRIVFTSSAGTVNIEERQRPSYDHDDWSDIDFCRRVKMTGWMYFVSKSLAEKAAMEYAREHGLDLISVIPTLVVGPFISNGMPPSHVTALALLTGNEAHYSILKQVQFVHLDDLCDAEIFLFESPEARGRYVCSSHDATIHGLATMLADMFPEYDVPRSFPGIDADHLQPVHFSSWKLLAHGFRFRYTLEDMFEAAVRTCREKGLLPPLPPPPTTAVAGGDGSAGVAGEKEPILGRGTGTAVGAETEALVK

SEQ ID NO: 16939 - protein, 448 aa, Zea mays
MASTKAPGPGEKHHSIDAQLRQLVPGKVSEDDKLIEYDALLVDRFLNILQDLHGPSLREFVQECYEVSADYEGKGDTTKLGELGAKLTGLAPADAILVASSILHMLNLANLAEEVQIAHRRRNSKLKKGGFADEGSATTESDIEETLKNQTVDLVFTAHPTQSARRSLLQKNARIRNCLTQLNAKDITDDDKQELDEALQREIQAAFRTDEIRRAQPTPQDEMRYGMSYIHETVWKGVPKFLRRVDTALKNIGINERLPYNVSLIRFSSWMGGDRDGNPRVTPEVTRDVCLLARMMAANLYIDQIEELMFELSMWRCNDELRVRAEELHSSSGSKVTKYYIEFWKQIPPNEPYRVILGHVRDKLYNTRERARHLLASGVSEISAESSFTSIEEFLEPLELCYKSLCDCGDKAIADGSLLDLLRQVFTFGLSLVKLDIRQQPLLPLVLG

SEQ ID NO: 16940 - protein, 305 aa, Candida albicans SC5314
MDTKEIRSTVSNLEKAVDDTTILKLLNILNDGVKPSEKLLRETKVGVAVNKFRSHDSAEINGLVKKMIRNWRDAVQAEKNNKKKLAIAAGTGTGTPSSSAISPSSSGSGSTTPKPSESTTPSAARKGPRNPKTDGVNTQLYENDTRNASVSALYTSLAVDRDDSPKHILRIAIEIEAEVYKSEYSKVSDSYRNRLRSFTMNLRNKKNPELRERILSKQILPAAFIKMTPNEMAPEALKKEIEKLHKQNLFDAQGATEKRAVTDRFTCGKCKHKKVSYYQMQTRSADEPLTTFCTCENCGNRWKFS

SEQ ID NO: 16941 - protein, 579 aa, Staphylococcus aureus subsp. aureus MSSA476
MAKIKANEALVKALQAWDIDHLYGIPGDSIDAVVDSLRTVRDQFKFYHVRHEEVASLAAAGYTKLTGKIGVALSIGGPGLIHLLNGMYDAKMDNVPQLILSGQTNSTALGTKAFQETNLQKLCEDVAVYNHQIEKGDNVFEIVNEAIRTAYEQKGVAVVICPNDLLTEKIKDTTNKPVDTSRPTVVSPKYKDIKKAVKLINKSKKPVMLIGVGAKHAKDELRAFVEAAKIPVVHSLPAKTILPDDHPYSIGNLGKIGTKTSYQTMQDADLLIMVGTNYPYVDYLPKKNIKAIQIDTNPKNIGHRFNINVGIVGDSKIALHQLTENIKHVAERPFLNKTLERKAVWDKWMEQDKNNNSKPLRPERLMASINKFIKDDAVISADVGTATVWSTRYLNLGVNNKFIISSWLGTMGCGLPGAMASKIAYPNRQAIAIAGDGAFQMVMQDFATAVQYDLPLTVFVLNNKQLAFIKYEQQAAGELEYAVDFSDMDHAKFAEAAGGKGYTIKSASEVDAIVEEALAQDVPTIVDVYVDPNAAPLPGKIVNEEALGYGKWAFRSITEDKHLDLDQIPPISVAAKRFL

SEQ ID NO: 16942 - protein, 368 aa, Lactobacillus delbrueckii subsp. bulgaricus
MNLDKLQNWLQENGMDVAYVSSPTTINYFTGFITDPEERIFKLFAFKDAEPFLFCPALNYEEAKASAWDGDVVGYLDSEDPWGKIAEEIKQRTKDYQNWAVEKNGLTVAHYQALHAQFPDSDFSKDLSDFIAHIRLFKTESELVKLRKAGEEADFAFQIGFEALRNGVTERAVVSQIEYQLKLQKGVMQTSFDTIVQAGKNAANPHQGPSMNTVQPNELVLFDLGTMHEGYASDSSRTVAYGEPTDKMREIYEVNRTAQQAAIDAAKPGMTASELDGVARKIITDAGYGEYFIHRLGHGIGMEVHEFPSIANGNDVVLEEGMCFSIEPGIYIPGFAGVRIEDCGVLTKEGFKPFTHTSKELKVLPVKE

SEQ ID NO: 16943 - protein, 276 aa, Candida albicans SC5314
MYRNWLYFGRDSIDNLLNNYSFLLPRIRKTRQLKLNMDSKSTCVSIGKFPFDYTEEQVRDIARSVGPVLDVKLLFDELTGKSKGYAIINYGDNETASSAVRNLNYMTLPNGRFLKCSFVTDYDMSSKESVKLPPLPLGIQIHPNQNASQVISTILSNIDSNSALQILKEIKVMSIDNPKSTKVLLERFPQLSLALVELGLLSNTTNQELIELTLNKRPVDLTELSLDHVRLLQSVEKLTDEEIDELDESQQEIVRKVKEEIAKGTYGEVSAVKDNA

SEQ ID NO: 16944 - protein, 178 aa, Brassica napus
LDITSTRMLGQYGFLSKVLSTFEKMGISVDVVATSEVSVSLTLDPSKFCSKELIQQEINHVVEELEKIATVNLLQHRSIISLIGNFQRSSSFILEKGFRVLRTNGINIQMISQGASKVNISLIVNDDEAEHCVKALHSAFFETGTSKAVPQIGRLATTPLPCRENLLVQPDLRDLQVV

SEQ ID NO: 16945 - protein, 459 aa, Glycine max
MASEEAECISNLFKPIYLKEVAELRQYVPNLQSRPNPLDHNPYFDTRQLQQQQGFYLTESDVLLRQIGNDLSPSPRFAYHRAGPRKNIYFDPSIVRVAIVTCGGLCPGLNTVIRELVVGLWQLYGVRHIFGITAGYRGFYSSVPLPLNPKLVHHWHNVGGTLLQTSRGGFDLHNIVDAIQTHAFNQVYIIGGDGTMRGAVKIFDEIKHRKLEVAVVGIPKTVDNDVGIIDRSFGFQTAVEMAQEAISAAHVEAESAVNGIGLVKLMGRSTGHIALHATLSSRDVDCCLIPEIDFFLEGKGGLLEFLGQRLKENGHAVLVVAEGAGQDIIPRTDSQKDERDESGNPVFLDVGVWLKSELNKWWKREHPNELFTVKYIDPTYMIRAVHANATDNLYCTLLAHSAIHGVMAGYTGFVAGPINGNYAYIPLEDVARANNPVDTQDHKWSWVRSVTNQPDFVRR

SEQ ID NO: 16946 - protein, 433 aa, Trichodesmium erythraeum IMS101
MASTPQLRREIGVFGATLMGNGSILGTGVFVSIGIAASIAGPSVIIAVAVAGVVATCNAFNSAQLAANHPVSGGTYEYGYKYLNNWLGFIAGWMFLFAKSASAATAALGFAGYFLNAFGVNNNTWLVLTALTAVVVLTIVVLSGIRRSNVTNIIIVSITLFSLVLFILAGVPQVVFSEGKNLMPFFPGDKPIASLLQATALMFVAYTGYGRIATLGEEVKEPRRTIPRAIALTMIFTCVLYISTAIVSVFAGQEVIQKLSQADVSLVAPLEVIAKVGGLGIPVIPKLIAIGAITAMLGVLLNLILGLSRVLLAMGRRRDVPKVVARLDSGQTTPYIAVVIVGVAIACLVLIGDVKTTWSFSAFNVLIYYAITNFAALHLSPEERLYPKWLGWLGLASCLFLAFWVEKQIWLVGLGLILIGLIWHSLIHRFITD

SEQ ID NO: 16947 - protein, 396 aa, Xanthomonas campestris pv. vesicatoria str. 85-10
MAKAKFERTKPHVNVGTIGHVDHGKTTLTAALTKIGAERFGGEFKAYDAIDAAPEEKARGITISTAHVEYESPTRHYAHVDCPGHADYVKNMITGAAQMDGAILVCSAADGPMPQTREHILLSRQVGVPHIVVFLNKADMVDDAELLELVEMEVRELLSKYDFPGDDTPIIHGSARLALDGDQSDIGVPAILKLVEALDSFIPEPTRDVDRPFLMPVEDVFSISGRGTVVTGRIERGIIKVGDEIEIVGIRDTQKTTVTGVEMFRKLLDQGQAGDNAGLLLRGTKRDDVERGQVLCKPGSIKPHTEFEAEVYVLSKDEGGRHTPFFKGYRPQFYFRTTDITGACQLPEGVEMVMPGDNVKMVVTLINPVAMDEGLRFAIREGGRTVGAGVVAKIIK

SEQ ID NO: 16948 - protein, 248 aa, Zea mays
  misc_feature (27)..(27): Xaa can be any naturally occurring amino acid
LHPLRCSRFHRAVRNLTWPCRRWWSTXVVFPPVARPPGSAGPHFLGGAGVRGLEIGGNFIKFTAIGVYLEDAAVPALAKKWGGKTADELASDAAFFRDVVTGDFEKFTRVTMILPLTGEQYAEKVTENCVAFWKAAGLYTDAEGVAVEKFREVFKPETFAPGASILFTHSPAGVLTVAFSKDSSVPAAGGVAIENKRLCEAVLESIIGERGVSPAAKLSLAARVSELLAKETAAPADAPQAEPVSITA

SEQ ID NO: 16949 - protein, 464 aa, Nicotiana tabacum
MASIALKTFTGLRQSSPENNSITLSKSLPFTQTHRRLRINASKSSPRVNGRNLRVAVVGGGPAGGAAAETLAKGGIETFLIERKMDNCKPCGGAIPLCMVGEFDLPLDIIDRKVTKMKMISPSNVAVDIGQTLKPHEYIGMVRREVLDAYLRDRAAEAGASVLNGLFLKMDMPKAPNAPYVLHYTAYDSKTNGAGEKRTLEVDAVIGADGANSRVAKSINAGDYEYAIAFQERIKISDDKMKYYENLAEMYVGDDVSPDFYGWVFPKCDHVAVGTGTVTHKADIKKFQLATRLRADSKITGGKIIRVEAHPIPEHPRPRRLQDRVALVGDAAGYVTKCSGEGIYFAAKSGRMCAEAIVEGSEMGKRMVDESDLRKYLEKWDKTYWPTYKVLDILQKVFYRSNPAREAFVEMCADEYVQKMTFDSYLYKKVAPGNPIEDLKLAVNTIGSLVRANALRREMDKLSV

SEQ ID NO: 16950 - protein, 175 aa, Glycine max
KYHFCETSKLNKGSLRDYSKTYARSKYYDEAKPWSERCDVAFACASQNEIDQSDAINLVNSGCRILVEGSNMPCTPEAVQILRKASVLIAPAMAAGAGGVVAGELELNHECSLMHWSPEDFESKLQEAMKQTYQRAMKAATDFGYQKESPEALVHGAVISAFLTIAQAMTDQGSI

SEQ ID NO: 16951 - protein, 256 aa, Geobacter metallireducens GS-15
MGVDFVTEGNVAYITLNRPDAMNALDPEGLVRLAEIWGEVKNNPEIRIAVLTGAGEKAFCTGTDMKKAKVPDECMAALYYKEGQPIIPHMKMWKPIIACINGYAVGGGLEMALACDLRICSTTAKFALTETKVASLAGLNGTQCLPRAIPQAVAMKMLLTGEMIDAAEAHRVGLVSDVAEPDQLMALARKYAEKIASNAPLSVMAAKQAAVMGMDMPLPHAIDFSYLLWGILRDTEDRKEGFTAFAEKRAPQYRGR

SEQ ID NO: 16952 - protein, 475 aa, Bordetella parapertussis
MYEQLALYIDGEFLTGDGRRTQDVVNPATLEVLGQLPHASEADLDRALAAAQRAFETWKRTSPMERAAILRKVGQLSRDRAQEIGRNMTLDQGKPLAEAVGEVASCSEHADWHAEECRRIYGRVIPPRNPDVRQFVVREPIGVCAAFTPWNFPYNQAIRKIAAALGAGCTVVLKGPEDSPSAVMAIARMFHEAGLPKGCLNIVWGEPAKISDYLIRSPIVRKVSFTGSVPVGKQLAALAGAHMKRVTMELGGHSPVLVFDDADVDRAAEMLERFKVRNAGQVCVSPTRFYVQNGAYEQFLARFTEVLKNIKVGDGLEKGTDMGPLAHERRVPAMSTFVDDALKHGGKVVLGGDAPDRKGYFFSPTVVTELPDNAMLMTEEPFGPLAPVVRFTDTDEVLRRANSLPFGLSSYVFTNSLKTATKVSNALEAGMVNINHFGSALAETPFGGIKDSGIGSEGGLETFDGYLVTKYITHI

SEQ ID NO: 16953 - protein, 195 aa, Azotobacter vinelandii
YRDNGIDLRLGCKVVDIDRENREVTRSDGSHAQYDRLLVATGSSPFILPIPGKDLQGVIGYRDIADTRAMMETARSHRHALVIGGGLLGLEAANGLRLRGMEVTVVHLGDWLLDRQLDRTAGKLLQNAGGTRASRFRLNTNTAPCSTMPGRVASAHFSDGEECPADLVVMRAGIRPNVELAERAGLECDRGIRVD

SEQ ID NO: 16954 - protein, 331 aa, Yersinia enterocolitica
MSQNTLKVNELHEDADFDENSTETEIFDEKALVEDEPTESELAEDELLAQGVTSGADATQLYLGEIGYSPLLTAEEEVYFARRALRGDVPSRRRMIESNLRLVVKIARRYSNRGLALLDLIEEGNLGLIRAVEKFDPERGFRFSTYATWWIRQTIERAIMNQTRTIRLPIHIVKELNVYLRTARELSHKLDHEPSAEEIAEQLDKPVDDVSRMLRLNERITSVDTPLGGDSEKALLDILSDENENGPEDTTQDDDMKQSIVKWLFELNAKQREVLARRFGLLGYEAATLEDVGREIGLTRERVRQIQVEGLRRLREILQAQGLSIEALFRE

SEQ ID NO: 16955 - protein, 471 aa, Chromobacterium violaceum ATCC 12472
MSKRYRTALVWLRRDLRLDDHAAFYHALKHSEAVLPVFVFDASILAALPRDDRRVDFIWQSAAALKAELNQLGGDLLIRHGLPQHEIPRLAAELGAEAVFCNRDYEPAARARDAEVAQRLAEQGVAFRDSKDQVIFETDEVLTGAGKPFSVFTPYKNAWLKKLTPFHLQAYPVRRYLDALMPREPQSMPSLADIGFLPSDLASLPVKAGAAGAEALFADFAGRIERYKAQRDFPGVKGVSYLSVHLRFGTLSIRRLAAYAWHDGGEGAMTWLSELIWRDFYQQVLWHRPDAAKHAFKPEYDALPFPNDPEWFDAWREGRTGYPLVDAAMRQLNRSGYMHNRLRMVAASFLVKDLLIDWRWGEQYFAEKLLDFDLAANNGGWQWAASTGCDAQPYFRIFNPVSQSEKFDPDGRFIRRYVPELAALPDKLIHAPWQAKPEQLMSAGVRLGRDYPHPIVDHAVQRELALALFKR

SEQ ID NO: 16956 - protein, 495 aa, Treponema pallidum subsp. pallidum str. Nichols
MTACVCLITIGRKIPDLRARGGTQEDAKPVIKCWFDGVQVGPLSSVRNALGSRAGCARCLRGPFGCSAVDPSFRFFVPPCCVRACGVRRICATDLLRRIFMAKEKFARTKVHMNVGTIGHVDHGKTTLSAAITSYCAKKFGDKQLKYDEIDNAPEEKARGITINTRHLEYQSDRRHYAHIDCPGHADYVKNMITGAAQMDGGILVVSAPDGVMPQTKEHLLLARQVGVPSIIVFLNKVDLVDDPELLELVEEEVRDALAGYGFSRETPIVKGSAFKALQDGASPEDAACIEELLAAMDSYFEDPVRDDARPFLLSIEDVYTISGRGTVVTGRIECGVISLNEEVEIVGIKPTKKTVVTGIEMFNKLLDQGIAGDNVGLLLRGVDKKEVERGQVLSKPGSIKPHTKFEAQIYVLSKEEGGRHSPFFQGYRPQFYFRTTDITGTISLPEGVDMVKPGDNTKIIGELIHPIAMDKGLKLAIREGGRTIASGQVTEILL

SEQ ID NO: 16957 - protein, 128 aa, Triticum aestivum
QYSDKVTENCVAYWKATGVYTDAEAAAVDKFKEAFGPHSFAPGASILFTHSPAGVLTVAFSKDSSVPESGGVAIDNARLCEAVLESIIGEHGVSPAAKLSLATRVAELLKGASHAGGEPAAEPVSVSV

SEQ ID NO: 16958 - protein, 331 aa, Salmonella typhimurium LT2
MTIKVGINGFGRIGRIVFRAAQKRSDIEIVAINDLLDAEYMAYMLKYDSTHGRFDGTVEVKDGHLIVNGKKIRVTAERDPANLKWDEVGVDVVAEATGIFLTDETARKHITAGAKKVVLTGPSKDNTPMFVKGANFDKYEGQDIVSNASCTTNCLAPLAKVINDNFGIIEGLMTTVHATTATQKTVDGPSHKDWRGGRGASQNIIPSSTGAAKAVGKVLPELNGKLTGMAFRVPTPNVSVVDLTVRLEKAATYEQIKAAVKAAAEGEMKGVLGYTEDDVVSTDFNGEVCTSVFDAKAGIALNDNFVKLVSWYDNETGYSNKVLDLIAHISK

SEQ ID NO: 16959 - protein, 613 aa, Clostridium thermocellum ATCC 27405
MCGIAGWINLKSDLTNQKEILNSMIDRLTPRGPDASGSWISPNALIAHKRLIVVDPEGGIQPMVRRQGENTYVITYNGELYNTADLRNELESRGHEFLTSSDTEVLLVSYIEWGAKCVEHLNGIYAFGIWDEGKKRLFLGRDRFGVKPLFYAQRGDSLIFGSELKALLANPLVEPKLDAEGLAEIFALGPARTPGHGIFKDVYELKPAHSMIFDINGIQIRKYWSLESYPHTDSEKATISKVRDFVLDAITRQLVADVPVCTFLSGGLDSSAITAVASKTFASQGKGQLNTFSVDYVDNDIYFKPSMFQPNSDEPWIKKMSESFNTCHHYVKFDTPQLVDALIDAVKARDLPGMADIDSSLFLFCREVKKFSVVALSGECADEIFGGYPWFHNEKMLFADTFPWSVSVHERTKILSPEILNLIKPEEYIQRRYRETLSEVPHLKGENRIEARRREIFYLNINWFMATLLDRKDRMSMASGLEVRVPFCDHRLVQYVWNIPWELKMYNKREKGLLRQALKGILPDDIIERKKSPYPKTHNPSYKKAVSKWLLEILNDSSSPLHQLIDVKVVRSMAEGNSDNTDPWFGQLMAQPQMLAYLIQVDFWLRDNHISIV

SEQ ID NO: 16960 - protein, 696 aa, Marchantia paleacea var. diptera
MAARTIVWFRRDLRVEDNPALVAAARAGIVIPVFIWSPEEDGQFHPGRVSRWWLKQSLIHLDSSLKSLGSPLIMRKSPDTLTVLLDIVQQVGATQVFYNHLYDPVSLVRDHRVKQGLSIHNIPVHTFNGDLLYEPWEVYDDEGQAFTTFDDFWDKCMNMPFEPEAPLLSPRRLVGLPPGRISVGRIDDLGLENEYERSSNALLGRAWAPGWSSANKALEVFMKGPLHDYATHRIKADNANTSQLSPHLHFGEVSVRKIFHEARTKQILWARENSYVGEQSVGMFLRAIGFREYSRYLSFNFPFTHERSLLANLKSFPWRIDENSFKSWRQGRTGYPLVDAGMRELWATGWLHNRIRVVVSSFCVKFLQLPWRWGMKYFWDTLLDADLECDVLGWQYISGSLPDGHELDRMENPQIEGYKFDPEGEYVRRWLPELSRLPTEWIHHPWDAPANVLRAAGVELGSNYPLPIVDISSARDQLQQSLAEMWEREAASKAALANGSEEGLGETVETPGSCGPGVKMDVHRVVIRSSRAACSTASSRRDQLVPCMPTEDHKLAAASIMNWNQSPVDEEDEPVQPAFVPSQTGGLLDRPSDVRAEVIAHPPSDSSMAEAVHVDNELNSTAESSAAVGRRSEESRGEVPVWPQSSSSRPQRPHLEGLVPVVPEVRRATMNRRHLHSMQMVNLEARTSHKTSSLSA

SEQ ID NO: 16961 - protein, 73 aa, Glycine max
LCFYTTQEQLKKLFSPFGLVTQADLALDPITKRPKGFGFVSFKSEIEAEKALRAMNGRIVSGRLILVELANEK

SEQ ID NO: 16962 - protein, 164 aa, Candida glabrata CBS 138
MAAKSFYELECKDKKGETFKFDTLKGKVVLIVNVASKCGFTPQYKDLESLYQKHKDEGLVILGFPCNQFGGQEPGSQEEIGNFCQLNYGVTFPIMHKIEVNGDNTDPVYDFLKSQKSGLLGLNRVKWNFEKFLVDKHGKVHQRYSSLTKPMSIEDDIKQLLAQK

SEQ ID NO: 16963 - protein, 228 aa, Nostoc punctiforme PCC 73102
MNVADDKTIVREYFNSTGFDRWKRIYGDGEVNKVQLDIRNGHQQTVDTVLGWLKADNNLPELSICDAGCGVGSLSIPLAVDGAKVYATDISEKMVEEGKDRAKQTLGNDENPTFAVQDLESLSGSYHTVICLDVLIHYPQEKADEMISHLCSLAQSRIILSFAPKTCALSILKKIGSFFPGPSKATRAYLHREADVVRILESNGFSLQRKAMTKTRFYFSRLLEATRK

SEQ ID NO: 16964 - protein, 608 aa, Aspergillus oryzae
MGLIRRFVGMTGGQIFHEMMQRHGVKHIFGYPGGTILPVFDAIYNSKHFDFILPKHEQGAGHMAEGYARASGKPGIVLVTSGPGATNVVTPMQDALSDGTPMIVFSGQVATAAIGSDAFQEADILGISRGCTKWNVMVRNVAELPQRINEAFEIATSGRPGPVLVDLPKDVTAGILRKTTPTGPAIPRISTYANTDANQKLLTKSISHVAKLINTAKKPVIYAGQGVIQSPNGPQLLKELADKASIPVTTTLQGLGAFDELDEKSLHMLGMHGSAYANMSIQEADLIIALGARFDDRVTLNIAKFAPAARAAAAKGLGGIVQFEILPKNINKVIQSTEAVVGDIAENLTHLLPHVNRTSMTERQAWFKQINEWKTKWPWNAYTRDERPHLIKPQYLIEELSNLTAGRKQETIITTGVGQHQMWTAQHFRWRHPRSLITSGGLGTMGFGLPAAIGAKVARPDTLVIDIDGDASFSMTLTELTTASQFNIGVKVIVLNNEEQGMVTQWQNLFYEDRYSHTHQRNPDFMGLAGAMHIQHRRVSKPEEVVDSLKWLIHTEGPALLEVMTDKKVPVLPMVPAGSGLHEFITWDAHKDMERRSLMRDRTCGLHG

SEQ ID NO: 16965 - protein, 154 aa, Lupinus luteus
MGVLTDVQVALVKSSFEEFNANIPKNTHRFFTLVLEIAPGAKDLFSFLKGSSEVPQNNPDLQAHAGKVFKLTYEAAIQLQVNGAVASDATLKSLGSVHVSKGVVDAHFPVVKEAILKTIKGVVGDKWSEELNTAWTIAYDELAIIIKKEMKDAA

SEQ ID NO: 16966 - protein, 1032 aa, Glycine max
MTDITGDIAEEISFQSFDDDCRLLGNLLNDILQREVGTNLLDKIERTRVLAQSGCNMRQAGIVNMAEMLEKQLASELSKMTLEEAFTLARAFSHYLTLMGIAETHHRVRKGGNMAQIAKSCDDIFNQLVQGGVPPEELYDTVCKREVEIVLTAHPTQINRRTLQFKHIRIAHLLDYNDRPDLSTEDREMVIEDLVREITSIWQTDELRRQKPTPVDEARAGFNIVEQSLWKAVPHYLRRVSNALKKHTGKPLPLTCTPIKFGSWMGGDRDGNPNVTAKVTKDVSLLSRWMAIDLYIREVDSLRFELSMNQCSDRLSRLAHEILEAKHENRRENWNQSANRSLTLPTQLPARAHLPSIAENGESRHPRLDIPAPDYMQSNHKDGGVSVSSTTSKLANPNTRLPGTSSANSSASSAALGQKKLYAESQTGKSTFQKLLEPMLPQLPGIAPYRIVLGNVKDKLEKSRRRLEILLEDVACDYDPLDYYETSDQLLEPLLLCYESLQSCGSGVLADGRLADLIRRVATFGMVLMKLDLRQESGRHAEALDAITQYLDMGTYSEWDEEKKLDFLTRELKGKRPLVPVSIEVHPDVKEVLDTFRIAAELGSDSLGAYVISMASNASDVLAVELLQKDARLAAIGELGKACPGGTLRVVPLFETVKDLRGAGSVIRKLLSIDWYHEHIVKNHNGHQEVMVGYSDSGKDAGRFTAAWELYKAQEDVVAACNDYGIKVTLFHGRGGSIGRGGGPTYLAIQSQPPGSVMGTLRSTEQGEMVEAKFGLPQIAVRQLEIYTTAVLLATLRPPIPPREEKWRNVMEEISNISCQCDRNVVYENPEFLAYFHEATPEAELGFLNIGSRPTRRKSSVGIGHLRAIPWLFAWTQTRFVLPAWLGVGAGLKGACEKGYTEELKAMYKEWPFFQSTIDLIEMVLGKADIPIAKHYDEVLVTKERQELGHELRSELMTAEKFVMVISGHEKLQQNNRSLRRLIENRLPFLNPLNMLQVEILKRLRRDDDNRKIRDALLITINGIAAGMKNTG

SEQ ID NO: 16967 - protein, 292 aa, Candida albicans SC5314
MSAIYKALQSKSSKETSEKTKHINRQRLLVISSRGITYRHRHLIQDLLALLPHARKEPKFDSKKNLHQLNEVAELYNCNNIFFFECRTQQDLYLWISKPPNGPTLKFHIQNLHTLDELNFTGNCLKGSRPILSFDKSFLENDHYKLLKEMFLQTFGVPPNARKSKPFIDHVMTFSIVDGKIWIRNYQINETLDVKENDKIEDDEDYDVDQLNLVEIGPRLVLTLITVLEGSFSGPKIYENKQYVSPNFVRAQLKQQAADQAKSRSQAALERKIKKRNQVLKADPLSNDALFK

SEQ ID NO: 16968 - protein, 177 aa, Triticum aestivum
  misc_feature (101)..(101): Xaa can be any naturally occurring amino acid
  misc_feature (126)..(126): Xaa can be any naturally occurring amino acid
MAPTVMASSATSVAPFQGLKSTAGLPVSRRSNGASLGSVSNGGRIRCMQVWPIEGIKKFETLSYLPPLSTEALLKQVDYLIRSKWVPCLEFIKVGFIFREXHNASPGYYDGRYWTMWKLPMFGCTXDATQVINEVEEVKKEYPDAYVRIIRFDNMRQVPGVSFIAFNPPGCDDVDKA

SEQ ID NO: 16969 - protein, 439 aa, Triticum aestivum
HYRILKLCIQRVGSSPIWSTCRRPRLVISVSRPRSVKACIVSCGGLCPGLNTVIRELVCGLAHMYNVNNIFGIQNGYKGFYSSNYVAITPKTVNDIHKRGGTVLGTSRGGHDTKKIVDNIQDRGINQVYIIGGDGTQKGAYEIYKEIRKRGLKVAVAGVPKTIDNDIAIIDKSFGFDSAVEEAQRAINSAHVEACSAENGIGLVKLMGRYSGFIAMYATLASRDVDCCLIPESPFYMDGEGGLLQYVERRLKENKHMVIVVAEGAGQDIIAKSIPASDQLDASGNKLLLDIGLWLTHKIKDHFKSKKMEMTIKYIDPTYMIRAIPSNAADNVYCTLLAHSAIHGAMAGYSFTVGMVNGRHAYIPFYRVTSTRNKVKITDRMWARLLSSTNQPSFLRQKDIDEAREADRLTNKPPLPPVANQNVAKAFDQSASASSNGEI

SEQ ID NO: 16970 - protein, 509 aa, Candida albicans SC5314
MITKRLYSTIESSKKVLGTLSNPNLVKTEAYINGKWVPSSSGETFTVTNPALYPNPESELATMQSMSEEDFNSAIESADIAFNKFKKTTGRYRSELLLKLYNLMISNKDDLAKLVVLENGKPYADALGEVNYAASFFQWFSEEAPRIYGDIIPSANGTNRILTFKQPIGVCGILTPWNFPLAMITRKLGAAIATGCTAVIKPASETPLSATALAFLAEEAGFPPGVINVLPSADASGSGKYLTEHPLIKKVSFTGSTPVGKILMNQSASTLKKLSFELGGNAPFIAFDDVDVDKAVNGAIASKFRSSGQTCVCANRIFVHEKIYDEFAKKFVDKLKNETVLGNPLASGVTHGPVIHDRSMKKVRQHIEDAVDKGATILLGGSKRPDLGENFHDLTVLGDVTTEMLITQEETFGPVAPLIKFKTDDEVIKMANDTTVGLAGYFYANDVAKVFKIAEALNVGMLGVNTGAISEAALPFGGVGESGFGREGSKFGVEDYLVIKSAVLGGIEN

SEQ ID NO: 16971 - protein, 438 aa, Ehrlichia ruminantium str. Welgevonden
MVRFFVLFLIIFCITTNNAISVNVEVIHEKLDNGMEIYILPNNRSPAVMHMVLYKVGGSDDPVGYSGLAHFFEHLMFSGTEKFPNLISTLSSIGAQFNAGTSASFTMYHELVPKQYLPLVMDIESDRMKNLKITDNAFTREQKVVLEERKMRTESKASTILEEEMENAFYYNGYSRPVVGWEHEINQYNKKIAEAFYKSHYSPNNAILLVAGDVDSNEVIKLAKQYYGKIEPSTQEFPRVPRLEPQHKVNMTITLEDESVEVPELFLMNQIPSKLTKNYITNMITAEILGNGRFSMLYNDLVLNNPIVTSISTDYNHLVYSDTFLSIHAVPKDGITIQTVEEEIYKCINDYIENGIPEEYLEAAKYRTKASMTYAFDGLDFISQFYGISLVIGIPLSEINNMFNLIDNITIDDVNSTLQNIFQNKAKFAGHLLPKSGA

SEQ ID NO: 16972 - protein, 320 aa, Burkholderia mallei ATCC 23344
MSTPKHAKVLILGSGPAGYTAAVYAARANLSPLLITGIAQGGQLMTTTDVENWPADADGVQGPELMQRFLAHAQRFNTEIVFDHIHTAKLHEKPIRLIGDSGEYTCDSLIIATGASAQYLGLQSEEAFMGRGVSACATCDGFFYRGQNVAVVGGGNTAVEEALYLTGIAKKVTVIHRRDKFRAEPILVDRLLEKEKEGAVEIKWDHVLDEVTGDDSGVSGVRIKHVTTGATEDVAVQGLFIAIGHKPNTDIFKGQLEMKDGYIITNSGLSGNATGTSVPGVFAAGDVQDHIYRQAITSAGTGCMAALDAQRYLESLHDHK

SEQ ID NO: 16973 - protein, 109 aa, Pseudomonas fluorescens PfO-1
MSSDLIKHVSDASFEADVLKAEGAVLVDYWAEWCGPCKMIAPVLDEIAETYKGKLTVAKLNIDENQETPAKHGVRGIPTLMLFKNGNVEATKVGALSKSQLAAFLDANI

SEQ ID NO: 16974 - protein, 288 aa, Escherichia coli
MAAKIIDGKTIAQQVRSEVAQKVQARIAAGLRAPGLAVVLVGSNPALQIYVASKRKACEEVGFVSRSYDLPETTSEAELLELIDTLNADNTIDGILVQLPLPAGIDNVKVLERIHPDKDVDGFHPYNVGRLCQRAPRLRPCTPRGIVTLLERYNIDTFGLNAVVIGASNIVGRPMSMELLLAGCTTTVTHRFTKNLRHHVENADLLIVAVGKPGFIPGDWIKEGAIVIDVGINRLENGKVVGDVVFEDAAKRASYITPVPGGVGPMTVATLIENTLQACVEYHDPQDE

SEQ ID NO: 16975 - protein, 147 aa, Brassica napus
LPLGIGLSLLLCCLLYMMVSVVIVGLVPYYAMDPDTPISSAFATHGIQWAAYLIALGAIMALSSTLMGSILPQPRILMAMARDGLLPSFFSDVNQRTQVPVKGTISTGFCAALLAFFMDVSQLAGMVSVGTLVAFTMVAVSVLILRY

SEQ ID NO: 16976 - protein, 404 aa, Chromobacterium violaceum ATCC 12472
MLSEQTRSLVKATVPVLQQHGVALTSHFYRRMFEHNPELKNVFNQGHQHSGQQQQALAMAVLAYARHIDDPSPLLPVLTRVAHKHVSLGIRAEHYPIVGKHLLASIRELLGEAAGDDLIQAWAEAYGLLADTLIGIENGMYGDATSADGGWSGWRPFRVAKKEIESEEIASFYLEPSDGGALPAFKPGQYVSVKRFVAEWGLSQPRQYSLSDAPNGEYLRISVKREDAAQGKPAGRVSNLLHREVQVGDVLELSAPQGDFFLHEERDGPAVLISAGVGQTPMQAMLGQLLKRGGREVRFLHAARHGGAHAMGAKVRQLADRHPQLKVHVCYETPRAQDAIGVDYQAAGRLNLADVKGIALLPDADYYLCGPLGFMRAQRDSLRGLGVAADRIHYEVFGSHPGDD

SEQ ID NO: 16977 - protein, 280 aa, Pericallis cruenta
VATPMDFETKDPENEMIKPTIEGVLSIIRSCVKAKTVEKLVFTSSAGTVNVQETQLSVYDESHWSDLDFIYSKKMTAWMYFVSKTLAERAAWEAAKENNIDFISIIPTLVVGPFITPSFPPSLITALSLINGLESHYSIIKQGQYVHLDDLCESHISLYENPKAEGRYICSSHDATIHQLAKMINEKWPEYHVPTQFAGIDEDVPIVSFSSKKLTDTGFKFKYDLEDMFKGAIDGCKEKGFLPYSTNKVKKELITFSIDGNGVEQKKQVKEGGIQIDQIC

SEQ ID NO: 16978 - protein, 677 aa, Magnaporthe grisea 70-15
MKNNSENGWVVQKFGGTSVGKFPDKIAEDIVQPYLRNNKIVVVCSARSSGKKVTGTTSRLLEVFRRLKSLEISIEPTQTELIDEARRIIQDICDDHVAAAETFIRDASRCAMLIKEIQDECLELCEYIVAAKRFHLEVNARSKDRVASFGEKLSCRFMACLLQDRNVEAQYVDLSDVLSYEGARRLDHTFYSDAAAVIRKKILACGDKVPIVTGFFGNVPGSLLDGDIGRGYTDLCAALIAVGLKAGELQVWKEVDGIFTADPTKVPTARLIGAITPSEAAELTFYGSEVIHHLTMDQVIKADPPIPIRIKNVKNPRGEGTIVVPDAVFAPGKELRRSRPSELDSVGRKTPKRPTAVTIKDGISVINVHSNKRSIAHGFFARVFSILDQNQVSVDLISTSEVHVSMAIHAASDNGGNFDRARAELGDCGEVSVLHDMAILSLVGADMKNMVGVAGKMFSTLGEHNVNIEMISQGASEINISAALVAFASATAMTLASIALPNWISYNITSIKGHSITRNIGLHKTCSSGIDPFSDSPTCRPFPIEREDCAGDERGFCSIWRTTGFLMSLAIVVELATLVGFLVIMAGGKMKRVTGWKILSCLLVSIATLLLMSMGTVAYIFDNDDKFSVPGWSLDKSWIMTTVSAAFCLLCAVVFPVSAHFLPAEGDYEFLRDPVHA

SEQ ID NO: 16979 - protein, 468 aa, Methylobacillus flagellatus KT
MLAQLFRTKPVEIGHHSGLKKCLSAFDLALLGIGCAIGTGIFVLTGIAAAVYSGPAVVISFVIAGFAAAFAGFAYAELASSVGGSGSAYGYSYVAFGEFIAWVIAWILLLEYGVGAAAVANGWSGYFINTLANFGIAIPEAWTKAPSQGGIINLPAFGIIWLLVFILISGVKQSSTVNNIMVAIKLSTIAIFLAIAVGHINSDNWHPFMPFGWFSSQADGSNIGILAGASLVFFAYFGFDAVSTAADEARNPQRDLPIGLIASVTFCTLIYILVSGVLTGVVHYSDLNVSSPVAYALSKLGYSWSSSLVATGVLAGLITVLLVLLYGLTRILYAMSRDGLIPAAFSKVNPDRQSPTRVILFCGSIISIVAGFFPLGTLAETVNIGTLASFVMVCVGVIVLRKRQPDLHRPFKNPGGPIIPLLGIISCSALMAFLPGETWHRFLIWVGIGIIMYFAYSMHHSKLRQRNS

SEQ ID NO: 16980 - protein, 328 aa, Flavobacteria bacterium BBFL7
MSEQIERVKCLIIGSGPAGYTAAIYAARADMKPLLYTGMEPGGQLTTTTEVDNFPGYPEGIDGPTMMVDLQKQAERFGTEVRIGMVTEVNFASEQGGIHTAIVDGKTKIEAHTVIISTGATAKYLGLPSEQRLRGGGVSACAVCDGFFYRGQDVAIVGAGDTAAEEATYLANICSKVTMLVRKGEMRASKAMQHRVAQTENIEVLFNSEVDEVLGDQVVDGLRIVNNQTNEKHDIAITGLFIAIGHKPNTDIFKGQLDMDEAGYLKTKAGSTYTNMPGVFASGDVQDKIYRQAITAAGTGCMAALDAERYLAEVGIVEEVIAGDYSIE

SEQ ID NO: 16981 - protein, 205 aa, Magnaporthe grisea
MSSRKKVLLKVIILGDSGVGKTSLMNQYVNKKFSASYKATIGADFLTREVLVDDRQVTMQLWDTAGQERIQSLGVAFYRGADCCVLVFDVNNSKSFDALDSWRDEFLIQASPRDPDNFPFVVLGNKIDVEESKRVISTKRAMTFCQSKGGIPYFETSAKEAINVEQAFEVIARNALAQEESEEFSGDFQDPINIHIDNDRDGCAC

SEQ ID NO: 16982 - protein, 151 aa, Chrysanthemum x morifolium
VATPMDFESKDPENEIIKPTIDGVLSIIRSCAKAKTVKKLVFTSSAGTVNVQKQQVPVYDESHWSDLDFIYSKKMTAWMYFVSKTLAEKAAWKATKENNIDFISIIPTLVVGPFISPSFPPSLMTALSLITGAESHYSIIKQCQYVHLDDF

SEQ ID NO: 16983 - protein, 447 aa, Salmonella typhimurium LT2
MDQTCSLESFLNHVQKRDPHQTEFAQAVREVMTTLWPFLEQNPRYRHMSLLERLVEPERVIQFRVVWLDDKNQVQVNRAWRVQFNSAIGPYKGGMRFHPSVNLSILKFLGFEQTFKNALTTLPMGGGKGGSDFDPKGKSEGEVMRFCQALMTELYRHLGPDTDVPAGDIGVGGREVGFMAGMMRKLSNNSSCVFTGKGLSFGGSLIRPEATGYGLVYFTEAMLKRHGLGFEGMRVAVSGSGNVAQYAIEKAMAFGARVVTASDSSGTVVDESGFTPEKLARLCEIKASRDGRVADYAREFGLTYLEGQQPWSVPVDIALPCATQNELDVDAARVLIANGVKAVAEGANMPTTIEATDLFLEAGVLFAPGKAANAGGVATSGLEMAQNAARLSWKAEKVDARLHHIMLDIHHACVEYGGDNKHTNYVQGANIAGFVKVADAMLAQGVI

SEQ ID NO: 16984 - protein, 427 aa, Oceanobacillus iheyensis HTE831
MSVEKINMPQLGESVTEGTINTWLVAVGDKVNKYDPIAEVMTDKVNAEVPSSFSGVIKELIAEEGETVEVGQLMCYIDTEESSSASKPKSSEDSTKTNDNIENDTNSKEDVNKSMKKRYSPAVLRLAQENDIDLTMIDGSGRAGRITRKDVEKFMKEGTKNDPKEEQKEPSHQTIPKVNQSGTPSVRSNSIASEKGDKEIPVKGVRKAIADNMVRSKQEIPHAWMQVEVDVTNMMKYRNSIKDKFKSDEGYSLTPFAFFIKAVSQALREYPELNSAWAGDKIIQKKDIHLSIAVAKENELFVPVIRHADEKTIKAVARDIYELANKARNGKLSSEDMQGGTFTVNNTGTFGSVSSMGVINHPQAAILQVESIVRKPVIIDDMFAARDMANLSLSLDHRILDGLVCGRFLARVKEILEGMNVDTVSLY

SEQ ID NO: 16985 - protein, 302 aa, Arabidopsis thaliana
MEFHLEHPLSHSSLHNNFNDDTDYETLPHSLFLVEFQHMPSSHYFHSLKSSAFLLSNRNQAISSITQYSRKFDDPSLTYLAVNYLDRFLSSEDMPQSKPWILKLISLSCVSLSAKMRKPDMSVSDLPVEGEFFDAQMIERMENVILGALKWRMRSVTPFSFLAFFISLFELKEEDPLLLKHSLKSQTSDLTFSLQHDISFLEFKPSVIAGAALLFASFELCPLQFPCFSNRINQCTYVNKDELMECYKAIQERDIIVGENEGSTETAVNVLDQQFSSCESDKSITITASSSPKRRKTSTRRY

SEQ ID NO: 16986 - protein, 503 aa, Erwinia carotovora subsp. atroseptica SCRI1043
METVSNFIQGAIASSNSQRYAAVYNPATGEQIRQVVMSDKAEVEQAIASAAAAFPAWSKHSPLRRARVLFRFKALLEERMDTLARLISQEHGKVYSDAVGEVTRGLEVVEFACGIPHLQKGEHSANVGTGVDSHSLMQPLGVCVGITPFNFPAMVPMWMFPIALATGNTFVLKPSEKDPSFSLLLAQLLKEAGLPDGVFNVVQGDKEAVDVLLTDPRVQAVSFVGSTPVAEYIYQTASAHGKRCQALGGAKNHCILMPDADMDMAASAIMGAAFGAAGERCMALSVVVAVGDDTADALHQRLSAQIKAMRVGPGLVDGQENEMGPVISAPHRAKIADYIQSGVDQGATLRIDGRTLSVQGHPQGYFIGPTLFDNVTPEMKIYQEEIFGPVLSVVRVPDYQTAVTLINNHEYGNGTAIFTRDGETARQFCEEVQAGMVGVNVPIPVPMAFHSFGGWKRSIFGPLNVHGSDGVRFYTRMKTVTSRWPASVRLEHHTSSFIMPTLE

SEQ ID NO: 16987 - protein, 410 aa, Arabidopsis thaliana
MDRLEGPPRLILVADLDCTLVDHDDPENNDLLRFNALWEAHYRHDSLLVYCTGRSFSSYSSLRKKRPLLTPDIAVTSVGSEIVYGGGESTVSDVVWTARLDYKWNRDIVVEETLKFPKLEPQPDKSQEEHKVSFFVGREDAVEIMKVLPGILEERGVDVKLVYSNGYAFDVLPRGAGKQGALTYLLDKLDIEGKQPSNTLVCGDSGNDAELFNISDVYGVMVSNSHEELLQWYEENAKDNPKIFHASERCGAGMIEAIQRFNLGPNVSPRDVMDTENFHGESLNPAHEVVQFYLFYERWRCGEVEKSDKYLQNLKSLSSPLGIFVHPSGVEKPIHEWIDEMENLYGDGKEKKFRIWLDNVTSSHISSDTWLAKFVKHELSGYTVEVCFHVLMSSSCLQREKYGLVQQKSY

SEQ ID NO: 16988 - protein, 94 aa, Glycine max
  misc_feature (28)..(28): Xaa can be any naturally occurring amino acid
  misc_feature (36)..(36): Xaa can be any naturally occurring amino acid
LNGPGDRILLLVLGDLHIPHRCKNITAXFKKLLVPXKIQHILCTGNLCTKESYDYLKTLAGDVHIVRGDFDENLNYPEQKVVTVGQFKIGLIHG

SEQ ID NO: 16989 - protein, 381 aa, Raphanus sativus
NRTLVSPGNVFELGFFKTTSSSRWYLGIWYKTLSDRTYVWVANRDNPLSNSTGTLKISGNNLVLLGDSNKSVWSTNLTRRNERSPVVAELLANGNFVMRDAGEFLWQSFDYPTDTLLPEMKLGYDLKTGLNRFLTSWRSSDDPSSGDFSYKLEAQRLPEFYLSSGIFRLHRSGPWNGIGFSGIPDDQKLSYMLYNFTENSEEVAYAFRMTNNSIYSRLTLSSEGYIQRLTWDTSLGIWNMVWSSPLDSQCDMYKMCGPYAYCDVNTSPICNCIQGFNPSDVEQWDLKSWSGGCIRRTPLSCSIDGFTRMNNVKLPETTMAIVDRSIGVKECEKRCLSDCNCTAFANADIRNGGTGCVIWTGRLDDMRNYVTDGQDLYVRLA

SEQ ID NO: 16990 - protein, 254 aa, Acinetobacter sp. ADP1
MTPQQIELVKSTVPVLREHGVTLTSYFYNRMLNNHPELKNVFNLDHQSTGRQPRALAAAVLAYAEHIEQPEKLAKAVERITTKHVSLNIQPEQYAIVGENLLHSISEVLNVPFESELIEAWKQAYLQLADILIEVEKEKYHQLAKQDGGWTGWRSFKIIAIQEQYEGKCFKISATDQQAILAATLGEYISVKVHVPEKELDQPQQFNLNTTQADDHYEFVVKPEPAHSDYDVANILLNHYSLGDEVMVSAPIRN

SEQ ID NO: 16991 - protein, 478 aa, Pediococcus pentosaceus ATCC 25745
MGVFILVSWKARTSQKETSMVKVVKFGGSSLANAAQYQKVIEILRADPERRIVVVSAPGKRFKDDVKVTDLLIKYANASGENVKVARQAVLDRYQEIADAYHVSDSDFEQINVHLIDLANLHHANKACRLAHFKAAGERLNAILMALVLKKFNVTARFVDPKQLGIKAHGDYNNAILDQHSYAQIEAVCSNLLDEAEYLVVPGFYAYNQNGEVCTFSRGGSDITGAILARGFQAQLYENFTDVDSIYSADPKIIAQPHPIREMTYREMRELAYAGFSVFHDEAIIPAIEAQVPIVIKNTDHPNLPGTVIEPEQNYASDLEITGVASSSRFAALYIHKYLLNREVGFTLKLLKILYRYDISYEHMPSGIDDLTIIFNQNQITDEILPSLLSDIREELHTDQLEWIDDYAILMVVGEGMRDKVGVVDRIVNALARKQIGIQMINQGASRISTMLGVHQNQVNQAVREIYREFFKNKGRAD

SEQ ID NO: 16992 - protein, 771 aa, Ustilago maydis 521
MSKQELLLQVTTDVICPWCFVGSRRLKAFLNSEDYKTQIAPHVRLVLKLEPYILDPRLPATSYDTPDKYYDAIETTPYDKNVPPTKKFYYGSKFGGGLDAFDAKISAAASELGMPKFDWTSEGKVGATWNAHRLVLKAGQLDEQNNSRADRDDLETALQSLQMRFMDRFYQDFHSNSKDMSDNTYLAGVAEELGLFDAQEAALTWLESDDLEYELGNKLQQAEMNGVQSIPFYIVNDGADHMSETGSHGSFLKMMQMAVAPYLSELSAERDEPDKPTRLGFAVVSNDDFSTLTFCVTRTATCGRLSGVPIAARVSLCLLAYIAPQETFTNVRYKEFAIRRGNKYLIEPLLRVGLFLVTVISSWAHCHCDYAHRLAEMTRATSVPSVYDTHCDGPGLLPVTKPWSQYYCQLRKYTSDVYATLKFPDFKHADYDCTGKTVLISGSNSGIGKQAALYFARAGATVVMACRFTATHEQNPEEARKEIVATAGVDDSKVELWEIDCSSLANIEKFGIKWRESGRTLDILVNNAGLSAGKRRITDEGFELTHVINLLSHCLLTFYLLPSLNKSAAPRIINTCSCFHAGGKLDFANMDNEKLTSLGPDCVQAYCDTKLWFLMWSVELQDRLSRSDDYRHVIVHGIHPGFVGSNIWHNPDTRIPYPLRIIFQSAISKLSINSEQGSYAIIHAALEPSLGLPKKLTSARNKLAVGESAKFGGKFINRNFVDIRRPEVDDVLARSRLWQRVLEDVAAAKRGVAADLPDHYESVKLLGQSTK

SEQ ID NO: 16993 - protein, 341 aa, Ipomoea batatas
MAYSNSSLKLLVALALVFATSAYLATSRTLSDSLMVVRHEQWMAQYGRVYENEVEKTKRFNIFKENVEYIESFNKAGTKPYKLGINAFADLTNQEFKASRNGYKLPHDCSSNTPFRYENVSSVPTTVDWRTKGAVTPVKDQGQCGCCWAFSAVAAMEGITKLSTGNLISLSEQELVDCDVKGIDQGCEGGLMDDAFSFIINNKGLTTESNYPYQGTDGSCKKSKSSNSAAKISGYEDVPANSESALEKAVANQPVSVAIDAGGSDFQFYSSGVFTGECGTELDHGVTAVGYGIAEDGSKYWLVKNSWGTSWGEKGYIRMQKDIEAKEGLCGIAMQSSYPSA

SEQ ID NO: 16994 - protein, 155 aa, Triticum aestivum
MARLNSKAVAAAVVLAAVVLMMAGREASAALSCGQVDSKLAPCVAYVTGRASSISKECCSGVQGLNGLARSSPDRKIACRCLKSLATSIKSINMGKVSGVPGKCGVSVPFPISMSTNCNKYVLIFRSTHPNACIFIFSRSRVVQILCIFPCGATP

SEQ ID NO: 16995 - protein, 354 aa, Sinorhizobium meliloti 1021
MLMEASFPFSLSAANQQPCYRGGPATLVCKAVIDETHDSKTFVFEDSQSRSFDFKPGQYISFKFEIEGKLCPRAYSICSTPTRPHNVQITVKRVPGGLVSNWLNDHMRPRMSVEIADIAGRFNYFDIPSRKPLLLSGGSGVTPVMSMLQYITDVVDQVDVEFVHFARTPKDIIFRDQLEFIARRFSNIKVHMVVGETGEETCFRGRMGTISASLMQSLVPDLPQREIFMCGPEGFMKAARAMAAEVPIRAVYEESFGERIPIEEPDKLGGEVYFSLSGKHGTCAPGETILEAALNSGIWIESSCHQGVCGSCKVKLTQGMVDMQDLGGLPACERSEGFVLACCSRPMGSVSIDA

SEQ ID NO: 16996 - protein, 319 aa, Gibberella zeae PH-1
MRPRLSQPVTTLRVLRRCYSSATAEPLIRVTNLPAPNTGHIRILELNRPSARNAISKALLANLRAEIDELHSQYGPNGEELPLPQRFGGAAGVDEKGPTRAVVLASAVDTSFCAGADLKERKGFTPGETAEFLTNLRNTFTSLSNLPIPTISAISSVALGGGLELALSTHFRVLSSNATVGLPETRLGIIPGAGGTHRLPALIGLSRARDLILTGRRVGAPEAYFLGIADRLVEVVPKDERDGSAILSEARKAALSEAVRLAQEICEGGPIGVRAGLQAVAWAREEVENKMYERVVNSEDRNEALKAFGEKRKPIFTGR

SEQ ID NO: 16997 - protein, 666 aa, Bassia scoparia
MASTCANPTFTPFTSKPLKPRSPFHSFPFPSNPKTPSSSFRNLKITSSLSSSQPPKPPSAVKTHSPPSPLTTDEPPQGFVSRFAPDQPRKGCDVLVEALEREGVTDVFAYPGGASMEIHQALTRSDSIRNVLPRHEQGGIFAAEGYARATGRVGVCIATSGPGATNLVSGFADALLDSVPLVAITGQVPRRMIGTDAFQETPIVEVTRSITKHNYLVLDVEDIPRIVKEAFFLANSGRPGPVLIDIPKDIQQQLVVPDWDQGVRLGGYVSRLPKSVFSANDEGLLEQIVRLMSEAKKPVLYVGGGCLNSGEELRKFVELTGIPVASTLMGLGAYPCNDDLSLHMLGMHGTVYANYAVDKADLLLAFGVRFDDRVTGKLEAFASRAKIVHIDIDSAEIGKNKQPHVSICADVKYALKGMNKILESRKGKLKLNYSSWREELGEQKKKFPLSFKTFGEAIPPQYAIQMLDELTNGNAIISTGVGQHQMWAAQHYKYRNPRQWLTSGGLGAMGFGLPAAIGAAVARPDAVVVDIDGDGSFIMNVQELATIRVENLPVKIMLLNNQHLGMVVQLEDRFYKANRAHTYLGNPSKESEIFPDMLKFAEACDIPAARVTKVGDLRAAMQTMLDTPGPYLLDVIVPHQEHVLPMIPSGAAFKDIINEGDGRTSY

SEQ ID NO: 16998 - protein, 415 aa, Thermotoga maritima
PEKSLYEMAVEQFNRAASLMDLESDLAEVLRRPKRVLIVEFPVRMDDGHVEVFTGYRVQHNVARGPAKGGIRYHPDVTLDEVKALAFWMTWKTAVMNLPFGGGKGGVRVDPKKLSRRELERLSRRFFREIQVIIGPYNDIPAPDVNTNADVIAWYMDEYEMNVGHTVLGIVTGKPVELGGSKGREEATGRGVKVCAGLAMDVLGIDPKKATVAVQGFGNVGQFAALLISQELGSKVVAVSDSRGGIYNPEGFDVEELIRYKKEHGTVVTYPKGERITNEELLELDVDILVPAALEGAIHAGNAERIKAKAVVEGANGPTTPEADEILSRRGILVVPDILANAGGVTVSYFEWVQDLQSFFWDLDQVRNALEKMMKGAFNDVMKVKEKYNVDMRTAAYILAIDRVAYATKKRGIYP

SEQ ID NO: 16999 - protein, 399 aa, Bifidobacterium longum DJO10A
MAKEKYERTKPHVNIGTIGHVDHGKTTLTAAISKVLHEEFPDVNPEYDFNQIDSAPEEAARGITINIAHIEYQTEKRHYAHVDCPGHADFVKNMITGAAQMDGAILVVAATDGPMAQTREHVLLARQVGVPKILVALNKCDMVDDEELIELVEEEVRDLLDENGFDRDCPVIHTSAYGALHDDAPDHEKWVQSVKDLMDAVDDYIPTPVHDLDKPFLMPIEDVFTISGRGTVVTGRVERGQLAVNTPVEIVGIRPTQQTTVTSIETFHKTMDACEAGDNTGLLLRGLGRDDVERGQVVAKPGSVTPHTKFEGEVYVLTKDEGGRHSPFFSNYRPQFYFRTTDVTGVIELPEGVEMVQPGDHATFTVELIQPIAMEEGLTFAVREGGHTVGSGRVTKILA

SEQ ID NO: 17000 - protein, 112 aa, Bartonella henselae str. Houston-1
MKKIEAIIKPFKLDEVKEALQKIGLHSITVTEAKGFGCQKGHTELYRGAKYVIDFLPKVKIEIVIADEKLEQAIDTIRKAAQTKHIGDGKIFVSSIDHAIRIGTGKSGIDAL

SEQ ID NO: 17001 - protein, 317 aa, Xanthobacter autotrophicus Py2
MLLNQAGAKGAAGTGAGAGASTGAGNGAAGGDIIDTTTQTFMAEVMEESKRRPVLVDFWAPWCGPCKTLTPVIEKVVKAAKGKVRLAKLNIDDHPVIPGKLGIQSVPTVYAFVNGQPVDGFQGALPEGQVKAFIDRLIGPSDDGLEEALAAADAALAQGDLTAAAEIFVGVLGEEPDNLKALTGLVRTQVAAGALEQAKATLAMVPADKQNDALVNAARAALDVAEQAAALGDLATLEARLDLDPADHQARFDLALALNGKGRREQALIHLLDIVKRDRAWNEDAARKQLVQLFEAWGPTDPLTLSGRKKLSAIMFA

SEQ ID NO: 17002 - protein, 957 aa, Arabidopsis thaliana
MSDHGEKTCPLCAEEMDLTDQQLKPCKCGYQICVWCWHHIVDMAEKDQIEGRCPACRTPYDKEKIVGMTVNCDSLASEGNMERKKIQKSKSKSSEGRKQQLTSVRVIQRNLVYIVGLPLNLADEDLLQHKEYFGQYGKVLKVSMSRTASGVIQQFPNNTCSVYITYGKEEEAVRCIQAVHGFILDGKPLKACFGTTKYCHAWLRNVACVNPDCLYLHEVGSQDDSFTKDEIISAYTSDSSSAKPIIKVPSTNATSVPRYSPPSGSGSSSRSTALPAAASWGTHQSLATSVTSNGSSDIQRSTSVNGTLPFSAVVANAAHGPVSSNDILKRPSRKEESQIVMDKVKPSVLKPLQHNVVVSGSERITAPDRDPTSNRLSSSVDSAYGGRDIDQPSAYSGRDIDKPSSTVSSFDAANEAVEDVPTVSNLLDGVACMRITMNCRDERPDITMAIGSQSDQGSIRQPGSEVSKLPDLEQCRIDSSINTDKKAISLEDRIPRTRPGWDWISDLQSQMQGSSKLQVEDISTLDSQRPHPEEDIIHSRLLSNLSSSSLDTNHMASRSSLPCEVRGSDRLHLPNGFGEKSMSSVEHSLFANEGRNKVNNAEDAILSNILSLDFDPWDESLTSPHNLAELLGEVDQRSSTLKPSNFLKQHNNQSRFSFARYEESSNQAYDSENYSIYGQLSRDKPIQESAMSRDIYRNNLGSVNGFASNFAGGLDNFAASPLFSSHKNPVSRPQVSAPPGFSAPNRLPPPGFSSHERVGLSSDTTLGNRFLDSTSLRNAYQVPPPVGNSNGASDIDFVDPAILAVGRGMVNADLDMRSGFSSQLNSFENETGLHMLRQQSLSSAQQVNGFHHDLRNLSPSLNDPYGFSSRLMDQTQGSSLSPFSQLPRQQPSANSILSNGHHWDKWNEGQSVNNIGMAELLRNERLGFNGSLYNNGYEEPKFRIPSPGDVYNRTYGI

SEQ ID NO: 17003 - protein, 513 aa, Oryza sativa (japonica cultivar-group)
MVLSHGVSGSDESVHSTFASRYVRTSLPRHARSPLSRAPLAPIDSVIDWEFRMPEQSIPKEAAYQIINDELMLDGNPRLNLASFVTTWMEPECDKLIQASVNKNYVDMDEYPVTTELQNRCVNMIAHLFNAPLGDSETAVGVGTVGSSEAIMLAGLAFKRRWQNKMKAAGKPCDKPNIVTGANVQVCWEKFARYFEVELKEVKLSDGYYVMDPAKAVDMVDENTICVAAILGSTLNGEFEDVKLLNDLLTKKNAETGWDTPIHVDAASGGFIAPFLYPELEWDFRLPLVKSINVSGHKYGLVYAGIGWCIWRSKEDLPEELIFHINYLGADQPTFTLNFSKGSSQVIAQYYQLIRLGFEGYKNIMENCQENAMVLKQGLEKTGRFNIVSKDNGVPLVAFSLKDSARHNEFEISDFLRRFGWIVPAYTMPPDAQHVTVLRVVIREDFSRTLAERLVLDVEKVLHELDALPARVVANGGDAAAASASEREMEKQREVISLWKRAVLAKKKTNGVC

SEQ ID NO: 17004 - protein, 410 aa, Citrus junos
LFEKLADLEAAPAALARLFSVDWYRNRINGKQEVMIGYSDSGKDAGRFSAAWQLYKAQEELIKVAKQYGIKLTMFHGRGGTVGRGGGPTHLAILSQPPDTIHGSLRVTVQGEVIEQSFGEEHLCFRTLQRFTAATLEHGMRPPISPKPEWRAMMDEMAVIATEEYRSIVFKEPRFVEYFRLATPELEYGRMNIGSRPSKRKPSGGIESLRAIPWIFAWTQTRFHLPVWLGFGAAFKHVIQKDIRNLHMLQEMYNNWPFFRVTIDLVEMVFAKGNHKIAALYDQLLVSKDLWSFGEKLRVNYEETKGLLLQIAGHKDLLEGDPYLKQRLRLRDAYITTLNVCQAYTLKRIRDPNYHVKVRPHISREIMESESVKPADELVKLNLSSEYAPGLEDTLILTMKGIAAGLQNTG

SEQ ID NO: 17005 - protein, 739 aa, Mangifera indica
MESCNCIEPQWPADELLMKYQYISDFFIALAYFSIPLELIYFVKKSAVFPYRWVLVQFGAFIVLCGATHLINLWTFSMHSRTVAIVMTTAKVFTAAVSCATALMLVHIIPDLLSVKTRELFLKNKAAELDREMGLIRTHEETGRHVRMLTHEIRSTLDRHTILKTTLVELGRTLALEECALWMPTQTGLELQLSYTLHQQNPVGYTVPIQLPVISQVFTSNHAVKISPNCPVARLRPLAGKYMPGEVVAVRVPLLHLLNFQINDWPELSTKRYALMVLMLPSDSARQWHVHELELVEVVADQVAVALSHAAILEESMRARDLLVVQNIALDRARREAETAICARNDFLSVMNHEMRTPMHAIIALSSLLQETELTPEQRLMVETILKSGNLLATLINDVLDLSRLEDGSLQLQLGTFNLHAVFKEVLNLIKPIASVKKLLVALNLAPDLPEYAVGDEKRFMQTLLNVVGNAVKFTKEGNILITAFVAKSESFLDSRTPEFFPVPSDNHFYLRVQVKDSGSGISPQDIPKLFTKFAQNQSIATRNSHGSGLGLAICKRFVNLMEGHIWIESEGLGKGCTAVFVVKLGIPESSNESKLSFMPKMSGPQTNFTGLKVLVLDDNGVSRSVTKGLLVHPGCDVMTVGSSEECLHVVSQEHKVVFMDVGIPGIDGYEVAVHIHQKFTRRHERPLIVALTGNTDKITKENCMSVGMDGVILKPISLEKMRSVLLGLLEHRVLFEAI

SEQ ID NO: 17006 - protein, 156 aa, Lophopyrum elongatum
MEYQGQQQHDQATTNRVDEYGNPVAGHGVGTGMGAHGGVGTGAAAGGHFQPTREEHKAGGILQRSGSSSSSSSSEDDGMGGRRKKGIKDKIKEKLPGGHGDQQQTAGTYGQQGHTGMAGTGGNYGQPGHTGMAGTDGTGEKKGIMDKIKEKLPGQH

SEQ ID NO: 17007 - protein, 250 aa, Oryza sativa (japonica cultivar-group)
MKFNIANPTTGCQKKLEIDDDQKLRAFFDKRISQEVSGDALGEEFKGYVFKIMGGCDKQGFPMKQGVLTAGRVRLLLHRGTPCFRGYGRRDGERRRKSVRGCIVSQDLSVINLVIVKKGENDLPGLTDTEKPRMRGPKRASKIRKLFNLSKDDDVRKYVNTYRRTFTTKNGKKVSKAPKIQRLVTPLTLQRKRARIADKKKRIAKKKSEAAEYQKLLAQRLKEQRERRSESLAKRRSKLSSAAKAAATTA

SEQ ID NO: 17008 - protein, 464 aa, Oceanobacillus iheyensis HTE831
MKVAKFGGSSVANAEQIQKVANIIKADPSRKVVVVSAPGKRFKDDVKITDLLIEFAGSHQRKQFEQSEKTLTIIMDRFKEIVDNLNLHTSIIDDIKQTIEEDLNKDLSPNQLLDAIKAIGEDSSAKIVSAYLQHIGIDATYMNPKDAGIYVSNEPGHAQLLPESFPIIKKLRDIDKVVVIPGFFGYAENGELVTFSRGGSDITGSILAAGTKAELYENFTDVDSVYAVNPTIVNNPKEINVLTYKEMRELSYAGFSVFHDEALIPAFREQIPVCIKNTNNPDSPGTMIVSERDARDNCVVGIASDVGFCSLYVSKFLMNREVGFGRKLLNIFEDEDISFEHAPSGIDDMSVIFRDHKFTPEKERIVIDRIKNELHVDTVSIHRDLAVIMVVGEGLVNTIGVAARATSSFSKARVNIEMINQGSSEVSMMFGIHAEDIDKAIQSLYHEFFEVSQKVEEAETKILT

SEQ ID NO: 17009 - protein, 1229 aa, Chromobacterium violaceum ATCC 12472
MQAYSSPHGTAYARWLDIPFDPAAPEHYCRVYAVLPDEAVATLAQTARLSALGSALGVFLLIGLVLAVYRRKYRQANARQAELAAIVESSHDAIIGCAADGRIDSWNRGAENMLGYPAQETLGKPLENFVKLPEPDDRAPPLLSVQREQTPLELICFLHDRDGRRLDAAVTMSPVKTSDKQGGVALIIRDITELVANERDIRKLNASLEQQVEQRTAEIRVFSALQNAILANAGYAIIATDRSGVITLFNPAAERMLGHAAADVIGRVSLTRFHDPRELAERARQIGERLGQQIESGFDAIVSPSRQARSDESQWTYIRRNGSTLPVLLTISALENDDGHVTSYLVIAADITQREQDRHQLELARDQLVKAAEVAELGIWSWTLDSDVLEWNDRMFEIYDLPRSFRDFGLYYNHWRGRVHPDDIERIEHQLQRALEGADAFNADFRILRQDGEARHLQVAARIEYGADGKAVRVTGINRDVTLEREREAWLSQAKSAADSANRAKSEFLANMSHEIRTPMNAILGMLQLIQQTGLNARQADYADKASSAARTLLGILNDILDFSRVEVGKLTLAPHPFSIDKLLRDVGVIMSANVGDKDVEVLFDIDPELPDWISADSLRLQQILINLSGNAIKFTERGEVVIAARLARRDEAGLRIAFSVRDTGIGIAPEHLQRIFEGFSQAEASTARRYGGSGLGLAISQRLVALMGGQLTVESEEGKGSVFRFEVDCAAAEAPKPAVDVVSLRDLSCLVIDDNENARQTQSGLLRAFGWRVDVAASGEEALALMEDPQAVDYDVILVDWRMPGMDGWETCKRLRELESRARASVIVLVTAYGREWLEQRRAQSPDMFDSLLVKPVTASMLFDAVADARSGNGRRDSHPAPGASPQFRLSGLRLLLVEDNQTNQQVARELLGGEGAEIDVADCGRAALDAVRGAAAPYDLVLMDIQMPDMDGYAVTRLLRQDFPADALPIVAMTANVMPADREAALASGMNDHVGKPFDLAQLVGVILHHTRGHDAPESRHPAAQSADGQLLNSEAAIVRFGGNREIYRHTLLSFCEESRALLDGLQRAHDFRQRQQGIQFLHTLKGLAATIGAEALAATAALEEKKLRATEQDWPPSYAVLERAAREAEQAARRLAGELAGASRALPHGADGQDPLPGLGDELARLTQLLREANVEAVQLFSSLRERYGRYRPGEFDRLNEAIMQMNFAAAVRLCEDMQQQKAPQS

SEQ ID NO: 17010 - protein, 483 aa, Arabidopsis thaliana
MIARRIWRSHRFLRPFSSSSVCSPPFRVPEYLSQSSSSPASRPFFVHPPTLMKWGGGSRSWFSNEAMATDSNSGLIDVPLAQTGEGIAECELLKWFVKEGDSVEEFQPLCEVQSDKATIEITSRFKGKVALISHSPGDIIKVGETLVRLAVEDSQDSLLTTDSSEIVTLGGSKQGTENLLGALSTPAVRNLAKDLGIDINVITGTGKDGRVLKEDVLRFSDQKGFVTDSVSSEHAVIGGDSVSTKASSNFEDKTVPLRGFSRAMVKTMTMATSVPHFHFVEEINCDSLVELKQFFKENNTDSTIKHTFLPTLIKSLSMALTKYPFVNSCFNAESLEIILKGSHNIGVAMATEHGLVVPNIKNVQSLSLLEITKELSRLQHLAANNKLNPEDVTGGTITLSNIGAIGGKFGSLLLNLPEVAIIALGRIEKVPKFSKEGTVYPASIMMVNIAADHRVLDGATVARFCCQWKEYVEKPELLMLQMR

SEQ ID NO: 17011 - protein, 512 aa, Zymomonas mobilis
MESPSYKNLIKAEDAQKKAGKRLLSSEWYPGFHVTPLTGWMNDPNGLIFFKGEYHLFYQYYPFAPVWGPMHWGHAKSRDLVHWETLPVALAPGDSFDRDGCFSGCAVDNNGVLTLIYTGHIVLSNDSLDAIREVQCMATSIDGIHFQKEGIVLEKAPMPQVAHFRDPRVWKENNHWFMVVGYRTDDEKHQGIGHVALYRSENLKDWIFVKTLLGDNSQLPLGKRAFMWECPDFFSLGNRSVLMFSPQGLKASGYKNRNLFQNGYILGKWQAPQFTPETSFQELDYGHDFYAAQRFEAKDGRQILIAWFDMWENQKPSQRDGWAGCMTLPRKLDLIDNKIVMTPVREMEILRQSEKIESVVTLSDAEHPFTMDSPLQEIELIFDLEKSSAYQAGLALRCNGKGQETLLYIDRSQNRIILDRNRSGQNVKGIRSCPLPNTSKVRLHIFLDRSSIEIFVGDDQTQGLYSISSRIFPDKDSLKGRLFAIEGYAVFDSFKRWTLQDANLAAFSSDAC

SEQ ID NO: 17012 - protein, 178 aa, Helianthus annuus
MASISSSVATVSRTAPAQANMVAPFTGLKSNAAFPTTKKANDFSTLPSNGGRVQCMKVWPPLGLKKYETLSYLPPLTETQLAKEVDYLLRKKWVPCLEFELEHGFVYRENARSPGYYDGRYWTMWKLPMFGCTDSAQVMKELAECKKEYPQAWIRIIGFDNVRQVQCIMFIASRPDGY

SEQ ID NO: 17013 - protein, 315 aa, Rhodopirellula baltica SH 1
MPTEKHFGPQGWTPDRIGSLQGKTYVITGANAGAGFEATRALLSKGAKVVMMNRNADKSAAAIETLKREFGRDADVTFVRLDLAVLDSVREAASELLDTVPQIDALICNAAIAQVAKQEITVDGFESQLGVNHFGHFLLCGLLFDWIEQSHGRIVVVGSNAYKMGLKKIQFEDLNFDKNYTAWNAYAQSKLAQMMFAYELQRRVEASSKHVQVRVCHPGASRTNLLNDTASLPMKMLWKVISPFIAQSAERGSWPEVMCATEDGLKPQALYGPTKRAETVGPVGECPLEPLALNQEAATQLWSVSEQKVALTWSP

SEQ ID NO: 17014 - protein, 324 aa, Glycine max
MHVDSAWRIGVEKNLLPVETVDAGLKSLASGCPNLRKLEVAGCSEVGISTIGAECATLQELELQRCDDAVLGGVAGCENLQILKIVGCVKGFYESVVSDIGLTILAQGCKRLVRLELVGCEGSFDGVKAIGQCCVMLEELVIVDHRMDDGWLAGVSYCENLKTLRVQSCKVIDGSPGLEEHLGCCEALERVHLHKCQVRDRNAVGALFSVCRNAREIVLQDCWGLDDATLSLAVVCRRVKLFYVEGCSLLTTEGLESVIEHWKELECLRVDSCKNIKDSDISPELATLFSTLKELKWRPDTKYLFESDVGVSMGKKGGKFFKRT

SEQ ID NO: 17015 - protein, 292 aa, Pyrobaculum aerophilum str. IM2
MREIIELYRKVGGFQALHVAEAYDVLKEAVEAADVRFLSFTGNLVATGLREFIADAIRRRLFNVVVTTAGALDHDIAKSMGAVYAPGSFDLDDVDLAAKGYHRLGNVVIKKEEYGPLVEKFILAHCEKLWGKTLATYELAYLLGAELPEDSILGAAARAGAKVFVPGIVDGAVGTALMTCNDLARTKRGGSRAFIDVLKDEEELREIVHNSKKLAALIVGGGISKHHVIWWAQFKGGLDYVVYISTAVEYDGSLSGARPREAISWGKVKPSAKSVFIFADATLVLPVLLKAL

SEQ ID NO: 17016 - protein, 1225 aa, Cryptococcus gattii
MSGFTPALGLHHTHSSSVLPTISNDAEPNPPTSSQPHQLAAYSHLYTTSPNYASKITNESSYSSSTTHHGFKYVRPSTSPLLKPPKGNSFSAYLGDWGSQELFTFLDIHKCGQCLAIFQKNDINGKLLLDLDVAALKSMGIDKISERVRLISGIKDLRRRVTDESVRAPFTLCSCPPERTLLPILPSHSNVLLDRWDCSSSTSCLGKREITFRPPPLDLRGHMPPRLSNHSSQSIASIDTHDVHTTNPQIGAVQQYPLDQPQSVPTNRSDSLTLRAPPSRNIGRRSPSPRHFEGCESQTDRFTTLNVASDQQVLSSTVNSLTLREDCHLQREEGLPSFLQVPHFRNTFTSSHKTLLSRRSDLARDDTTSHQPFGPAIAEQDNHIRCRIPDTITNIRETSQGDPNHPFAVKSSKSQSGMLDGVCDMVHGPMADGTKPKGKASVPLTGMSSPNIFPVNANSAALSLADLRRQLVKFINTEDDTIRTVNVMHVTSGIEILERALKKFGKWGTGMHSGPDVYSDDDVNGTLEIDGWGVYTESNPDESSKPLSESSLLQKCTFHREGTAIPDKGLFLHKKKRSQKRKNIHDFFGETPPPLMSPTLPTLFTGPHLGLVQGKSQPASESAPFSSTRLSTSANKGPNRASMISVMSGLGVPITCTLPSPQGNGLRLTGQVNSHKKKSMYNFFGHRPPSELISNHLADYFPSAKKSDVEKARHSLLRLSGGNSAYQGSWIDQGDNAPDHRSKPGSSQPPSLPPFEPSRDTLSDSLQAYASTAIHLSRPKHSTALRRRRDSDSSSRSHMSELMQTRLNRDHSDTASLLTVDEITAEVENRRTSAVLKGNCIEEAEDPPSIERDMLPKYEESKGLLHAVCSDGNSNVDDGMSYRGNSDLDPEEEEEEEEEEEEEEEGEEEEDEENEQGKAFTSTGSKRIIKWIKGALIGAGSFGSVYLGMDAQSGLLMAVKQVELSAGSAKTEDRKRSMLSALEREIELLKELQHENIVQYLDSSVDANHLNIFLEYVPGGSVAALLNNYGAFEEALVRNFVRQILTGLNYLHMRGIVHRDIKGANILVDNKGGIKISDFGISKKVENSLITGLRTNRPSLQGSVFWMAPEVVKQTSYSPKADVWSVGCLVVEMLTGTHPWADLTQMQAIFRIGSLARPAPPSDISVQADEFLRKTFEIEHTKRPTAAQLLKHPFIGSPRVRATSSNFINGAIVSEKMQVQIVKEM

SEQ ID NO: 17017 - protein, 375 aa, Triticum aestivum
MEGCACIEQFRRTDELLIKYQYISDFFIALAYFSIPLELIYFAKKSGSFPYRWVLLQFSAFIVLCGATHLINLWTFTKHTQTVDIVMTVTKVTTAVVSCATALTLIHIIPDLLGVKTRELFLKKKADELDREMSLMRSQEDTGRHVRMLIHEIRSTLDRHTILKTTLVELGRTLGLEECAFWMPSRSGSSLELTHTMRHHIPTGSSVEINLPVVNQVLSTNRAIIVPHTSPLARIHPVQGRHVPPEVAAVRVPLLHLSNFHPELLAKSYAIMVLMLPSDSVRKWLAHELELIEVVANQVAVALSQAEILEESMRARDLLTEQNVALDLALREAEMAIHARNVNRVGVELVGPEDADNVATINSSASAAKVHNAEP

SEQ ID NO: 17018 - protein, 106 aa, Rhizobium etli
MATVKVDINNFQSEVLESAEPVVVDFWAEWCGPCKMIAPSLEEISVEMEGKVKVAKLNIDENPELAAQFGVRSIPTLAIFKGGEVADISVGAKPKTALSNWISNAA

SEQ ID NO: 17019 - protein, 380 aa, Actinidia chinensis
MGLPKSFVSMSLLFFSTLLILSLAFNAKNLTQRTNDEVKAMYESWLIKYGKSYNSLGEWERRFEIFKETLRFIDEHNADTNRSYKVGLNQFADLTDEEFRSTYLRFTSGSNKTKVSNRYEPRVGQVLPSYVDWRSAGAVVDIKSQGECGGCWAFSAIATVEGINKIVTGVLISLSEQELIDCGRTQNTRGCNGGYITDGFQFIINNGGINTEENYPYTAQDGECNVDLQNEKYVTIDTYENVPYNNEWALQTAVTYQPVSVALDAAGDAFKQYSSGIFTGPCGTAVDHAVTIVGYGTEGGIDYWIVKNSWDTTWGEEGYMRILRNVGGAGTCGIATMPSYPVKYNNQNHPKPYSSLINPPAFSMSKDGPVGVDDGQRYSA

SEQ ID NO: 17020 - protein, 800 aa, Oryza sativa
  misc_feature (27)..(27): Xaa can be any naturally occurring amino acid
MWREMPRVSFYLQQGQDHGNKHQQPNXELCADKSNFQKEQAKSQKQKPVKVQSGVTEESIDPYSVRVIQRRLVYIVGMPSEFASDKVLRQHNFLGQYGKIESIIIDNIGANQQIPDSGRVYVTFSREEEAFRCIEAVNGFILDGRPLKATFGVTRYCHVWLSNKVCRKPICSYVHQKAPPEDICTKDDVAVYCARLQHLLGMDTKGLRSGNTLPPPGDCVSRTTVCNGNSKDKTCSDDYGVLHNHGNKNLGTLPATTLQEEKKRNSTPNNQQGLSASVSQELPPLGPKVHHLNDQLASCGDKPQASVQSANGNLNSKQVTAAGNGTVGTLSAKQYVNVVSQGSSGSGRRFTVLTRQTASSDTRSKATGQVGNASSDSQKLTSANNEHSDRIKISRSDNVKLVSQRPEEPSQMLANHLTGAIDKTHVDTDEKNARSDINEKTVCGIQMQLKESTAAHRSTVLQSLRDNPMSNNLPTLDVKSQISVVPDKPSDSQSASKTQLQPSNHKKTAVCSSDTANASDACGIANNQVLFPGGKHQTSSQGEDHSLYKRDKSQSGDQLSSQHPGNVFSPRLLTSLSSIDITAKENKGIKRHVCPPGFEELHRPSDSDKITSVSSPTSSIMCSGPDTLVQDSCSAKDQPDFISWVSECLEDGGETTQSNRSIPSTLSSTDATWRYMQYPASCFSGASNHFLVSPYPRGLSQHTVGRIENTMNCCCSHPSVSGIANHKPEYWSGSDHSYMSTGGYDVFSQSATLGMIAGMVGTSPQQPSPPVHYNDWTTGSADSDLKSPQVDHTYPMYSLF

SEQ ID NO: 17021 - protein, 450 aa, uncultured archaeon
MSSEGEKQNVSEIAKMGLRLDVCGLSRSVFSDLDACLECEVDVVHTFIPTSDVQRIHTIKKSREEVLDMAIRAVEHIKDHGVKCMFSPMDATRTDFDYLLQISKAVQEAGCDVINIPDTVGVFVPSAMKALIADIKKDITIPIDVHCHNDFGLAVANSLAAVEGGGMQVQVTINGLGERAGNADLAETVMSLHSIYGAKTNIKTEYLVETARMVERYTGVRIPPTMPIVGDNAFAHESGIHTHGVLTRTDTFEPGIMTPEMVGHKRRIVMGKHAGRHAVIKTLKDAGLEPDNDQLNEIMSRMKDISNKGKSITDSDLFAIAEAIIGKVKKSERPIDLIEVSVMTGNIITPTASVKAMVRGEEKVGASIGVGPVDAALNAVQSIINGQRTMKLRDFKIEAISGGSDALAEVIIGVEDDKGRIMTARAANEDIVMASVEALVTAMNRILMMK

SEQ ID NO: 17022 - protein, 344 aa, Rhodopseudomonas palustris CGA009
MNLADLNQIARAMVAPGKGILAADESSGTIKKRFDVIGVESTETNRRDYREMLFRSKEAMSDYVSGVILYDETIWQNAADGTPLVKLIEQAGSIPGIKVDEGTQPLPNCPGETITVGLDKLAERLAKYYKQGARFAKWRAVIDIDTARGVPSHTAIMTNAHALARYAALCQQAQIVPIVEPEVLMDGAHDIDTCYNITEWVLKETFQQLYFQRVALEGMILKPNMAVPGKKSAKKASVQEVAEKTVKLLKACVPSAVPGIAFLSGGQSDEEATAHLDAMNKIGGLPWGLTFSYGRALQAAPQKAWSGKAENVAAGQAAFTHRARMNSLAAKGEWSAELETKKAA

SEQ ID NO: 17023 - protein, 442 aa, Alkaliphilus metalliredigenes QYMF
MSKVIVSKFGGSSLADSKQFNKVKEIVLSNKNRRYIVPSAPGKRHEKDYKMTDLLYLCQQHVEQGVPFDEVYKIIEKRYIDICLELGLTLDMKTILNEIKDNITAGASADYAASRGEYLNGLILASLLKYEFIDASELIIFSENGQFDSEATQKRVNQTLKSIEKAVIPGFYGAMESGQIKTFSRGGSDVTGAIIARGVGAHLYENWTDVSGFCMADPRIVENPQYIKKITYRELRELSYMGASVLHEEAIFPVKRESIPIRIKNTNAPEDVGTLIVDDLSPVNYTRTITGIAGKKDFTVIAIEKMLMNAEKGFIHKLLTILEANGISAEHMPSSIDSISLVISDKGLKNNIQKVINEIRVQTNPDSIVAYPNMALIAVVGRGMIKTKGISAKVFGALAKEGINVRMITQGSSELNIIVGIENSDFERGISVLYKVFQKKEA

SEQ ID NO: 17024 - protein, 233 aa, Sinorhizobium meliloti
MNSKSKGPGLDTSSSAIFTKNFAALLFDMDGTLLNSMAVVERVWGSWALRNGIDPVALMKIVHGVRAVDTIRALGLPVDPEQEARILAEAEIADVEGIVEIPGAVSFLKTLPPERWAIVTSAPLELAARRLEAAGIPVPRHMVTGEDVSVGKPDPQGYLLAAQRLGVRAEDCLVFEDAPAGVLAGKSAGAEVAVITGAHAAAAEMPHIMLSHYSDVEARLVEDGWLSLHRRRG

SEQ ID NO: 17025 - protein, 829 aa, Shewanella sp. ANA-3
MNRRDFIKANAVIAAAGAAGLALPASASNLITSSEQTKLEWNKAPCRFCGTGCSVIVATREGKVVATHGDANSEVNRGLNCIKGYFLSKIMYGSDRLTTPMLRMTDGKYDKHGEFTPISWDSAFDIMAQKWKETLKAKGPTAVGMFGSGQWTVWEGYAAVKLMKAGFGSNNIDPNARHCMASAVVGFMRTFGIDEPMGCYDDMEAADAFVLWGSNMAEMHPILWTRVTDRRLSASHVKVAVLSTFEHRSFDLADLPIVFTPQTDLAILNFIANYIIQNDKVNWDFVKKHVNFRQGTTDIGYGLRPTHPLEQKAKNVKTAGDSTPIDFDTFKAFVAEYTVEKVSKMSGVPEAKLIELAKLYADPETKVTSFWTMGFNQHTRGVWCNNLIYNIHLLTGKISTPGNSPFSLTGQPSACGTAREVGTFSHRLPADMVVTNPEHRKHAEEIWKIPSGIIPPKPGYHAVEQNRRLKDGDLNCYWVQVNNNMQAGPNINEEGLPGYRNPANFIVVSDAYPTVTTQAADLILPTAMWVEKEGAYGNAERRTQFWHQMVQAPGESHSDLWQLMEFSKRFTTDEVWSKEVLAANPQFKGKTLFEVLYKNGNVDKFPLADTDPKYLNNEAKHFGFYVQKGLFEEYATFGRGHGHDLAPFDAYHEAHGIRWPVVDGKETKWRFREGSDPYVKPGSGFEFYGKPDGRAVIYALPFEPPAESPDTEYDMWLSTGRVLEHWHSGSMTQRVPELYRAFPDAVCFMHPEDAKKRGLRRGDEVRVVSRRGEIKTRVETRGRNKPPVGLVFVPWFDASQLINKVTLDATDPLSKQTDFKKCAVKIVKV

SEQ ID NO: 17026 - protein, 493 aa, Xanthomonas campestris pv. vesicatoria str. 85-10
MNALTSATAAATDSPAWHGCIFNGDWVPGRGGSVPIHEPATGALLHEVGKADLADVAAAIAQAKQAQRAWAATPPRERAAVFHRAAQAMQARSAEATLLIARETGGILPKAQREVDESVVFYQQAAAMPLQASGQMLPTASGQLSLARRLPLGVIGVISPFNFPLILSLRSVAPALAMGNAVILKPDPRTPYTGGVIIAQVLEEAGLPKGLLHVLHGDAQIGQALVESPDVPMIAFTGSTAAGRRIGEIAGRHLKKVSLELGGNNAVIVLDDADLDKAASAVAFGAYMHQGQICMATGRVLVHRSVAQALTQRLAEKARHLPVGDPVSGIVALGPIIDQRQLQRVVDIVNDSVAAGAVVEAGATHEGLFYAPTVLSNVRPGMRAFDEEVFGPVINITVFDTGDDAAELANQGEYGLAAGILSASVSRALALGEKLHTGLLHINDQTVADEVVNPFGGAGASGNGTSVGGPADWEQYTHWQWLTIKSEVPQYPF

SEQ ID NO: 17027 - protein, 940 aa, Streptococcus thermophilus
MAFNKLESSNNQEIISEEVGILKELLDDATRGMAGEQGLTTIQHLVELYDEGDYEALTQAISEMTNDDMVVASRYFSLLPLLINISEDVDLAYEVNRKNNIDESYLGKLSETFDVVAESDNARDILENVNVVPVLTAHPTQVQRKTMLELTNHIHELLRKHRDVKDGLINKDKWYADLRRYVEIMMKTDIIREKKLKVKNEITNVMEYYNSSLIKAISKLSHEFKRLAVEKGIELDNPTPITMGMWIGGDRDGNPFVTAETLKLCATLQSEVILNYYIEKVVNLYRSFSLSSRLTEVSETVAEMAKLSPDTSVYRENEPYRRAFSYIQSKLIQTLLFFKAGNFSKERVAKRLSENVRLGSVSTGEVVADFVHDRLSQSLQAVSQQTTEFYETAEAFHDDLLAIKNSLLENDDSVLISGDFEELLQAVEVFGFYLATIDMRQDSSVHEACVAELLKSANIVDNYSELTEVEKVAVLLKELQEDPRTLSSTNVSKSETLEKELAIFRTARLLKDYLGEEVIKQHIISHTESVSDMFELAILLKEVGLVDTERARVQIVPLFETIEDLENSNEIMKQYLGYDIVKRWIKNSNNYQEIMLGYSDSNKDGGYLSSGWTLYKAQNELTKIGEERGIKITFFHGRGGTVGRGGGPSYDAITSQPFGTIKDRIRLTEQGEVIGNKYGNKDAAYYNLEMLVSATLDRMVTRQITDPDELVDFREIMDSIVQDSNGVYRDLVFGNEHFYEYFFEASPIKEVSSLNIGSRPAARKTITDISGLRAIPWVFSWSQNRIMLPGWYGVGSAFNHYIEAEEGNLEKLQHMFETWPFFRSLLSNVDMVLSKSDMNIAFHYAQLAESEEVRSVFNIILDEWQLTKNVILAIEKHDDFLEESPFLKASLDFRLPYFNVLNYIQIELIKRLRNNNLTDDEISLIHITINGIATGLRNSG

SEQ ID NO: 17028 - protein, 512 aa, Arabidopsis thaliana
MCGILAVLGCSDDSQAKRVRVLELSRRLRHRGPDWSGLYQNGDNYLAHQRLAVIDPASGDQPLFNEDKTIVVTVNGEIYNHEELRKRLKNHKFRTGSDCEVIAHLYEEYGVDFVDMLDGIFSFVLLDTRDNSFMVARDAIGVTSLYIGWGLDGSVWISSEMKGLNDDCEHFETFPPGHFYSSKLGGFKQWYNPPWFNESVPSTPYEPLAIRRAFENAVIKRLMTDVPFGVLLSGGLDSSLVASITARHLAGTKAAKQWGPQLHSFCVGLEGSPDLKAGKEVAEYLGTVHHEFHFSVQDGIDAIEDVIYHVETYDVTTIRASTPMFLMSRKIKSLGVKMVLSGEGADEIFGGYLYFHKAPNKKEFHQETCRKIKALHKYDCLRANKSTSAFGLEARVPFLDKDFINTAMSLDPESKMIKPEEGRIEKWVLRRAFDDEERPYLPKHILYRQKEQFSDGVGYSWIDGLKDHAAQNVNDKMMSNAGHIFPHNTPNTKEAYYYRMIFERFFPQVRVL

SEQ ID NO: 17029 - protein, 1832 aa, Podospora anserina
MYNPPGQRDATRPFHVPPPPPPMSPPPPTVGINNPMMTIPPPPPRHPNAPSTTGNVLLPPPPSGPPPNSGFPNSAIAPPSALGSTAPWHGAWGRAYDGRTAFNIPPPPPGGGAGGGGGGGSGGVLRAYDPKYHAQVLAAANNGATYTVPPPPPPQQQQQQQQQQQQQQQQQQQQQQQQQQQQQQQQQQQQQQQQQQQQQQQQQQQQQQQQQQQQSDQMGALTSATYIPQGDTYGEGVGIPGLGLEDSAIGWNMGAHLESATATPLDESSGRDRLYANAMAQRGSSTTSNATVSSVSVPPELAAQWPMEKVLGWLQANSFSSHWQETFKYLGLDGARFLELGSSHGGRGNFGMMHQQVYPRLLALSGPEWNQAREREEGKRMRRLVRSIVTGRPVEVKGGRLGGGQQQPQHARQNSTSAPPAVTGGQTGNRSAESPNVSVDDGFWDTGVTDADDGDKQTPNPIKIPEFGFSRRFSQSRATTMPTLSSTMPTDHRNMMKEIDTSRRHSPTLSESGEAGGTFRGGSTPLGGGGGGGGGGGRDSPSAGSPNPASGLFPSSTAGNLSASPHSSRFGHRSRNSTDSVSSSAAIYGSGVPADAAAMLKSGMNIADVVNAARNANDRRHAQDGGRPSPQESGGGDRSAGEPPGSAKGSGSFLSIFTRKKHGRKDDGFGGDEDSPTSPGLSFKPQSLGDNRPGSSAGTYGHHHAGNVRANRGGPRVFILATADCWNYRMLDVTDIETASDLRQLICINLGLPESEGAHLYPTELGKFEHDGEALDDSKLLAIKTQRADAIGTLKLFVRVGGPPQMRQTGAQIAMDEETYVKLNGRMRSSSSPPTSRQNTLTGKEGEDKMLTAEAIEYRTEQLRKQKEYLAKRKQVAENNHVADRSPSSSIVGRTVDFDQPRHSPFEDRKMDTLLPQRKPPAPPSDPSATLIKANSLKKTGHGLRLSGDSGYHPKRKTSSDLRSSGDVVFEKQKRWGPVADPSAGIGALLVGMSDGMASIARPRPGGGMMQQRQPSPHRVATEPITSQELQRGKKAMSTVNFGPAHQRERSGSGGGSPRPGGMPGSPGSYTWSSKNVPFLVPDYSPNGTPAPPTASRMPDGGGNSGDGCLDQNHNHQAQNGTIAKMRNVARAPSPGNVSPSSRRRPSDSFSSQAAVAKKRKSHGPDTDFTDNDVTFSASSTRASKKVDDSDSDDDSDDGLFAIPIAARNSGPDKGKTTAPAEGNSGDSDGASGTGTGKRPSLRLNTRSGSNSRAKKTLSVAFAVSPQSSSAGGKTPLEDDDSGRSSSQRRGTPGTPQSEGGWDSEEKDSKISRRKSFIEKDVWANRPPTDALVNNLEDFFPDLDVDQPVLEEGVDQEPPSPIAEGDENNQGSASVPPLPPLPPGLSTGKLHTFYNDNDTLGSDESTLKALESRPVSMQSLAHRSIRRSGGGGGLGRMKSIREVARGANEFGKRYTQGPGQIDAQSSAAAAGNRNTNLMRRKSTKMFNANIVQIQPDRGSLNLAMGGLTTIPQDSLPTRSTNSRESIPKRQTTFRWFKGQLIGKGTFGRVYLGMNATTGEFLAVKEVEVNPKAAQGDKKKMQELVAALDQEIDTMQHLDHVNIVQYLGCERKETSISIFLEYISGGSIGSCLRKHGKFEEPVVASLTRQTLSGLAYLHREGILHRDLKADNILLDLDGTCKISDFGISKKTDNIYGNDKTNSMQGSVFWMAPEVIRSQGEGYSAKVDIWSLGCVVLEMFAGRRPWSKEEAVGAIYKIANGETPPIPEDIREVISPVAIAFMLDCFTVVSSERPTADVLLSQHPFCELDPTYSFLDTELYAKIAGRVNDLGRGQ

SEQ ID NO: 17030 - protein, 584 aa, Phaseolus vulgaris
MCGILAVLGCSDHSRAKRVRVLELSRRLKHRGPDWSGLHQHGDCFLAHQRLAIVDPASGDQPLFNEDKSVIVTVNGEIYNHEELRKQLPGHKFRTGSDCDVIAHLYEEHGEGFVDMLDGIFSFVLLDTRDNSFIVARDAIGVTSLYIGWGLDGSVWISSEMKGLNDDCEHFECFPPGHLYSSKDRGFRRWYNPPWFSEAIPSAPYDPLVLRRAFEQAVIKRLMTGVPFGVLLSGGLDSSLVASITSRYLANTKAAEQWGSKLHSFCVGLEGSPDLKAAKEVADYLGTVHHEFHFTVQDGIDAIEDVIYHVETYDVTTIRASTPMFLMSRKIKSLGVKWVISGEGSDEIFGGYLYFHKAPNKEEFHRETCRKIKALHQYDCLRANKSTFAWGLEARVPFLDKEFINAAMNIDPEHKMIKRDEGRIEKWILRRAFDDEDQPYLPKHILYRQKEQFSDGVGYSWIDGLKAHAAKHVTDKMMLNAGNIYPHNTPVTKEAYYYRMIFERFFPQNSARLTVPGGASVACSTAKAVEWDAAWSNNLDPSGRAALGVHISAYENQNNLANKGVEIEKIIPMDAAPLGVAIQS

SEQ ID NO: 17031 - protein, 511 aa, Staphylococcus epidermidis RP62A
MEEHIQIFDTTLRDGEQTPGVNFTFDERLKIAKQLEKWGVDVLEAGFPASSTGSFKSVEAIAKTLTTTAVCGLARCKKSDIDAVYEATKEAVKPQVHVFIATSPIHLEHKLKMTQDEVLTSIKEHVSYAKQFFEVVQFSPEDATRTEIPFLIECVQTAINAGATIINIPDTVGFSYPTEYGEIFKQLTQAVKSNSKIIFSAHCHDDLGMAVANSLAAIEGGARRIEGTVNGIGERAGNASLEEVALALYVRKDHYGLESQINLEETKKTSDLISRYAGIRVPRNKAIVGQNAFSHESGIHQDGVLKHRETYEIMTPQLVGVNTTELPLGKLSGKHAFAEKLKALGYEIKLEDQVTLFKQFKEIADKKKNVSDRDIHAIIHGSEHEHNAIFQLDNLQLQYVSKGLQSAVVVIKERNGQVKQDSSIGTGSIVAIYNAVDRIFKKDAELIDYRIDSVTEGTDAQAEVHVRIIINHIEVTGIGIDHDILKASCKAYIDAHAKYISEYELKEGIRT

SEQ ID NO: 17032 - protein, 332 aa, Oryza sativa
MAASTSQHALVSVKSLCTGANFGFEKRTSKVRFVLVGRCCSGTRKLGLVCASNSHSSVMEPAQLPLSPESGNTPKKSSESALILIRHGESLWNEKNLFTGCVDVPLTPKGVDEAIEAGKRICNIPVDVIYTSSLIRAQMTAMLAMMQHRRKKVPIVVHSESEQAHRWSKIYSEETKKQSIPVITAWQLNERMYGELQGLNKQETADRFGKEQVHEWRRSYDIPPPNGESLEMCAERAVAYFKDQIVPQLVAGKHVMIAAHGNSLRSIIMHLDKLTSQEVISLELSTGIPMLYIFKEGKFIRRGSPAGPSEAGVYAYTRSLAQYRQKLDNMFQ

SEQ ID NO: 17033 - protein, 158 aa, Triticum aestivum
  misc_feature (67)..(67): Xaa can be any naturally occurring amino acid
MAAPLRRVFPSLGRALLSPTPARMLSAEASDALVEIKRGEIGMVSGIPEEHLRRKVLIYSPARTASXAGSGQVGRWKINFVSTQKWENPLMGWTSTGDPYANVGEAGLTFDSAESAKAFAEKHGWEYVVRKRHTPLLKPKTYAENFKWKGPPKTEEAA

SEQ ID NO: 17034 - protein, 347 aa, Staphylococcus epidermidis RP62A
MSYKIVALPGDGIGPEILSGTLELLKLISEKYHFEYHLESHHFGGVSIDYYGTPLTNETLQSCKNADAILLGAIGGPKWTDPNNRPEHGLLKLRKSLNLFANIRPTFVTKGASHLSPLKQDIVEGTDLVIVRELTSGIYFGEPSYVKKTEALDSLKYSSQEIERIVRIAFNLANRRRKKLTSVDKENVLSSSKLWRQIVNDVKKDYPEVEVNHMLVDACSMHLITQPTQFDVIVTENLFGDILSDEASVIPGSLGLSPSASFGQTGTRLYEPIHGSAPDIANEDKANPFGMVLSLALCLRESLNQNDAANELESIVYSFIQSNKTTADLGGQYRTSEIFKLLKEKYL

SEQ ID NO: 17035 - protein, 425 aa, Hordeum vulgare subsp. vulgare
MGNCWGTRIKDGSTHPGASGMFSRGSGKDGSRLSACSSRASSASMPPSAKTECEILQSANVKVFSYNDLRLATRNFRPDSVLGEGGFGSVYKGWIDEHTLSACKPGTGIPVAVKRLNLEGLQGHREWLAEVNYLGQFCHQNLVKLIGYCLEDEYRLLVYECMPRGSLENHLFRRGSHFQPLSWNLRMKVALGAAKGLAYLHSAEAKVIYRDFKTSNILLDTDYTAKLSDFGLAKDGPVGEKSHVSTRVMGTYGYAAPEYLSTGHLTAKSDIYSFGVVLLEMLSGRRAIDKNRPQGEHNLVEWARPYLTHKRKIFRVLDTRLEGQYSLNGAQTIAALAVECLSFEAKMRPSMEAVVSILEGIQDSSDPTRRPADPARRPAAERPQDPKSGSKTAPGASNSGKGRRKSSGDLLKEPGRDPKPSAYSS

SEQ ID NO: 17036 - protein, 230 aa, Synechocystis sp. PCC 6803
MTNAALDDKTIVRDYFNSTGFDRWRRIYGDGQVNFVQKDIRVGHQQTVDSVVAWLVADGNLPGLLVCDAGCGVGSLSIPLAQAGALVYGSDISEKMVGEAQQKAQEVLAYGNQPTFMTQDLAQLGGKYDTVICLDVLIHYPTEEASAMISHLASLADRRLILSFAPKTLGLTVLKKIGGLFPGPSKTTRAYQHKEADIRKILGDNGFSIARTGMTSTRFYYSRILEAVRS

SEQ ID NO: 17037 - protein, 488 aa, Arabidopsis thaliana
MGRAFVYVILGGGVAAGYAALEFTRRGVSDGELCIISEEPVAPYERPALSKGFLLPEAPARLPSFHTCVGANDEKLTPKWYKDHGIELVLGTRVKSVDVRRKTLLSSTGETISYKFLIIATGARALKLEEFGVEGSDAENVCYLRDLADANRLATVIQSSSNGNAVVIGGGYIGMECAASLVINKINVTMVFPEAHCMARLFTPKIASLYEDYYRAKGVKFIKGTVLTSFEFDSNKKVTAVNLKDGSHLPADLVVVGIGIRPNTSLFEGQLTIEKGGIKVNSRMQSSDSSVYAIGDVATFPVKLFGEMRRLEHVDSARKSARHAVSAIMDPIKTGDFDYLPFFYSRVFAFSWQFYGDPTGDVVHFGEYEDGKSFGAYWVKKGHLVGSFLEGGTKEEYETISKATQLKPAVTIDLEELEREGLGFAHTVVSQQKVPEVKDIPSAEMVKQSASVVMIKKPLYVWHAATGVVVAASVAAFAFWYGRRRRRW

SEQ ID NO: 17038 - protein, 206 aa, Mesorhizobium loti MAFF303099
MSRTLVLVRHGQSEWNLKNLFTGWRDVDLTEQGHAEAKAAGQKLKARGLKFDIAFTSALSRAQKTCQHILDAVGQSDLKTIRDQALNERDYGDLSGLNKDDARKKWGEEQVHVWRRSYDVSPPGGESLKDTGARVWPYYLHDLQPHVLRGGTVLVAAHGNSLRALIMALDGKSGEEIVKLELGTGVPVIYQLNADSTVASKEVLEG

SEQ ID NO: 17039 - protein, 109 aa, Clostridium thermocellum ATCC 27405
MAGEKVVILTKENFEQEVLNSDKVVMVDFWAPWCGPCRAVSPIIDELAEEYDGRAKVAKLNVDSEGEVTEKFRIMNIPTIMVFKNGEVVEKLIGARSKTELASAIDKHL

SEQ ID NO: 17040 - protein, 372 aa, Hordeum vulgare subsp. vulgare
MGNCAGVQGNAEINPTFSAPNTSGNNSKSSSSNATDTSTFGKSSSSSVPPTPRSEKEILQSSNLRKFTFSELKSCTRNFRTDSLLGEGGFGSVFKGWIDERTFTPVKPGTGMIVAVKKLKLDSFQGHKEWLAEVNYLGQLSHPNLVKVIGYCLEDEQRLLVYEFMPRGSLEHHLFRRAPHFQPLSWNLRMKVALEAARGLAFLHSDEAKVIYRDFKTSNVLLDSEYNAKLSDFGLAKDGPSGDKSHVSTRVMGTQGYAAPEYLATGHLTTKSDVYTYGVVLLELLTGQRALDKNRPPGQHNLVEWARPYINSKRRVIHVLDPRLGSQYSLPAAQKAAALAMQCLSMDARCRPDMDQVVTVLQKLPEVKKTSK

SEQ ID NO: 17041 - protein, 315 aa, Methanosarcina acetivorans C2A
MNSFLFSGGNMYDLIIIGGGPAGLAAGIYAVRFGLDTLVLEKSEISGQISMSDIVENYPGFPSISGLELMEKYRTHAQEVGVKTKITEVLSVRTEGAKKIVSTDSGDLEAKTLIIATGANPKHLGVPGEKEFISKGVSYCAICDGPFFKNKTVVVVGGGNSAVTDALLLSKVAQNVYLIHRRDRLKAAKVLQDRALATPNIEFILNTLVQEIAGSREGVKKVEKVILQDLNSKESRELSTNGVFIYVGIQPNTEFVNVEKNNEGFIITNRWMETSEKGIYAAGDCRDTPIWQLVAAVRDGAIAATAANEYIESLK

SEQ ID NO: 17042 - protein, 371 aa, Mesorhizobium loti MAFF303099
MNPGEKDLARCIGLLRPIDADTLYDVAIVGAGPAGLAAAVYAASEGLSTIVLDCRAFGGQAGASSRIENYLGFPTGITGMALMARAYNQAQKFGVEMVIPDEAKLLSAAADNTGARYLLDVGDGETVRTRSVVIASGARYRRLEVANLSQFEGTSVHYWASPIEGRLCAGQEVALVGAGNSAGQAAVYLASHARKVALLARGGSLDASMSRYLVERIQAQPNIEVLTETEIEALEGEEGNLATVRWRNRVSGEVTTRPISHLFLFIGADPNTDWLAQCNVALDAKGFIRTGSELGPEHGLMETSRSGVFAIGDVRCGSVKRVAAAVGEGAQVVAALHAYLARDSSAAVTPQSMIPKSGDRFSEKDHASTKR

SEQ ID NO: 17043 - protein, 428 aa, Mycobacterium sp. MCS
MTPRCAAPTLPGGLRVVTERIPSVRSASVGVWVNVGSRDEGPTVAGAAHFLEHLLFKSTPTRTAVDIAQAVDAVGGELNAFTAREHTCYYAHVLDADLELAVDLVADVVLRGRCAVEDVEVERDVVLEEIAMRDDDPEDTLGDVFLSAMFGSHPVGRPVIGSVESIEAMTRNQLHSFHVRRYVPERMVLAVAGNIEHDDVVAMARKYFGPRLIRGQSAVPPRKGTGRVPGRPTLQLINRDAEQTHLSMGVRTPGRHWDHRWALAVLNTALGGGLSSRLFQEIRETRGLAYSVYSTVDTFSDSGALSIYAACQPERFDEVVRVTTAVLENVARDGITESECRIAKGSLRGGLVLGLEDSGSRMHRIGRSELNYGKHRSIDHTLEQIGAVTRDEVNAVARQLLTRSFGAAVLGPHRTKSSLPKPLQTVGR

SEQ ID NO: 17044 - protein, 285 aa, Oceanobacillus iheyensis HTE831
MATLLNGKELSEELKQKMKIEVDELKEKGLTPHLTVILVGDNPASKSYVKGKEKACAVTGISSNLIELPENISQDELLQIIDEQNNDDSVHGILVQLPLPDQMDEQKIIHAISPAKDVDGFHPINVGKMMTGEDTFIPCTPYGILTMLRSKDISLEGKHAVIIGRSNIVGKPIGLLLLQENATVTYTHSRTKNLQEITKQADILIVAIGRAHAINADYIKEDAVVIDVGINRKDDGKLTGDVDFESAEQKASYITPVPRGVGPMTITMLLKNTIKAAKGLNDVER

SEQ ID NO: 17045 - protein, 452 aa, Schizosaccharomyces pombe
MTSYGNGFRMMAKCLLSLRSGYSVTAPVSKSMANVLWARYASTRIKTPPFPESITEGTLAQWLKQPGEYVNKDEEIASVETDKIDAPVTAPDAGVLKEQLVKEGDTITIDQDIAVIDTSAAPPEGGSAGPKKDEVKTADADAAKDLSTPQDSSKPIEEKPMPDLGAEQKESAPSSTKPAPDAKEPEFSSPKPKPAKSEPVKQSKPKATETARPSSFSRNEDRVKMNRMRLRIAERLKESQNRAASLTTFNECDMSAVVALRKKYKDEILKETGVKIGFMSFFSKACTQAMKQIPAINGSIEGEGKGDTLVYRDFCDLSIAVATPKGLVTPVIRNAESMSLLEIESAIATLGSKARAGKLAIEDMASGTFTISNGGIFGSLYGTPIINLPQTAVLGLHAIKERPVVINGQVVPRPMMYLALTYDHRMVDGREAVTFLRLVKEYIEDPAKMLLV

SEQ ID NO: 17046 - protein, 359 aa, Novosphingobium aromaticivorans DSM 12444
MSSNTRSYSIAVIPGDGIGKEVMPEGMRVLEKAASIFGFEIEQKWHDFACCDYYARHGKMMPDNWKEEIGRPDAIFFGAVGWPDTVPDHVSLWGSLLQFRREYDQYVNLRPVRLMPGVPCPLAGREPGDIDFWVVRENTEGEYSSVGGIMFPNTDREVVIQETVMTRIGVDRVLRYAFDLAQKRERKHLTSATKSNGIAITMPYWDQRVEAIGAEYPDVSHDKYHIDILTAQFVLNPDRFDVVVGSNLFGDILSDLGPACTGTIGVAPSGNINPEGIHPSLFEPVHGSAPDIAGQGIANPVGQIWSAAMMLEHLGEAEAAAAIMRAVEQVLATPSARTRDLKGAASTDACGKAIAEALG

SEQ ID NO: 17047 - protein, 485 aa, Novosphingobium aromaticivorans DSM 12444
MALQLNDPSLLRQAALIDGAWISGDLPKVEVLDPASGEVVGVVPDCGVAETEAAIAAAEASWAGWRRRTANERAALLEAWHALVLANLDDLARIMTAEQGKPLAESQGEIRYAATFIKWFAEEGRRVGGRNIPSPERDRRIIVMTEPVGVSAAITPWNFPAAMITRKCAPALAAGCPVVIKPSEMTPFTALALVELALRAGFPKGTINLVTGMPQAIGAAITASPVVRKLSFTGSTRVGALLMRQSADTIKRLSLELGGNAPLIVFDDADLDLAVKAAMASKFRNAGQTCVCANRILVHAPVYEEFASRLGAAVSALNSAPGMEAASTVGPLINAAAVEKVSAHVEDALAKGGKVLFSGKGREGGNFLRPLVIGNASSDMRLASEETFGPVAPLFRFETEDEAIALANDTPYGLASYFYTSGLDRAFRVAEALEAGMIALNTGSIAMEMAPFGGIKQSGLGREGGLAGIEEYLETKAFHIGGLKI

SEQ ID NO: 17048 - protein, 435 aa, Saccharomyces cerevisiae
MTLSKYSKPTLNDPNLFRESGYIDGKWVKGTDEVFEVVDPASGEIIARVPEQPVSVVEEAIDVAYETFKTYKNTTPRERAKWLRNMYNLMLENLDDLATIITLENGKALGEAKGEIKYAASYFEWYAEEAPRLYGATIQPLNPHNRVFTIRQPVGVCGIICPWNFPSAMITRKAAAALAVGCTVVIKPDSQTPLSALAMAYLAEKAGFPKGSFNVILSHANTPKLGKTLCESPKVKKVTFTGSTNVGKILMKQSSSTLKKLSFELGGNAPFIVFEDADLDQALEQAMACKFRGLGQTCVCANRLYVHSSIIDKFAKLLAERVKKFVIGHGLDPKTTHGCVINSSAIEKVERHKQDAIDKGAKVVLEGGRLTELGPNFYAPVILSHVPSTAIVSKEETFGPLCPIFSFDTMEEVVGYANDTEFGLAAYVFSKNVNT

SEQ ID NO: 17049 - protein, 299 aa, Oryza sativa (japonica cultivar-group)
MRKRCDQILAKLRKDKRSIWFNAPVEVDRLGLQDYHAVIKCPMDLGTVRANLAAGRYPSHDDFAADIRLTFSNALRYNPAGHEVHTFAGDLLASFEKMYKASVSWFEQELKILEPPMPVPPPELPPAKAPAQVKPRAGNVKMRKTKAREPNKREMTLEEKNLLRVGLESLPEEKMHNVLQIVRKRNGNPELVGGEIELDIDEMDVETQWELDRFVNKFKKALNKSRRAAIVNGENADVIDASVANDSDMLVNGSTATMVDNGDVTMAIESKDPDKITTQAEQLDEYVDALGPPLCRCRG

SEQ ID NO: 17050 - protein, 623 aa, Xylella fastidiosa Ann-1
MRSPIMSNERTAQQSDIKQLISKGLEQGYLTYAEVNDHLPEDLVDPDQIEDIIGMINGMGIEVHEVAPDAETLLLNEGNTGNREVDDTAAEEAAAALSALDTEAGRTTDPVRMYMREMGTVELLTREGEIAIAKRIEEGLSEVQAALGAFPLSTELLLSEYELHKEGKRRLTEVVVGFNDLIEDDNSVTSSVDVTDESIVEVDEEDDDSVGNDEDAPMIGPDPAEVASRIESLSTEYAKFKKLYAKHGPEHKAVIKVREDMAAIFVTFKLSLPLTDLLVQQLQNMVNSVKDHERKVLHLATNVAKMPRKDFIRSWENNQTNLEWVEDAIKRKQKWSSALRDIKDQITAEQQSSIDLEKVNSLTLADIKEINRMMVYGEAKASKAKKEMVEANLRLVISIAKKYTNRGLQFLDLIQEGNIGLMKAVCKFEHRRGFKFSTYATWWIRQAITRSIADQARTIRIPVHMIETINKLNRISRQMLQQFGREATPEELAKEMDMPEDKIRKVMKIAKEPISMETPIGDDEDSHLGDFIEDPNVESPVDTTTNVNLSETVREVLAGLTPREAKVLRMRFGIDMNTDHTLEEVGKQFDVTRERIRQIEAKALRKLRHPSRSEQLRSFLDID

SEQ ID NO: 17051 - protein, 156 aa, Haemophilus influenzae
NRTNTPVLVDGKDVMPEVNAVLAKMKDFCQRIISGEWKGYTGKAITDVVNIGIGGSDLGPYMVTEALRPYKNHLNMHFVSNVDGTHIAETLKKVNPETTLFLVASKTFTTQETMTNAQSARDWLLKAAKNESAVAKHFAALSTNAKDVEKFGIDTN

SEQ ID NO: 17052 - protein, 591 aa, Glycine max
MGGGGTLVQGIRRLFKRRASSPASDDHNHNNVNANNSRVLVRDLRAQLASIPNTLDPVSDFDFDFSTLKPIKVPTPIPFRPSSMDHHKKGAQETEFFTEYGEASQYQIQEVVGKGSYGVVGSAIDTHTGEKVAIKKINDVFEHVSDATRILREIKLLRLLRHPDIVEIKHIMLPPSRREFRDIYVVFELMESDLHQVIKANDDLTPEHHQFFLYQLLRGLKYIHTANVFHRDLKPKNILANADCKLKICDFGLARVSFNDAPSAIFWTDYVATRWYRAPELCGSFFSKYTRAIDIWSIGCIFAEMLTGKPLFPGKNVVHQLDLMTDLLGTPPPESIARIRNEKAKRYLNSMRKKQPIPFSQKFPNADPLALRLLERLLAFDPKDRPSAEEALSDPYFTGLANMDREPSTQPISKLEFEFERRKLTKDDVRELIYREILEYHPQMLQEYLRGGDQTSFMYPSGVDRFKRQFAHLEEHYGKGERSTPPLQRQHASLPRERVCAPKDESKQNNDSEKPSGSNLQQSPPGSDETGAQNGTSKPNYSARSLLKSASISASKCVVLKQNKDPEQEPITEVNDEAVDGVTGEIAALHA

SEQ ID NO: 17053 - protein, 335 aa, Rhodopseudomonas palustris CGA009
MAVRVAINGFGRIGRNVLRAIYESGRKDIEVVAINDLGPVETNAHLLRFDSVHGRFPFEVKVDGDTIDAGRGKIKVTAIKDPSALPYKEVGVDIALECTGIFTARDKAATLLTAGAKRVLVSAPSDGADATIVYGVNHETLSKDHMVVSNGSCTTNCLAPVAKVLNDTVGIETGFMTTIHAYTGDQPTLDTMHKDLYRGRAAAMSMIPTSTGAAKAIGLVLPELKGKLDGVAIRVPTPNVSVVDLKIIAKKATTKEEINEAIKRAAEQELKGILGYTNAPNVSIDFNHDPHSSTFHMDQTKVQNGTLVRVMSWYDNEWGFSNRMADTAVAIGKLI

SEQ ID NO: 17054 - protein, 310 aa, Salmonella typhimurium LT2
MVRIYTLTLAPSLDSATITPQIYPEGKLRCSAPVFEPGGGGINVARAIAHLGGTATAIFPAGGATGEHLVALLADENVPVSTVDAKDWTRQNLHVHVESSGEQYRFVMPGATLDDDEFRQLEEQVLEIESGAILVISGSLPPGVKVEKLTQLISAAQKQGIRCIIDSSGDALTAALALGDIELVKPNLKELSALVNRDLTQPDDVRKAAQELVQSGKARRVVVSLGPQGALGIDSENCIQVVPPPVKSQSTVGAGDSMVGAMTLKLAQDASLEEMVRFGVAAGSAATLNQGTRLCSRDDTQKIYAYLSAQ

SEQ ID NO: 17055 - protein, 281 aa, Zea mays
  misc_feature (135)..(135): Xaa can be any naturally occurring amino acid
  misc_feature (208)..(208): Xaa can be any naturally occurring amino acid
LEIDNVGGWRYMFGFSAPLAAIMAIGMWTLPSSPRWLLLRAVQGKASLEDNKKKAIQALRTLRGRTASEKVLADDVDDTIVSIKAAYAGQEAEGNVWDVFEGASLKAFTIGGGLVLFQQITGQPSVLYYAASILXGVAVFKVDDVGRRPLLIGGVGGIALSLFLLAAYYKILNNFPFVAVGALLLYVGAYQVSFGPISWLMVSEIFPXRTRGRGISLAVLTNFGSNALVTFAFSPLKELLGPANIFFLFGVIAVLSLVFVILVVPETKGLSLEEIESKILK

SEQ ID NO: 17056 - protein, 456 aa, Arabidopsis thaliana
MCGILAVLGCSDDSQAKRVRVLELSRRLRHRGPDWSGLYQNGDNYLAHQRLAVIDPASGDQPLFNEDKTIVVTVNGEIYNHEELRKRLKNHKFRTGSDCEVIAHLYEEYGVDFVDMLDGIFSFVLLDTRDNSFMVARDAIGVTSLYIGWGLDGSVWISSEMKGLNDDCEHFETFPPGHFYSSKLGGFKQWYNPPWFNESVPSTPYEPLAIRRAFENAVIKRLMTDVPFGVLLSGGLDSSLVASITARHLAGTKAAKQWGPQLHSFCVGLEGSPDLKAGKEVAEYLGTVHHEFHFSVQDGIDAIEDVIYHVETYDVTTIRASTPMFLMSRKIKSLGVKMVLSGEGADEIFGGYLYFHKAPNKKEFHQETCRKIKALHKYDCLRANKSTSAFGLEARVPFLDKDFINTAMSLDPESKMVTTKLTSQTQYLPSQVNVEQIFYMGFSRSSQRKEGSRNGF

SEQ ID NO: 17057 - protein, 404 aa, Listeria monocytogenes str. 4b F2365
MGLVVLKFGGTSVSTVDKIGKTADQAIYEKKQGNKVIVVVSAMGKSTDKLVAMAEEISEAPDKREMDMLLSTGEQITIALLAMTLKEKGHDAISYTGWQAGIETEAVHSNARIADIDSARIESALDAGQIVVVAGFQGFTTDGEITTLGRGGSDTTAVAIASALNAVKCAICTDVVGVFTTDPRYVKKAQKLEQITYDEMLELANLGAGVLHPRSVEYAKNFRIPLEVRASHEQVPGTMIEEDLTMENTKVVRGIAFEDQITRVTIHWKQKEAMRVSKVFTKLAENNIDVDIIIQGITGLGHGNLSFTIKTSALLATLAVLEESKELLQIEKLESEQDLAKVSIVGSGMVSNPGVAAQMFEALTENNIPIKMISTSEIKVSTVVPARKMVEAAQVLHDQFELDK

SEQ ID NO: 17058 - protein, 377 aa, Burkholderia vietnamiensis G4
MRHIRALVAPRAPGRRGCRRRARAGGGLRATIVRSSIPSFDVPAMNSETFSAGPKSAPAPATLTIASRESRLAMWQAEHVRDALRKLYPACDVKILGMTTRGDQILDRTLSKVGGKGLFVKELENALADGRADLAVHSLKDVPMALPDGFALAAIMAREDARDAFVSNDYASLDALPAGAVVGTSSLRREAMLRARYPHLNVLPLRGNLDTRLAKLDRGDYAAIILAAAGLKRLGLEARIRALIDVEDSLPAAGQGALGIEIAAHRSDVAQWLAPLHDPHTALAVEAERMVSRALGGSCEVPLAAHAVWRAGELYLTGRVSTTDGRRVLSAQACGAVMTAADALALGRAVSDELDAQGARDIVNALLAGSQVGKGDA

SEQ ID NO: 17059 - protein, 405 aa, Bacillus licheniformis ATCC 14580
MKGGCASMFHTIEEAIRDLKQGKVIIVVDDENRENEGDFVALAEYATPDVINFMASHGRGLICAPLNEEIASRLELQPMVDENTDSHHTAFTVSVDHRDTKTGISAQERSLTVMSLIADHAHPGDFKRPGHIFPLIAKKGGVLKRAGHTEAAVDLAEACGSAPAGVICEIMNEDGTMARVPELKKIADQHGLKMITIKDLIEYRYSKGTLINREVKITLPSEFGTFKVYGYTNEIDDKEHIALVKGDIPFGDEPVLVRVHSECLTGDVFGSYRCDCGPQLAAALAQIEQAGRGVLLYLRQEGRGIGLINKLKAYKLQEEGYDTVQANEKLGFLPDLRNYGIGAQILRDLGVKQMKLLTNNPRKIAGLEGYGLTIADRVPLQMETKKDNEKYLKTKKSKLGHMLHF

SEQ ID NO: 17060 - protein, 185 aa, Candida albicans SC5314
MVRYAATPANPAKSASARGSYLRVSFKNTRETAQAINGWKLEKAQKYLDQVLDHQRAIPFRRYNSSIGRTGQGKEFGVTKARWPAKSVNFVKDLLRNAQANAEAKGLDSSKLVISHIQVNHAPKQRRRTYRAHGRINAYQSTPSHIELTLTEEDEIVEKPVEQKQIRLNSRQRGRLASQKRLTAA

SEQ ID NO: 17061 - protein, 219 aa, Methanosarcina barkeri str. fusaro
MKDNLPEKGAIVQRDRETYAIAPHIPGGIADPNTLRKIADVAEKYGAAALKMTSAQRIAIVGLKEEDLDNAWADLDMKPGAAVGLCVRSVKFCPGTTFCKQGKQDAVGLGLKLDEKYHGMSMPSKFKMAVSGCPNSCSEPAIKDIGVMGTAKGYTLMVGGAAAASPRLAEVVAKNLSEEEVLDAIDRIVNFYKNSGTKKRLGKFIDGVGLEEFKAQVGL

SEQ ID NO: 17062 - protein, 351 aa, Vibrio sp. Ex25
MFFEWQGNQPVTLRCIDKYFETHDTVSIKLAELTESLLFQFKPGQFINLGVEIDGKMEFRAYSISSINEDNHLQLTIKRVSGGKVSNYIVDSLLLGDTVQALPPAGEFNCIDHPPVLRDGETKALLISAGCGVTPVYSMAKHWLSNQDENDNDVDIAFLHIARSPEETIYYDQLETFDAVYPNFHLKLLLKNREGTSHPQGRLNADWLKELVPDFKQRTVYLCGPSQFMQDVHGYLNDLGFDMTNFYQESFTPATGAETSVSDEVVRVSVPDFAQTIDAQKGQVLADVLEGAGLPLIVACRSGICGSCKCKVRQGNVSSTSLETLTPEEIEQGYVLACSSTIEADLEVQIG

SEQ ID NO: 17063 - protein, 534 aa, Ustilago maydis 521
MAGGAVADVGYTSTGPVARPVNVRQSLPAILVAAASAFGGVLFGYDTGTISGLLVMKNFKETFGQLLPDGKVDLTTNDTSLVVSILSAGTFVGALAGAPLSDILGRRWGMQVALFVFTIGVVMQMATTNLDVFIGGRVVAGLGVGILSTIVPMYQSETAPRWIRGAVVSGYQWAITIGLLCASLATYGTKNHDNSGAWRIPVGIQLAFAIILCIFFTILPESPRWLVKKGNHERASKSLARLNSTDVDDPIVRSELSVIQTNLDIELTHSTGSYLDCFKTNDRKYLLRSLTGIFIQAFQQLTGINFIFYFGTKFFETALPGSDPFIFSVISNVVNVVSTIPGMYMMERLGRRKLLIWGAVWMCLCELIVAVVGTAVPKENTSGGKTAVAFVCIYIAGFASTWGPAAWVVCGEIFPLAIRAKALSLCTASNWLWNFGIGYATPYLVDSGRGKAGLGAKVFFIWTGTCACCAVFAYFLIYETRLLSLEEVDEMYAQTNPIKSTAANAEIRARRSDLEGAVAPVKEDELATHDEKKY

SEQ ID NO: 17064 - protein, 417 aa, Streptomyces sp. R1128
MITGMGVVAPGGTGTKGFWDLLTSGRTATRRISHFDPSPFRSQVAAECDFDPVLAGFTHREIRRLDRASLFAVASARDCAADSGLAFADLDPTRIGVSVGSAVGATTSLEREYLVLSDSGRDWVVDADYATPHMYDYFTPGAIAAEVAWSVGAEGPATIVSSGCTSGLDSVGYAYQLIVEGTADIMVTGATDAPISPIAVACFDAIKATTPRNDEPESASRPFDLTRSGFVIGEGAAMFVLEEYEHAKARGAHIYAEVTGYATRCNAYHMTGLKADGREMADAITYALNESRIDPTAVDYINAHGSGTKQNDRHETNAFKVALGDHAYDVPVSSIKSMIGHSLGAIGSIEIAASVLAIQHNVVPPTANLTQSDPECDLDYVPVTAREHRTDTVLSVGSGFGGFQSAMVLRRLQEDAR

SEQ ID NO: 17065 - protein, 340 aa, Glycine max
STSSRGGSRPDPVTLIPGDGIGPMVTGAVEQVMEAMHAPVYFEKFEVHGNMKAVPPEVLDSIRKNKVCLKGGLVTPMGGGVSSLNVQLRKELDLYASLVNCFNLPGLPTRHDNVDIVVIRENTEGEYSGLEHEVVPGVVESLKVITKFCSERIAKYAFEYAYLNNRKKVTAVHKANIMKLADGLFLESCREVATKYPGIKYNEIIVDNCCMQLVSKPEQFDVMVTPNLYGNLVANTAAGIAGGTGVMPGGNVGAEHAVFEQGASAGNVGSDKIREQKKANPVALLLSSAMMLRHLQFPAFADRLETAVEKVILEGKCRTKDLGGTSTTQEVVDAVIDALD

SEQ ID NO: 17066 - protein, 444 aa, Gibberella zeae PH-1
MSTEIFWHMSGSNQSPPSWLFSNNPLNPVKPTTTSNDMGKKSTKAVAANNDVASAPPPSQLMDLVENFLSDHSFKSAADAFKKQREKKGWQTTAATDEQANPSLVGVFQTWEATKGVDSGKPKKKSSKKSSENKEEDVDMKDAVSSSESSDSDSEEEAAKPTPSNNLKRKAPVESSSESSSDSDSNSDSSSSDSDSDSDKKPQAKKRKRASSSSSSSSGSSDSSDSSSDSSSDSSSDSDDESAESDSDSDSSDSSSDSSSDSDSDFDSDSDSDSDSDSSSSSGSEGKAAAKVPLPDSDGSSSDSDSSDSSDCDSDSDSDSDKNKKKKVKKETKDSSDSSVTLDKTSPEFQSNLANPPLPPDPIMNGNGKKKQNEPFSRIPKDIKVDPKFASNEYVSIAYSQRAHEDLIVTKGKGFTKEKNKKKRGSYRGGAIDISDKKGIYFDD

SEQ ID NO: 17067 - protein, 614 aa, Nostoc sp. PCC 7120
MERESPRSDSWNPPFSKRGRMSTYRQAFAGISSRFEAPYGHRVYEVHVLPVRNDDGEIFAGMTITQEITERKQSELALQNALQLLNLHIDTTPLAVVQWDCHLCVTRWSSAAEKIFGWLAEEVIGKYIQDLHIVYEEDMTAVAEVSDRLLSGQEAQIIQYNRNYTKDGRVIYCEWYNSSITNEEGSVTSVLSLVLDVTERIQAEKALRQSELMVTEERAQALERERAARIELERASRMKDEFLAIVSHELRSPLNGILGWSRLLRTRKLSPEKIEQALESIERNAQAQTQLIEDLLDISRIIRGNIRLLVRPTKLIPVIQAALDTVRPIANTKSIQIISRLNFDIGLVSADPERLQQVIWNLLSNAVKFTPEGGRVEICLEQVETNVQIQVIDTGTGISPEFLPYVFDRFRQADATTTRNQGGLGLGLAIVRNLVELHNGKVSVASPGEGQGATFTVQLPLLATYSTLTPEEPLIQRQTAWDTKVQIKGLKILAVDDEPDTREFLKTALEQYGAIVTTAASTREALKLLQLVKPDVLLSDIGMPNEDGYALIRQIRALSSEQGGNVPAAALTAYTRQSDRLQALTAGFQIHISKPIEPIQLLKIVATLAGNNSN

SEQ ID NO: 17068 - protein, 104 aa, Oryza sativa
MSSSRRSRSRRAGSSVPSSSSSSRTSISEDQIAELLSKLQALLPESQARNGAHRGSAARVLQETCSYIRSLHQEVDNLSETLAQLLASPDVTSDQAAVIRSLLM

SEQ ID NO: 17069 - protein, 277 aa, Nicotiana tabacum
MAFFNRVGSILKQSVSKHSNLELSASNASLFQAIRSMSSSKLFVGGLSYGTDESSLKEAFSQYGDVIEARVIMDRDTGRSRGFGFISFPSSEEAASALQAMDGQDLHGRRIRVNYATEKRRAGFGGGYGGGGGGFNYGGEGGNSAGAGGYPTNNYGGGFSGGNTSAGGYGSYGGGSNYGNDNSSPAEGGVGYGSANYGNTPNSNYSGPGNSFSGGYDGGNNGNGFGESPGASFNGGQEQVSVDQGTQSINEDIGQETSEGNYRDDDDEPKDFANSRG

SEQ ID NO: 17070 - protein, 489 aa, Vibrio angustum S14
MTNKTVTEQHVVIWFRSDLRVVDNTALNHAIDSGLPIIALFIATPMQWHQHNMAAVQVDFIHRRLQVLKQQLAKRNIPLQVIEVNDFAESVHVIDQICFDYNAVHVFANKQYPINEQQRDNSAGELIAKKGIKFSIFDDNYILQPETVLTRDGELFKVFTPFRNAWIKRFTLSPCYPVTKDGYIVTSDAVIKLLSVSNPIKAFNYPIIDSVLWPVDEETIAQRLETFFETKAETYHQNRDFPAIDGTSCLSPYLAIGALSARQCLYQLLQHFPNALEINKDDGAFTWLNEIVWREFYGHLLHRYPELSQYQPFQKFTRFVQWKDDAVLLKAWQEGKTGFPIVDAAMRQLRSTGWMHNRLRMITASFLTKDLLCDWRVGEQWFMQHLIDGDFASNNGGWQWAASTGTDAQPYFRVFNPTLQGQRFDPKGDFIRTWVKELEHVPDKYIHTPHQWASAESLNYPLPIVDHKEARLIAIESFKQAKAYMDIHQ

SEQ ID NO: 17071 - protein, 332 aa, Listeria monocytogenes
MPNEVYDVTIIGGGPIGLFSAFYSGLRSMKTKIIDAEPAVGGKVRYFFPEKIIRDIGGIPAITGENLVANLKQQAETFHPTIVCSERVVDVTKLADGTFQLTSHNGSIHFSKTIVIATGSGTFEVNKLEALHAEDFPFAIHYDVKNIEQFRDKVVVVSGGGNSAIDWAQTLEPIAKKVHLIYRGEDFKAHEESVRELKNSRVEIHIHHEISELIGTNNQLTEITVCCNQTQTTKTIETEALFINHGVKVDLGTMAEWGFKQADFGIVVDDEMKTTVPGIFACGDSATYPRKIRIIAAGLHEGPIAINSAKKYLEPTAADEAMISTHHESFIG

SEQ ID NO: 17072 - protein, 427 aa, Schizosaccharomyces pombe
MSSVEVNRENADVANTNRQANLAEGYEIKELNESQKQYIRSSIPILESSGVNLTKAFYQKMLGNYPEVLPYFNKAHQISLSQPRILAFALLNYAKNIDDLTSLSAFMDQIVVKHVGLQIKAEHYPIVGHCLLSTMQELLPSDVATPAFLEAWTTAYGNLAKILIDSEKKVYQSQPWNGFVEFKVTELINESSDVKSVYLGPKDPAFRISHAHPGQYVSVLWEIPGLSHKTLREYSLSNRVDTCRNQFRISVRRVAGGVVSNFVHDNLKVGDIVGVSPPAGNFVYKRSEENVNRPLLCFAGGIGITPLIPIIETALLDGRKVNFCYSSRNYVSRPFKQWLEQLKLKYKENLKLKEFFSEESSVTKEQIVDEVMTRIINEEDLEKLDLSECDIYMLGPNNYMRFVKQELVKLGVEPNKVQSEFFGPYIP

SEQ ID NO: 17073 - protein, 339 aa, Solanum tuberosum
MAFLNKIGNILKHGVGKNTNLELSASNGSLFQTIRSMSSSKLFVGGLSYGTDESSLKETFSQYGEVIEARVILDRETGRSRGFGFISFPSSEEATSAMQAMDGQDLHGRRIKVNYATEKRRDGFGGGYGGGNYGGEGGNFAGGGGYAASNYGGGGGGFSGGYNSSGGGGYNSAGGSGYGSSSGYTYGGEGGNVAGSGGYPTNNYGGGGTEFSSGNSSAGGYSSYGGGSSNYGNNSSPVEGGNYGSSTPNINHSGQGSSFSGGYGGGNSGNDFVGAPSNNNSFANTGFGGSSEASYNGSQEQVSADQGTQSINEHLGQETPEGNYRDNDDKPKDYANTRG

SEQ ID NO: 17074 - protein, 343 aa, Thermobifida fusca YX
MRSYDAFLLISFGGPEKREDVIPFLENVTRGRGIPRERLAEVGEHYYLFDGVSPINQQCRDLIAALRDDFAANGVELPIYWGNRNWDPYLEDTVAEMARNGVRRAVALATSAYSNYSSHRQYLEDIERARAAVPEAPEIDLIRPFYDHPGFIDAFVDHTRQALERIPEELRPETRLLYSAHSLPIAMAKKSGDPRRDYGSLTAYEAQLLETARLITERLDRDYPYEIVYQSRSGPPSQPWLEPDINDRLEQLAKEGVRSVVVVPHGFVSDHMEVKYDLDVEARETAEKLGIRLERAAAPGTHPAFVAMVRDLVAERAEGRPPRGLGAIERSCHDDPADCCQRS

SEQ ID NO: 17075 - protein, 484 aa, Oryza sativa (japonica cultivar-group)
MAVLLRKVWGSVLARAAAGAAPPEAFAAAASPRRPQAAGEYGSLGALDVLPIDVLAQILRLLGPADAARSTAVCRAWRLLASDNGLWAFFLRLGPDPWELVVFAETHLGAGPALHPGLYYDSSPQLSFKHVYTRRAVVPGSIIVDGGSGYCKYGWSKYAAPSGRCATFLEFGNIESPMYARLRHFLSTIYTRMQVKPSTQPIIVVLPLCHSDDTESARASRKQYRDTLYSVLFDMNVPAVCSVDQAVLALYAAKRTSGIVVNIGFNATSIVPIFQGRVMHEIGVETVGQGALKLTGFLKELMQQRNITFESLYTVRTIKEKLCYVAADYEAEKRKDTQASCEVDGEGWFTLSEERFKTAEILFQPQIGGVRAMGLHKAVSLCMDHCYNSEVFGDDNWYKTVVLSGGSSCLPGLSERLEKELRELLPAHISEGIRVIPPPFGTDSAWFGAKMISNVSTFTEAWCIKKKQFRQKTRRNGPSFVNVW

SEQ ID NO: 17076 - protein, 584 aa, Lycopersicon esculentum
MELFMKNSSLWGLKFYLFCLFIILSNINRAFASHNIFLDLQSSSAISVKNVHRTRFHFQPPKHWINDPNAPMYYNGVYHLFYQYNPKGSVWGNIIWAHSVSKDLINWIHLEPAIYPSKKFDKYGTWSGSSTILPNNKPVIIYTGVVDSYNNQVQNYAIPANLSDPFLRKWIKPNNNPLIVPDNSINRTEFRDPTTAWMGQDGLWRILIASMRKHRGMALLYRSRDFMKWIKAQHPLHSSTNTGNWECPDFFPVLFNSTNGLDVSYRGKNVKYVLKNSLDVARFDYYTIGMYHTKIDRYIPNNNSIDGWKGLRIDYGNFYASKTFYDPSRNRRVIWGWSNESDVLPDDEIKKGWAGIQGIPRQVWLNLSGKQLLQWPIEELETLRKQKVQLNNKKLSKGEMFEVKGISASQADVEVLFSFSSLNEAEQFDPRWADLYAQDVCAIKGSTIQGGLGPFGLVTLASKNLEEYTPVFFRVFKAQKSYKILMCSDARRSSMRQNEAMYKPSFAGYVDVDLEDMKKLSLRSLIDNSVVESFGAGGKTCITSRVYPTLAIYDNAHLFVFNNGSETITIETLNAWSMDACKMN

SEQ ID NO: 17077 - protein, 462 aa, Zymomonas mobilis
MAIELKMPALSPTMEEGTLTRWLVKEGDSIKAGEILAEIETDKAIMEFEAVDEGVITKILIPEGSENVKVGTAIAYLGTDANDVTLDGASAETKAEESAPVASPAKTEAAAVEEAATPSLGKVINSAPEIPEGTEFFQQTLREALRDAMAEEMRRDDRVFVMGEEVAEYQGAYKVTQGLLQEFGARRVVDTPISEYGFSGIGVGAAMEGLRPVIEFMTMNFSMQAIDHIINSAAKTHYMSGGQVRCPIVFRGPNGAAPRVGAQHTQNFGPWYAAVPGLVVLAPYDAIDAKGLLKAAIRSDDPVVFLECELLYGKTFDVPKMDDFVLPIGKARIIREGKDVTIVSYSIGVSFALTAAEALAKEGIDAEVIDLRTLRPLDKETILQSLAKTNRIVTVEDGWPVCSISSEIAAIAMEEGFDNLDAPVLRVTNADTPTPYAENLEKKGLVNPEAIIEAVRKVCYRK

SEQ ID NO: 17078 - protein, 584 aa, Lycopersicon pennellii
MELFMKNSSLWGLKFYLFCLFIVLLNINRVFASHNIFLDLQSSSAISVKNVHRTRFHFQPPKHWINDPNAPMYYNGVYHLFYQYNPKGSVWGNIIWAHSVSKDLINWIHLEPAIYPSKKFDKYGTWSGSSTILPNNKPVIIYTGVVDSYNNQVQNYAIPANLSDPFLRKWIKPNNNPLIVPDNSINRTEFRDPTTAWMGQDGLWRILIGSMRKHRGMALLYRSRDFMKWIKAQHPLHSSTNTGNWECPDFFPVSLNSTNGLDVSYRGKNVKYVLKNSLDVARFDYYTIGMYHTKIDRYIPNNNSIDGWKGLRIDYGNFYASKTFYDPSRNRRVIWGWSNESDVLPDDDIKKGWAGIQGIPRQVWLDLSGKQLVQWPIEELETLRKQKVQLNNKKLSKGEMFEVKGISASQADVEVLFSFSSLNKAEQFDPRWADLYAQDVCAIKGSTIQGGLGPFGLATLASKNLEEYTPVFFRVFKAQKNYKILMCSDARRSTMRQNEAMYKPSFAGYVDVDLVDMKKLSLRSLIDHSVVESFGAGGKTCITSRVYPSLAIYDNAHLFVFNNGSETITIETLNAWSMGACKMN

SEQ ID NO: 17079 - protein, 282 aa, Mycoplasma penetrans HF-2
MIVNCIDIANNILDKFKSDLEKLKKKKIIPHMAIVKINDDAASDKYVSIKLKKAAELGVKTTLISEGIKTQDDLIKQIHILNNDDSIDGYIIQLPLPKGFDSNVICEHIDVNKDIDGLSSFAISRNLANSNLFHPKPCTANGIIEILKQSNYSIEGKHAVIINRSMIVGKPLIGLFLENNATVTVCHTKTQNLKEMTKTADIVVVAIGKPDFLTKDMVNPNAFVIDAGISVVDGKVVGDAAKDLQEYVKYITPVPNGVGRLTVAMIFKNLMDLVKEKYNERI

SEQ ID NO: 17080 - protein, 440 aa, Zymomonas mobilis
MSIEVKMPALSPTMTEGTLAKWLVKEGDAVKAGDILAEIETDKAIMEFETVDAGIIAKILVPEGSENIAVGQVIAVMAEAGEDVSQVAASASSQISEPSEKADVAQKETADSETISIDASLDKAISNAGYGNKTENMTASYQEKAGRIKASPLAKRLAKKNHVDLKQVNGSGPHGRIIKADIEAFIAEANQASSNPSVSTPEASGKITHDTPHNSIKLSNMRRVIARRLTESKQNIPHIYLTVDVQMDALLKLRSELNESLAVQNIKISVNDMLIKAQALALKATPNVNVAFDGDQMLQFSQADISVAVSVEGGLITPILKQADTKSLSALSVEMKELIARAREGRLQPQEYQGGTSSISNMGMFGIKQFNAVINPPQASILAIGSGERRPWVIDDAITIATVATITGSFDHRVIDGADAAAFMSAFKHLVEKPLGILAQ

SEQ ID NO: 17081 - protein, 502 aa, Pseudomonas fluorescens
MTRSLTMNSSLPAIDGLRLPHQMLIGGQWVNAQSDKTLNVYNPATGDTLTDVPDGDVEDVNAAVESAAATLQSDAWRRMPPSARERILLRLADLLEAHGDELARLETLNNGKLLIYSKMMEVGASAQWLRYMAGWATKLTGSTLDLSLPLPPDVRSRASTQRVPVGVVAAIIPWNFPLLMAVWKIAPALACGNTVVLKPAEETPLTALRLAELAMEAGLPAGALNVVTGRGETAGDALVRHPKVAKVAFTGSTEVGRIIGSACGRSLKAVSLELGGKSPVIVLADCDPQEAAEGAAAAIFFNHGQVCTAGSRLYVHESIYEDVIQRLAVIGESIVVGSGLEQGVHMGPMVSKKHHENVLRHIRNGIEDGADLICGGTEAPCAQGFFVKPTIFANREKKDIRLLSQEVFGPVLVATPFSDIAEVVNEANRSVYGLGASIWTNDLSAALRINDELEAGTVWVNTHNMVDPNLPFGGFKDSGVGREHGAAAIEHYTTTRSLVIAY

SEQ ID NO: 17082 - protein, 145 aa, Arabidopsis thaliana
  misc_feature (130)..(130): Xaa can be any naturally occurring amino acid
VSRKDNKDITSIASNGGRVNCMKVWPPIGKKKFETLSYLPDLSYVELDKESEYLIRNKWIPCVEFELEPGFVYREHGNTPGSYDGRYWTMWKIPLFGCPDSAQVLKEVEECKKEYPGAFIRIIGFDNTRXVQCIRFIADKPPSFT

SEQ ID NO: 17083 - protein, 117 aa, Prunus avium
MACSAMTKLALVVALCMVVSVPIAQALTCGQVSSNLAPCIAYVRGGGAVPPACCNGIRNINNLAKTTADRQTACNCLKQLSASVPGVNANNAAALPGKCGVNVPYKISPSTNCATVK

SEQ ID NO: 17084 - protein, 143 aa, Oryza sativa (japonica cultivar-group)
MPVPLAPYPTPPVPFTPPNGAQSQLVCSGCRNLLMYPAGATSVCCAVCSTVTAVPAPGTEMAQLVCGGCHTLLMYIRGATSVQCSCCHTVNLAMEANQVAHVNCGNCRMLLMYQYGARSVKCAVCNFVTSVGASPGTDQKPSS

SEQ ID NO: 17085 - protein, 370 aa, Halobacillus dabanensis
MNFVIIGGDAAGMSAAMQIVRNSEGHDITVLEQGEITSYGQCGLPYVLSGDVESTDDLIARKPETFRNKYGIDVRTKNMVTEVDCEQKLVYAKDSQGQVYELKYDRLLVASGAAPVMPPWKGSDLEGVYSLKTIPDIEEIINATTENVNHVTIIGGGYIGLEMAESFRQAGKQVRLIDRGPQLAKNFDEDMGELILEEAERNRVEVHLGESVEGFEGDGKVEKVITDQGKYETDLVLVAVGVTPNTSFMKGTGIYKGLNDAITVNAFMETSILDIYAAGDCAMQYHRIKKKDDYIPLGTHANKQGQIAGLNMVDKKRSFRGIVGTAILKFFNLTLARTGLSEREAEKERLPYNKITIDSTHAAGYYSKDV

SEQ ID NO: 17086 - protein, 126 aa, Zea mays
  misc_feature (91)..(91): Xaa can be any naturally occurring amino acid
  misc_feature (108)..(108): Xaa can be any naturally occurring amino acid
MAARSSSQQLIATAVLAAPLLLLAKGTKTASEKMSCGEKTSPVAPSLGYTMASATSPSTACCTAMRSLNRRASSSANRQTTCNCLKSMTAXSAAAVSMTKTANIPGKXGVSISASISPTANCTKIN

SEQ ID NO: 17087 - protein, 458 aa, Listeria monocytogenes str. 4b F2365
MAQTSTIQNDTKAAEEYAARVFETIKLRNPGETEFHQAVEEFLNSVIPALAKEPKYEANGILEQLTEPERLISFRVPWVDDSGTVHVNRGYRVQFNSAIGPYKGGLRFHPSVTGSIVKFLGFEQIFKNSLTGLPIGGGKGGSDFDPKGKSDSEVMRFCQSFMTELQKHIGPDTDVPAGDIGVGGREIGYLFGQYKRLRGAYDAGTITGKGLSYGGSLARTEATGYGLVYFTVEMLEAAGETIRGKKIVVSGSGNVAIYAIEKAHELGAKVVACSDSAGFVYDKEGIKVETVKQLKEVERKRISEYTTIHPSAEYYAGGDVWSVPCDIALPCATQNEINADQARALVKNGVIAVAEGANMPSTLDAVDIYHENKVLFGPAKAANAGGVAVSALEMAQNSTRMSWTFQTVDEHLQNIMKDIYKNSSNAASEYGAPGNLVIGANIAGFLKVADTMISQGII

SEQ ID NO: 17088 - protein, 446 aa, Candida albicans SC5314
MNQPNPNKQPIVQSTSEQTSNEEVDTVLGRFTLFVKDLSNGLNGSQEIPPSQESVSEEAEVISRKIIVLGQTFDNFDNANDYIESKLWLSYRCGFEPIPKSIDGPQPIQFFPSIIFNRSTIYSNFANLKSLFDKENFTSDAGWGCMIRTSQNLLANTLLKLYPKNEPEIVKLFQDDTSSPFSIHNFIRVASLSPLHVKPGEWFGPNAASLSIKRLASELLQDQEIDGIKIPRVFISENSDLFDDEIRDVFAKEKNASVLILFPIRLGIDKVNSYYYNSIFHLLASKYSCGIAGGKPSSSFYFLGYEDTDLIYFDPHLPQVVETPINMDSYHTTNYNRLNISLLDPSMMIGILVTNIDEYIDFKTSCLDINNKIVHFHPHTLPVQQDSIINQSWEEVQDEEEEFINLNVSKIENEQQQEQGQSTDAPDEFIDIGNQSSSVVSVPSNV

SEQ ID NO: 17089 - protein, 115 aa, Pyrus communis
MASSAVIKLALVVALCMAVSVAHAITCSQVSANLAPCINYVRSGGAVPPACCNGIKTINGLAKTTPDRQAACNCLKNLAGSVSGVNPGNAESLPGKCGVNVPYKISTSTNCATVK

SEQ ID NO: 17090 - protein, 192 aa, Nicotiana tabacum
MGGCDKQGFPMKQGVLTPGRVRLLLYRGTPCFRGYGRRNGERRRKSVRGCIVSPDLSVLNLVIVKKGENDLPGLTDTEKPRMRGPREPQRSEALYFKEDDVRKYVNTTAEFTTKWKGSKAPKIQRLVTPLTLQRKRARIADKKKRIAKAKSEAAEYQKLLASRLKEQREKRSESLAKKRSRLSAASKPSIAA

SEQ ID NO: 17091 - protein, 180 aa, Nicotiana tabacum
MASSVLSSAAVATRSNVAQANMVAPFTGLKSAASFPVSRKQNLDITSIASNGGRVQCMQVWPPINKKKYETLSYLPDLSQEQLLSEVEYLLKNGWVPCLEFETEHGFVYRENNKSPGYYDGRYWTMWKLPMFGCTDATQVLAEVEEAKKAYPQAWIRIIGFDNVRQVQCISFIAYKPEGY

SEQ ID NO: 17092 - protein, 474 aa, Bacillus anthracis str. 'Ames Ancestor'
MKKHLYINGDWKSVNTYKPLYAPYSEETLAEIAQGTEEDVKEAVAAAKNAMKEMNTLSAYDRATILEKVAQKMDERREEFAEIIAKEAAKPIRAARGEVDRTVQTYKFAAEEAKRIYGETLPLDAAPGADGRIAYTIRKPIGVIGAITPFNFPLNLVAHKVGPAIAAGNTVVLKPADQTPLSSYALIELFEEAGLPKGALNIISGPGSTVGEAIVTNDDVASITFTGSPKVGIGIKAKAGLKRVTLELGSNAAVIIDEDVELTDELIERVKWGAFVNNGQVCISVQRVFVHEERRDDFLSKLRKAMETVVVGDPLIEETDVSALISKKDVERIDNWVQEAVKEGANVLYGGNKRDERVFEPTVLTNVPEHVSVQCQEVFGPLMTVNTFKEFDEAIEQVNNSRYGLQAGVFTNNLFKAMRAIDELEVGGVMINDIPTFRVDHMPYGGVKESGTGREGIKYAIEEMTEMKLVCIKK

SEQ ID NO: 17093 - protein, 1316 aa, Monilinia fructicola
MGDSTLAATTAILQSLALSSIDLPQSNVYGNKGIRLPGADTAGKLTLERELAALVSRVQRLEAKAITVNNQALPDTPNEIGAPSAFADVLTGAPSRASKSTTSRQQLVNSLLAAREAPTGGERPPKFTKLSDEELEALREHVDDQSKQLDSQKSELAGVHAQLFEQKQRQEQALNVLEVERVAALERELKKHQQANEAFQKALREIGEIVTAVARGDLSKKVQIHSVEMDPEITTFKRVINTMMDQLQIFSSEVSRVAREVGTEGILGGQAKISGVDGTWKELTDNVNVMAQNLTDQVREIASVTTAVAHGDLTQKIERPAQGEILQLQQTINTMVDQLRTFAAEVTRVARDVGTEGILGGQAEIEGVQGMWNTLIVNVNAMANNLTTQVRDIAIVTTAVAKGDLTQKVQAECKGEIKQLKETINSMVDQLQQFAREVTKIAREVGTEGRLGGQATVHDVEGTWRDLTENVNGMAMNLTTQVREIAKVTTAVARGDLTKKIEVEVQGEIASLKDTINTMVDRLGTFAFEVSKVAREVGTDGTLGGQAQVDNVEGKWKDLTENVNTMARNLTTQVRGISTVTQAIANGDMSQKIEVAAAGEILILKETINNMVDRLSIFSNEVQRVAKDVGVDGKMGGQADVAGIGGRWKEITTDVNTMANNLTTQVRAFGDITNAATDGDFTKLITVEASGEMDELKRKINQMVYNLRDSIQRNTLAREAAEFANRTKSEFLANMSHEIRTPMNGIIGMTQLTLDTDLTQYQREMLNIVHNLANSLLTIIDDILDLSKIEANRMIMEEIPYTLRGTVFNALKTLAVKANEKFLDLTYRVDSSVPDHVVGDSFRLRQIILNLVGNAIKFTEHGEVSLTIQKAVQDHCAPNEYAVEFCVSDTGIGIQADKLNLIFDTFQQADGSMTRKFGGTGLGLSISKRLVNLMRGDVWVKSQYGKGSSFYFTCTVRLATSDISFIQKQLKPYQGHNVLFIDKGQTGHGREIITMLTQLGLVPVVVDSEQHTILLGNGRTKEKIASTYDVIVVDSIESARKLRSIDEFKYIPIVLLAPVVHVSLKSALDLGITSYMTTPCLTIDLGNGMIPALENRAAPSLADNTKSFDILLAEDNIVNQRLAVKILEKYHHVVTVVGNGQEALDAIKEKRYDVILMDVQMPIMGGFEATAKIREYERSLGTQRTPIIALTAHAMLGDREKCIQAQMDEYLSKPLKQNHLIQTILKCATLGGALLEKGREVRQSANEESPNSQNGTRGNIQHPASSPTPAHMRPAIEPRAYTTTGPINHGSVESPSLVTADAEDPLARLLMRAHSS

SEQ ID NO: 17094 - protein, 252 aa, Triticum aestivum
MEPNMAPRRLWHVVRAVLFMLRKGMSKRKLSMDLQLLLHRGKIAGKALSRLMSAHGHHDQAASRSAAEAPPPASLSRRTLDPALAVYGPRGAGREVEFSCSNTPSYPPVQLIPAKRRRRNNRRTHRGANGAEPGWYNYDAADIAKVFEVLNDEQLLNEVVGDGGAAPPAVVATPSPALWSSFGRSPAPVRQLRITDSPFPLRDDAADLEGGLVDQEADEFIKKFYDQLRRQQNLAAATPEYGYAGRAAGVAY

SEQ ID NO: 17095 - protein, 470 aa, Listeria monocytogenes str. 4b F2365
MNNLKLSEEIKRAINELGYTEATPVQKAVIPVALTGEDIVAKSQTGSGKTAAFAIPIAEQIEWEENKPQALIIVPTRELAMQVKTECTNIGRFKRVKAAAIYGQSPFAKQKLELSQKNHIVVGTPGRLLDHIEKGSLNVDKVAHLVLDEVDEMLSMGFIDQVEDILSRLPKQRQNLFFSATMPEEMQDLIKRYQDDPMVIEMASEKTNPIFHVEMQTDNKEKTLKDVLITENPDSAIIFCNTKNQVDELTDLLDVKVSKIHGGLRQEDRFRAMDDFKSGKSRFLIATDVAGRGIDVDNVSLVINYDLPIEKENYVHRIGRTGRAGKSGKAISFVKTNENPLLRDIEEMLDVTIEKKRKPTVIEVKANEEAFRKKQQKRPTIKKARGEKLNKNIMKLYFNGGKKKKIRAVDFVGTISKLEGITAEDIGIITIEDHVSFVEILNGKGPAVLEMMRSRKVKGRRLKVNEARKR

SEQ ID NO: 17096 - protein, 75 aa, Mycobacterium sp. 'baby formula #683'
MAQREWVEKDFYKELGVSSDASEKEIKSAYRKLASELHPDRNPNNPTAADRFKAVSEAYSVLSDEAKRKEYDETR

SEQ ID NO: 17097 - protein, 820 aa, Leptospira interrogans serovar Lai str. 56601
MRFLLLYIIFLFHYSLMAESLSPVSGKISQLQKDSSLSFFVYYFSSDSDENFRERIFAKDSSLSFQNIPAEVFSLGFTSNTVWFYIPLKNDTEKDYRGEFEIFNSYLEEVDIFYRYGSKDSIHEILAGTSRVYEKSFPALNFYLRPGEEIQIVCKIKSGTPMRIPIVLESEENFNFTKLFRAILFGLTLGFGIAMGLYNFSLYMFFRTRSYLYYFIMILFSTVYLASWDGLISPLFKPNYGRYYLPFILVLFYTSALFLFLFSMEFLYPEKKERYVKIIIFLYVVVNLLLIPLSIFYPTHLNRISYYLGLVNNLIIVYFCIVRIRGGFKSAKNFLIIHLVFPVAGILTNLSTFGAISIDYLSLHLLKLAFISQSVLFSVMLVQRIKELEFRLKDGLQSEIHKNIVLLKKEIQQRRETEWELIQAKEVAEKASKVKSNFLANMSHEIRTPMNGVLGMVQLLGTTKLNDEQKEYVEVLSVSAKSLLQIINDILDFSKIEAGKVILEREVFSIRSVLDEIHDLLYPLAKQKEINFRLEGKLEIQEYVYGDPLRLRQILWNLAGNGIKFTSRGEVVLKVTQKNISKSSVSIEFTVMDSGIGIPLEKQKQVFEAFSQNDTSTARKFGGSGLGLSITKQLVELQGGVLKLESKDGEGSKFTFTIDYDIPSALEIEKILEAEKTKDLEKSFQDVVAKSTRILVAEDNETNCLLIERALKKLGYDPTVVHNGREVIERMQLEAFDIILMDIHMPEVDGIEATKWIRSKNQNSEFPIIIALTADAIESSKEKYISKGMNDCLTKPLDLPILKSTLDLWSNRVDVSHWKL

SEQ ID NO: 17098 - protein, 385 aa, Populus alba
MAIDCIKTMPSITTPHHHPKDQDQCKDDGKSFVFDAQVLRHQTNIPQQFIWPDHEKPNINAPELQVPLVDLGDFLSGNPVAAVEASRLVGEACKKHGFFLVVNHGVDKTLIAHAHNYVDTFFKLPLSEKQKAQRKIGESCGYASSFTGRFSSKLPWKETLSFRYKAEENSSKHIEEYFHNRMGEDFAEFGTVYQDYCEAMSTLSLGIMELLGMSLGVSREHFREFFNENDSIMRLNYYPPCQKPDLTLGTGPHCDPTSLTILHQDQVGGLQVFVDNEWRSINPNFDAFVVNIGDTFMALSNGIYKSCLHRAVVNSQTPRKSLAFFLCPKNDKMVTPPHELVDTCNPRIYPDFTWPMLLEFTQKHYRADMKTLEVFTNWLHQRSLS

SEQ ID NO: 17099 - protein, 317 aa, Azoarcus sp. EbN1
MTTKHARLLILGSGPAGYTAAVYAARANLDPVLITGLAQGGQLMTTTDVDNWPADADGVMGPDLMARFQKHAERFNTEMVFDHIHTVKLGEKPFRLVGDAGEYTCDALIISTGATAKYLGLPSEEKFSGRGVSACATCDGFFYKNQDVAVIGGGNTAVEEALYLANIAKKVTVVHRREKFRAEKILIDKMMEKVAAGKIELALNSTLDEVLGDNTGVTGMRVRDANTGATRDVALQGVFIAIGHKPNTDIFEGQLEMENGYIITKGGREGDATATSVAGVFAAGDVQDHIYRQAVTSAGTGCMAALDAERYLDTLAG

SEQ ID NO: 17100 - protein, 424 aa, Acidobacteria bacterium Ellin345
MTEKKDLRIQFNEEPTNNAKIKVIGVGGGGTNAVNRMIDAKLEGVEFLVANTDLQALKLSRAPIKLQLGVKLTNGLGAGANPEVGRKAALEDADKIIEALEGADMVFVTTGLGGGTGTGAAPIIASLASEMGALTVGVVTKPFAFEGRRRQSQAERGLDELLESVDTMIVIPNEKLLAVARDAGFFESFRVADDILRQAVQGISDIITIPGIINRDFADVKTIMAGMGYAVMGTATAKGDRRAVEAAQAAIASPLLEAGAIDGARGILINVTGSSTLKLAEVNEASTIIQSAAHEDANIIFGAVLDEKMKDEVKITVIATGFKGEATKHEAHHVSTAQQAIHTARTGFQVKGSTPVINTVPRPPAPDPDPEPEPGPAPMPEPPAPPVQAAAAVPPPPAPEKAKKDFDRDDLDVPAFLRKRGESS

SEQ ID NO: 17101 - protein, 158 aa, Glycine max
  misc_feature (94)..(94): Xaa can be any naturally occurring amino acid
MADETFEQVTSGASLTFPQQASALRKNGFVLLKGFPCKIVDMSTSKTGKHGHAKISITGVDIFTGKKYEDVTPSTHNMDVPHVSRLDYQLIDIXEGEKAPVSLLTEAGETKDDLNLPDDAELAGEIRAAFDEGKDIIVSVLAAMGIEQIISWKVDTKA

SEQ ID NO: 17102 - protein, 585 aa, Pseudomonas syringae pv. tomato str. DC3000
MPRPCVRYPHVFRTAGRLYPAPSLQKDFQMTMLNDPSKKYRAFPTIDLPDRTWPSKTIDAAPIWCSSDLRDGNQSLIEPMDSVKKLRFWKTLVSVGVKEIEASFPAASQTDFDFVRTLIEDGHIPDDTTIQVLTQAREDLIARTFESLRGAKKAIVHLYNATCPSFRRIVFNQDKAGVKEIAVNAAKLFVKYAAQQPETQWTFEYSPETFSATELEFAKEVCDAVIEVWNPTPENKVILNLPATVEVATPNIYADQIEWFGRHITRRDSVLISLHTHNDRGTGVAATELGLMAGADRVEGCLFGNGERTGNVDLVTVALNLYTQGINPELDFSDIDGVRKVVEECNQIPVHPRHPYVGDLVHTAFSGSHQDAIRKGFTQQKEGELWEVPYLPIDPADIGRSYEAVIRVNSQSGKGGIAYLLEQEYGISLPRRMQIEFSQVVQGETDRLGLEMTAEQIHALLRREYLQANTPYALISHRLQEENGNSAVDAEVHVDGETQHWRGKGKGALEALVAGLPVAVEIMDYNEHAIGSGTTAKAAAYIELRVNGDRAVHGVGIDENITTASFRALFSALNRSLSQAQAKAA

SEQ ID NO: 17103 - protein, 112 aa, Azoarcus sp. EbN1
MKKIEAVIKPFKLDEVREALSEVGIAGLTVSEVKGFGRQKGHTELYRGAEYVVDFLPKIKVEIVLGDDLVDQAVEAIIKAARTGKIGDGKIFVTAVEQVVRIRTGETDEAAI

SEQ ID NO: 17104 - protein, 385 aa, Populus alba
MAIDCIKTMPSITTPHHHPKDQDQCKDDGKSFVFDAQVLRHQTNIPQQFIWPDHEKPNTNAPELQVPLVDLGDFLSGNPVAAVEASRLVGEACKKHGFFLVVNHGVDKTLIAHAHNYVDTFFKLPLSEKQKAQRKIGESCGYASSFTGRFSSKLPWKETLSFRYKAEESSSKHIEEYFHNRMGEDFAEFGTVYQDYCEAMSTLSLGIMELLGMSLGVSREHFREFFNENDSIMRLNYYPPCQKPDLTLGTGPHCDPTSLTILHQDQVGGLQVFVDNEWRSINPNFDAFVVNIGDTFMALSNGIYRSCLHRAVVNSQTPRKSLAFFLCPKNDKMVTPPHELVDTCNPRIYPDFTWPMLLEFTQKHYRADMKTLEVFTNWLHQRSLS

SEQ ID NO: 17105 - protein, 232 aa, Oryza sativa (japonica cultivar-group)
MVAGGTESSIDALSIAGFSRLRALSTKYNSLPQAASRPFDCGRDGFVIGEGCGVMVLEALDHAKERGAKIYAEVRGYGMSGDAHHITQPQNDGRGATLAMKRALDQSGLQADQIDYLNAHATSTPLGDAVEANAIKSVFGDHATSGGLALSSTKGAIGHLLGAAGSVEAIFTVLAIHHGIAPPTLNLEKPDTLFEGAFMPLSSPKKMPIRAAISNSFGFGGTNTSLLFSCPP

SEQ ID NO: 17106 - protein, 429 aa, Oryza sativa
MERKQAEYSNLDERYAIQGEKYQGQQYSHIYFTRLHHMRNLLHALVPSWKPHLPVTTVLGLEEGKDCIIVGTLYKHMKLKPSILDEYSKERSAIPLVKPHNFMHPDDHLILEDESGRVTLAGAIPPAAYVTGVVIALHGKETSAGNFLVEDILEAGIPPQITLPSINEDKYVVFVSGLSIGSEKFNPLQFQLLIDHITGHLGDENEQSIASNIVRVVVAGNSVHISPRFFNGQAVASKDQSRIAEPIKELDIMLTQLVASLPVDMMPGSNDPANFSLPQQPLHRCLFAGAATYNTFSSCSNPHQFELDSVRFIGTSGQNIDDLYKYSDAKDKLEFVERTLRWRHLAPTAPNSLGCYPYTDKDPFLVESCPHVYFVGNQDKYETQLLQGLEKQKVRLICIPRFCDSGVAVMLNLRNLECSTLSFSTSFDA

SEQ ID NO: 17107 - protein, 340 aa, Pseudomonas fluorescens
MTYAIALNFEDGVTRFIDCKVGEKVLDAAFRQRINLPMDCSDGVCGTCKCRCETGAYDLGDDFIDDALSADEAQARRVLTCQMVPQSDCVIAVPVPSSACKTGTTHFAATLAGITRHADAALEVSFELDQAPVFLPGQYVNISVPDSGQTRAYSFSSPPGDPRASFLIKHVPGGLMSGWLERAQPGDSVAITGPLGSFYLREVARPLLLLAGGTGLAPFLSMLEVLAQRQETRPIRLIYGVTRDQDLVMIEALQAFTARLPDFNLVTCVADPHTTHPRQGYVTQHMADEALNGGDVDVYLCGPPPMVDAVREHFKQQSVTPASFHYEKFTPNAVATCDAA

SEQ ID NO: 17108 - protein, 353 aa, Oceanobacillus iheyensis HTE831
MTKIQQLRSRMEEHNVDAIIISSPYNRRYITGFTGSAGAALITGDKAVFITDFRYTEQASAQASDFDIVEHKGGIAKEVSKLISENNITRLGFEKDYTTYAEYLSYQESFSAELVPFNGWIEELRMIKTPEELEVMKKAAEIADDAFAHIQNYIKPGVPEIEISNELEFFMRRKGATSSSFDTIVASGHRSALPHGVASDKKIQSGELVTLDYGALYNGYCSDITRTVAVGEISVELKQIYDIVLEANLRGVKGTKPGISGIEADSLTRDYITEKGYGEQFGHSTGHGLGLEVHEGPGLSFRSDIILKPGMVVTVEPGIYVQGLGGCRIEDDIVITDTGNERLTFAPKELIQL

SEQ ID NO: 17109 - protein, 269 aa, Vibrio cholerae O1 biovar eltor str. N16961
MPVPQDSTEWQSCLMVGQVRHRRFTPVEHALNYPLFMPCIDLDEWPQLADKVWGLGERWWHWARFRREDYLGQGPLKQAVLDKIEQLTGERIEGGRVVALLHLRYLGIYFSPVNFYYVYDSEKRWRYLLAEVSNTPWNERHYYAVPAQAALTSEEAAVIEWQHAKAFHVSPFNPIEQRYCWKIKPLTRALMIHLECHRSNKEFDATLAMQAEPLSASNLLPRLIKTPIMAVKVVLGIYWHAFKLWRKGAPFYAHPDQTQNNNKEQPHVK

SEQ ID NO: 17110 - protein, 131 aa, Vibrio angustum S14
MAKIIHSMIRVLDLDASLKFYKEALDLEIAERLDFEGFSLVYLRNDENDMELELTWNEGTEEPYTHGTGYGHIAVAVDDLEAEHAKLTECGYAPLEIKEFFREGTLLAKFFFVQDPDGYKIEFLQRHARYQ

SEQ ID NO: 17111 - protein, 483 aa, Ehrlichia ruminantium str. Welgevonden
MSIPVTVAYGDGIGPEIMEAVLLILSEAKSGLVIETIELGHNLYKKEWSCGIAPSSWDSIHRTKVLLKSPTMTPQGQGHKSLNVTLRKKLGLYANVRPCISYHPVIKTKYPNLNVVIIRENEEDTYTGIEHRLTGDTYQCLKVITRSGSERICNYAFQYAMTHNRKKVTCLVKDNIMKMTDGIFHKSFSKIAEGYPSIISDHYIVDIGMARVATNPENFDVIVTTNLYGDIISDIVAELSGSIGLAGSANIGDNYAMFEAVHGSAPDIAGKNIANPSGLLSAAIQMLVYLKKFNEAELIHNAFLKTLEDGIHTADIYQDNISKEKVSTMDFAKAVVENFGQSPCHIQKPVLSIMNSTSGTTSVPYVYQPSYSDKILVGVDVTIGCDVIDLNLNQLIVDLRNIKHDQLELVLVHSKGLEIWPDESSTVNLSYVDQICCRFYMKCKSEITNDHVNQLLLELDKKKINVVKMEKLYLYDDQPGFFT

SEQ ID NO: 17112 - protein, 151 aa, Glycine max
  misc_feature (71)..(71): Xaa can be any naturally occurring amino acid
  misc_feature (106)..(106): Xaa can be any naturally occurring amino acid
  misc_feature (131)..(131): Xaa can be any naturally occurring amino acid
MDMSNRDHLRRREEDDDDLFLLILPSLHLLGYLGRSKKKLRHTSALTGEEKVRELLEGHIKNCRVSFRMEXIFKSLANYLRMEGLVKDTRIKVEEKLGFFLYMISXNATFEDLQVFFGHSNDTFHRVIKHXFDIVIPGLSMWFLKKKKKKK

SEQ ID NO: 17113 - protein, 485 aa, Oceanobacillus iheyensis HTE831
MSNKNFPLIFERSKEGRTSYSLPELDVESFDLEAELGSEYVRQTPPELPEVSELDIIRHYTGLSNRNYGVDSGFYPLGSCTMKYNPKINEDIARLDGFSHIHPYQDVSTVQGAMAMMFDLQESLKEITGMHEVSLQSAAGAQGEWTALMMIRAFHESRGDYGRTKVIVPDSAHGTNPASAAVAGFEAVTVKSNQEGLVDLDDLRQVVGEDTAALMLTNPNTLGLFEKDILTMAEIVHEAGGKLYYDGANLNAIMGYVRPGDMGFDAVHLNLHKTFTGPHGGGGPGSGPVGVSEELAAFLPKPLIVKKNDGYDFDENRPQSIGRVKPFYGNFGINLRAYTYIRTMGAEGLKKVSEYAVLNANYMMRQLEDVFELPYPQHCKHEFVLSGSKQKKLGVRTLDMAKRLLDFGYHPPTIYFPLNVEEGLMVEPTETESKETLDGFIDTMRTIAKEVEENPEIVQEAPHQTIVKRMDETRAARKPVLRYHP

SEQ ID NO: 17114 - protein, 449 aa, Oceanobacillus iheyensis HTE831
MEFRYLPMTNQDKQEMLDAIGIKSTEELFSDIPEHVRFKGEMNLKAPISEYELTKELTELASRNIHTKEYTSFLGAGVYDHYIPSVVDHVISRSEFYTAYTPYQPEISQGELQAIFEFQTMISELTGLPVANSSMYDGGTALAEAVNLSAAHTKRKKVLVSKAVHPEYRAVIDSYTRGQSIDIVEIDTVNGVTDLAQLDQAIDETIAGVVVQYPNFFGQLEPMKKIEQLLENHQKTMLIVSSNPLALGYLTPPGEFGADIVTGDTQVFGIPAQFGGPHCGYFATSKKLMRKVPGRLVGETVDEEGTRGYVLTLQAREQHIRRDKATSNICSNQALNALASSVAMSSIGKHGLRKLASVNMQKARYARKKLLEAGVELAFDGSFFNEFVIKVPGSVSKINKQLLDKGIIAGYDLAKDDKSLEGYMLIAVTEVRTKQEIDQFVKELGDIHV

SEQ ID NO: 17115 - protein, 304 aa, Aquifex aeolicus
MKIRIGTRKSKLALWQANYVKDFLEKHWGVEVELVKITTTGDKITDVPLAKIGGKGLFVKEIEKALLEGSIDLAVHSLKDVPMVIPKGLKLGAITKRENPYDVLISRSGKKLYELPSGSVIGTSSLRRQVQIKKRRRDLKVEVLRGNVDTRMRKLKEGLYDAVILAYAGVKRMGYESEITEVLEDFIPAVGQGSLAIEIREGDKRIEELIKPLNNEESFLCAIAERTFLRRLEGGCQVPVGAFAKIENGTLKMKAFISDIEAERYIEGYREGNPEEAEKLGLSLAEELLKKGGEEILKEIYSSQ

SEQ ID NO: 17116 - protein, 236 aa, Zea mays
MPATELAAGVAWDRRRELQAFDDTKAGVKGLVDAGVTALPPIFRHSPESLEGITSSNHVAGAIPTVDLSAARREDTVALVRRAAGTVGFFQVVNHGVPAELMAGMLEGVRRFNEGPAEAKQAIYSRDQARKVRFASNFDLFSSAAANWRDTLFFHLAPDPAPSQELPEAVRDVVTEYGNAVTKVALSVLELLSESLGLSSDHLRDMDCAENLNAVCQYYPPCPEPYLTWGTKKHTD

SEQ ID NO: 17117 - protein, 294 aa, Glycine max
MATVIDGKAVAQIIRSEIADEVRLLSQKYGKVPGLAVVIVGNRKDSQSYVGMKRKACAELGIKSFDVDLPEQVSQAELIKQVHELNVNPDVHGILVQLPLPKHINEEKVLTEISLEKDVDGFHPLNIGKLAMKGRDPLFLPCTPKACIELLQRSGVSIKGKKAVVVGRSNIVGLPASLLLLKADATVTIVHSHTSQPESIIHEADIVIAAAGQPMMIKGNWIKPGAAVIDVGTNAVDDPTKKSGYRLVGDVDFEEASKVAGWITPVPGGVGSMTVTMLLKNTVEGAKRYIEQNN

SEQ ID NO: 17118 - protein, 110 aa, Triticum aestivum
MDSQFGALERGGSRQRRSPVLARPNTTKRHIQQQRANAADKKVVMPNYFSIEAFFVLACLTVSLLILPLVLPPLPPPPSLLLFVPVCLLILLMVLAFMPTDMRSMATSYL

SEQ ID NO: 17119 - protein, 294 aa, Mycobacterium sp. JLS
MSGSTPRYGIVVGVDGSPESQVALRWAATEAQTSGRPVTLINVVTPIAISWPTIMLQEQISTYEKQNAEEVLGHARQTLLDGLGPGPQPAVHSEVLMAGIVEALVEASKDAHMVVVGARGRGAVRRVLLGSVSAGLIHHAHCPVAVIHSRDGRLPTADAPVVVGIDGSPASEAATALAFEEASRRGAELVAVHVWSDMAPIPGAATDRHQCEQRAEETLAERLAGWQERYPDVRTRRVVESDRPARWLVEHSADAQLVVLGSHGRGGFAGMLLGSVSAAVAQSVDVPVIVVRPR

SEQ ID NO: 17120 - protein, 183 aa, Salmonella typhimurium LT2
MQNSLLNTHVTTIDGEVTTLEKYAGKVLLIVNVASRCGLTPQYEQLENIQKAWADQGFVVLGFPCNQFMGQEPGSEEEIKTYCASTWGVTFPMFSKIDVNGDARHPLYQKLIAAAPTAVAPEKSGFYERMVSKGRTPLYPDDILWNFEKFLVGRDGQVVQRFSPDMTPEDPIVMESIKIALAK

SEQ ID NO: 17121 - protein, 253 aa, Corynebacterium glutamicum ATCC 13032
MRLASMGEEDSTPGRRSKAYSRQGADVRPMKGGHGINLVGTLMAATERGANIVEGVVDFRPTDLRGSLRRGREANLIVFVVDTSGSMAARSRVRAVTGTITSMLNDAYQRRDKVAVIAVNGNKPTLVLNPTNSVEQAQQKLKDMPMGGRTPLAEGLLMAKDLMARELRKEPGRRAILMVMTDGQDTSDAGEAGIATAAETVVKSRLSGNVVIDCEGRLKVRKERAGVLAEMLGGVCVRLRDLNSEHIKMVINA

SEQ ID NO: 17122 - protein, 409 aa, Sphingomonas xenophaga
MRSVAIVGANLAGGRAAEALRQVGFDGRITLIGEEPWRPYERPPLSKEFLWNPAEMSDNFFLQDENWYSDNRIDMLLSTRAEAIDLNAGGVRLSGGQLVAADKVLLATGGHARKLNLAGADCVNVHYLRTRDDAARMALDLRQGARVVIVGMGVIGAEVAASAIKLGCEVTAVEPLAGPMERALGKRFGQWLGEEHRKRGVKTHFNRGVTGFKFADGRVSAVEIDDGTVIPCDAVVVGVGIIPATSLAVDAGLTVNNGIVVDRRCQTSNKAIFAAGDVAEQDGFFGGRFRQETYQNASDQAQAAASAMLGHEVDYCKPMWYWSDQFDLNIQFCGQIPAQAEVVLRGDIESNAFVALFLSGNTIDGLLTVNRAPDMGIGKRLVERRTKASADRLADADVSLRELLMQSAR

SEQ ID NO: 17123 - protein, 367 aa, Corynebacterium glutamicum ATCC 13032
MASQQIRYPFSAVVGQDELRLALILTAISPRIGGVVIRGEKGTAKTTTVRAFAGLLGDAPLVNLPLGSTEDRVVGSLNMETVLTTGRAEYQPGLLAQADGGVLYVDEVNLLADHLVDALLDAAASGRVSIERDGISHSSPANFVLVGTMNPEEGELRPQLLDRFGLAVDVAASTNPEVRVEIIRRRLDFENAPEQFMAKWAEQDADTSNRILAAKDLLPGVELPDLILSQIAWLCARIEVDGMRADLVITRTALAHAAWAGRTVVTEEDVEIAARLALPHRRRRNPFDAPEMEERKLQETLQEARDFFKDNEDKGPAAKITDEETGAEAFTDTDNPTEEDGLQGTAQAKAQTTGKVGTAGSGDPFRS

SEQ ID NO: 17124 - protein, 344 aa, Streptococcus mutans UA159
MKKIVTLAGDGIGPEIMAAGLEVFDAVAQKINFDYEIEAKAFGGAGIDASGHPLPDDTLAAAKTADAILLAAIGSPQYDKAPVRPEQGLLAIRKELNLFANIRPVRIFDALRHLSPLKAERIAGVDFVVVRELTGGIYFGQHTLTENSACDINEYSASEIRRIMRKAFAIARGRSKKVTSIDKQNVLATSKLWRQIAEEVAKEYSDVTLEHQLVDSAAMVMITNPACFDVVVTENLFGDILSDESSVLPGTLGVMPSASHSESGPSLYEPIHGSAPDIAGKGIANPISMILSVAMMLRDSFGETAGAEMIEHAVNKTLTQGILTRDLGGLANTKQMTAAIIANL

SEQ ID NO: 17125 - protein, 377 aa, Bacillus licheniformis ATCC 14580
MLEFETNIDGLASIKVIGVGGGGNNAVNRMIENDVQGVEFIAVNTDAQALNLSKAETKMQIGAKLTRGLGAGANPEVGKKAAEESKEQIEEALKGADMVFVTAGMGGGTGTGAAPVIAQIAKDLGALTVGVVTRPFTFEGRKRQLQAAGGISAMKEAVDTLIVIPNDRLLEIVDKNTPMLEAFREADNVLRQGVQGISDLIATPGLINLDFADVKTIMSNKGSALMGIGVATGENRAAEAAKKAVSSPLLETAIDGAQGVLMNITGGTNLSLYEVQEAADIVAAASDQDVNMIFGSVINENLKDEIVVTVIATGFIEQDQDSSKPQRPLNQGLKQHHQPAPKREPKREEPSMPHRSPSQPAEDTLDIPTFLRNRNKR

SEQ ID NO: 17126 - protein, 135 aa, Brassica napus
MKSSSSSSWTFLTTTSLDQRNPSPVVTSKQMKKTASRNKPIKVRYISNPMRVKTCASKFRELVQELTGQDAVDLELEPEFSPSAVSDHSPSPPPPETFAPHIPHQEPFDDLVAGYYEPLDGEEMFLSQMSRGFLD

SEQ ID NO: 17127 - protein, 420 aa, Vibrio vulnificus CMCP6
MSKRRVVVTGMGMLSPVGNTVAESWKSLLEGKSGIVNIEHFDATNFSTRFAGLVKDFNCEEYMSKKDARKMDLFIQYGIAAGIQALDDSGLEITDENAHRVGVAIGSGIGGLDLIEAGHTALVEKGPRKVSPFFVPSTIVNMVAGNLSIMRGMRGPNIAISTACTTGLHNIGHAARMIAYGDADAMVAGGAEKASTPLGMAGFGAAKALSTRNDEPQKASRPWDKDRDGFVLGDGAGIMVLEEYEHAKARGAKIYAELVGFGMSGDAYHMTSPSEDGSGGALAMEAAMRDAGIVGTQVGYVNAHGTSTPAGDVAEIKGVKRALGEEGAKQVKVSSTKSMTGHLLGAAGSVEAIITPCCRWLIRSFHQPLTWIIQKKVWISILFHILRRKWIWNTRSVTHSASVEQTAHSYLRKSNTHLGF

SEQ ID NO: 17128 - protein, 316 aa, Sphingobium chlorophenolicum
MASIISGTAAAEGLLADLTRDVARFSQVHGYAPTLVAVLVGDDPASHIYVRKKIEQCRKVGMESVEHRLPADCSEEDLLALIASLNADERVHGILVQLPLPAQIDSGKVLDTIDPRKDVDGFHPVNVFRLSTGTGGLVPCTPMGCMILLRSVLPDLKGKQAVVIGKSNIVGKPVAMLLLEQGCTVTVCGRHTRNLAEVCRNADIIVAAAGTPHLVKGYWVKAGAVVIDVGINRIALDDGRSRIVGDVASDEIGHAAAFTPVPGGVGPMTIACLAAEYVQAARRRAWCWRRTNRHSFSLEGEGYGALLSGAKLGAVG

SEQ ID NO: 17129 - protein, 311 aa, Campylobacter upsaliensis RM3195
MLDLAIIGGGPAGLSAGLYATRGGLKNVVMFEKGMPGGQITSSSEIENYPGVAQVMDGISFMAPWGEQCMRFGLKHEMVGVEKISKNEDATFTITLEGGKSEVAKAVIVCTGSAPRKAGFKGEEEFFGRGVSTCATCDGFFYKNKEVAVLGGGDTALEEALYLANICSKIYLIHRRDTFRAAPNTVEKVKKNEKIELITNASINEVYGDASGVLGVKLELKNGERDLKVPGIFTFVGLDVRNEILKQDDGSFLCKMEQGGQVSVNLKMQTNIPGLFAAGDLRQDAPKQVICAAGDGAVAALSALAYIESLH

SEQ ID NO: 17130 - protein, 1230 aa, Cryptococcus neoformans var. neoformans
MSSFTPAFRLHHTHSSSVSPTASNDVAPSSPTPNQPHQLAARSPLYANSPNCASKITKGSSLSSSTAHHGLKYVRPSTSPLLRSPKGESFSAYLGNWGSQELITFLNIHKCGQYLAIFQKNDINGKILLDLDMTALKSMGIGKISERVRLIGGIKDLRRCVADESIRAPFTQRSYPSERTLLPSLPSHSNVLLDKWDCSSSASRLGKRQITLRPPPLDLQGHMPPRLLSHASLGIATIDTHDIHTTNSKIEVYIQQNPPGQPQSMPTKRSDSLTLCAAPSRNVGRRSPSSRHFEGCKSQTDGLTTLNLTLDRQVPSSTMNNVTLREDCHLQREERLPLSHQVPHSRNAFASPHKTSLSGRCPLARGDTTSHQPSGPAIAEQDSPVNYRISNTVTNTKEISQGDLKQPFVMKSLESQSHLLAGVSDMSHDPVTDGFKPKGKASVPLTVMSSSDISAVNANPAALSLADLRRQLVKFINTEDDTIRTVNVMHVTSGVEILERALKKFGKFGTGIHGSPDVYGDEDGDGTLEIGGWEVYTESTPDESSKPLSEFNLLKTCTFHREGTAIQDKGLFLRKKQRMQKRKNIQDFFGETPPPSMSPTSPTLITGPHLSLVQGKSQPTSGSAFSSSSRLSTLTHKGRNRASMISVMSGLGVPIINTLPSPQGNGLRLTGSVHSHEKKSMYNFFGHRPPSELISNHLTDYFPSAKKSDVEKARHSLLRLSGGTVAYKKSGIYEGDSTPDHWSKPGDNQPPSLPPFEPSQDTLSDSLQAFASSTPVHLSRPKHTVALRRRRDSDSSSRSHTSMLMQTRRNRDHSDTTSLLTVDEITAEVENRRVSTIQRGDYIEETEDSSSIEGDTLPQDDESKGVLRAICSDSNKLVDSGKSYQGDSDIDQQHELEDEEEDKLDDDEEEEEEEEEEDNEQGKAFTSTGSKRIIKWIKGALIGAGSFGSVYLGMDAQSGLLMAVKQVELSAGSAKNEDRKRSMLSALEREIELLKELQHENIVQYLDSSVDANHLNIFLEYVPGGSVAALLNNYGAFEEALVRNFVRQILTGLNYLHMRGIVHRDIKGANILVDNKGGIKISDFGISKKVENSLITGLRTNRPSLQGSVFWMAPEVVKQTSYSPKADIWSVGCLVVEMLTGTHPWADLTQMQAIFRIGSLARPAPPSDISVQADEFLRKTFEIEHAKRPTAAQLLKHPFIGSPRVRTAASNFINGAIASETMEVQVVEES

SEQ ID NO: 17131 - protein, 316 aa, Zea mays
MMTSWLLGRRGPSGFSWSSTADQVTQGISAAGLTAIVTGASSGIGAETARTLALRGAHVIMAVRSLPAAQAVKDAVLAQAPGAKLDVMELDLSSMASVRAFASQFIDRGLPLNILINNAGVMAIPFALSKDGIEMQFATNHVGHFLLTHLLLDTMKRTSHESNLEGRIVNVSSEGHRLAYREGIRFDKINDESVYSSIGAYGQSKLANILHANELARRFEEDNVNITANSLHPGSIITNLLRYHSILDVLHRTLGKLVLKNAEQGAATTCYLALHPHVKGVSGKYFCDCNLYEPSANAKDMELAKRLWDFGVELIT

SEQ ID NO: 17132 - protein, 338 aa, Yarrowia lipolytica CLIB122
MSVEERPVIFDDQSELPKVFVGGRKSKLALVQTQHVAAMLKKVHPDYSFPVLGLTTLGDQVQSKPLYSFDGKALWTKELETLLLEKVPGFDQQDIIVHSLKDMPTVLPDGCELGAILTREDPRDALVMAAGSPYKTLADLPAGSVVGTSSIRRSAQLKKSYPGLVYESVRGNVGTRLSKLDDPETPYKCLILAAAGLKRLDLGDRITGYLQKPDMLHAVGQGALGLEIRQGDEKTKKILEAIYDKESTLCCLAERAVMRTLEGGCSVPIGVETKYENGKLTLDAIVVSVEGTEFVECTQVRAVEENWEAEQLGKDVAEQLVKDGAKKILDAIHLENIK

SEQ ID NO: 17133 - protein, 491 aa, Nicotiana tabacum
MVLSKTSSESDVSVHSTFASRYVRTSLPRFEMAENSIPKEAAFQIINDELMLDGNPRLNLASFVTTWMEPECDKLMMDSINKNYVDMDEYPVTTELQNRCVNMIARLFNAPLEEKETAVGVGTVGSSEAIMLAGLAFKRNWQNKRKAEGKPYNKPNIVTGANVQVCWEKFANYFEVELKEVKLREGYYVMDPVQAVEMVDENTICVAAILGSTLNGEFEDVKLLNDLLIEKNKQTGWNTPIHVDAASGGFIAPFLYPELEWDFRLPLVKSINVSGHKYGLVYAGIGWVIWRTKQDLPEELIFHINYLGADQPTFTLNFSKGSSQVIAQYYQLIRLGYEGYRNVMENCRENAIVLREGLEKTGRFNIVSKDEGVPLVAFSLKDNSRHNEFEVSETLRRFGWIVPAYTMPADAQHVTVLRVVIREDFSRTLAERLVLDIVKVLHELDTLPARLSAKLEEVKLVKNGKKFELEVQREVTNYWKKFVLARKAPVC

SEQ ID NO: 17134 - protein, 234 aa, Wolbachia pipientis
EIMEHIKDSHMLFITAGMGGGTGTGAAPVIAKAAREAKAVVKDKALKEKKILTVGVVTKPFGFEGVRRMRIAELGLEELQKYVDTLIVIPNQNLFRMANEKTTFSDAFKLADNVLHIGIRGVTDLMVMPGLINLDFADIETVMSEMGKAMIGTGEAEGEDRAISASEAAISNPLLDNVSMKGAQGILINITGGGDMTLFEVDAAANRVREEVDENANIIFGATFDQAMEGKVRV

SEQ ID NO: 17135 - protein, 473 aa, Parthenium argentatum
MDPSSKPLREIPGSYGIPFFQPIKDRLEYFYGTGGRDEYFRSRMQKYQSTVFRANMPPGPFVSSNPKVIVLLDAKSFPILFDVSKVEKKDLFTGTYMPSTKLTGAYRVLSYLDPSEPRHAQLKNLLFFMLKNSSNRVIPQFETTYTELFEGLEAELAKNGKAAFNDVGEQAAFRFLGRAYFNSNPEETKLGTSAPTLISSWVLFNLAPTLDLGLPWFLQEPLLHTFRLPAFLIKSTYNKLYDYFQSVATPVMEQAEKLGVPKDEAVHNILFAVCFNTFGGVKILFPNTLKWIGVAGENLHTQLAEEIRGAIKSYGDGNVTLEAIEQMPLTKSVVYESLRIEPPVPPQYGKAKSNFTIESHDATFEVKKGEMLFGYQPFATKDPKVFDRPEEFVPDRFVGDGEALLKYVWWSNGPETESPTVENKQCAGKDFVVLITRLFVIELFRRYDSFEIELGESPLGAAVTLTFLKRASI

SEQ ID NO: 17136 - protein, 234 aa, Wolbachia pipientis
EIMEHIKDSHMLFITAGMGGGTGTGAAPVIAKAAREARAAVKDKALKEKKILTVGVVTKPFGFEGVRRMRIAELGLEELQKYVDTLIVIPNQNLFRIANEKTTFADAFKLADNVLHIGIRGVTDLMVMPGLINLDFADIETVMSEMGKAMIGTGEAEGEDRAISAAEAAISNPLLDNVSMKGAQGILINITGGGDMTLFEVDAAANRVREEVDENANIIFGATFDQAMEGRVRV

SEQ ID NO: 17137 - protein, 958 aa, Bdellovibrio bacteriovorus HD100
MKIADLSPTNEFIPRHIGPTDSDIHEMLKTLGFNSLDQMADKVIPAQIRTTHAYADVGNGISEHGLLNHLKQMVSKNKVYKNYIGMGYHDTITPTVIQRNIFENPVWYTAYTPYQPEISQGRLEALLNFQTMIADLNGMEIANASLLDEGTAAAEAMFMAHSLCKNKANAFVVSPDMHPHVIEVIGTRAEPLGFEMIVMDPAKYDFAKPVFGVFFQYPNTNGTVEDYAAIAKKYKDHGALVTASTDLLAMTLLTPPGEWGADMVVGNSQRFGVPLGFGGPHAGFLATKDAFKRLMPGRLVGVSVDSQGKSALRLALQTREQHIRREKATSNICTAQVLLANMASMYAVYHGPAGLKKIALRVQRLTAILSAGLKKLNLEVGAGHVFDTVTVKTDKAAEIIAQAEKMQMNFRNYGGGKLGVSLNEATTLEDVEQIWAAFNLGKAAGFTALSVDESLADVTLPANLTRSTAYMTHQVFNSHHSETEMLRYIHHLQNKDLTLTHSMIPLGSCTMKLNATTELVPVSWPEISKLHPFAPTAQAVGLIEMIHDLEKKLCDITGFAAVSLQPNAGSQGEYAGLLVIRKYHQSRGQGHRNICLIPSSAHGTNPASAALVNMQVVVVACDDQGNVDVADLKAKAEQHKDNLAALMITYPSTHGVFEEGIVEICKIIHDNGGQVYMDGANMNALVGMCRPGVFGPDVSHMNLHKTFSIPHGGGGPGVGPIGVGAHLAEFLPKHSLVPEAGPANGISATTSAPWGSASILPISWAYITMMGAQGLRKATLVSILSANYIAKKLEAHYPVLYKGKNGLVAHECIVDVREIKKTSGIDVTDVAKRLMDFGFHAPTMSFPVAGTLMIEPTESESKKELDRFIESMVTIRKEIAAVETGKMDKENNALKNAPHTAQMLMKPEWNHPYSREEAVYPVEWLRGNKFWPVVGRVDNAYGDRNLICSCPSIEDYQA

SEQ ID NO: 17138 - protein, 367 aa, Arabidopsis thaliana
MSRQSSSLLKNLRSIASRSKIQTRSVTYMPRPGDGKPRPVTLIPGDGVGPLVTNAVQQVMEAMHAPVYFEPFEVHGDMKSLPEGLLESIKKNKVCLKGGLKTPVGGGVSSLNVNLRKELDLFASLVNCFNLPGLASRHENVDIVVIRENTEGEYAGLEHEVVPGVVESLKVITKFCSERIAKYAFEYAYLNNRKKVTAVHKANIMKLADGLFLESCQEVAKKYPSIAYNEIIVDNCCMQLVARPEQFDVMVTPNLYGNLVANTAAGIAGGSGVMPGGNVGAEYAVFEQGASAGNVGKDTTEEQKNANPVALLLSSAMMLRHLQFPSFADRLETAVKRVIAEGNCRTEDLGGNSTTQEVVDAVIANLD

SEQ ID NO: 17139 - protein, 313 aa, Bacillus subtilis
MRTIKVGSRRSKLAMTQTKWVIQKLKEINPSFAFEIKEIVTKGDRIVDVTLSKVGGKGLFVKEIEQALLNEEIDMAVHSMKDMPAVLPEGLVIGCIPEREDPRDALISKNRVKLSEMKKGAVIGTSSLRRSAQLLIERPDLTIKWIRGNIDTRLQKLETEDYDAIILAAAGLSRMGWKQDVVTEFLEPERCLPAVGQGALAIECRESDEELLALFSQFTDEYTKRTVLAERAFLNAMEGGCQVPIAGYSVLNGQDEIEMTGLVASPDGKIIFKETVTGNDPEEVGKRCAALMADKGAKDLIDRVKRELDEDGK

SEQ ID NO: 17140 - protein, 265 aa, Vibrio vulnificus YJ016
MSDIIPPSENGISLSLNGHVATITMVNPPANTWTANSLTELKKTVLALNDNKAIYALVLTGDGEKFFSAGADLKLFASGDKGVAVDMARIFGEAFETLSAFRGVSIAAINGYAMGGGLEVALACDIRIAEEQAVLALPEAKVGLLPCAGGTQNLTALVGEGWAKCIILCGEQVSAEKALSIGLIEEVVAKGEALSAAQALAQQVANQSPSSVSACKKLIQNTRQAPLSMGLIRERELFIQLFDTQDQQEGVQAFLEKRAPQWKNQ

SEQ ID NO: 17141 - protein, 359 aa, Oceanospirillum sp. MED92
MSKNVLILPGDGIGPEIVTEARRVLELVNEQDNLGLELTEALLGGAAIDAEGVPLPDATLEAAKASDAILLGAVGGPKWDTNPDFQIRPEKGLLGIRSQLELFGNLRPAILYPQLAHASTLKPEVVSGLDILIVRELTGGIYFGQPRGVREKEGGIREGYNTYVYDENEIRRIGRVAFEAAMARDKRLCSVDKANVLEVTVLWREIMEDLAKEYPEVELSHMYVDNAAMQLVRAPKQFDVMVTGNMFGDILSDAAAMLTGSIGMLPSASLDESGKGMYEPCHGSAPDIAGQGLANPLATILSAAMMLRYSLGAGETADRIEAAVSKVLDQNLRTADIMSEGMQQVSTSEMGDAVVAALQ

SEQ ID NO: 17142 - protein, 155 aa, Triticum aestivum
  misc_feature (82)..(82): Xaa can be any naturally occurring amino acid
  misc_feature (101)..(101): Xaa can be any naturally occurring amino acid
  misc_feature (117)..(117): Xaa can be any naturally occurring amino acid
  misc_feature (119)..(119): Xaa can be any naturally occurring amino acid
  misc_feature (124)..(124): Xaa can be any naturally occurring amino acid
  misc_feature (132)..(132): Xaa can be any naturally occurring amino acid
  misc_feature (136)..(136): Xaa can be any naturally occurring amino acid
MAPTVMASSATSVAPFQGLKSTAGLPVSRRSNGASLGSVSNGGRIRCMQVWPIEGIKKFETLSYLPPLKHGGLLKAGPTTWXRSKWGALPPIQARLGHLPXEHNASPWGTNNGRYWXMXNCLVXGAPTQQVXNEVXGVKEDTYSASRFTSPHASP

SEQ ID NO: 17143 - protein, 515 aa, Vibrio vulnificus YJ016
MNADANRIRANETIRKANMTRSVPLFIQGSFVESQSNEWIDVTNPATGEVIARLPCATPAEMTSAITFASEAFQSWKEVAVSERARLMLRYQHLLKENHDALAQLLSQETGKTLADAKGDVWRGIEVVEQAANIASNMMGETVENVATDIDSYSLIQPLGVCCGITPFNFPAMIPLWMFPIAIASGNTFVLKPSEQVPLTSVRLAQLFADAGAPDGVLQIVHGGKAQVDFLLTHPDVRAVSFVGSVPTAQYIYQTATQNFKRVQAFAGAKNHMVVMPDANKAQVLSNLVGASVGAAGQRCMAISVAVLVGDAKHWVADLKAELAKVKPGAWDDATAAYGPLISAAAKQRVLGLIAEGKAQGAVCELDGSQCQVAGYPNGNWVGPTLFSGVTTEMSIYQQEIFGPVLVCLEVDSLEEAIALINRNPYGNGTSIFTANGAAARKFQHQIQVGQVGINVPIPVPLPFFSFTGWRGSFYGDLHAYGKQAVRFYTETKTVTARWFEEDLPSGPNMTIQLR

SEQ ID NO: 17144 - protein, 521 aa, Streptococcus mutans UA159
MRKVEFLDTTLRDGEQTPGVNFSIKEKVAIAKQLEKWGISDIEAGFPAASPDSFEAVKQIAAAMTTTAVSGLARSVKSDIDACYEALKDAKFPQCHVFIATSPIHREFKLKKSKEEILEVIKEHVTYARSKFDVIEFSPEDATRTELDFLLQVVQTAVDAGATYINIPDTVGFTTPVEFGHIFKYLIENVKSDRDIIFSPHCHDDLGMATANTLAAIKNGAGRVEGTVNGIGERAGNVALEEVAVALNIREDYYDATSAIVLDETVTTSEMVSRFSGIPIPKNKAVVGGNAFSHESGIHQDGFLKNPLTYEIITPELVGVKKSSLPLGKLSGRHAFIEKLKELKLDFEEGEVAPLFAKFKSLADKKHDITDADIRALVAGTSVENPEGFHFKDLRLTSNDDDTITAQVIMVNEGEEEVTIIANGKGSVEAIFNAVDKFFNQTVKLDSYNIEAVTDGIDAQARVLVSVENIDTDTIFNASGLDFDVLKASAIAYINANTFVQKENAGEIGHKVSERDYPSND

SEQ ID NO: 17145 - protein, 153 aa, Chorispora bungeana
MNSVSAFSEMFGSDYEPQGGDYCPTLATSCPKEPAGRKKFRETRHPIYRGVRQRNSGKWVSEVREPNKKTRIWLGTFRTAEMAARAHDVAALALRGRSACLNFADSAWRLRIPESTCAKDIQKAAAEAALAFQDETCDTTTTNHGLDMEGRCG

SEQ ID NO: 17146 - protein, 341 aa, uncultured bacterium 442
MAAPYPFTAIVAQQDMKLALLIAAVDQGVGGVLIMGDRGTGKSTAIRALAALLPKIPVIANCAYNCDPERTPAGQCDNCQQNKNQVVKTTTVSIPVVDLPLGATEDRVIGALDIERALHAGEKAFEPGLLARAHRGFLYIDEVNLLEDHIVDALLDVAASGENVVEREGLSIRHPARFVLVGSGNPEEGELRPQLLDRFGLSVDVATPQDVKSRVEIIRQRDRYEQDPEGFIKQWRRKESAQRSRIEKARLQVGLVNTPDEVLEFAASLCLQLGTDGLRGELTLLRAGRALAALNKKDLLTCEDIRTVAPMVLRHRLRRDPLDESGSDSRIARVLETMVVS

SEQ ID NO: 17147 - protein, 591 aa, uncultured bacterium 442
MKPSSASSHWALAEAALAAFSVAPHALGGLWVRSPPGPVRTLFLELAAEWQLNATAKRIPLHVQESRLLGGIELAQTLATGRLHWESGLLAQSDGGVVILSMAERAQRQTVAHLCSALDTGTLKLAREGLNQSVPAAFGVIALDEGLEGEHPQNALTERLGLRVDLGSLSVHDALSSDVDRANLINAQMRWMSVAVPDSLIEALAATTLALGIDSPRALVLTSRLIKILAALEGRTEAIEVDLERAVVMALAHRATRLPQQPPEEADEEPSEPEPQEAQTEPNEQEPKENKDQPTDAPPLEALIEAAIAYIPPGLLASLRQGHQPRSKSSGGGKSGTQQRHKQRGRPVGTEPGDPRRGGRLNLMATLRAAAPWQTLRRQQATSARQGQLHIKPSDFRTTRFRHQRESTTLFVVDASGSAAMHRMAEAKGAVELLLADCYSRRDSVALIAFRGNKAELLLPPTRSLVRAKKALAALPGGGGTPLAHAVELTTLLSEQILRDGATPTAVFLTDGVANIARDGTPGRQRAKEEAMTAAKQFKALKSRALVIDASPRAQQKARELADALGGQYLAMPQADAKGLRNIVQSAEAIS

SEQ ID NO: 17148 - protein, 153 aa, Chorispora bungeana
MTSVSTFSEMLGSEYESPTLSGEYCPALAASCPKKPAGRKKFRETRHPIYRGIRLRNSSKWVCEVREPNKKSRIWLGTFLTAEIAARAHDVAAIALRGKSACLNFADSAWRLRIPETTCPKDIQKAAAEAAVAFQAEINDTTTDHGLDRGDVG

SEQ ID NO: 17149 - protein, 142 aa, uncultured bacterium 582
MGLKYLHTMVRVKNLETSLAFYTLLGLKETRRKESENGRFTLIFMAPDGQEDRPIELTYNWDGDDGLPNDSRHFGHLAFGVDNIYETCAHLQANGVTINRPPRDGHMAFIRSPDNISIELLQNGPPLEGAEPWLSMGNTGHW

SEQ ID NO: 17150 - protein, 154 aa, Chorispora bungeana
MTSFSAFSEMLGSEYESPTLSGEYCPALAASCPKKPAGRKKFRETRHPIYRGVRLRNSGKWVCEVRGPNKKSRIWLGTFLTAEIAARAHDVAAIALRGKSACLNFADSAWRLRIPETTCPKDIQKAAAEAAVAFQAEINDTTTDHGLDMERRWW

SEQ ID NO: 17151 - protein, 457 aa, Staphylococcus aureus subsp. aureus MW2
MAIAVLLNRMFRMEHNPLFEYIYQQKEDIDACYFIIPEEDMSSASDLKAQFYRGTLQRFYQSLHAEKLTPYVMSYDDIISFCKENNISEVVTAGDIMSYHLEEYDILHQRSLFNEARIAVTLIRGNHYFKASKTMNQQGEPYKVFTSFYKKWRPYLRHRDVYHYDLKSFEDFVIASPDDLVFDDIAFGSSQIIEQNKWQHFLDQDIQNYESGRDYLPEVLTSQLSVALAYGLLDIIEIFNDLLARYDEDEANYEAFIRELIFREFYYVLMTQYPETSYQAFKPKYRQIKWSQNEADFNAWCEGQTGFPIIDAAIMELTQTGFMHNRMRMVVSQFLTKDLFIDWTWGEKFFRKHLIDYDAASNIHGWQWSASTGTDAVPYFRMFNPIRQSERFDAKALYIKTYLPIFNQIDAKYLHDTQRNESNLFEQGIELGSHYPRQIVDHQEKRTQVLATFKALD

SEQ ID NO: 17152 - protein, 364 aa, Glycine max
WRSDPATAYNLQSIRPAFSAIRHFSSAAKEITVRDALNSALDEEMSADPKVFLMGEEVGEYQGAYKISKGLLDKYGPERVLDTPITEAGFAGIGVGAAYYGLRPVVEFMTFNFSMQAIDHIINSAAKSNYMSAGQISVPIVFRGPNGAAAGVGAQHSQCYASLYGSCPGLKVLSPYSSEDARGLLKAAIRDPDPVVFLENELLYGESFPVSAEVLDSSFCLPIGKAKIEREGKDVTITAYSKMVGYALKAAETLAKEGISAEVINLRSIRPLDRSTINASVRKTNRLVTVEEGFPQHGVGAEICTSVIEESFGYLDAPVERIAGADVPMPYAANLERMAVPQVEDIVRAAKRACYRSVPLAASA

SEQ ID NO: 17153 - protein, 335 aa, Shewanella oneidensis MR-1
MSKRTITVIPGDGIGPSIIDSALKILDKAGCDFEYEFADAGLAALEKQGELLPQRTLELIEKNRITLKGPLTTPVGEGFTSINVTLRKKFGLYANVRPVLSFKGTQARYENIDIITVRENTEGMYSGHGQKVSEDGSTAEATSIVTRQGAEQIATFAYELARKESRKKVTIVHKANIMKSTSGLFLKVAREVSLRYPDIKTEEMIVDATCMKLVMNPENFDVIVTTNLFGDILSDLCAGLVGGLGMAPGANIGRDAAIFEAVHGSAPDIAGKNLANPTSVILASIQMLEYLGMADKAAPIRKAVSAVIEEGDRTTRDLGGTHGTTDFTQAVLDRL

SEQ ID NO: 17154 - protein, 347 aa, Streptococcus agalactiae 2603V/R
MFVKKGLFVFLLLCILSMWLMIFGVAFYYFGSLHQSLTSRIIYQFVLTVLLTTTAWFMGAYFLAFEGHFKTVFQFQEADGKQIVNCLFQLCFALYAVVMLIGSIIDRVQTKRLLLAVVSWLFLVYTPLAYLIWNSEGVFAKMGVLDFSGGMIVHLSAGLSSYILAHVIGKSEHQHNKVKNDSLFLGMILITFGWFGFNMGPVGEWNSQAIMILLNTIFAIIGGGLAWTLAAKWNGEEEKTGSLLNGIIVGLVTSTAGVGYLLTWQLLAVTFFASLFTYFVTDYVAKAFAIDDVVSSFGMNGIGGLLGSLGVGLFKLSHMPVQLLALATTILLSIIMTYIISKAIFRK

SEQ ID NO: 17155 - protein, 175 aa, Chorispora bungeana
KKFRETRHPIYRGVRLRNSGKWVCEVREPNKKSRIWLGTFLTAEIAARAHDVAAIALRGKSACLNFADSAWRLRIPETTCPKDIQKAAAEAAVAFQAEINDTTKGHGLDVEETIVEAIFTEENSDGSYMDEEESMFGVPTLLASMAEGVLLPPPSVQFEYNYDFDGDTDVSLWSY

SEQ ID NO: 17156 - protein, 321 aa, Vibrio vulnificus YJ016
MQMSDMKHSKLLILGSGPAGYTAAVYAARANLNPVLITGMQQGGQLTTTTEVENWPGDPEGLTGPGLMNRMKEHAERFETEIIFDHINEVDFSTRPFVLKGDAASYSCDALIISTGASAKYLGLESEEAFKGRGVSACATCDGFFYRNQKVAVVGGGNTAVEEALYLSNIAAEVHLIHRRDSFRAEKILINRLMDKVQNGNIVLHTDRVLDEVLGDEMGVTGVRLKDVKTGGTEELDVMGAFIAIGHSPNTQIFQGQLDMKDGYILVKSGLEGNATQTSVEGIFAAGDVMDHNYRQAITSAGTGCMAALDAERYLDSLNDK

SEQ ID NO: 17157 - protein, 356 aa, Gibberella zeae PH-1
MSFRTLRIGLIPGDGIGKEVIPAGRRILEALPSSLGLKFDFVNLKAGFETFEQTGAALPDKTVEVLKNECDGALFGAVSSPTQAVKGYSSPIVALRKRLDLYANVRPVKTVMTAAKPIDMVIVRENTEDLYVKQEKTYDTPEGKVAEAIKRISEKASFRIAAMAGDIALRRQKIRDAGASSIHKSPLVTITHKSNVLSQTDGLFRATSKRALADPKFSSVAVEEQIVDSMVYKLFRQPEDYDVIVAPNLYGDILSDGAAALVGSLGLVPSANVGEGFAIGEPCHGSAPDIQGQNIANPIATLRSTALMLEFLNEEEAAAKIYAAVDGNLEDGKLLSPDLGGKATTEEVVADILRRL

SEQ ID NO: 17158 - protein, 624 aa, Aspergillus oryzae
MKGALSVIGLSRVAFLYSFPLSSRARSTLTPTIIRNMPQKRKPSQNGTRENGTNSTSDTNKRGKSDLSSPHPNSRQAEEFGIVLRQFYPPEMSNERCQAYNDGTLERPMETLNRVCEETVDARLSIRPNAAVVHWFKSDLRLHDNRALRKAYEVAREHSIPLIALYILSPEDLTAHLSSPARVDLTLRTLEQLKLDLGELDIPLHMETQESRRDIPQRIIHLCQEWGANHLFANIEYEVDELRREAKLVRLCVENGIAFDVLHDTCVVPPGLLSSQQGKQYAVYSPWFRSWQMFLMDNPEHLEVSEEPGSNPGNARKVFKDLFASEVPGAPNNKRLSDEEREHFRQLYPAGEHEGLDRLESFLEEKATAYDDMRNSLSKQTTSVLSPYFASGSLSARTAVAKAKKANKNQLDRNELGFVSWISEVAWRDFYKHVLVRWPFICMNKCFKPEFTDLEWEYNMDYFNAWCEGRTGFPIVDAAMRQMKSSAWMHNRSRMIVASFLSKDLLIDWRRGERYFMEHLIDGDFASNHGGWGFGSSTGVDPQPYFRIFSPLRQSERFDPDGDYIRRWVPELREIEGSAIHDPYDRGAGDLAEKNGYPRPIVDHATRRALALDRYKKAAGGKSR

SEQ ID NO: 17159 - protein, 144 aa, Arabidopsis thaliana
  misc_feature (57)..(57): Xaa can be any naturally occurring amino acid
  misc_feature (94)..(94): Xaa can be any naturally occurring amino acid
  misc_feature (116)..(116): Xaa can be any naturally occurring amino acid
MVFCTAHATVRDPFIGLKYSSAFPATRKALKDITSITSNGSRVNCMQVWPPIGKKKXETLCYLSDLTDSKLAKEVDYLIRARWIRCDELELKHXVVFREHGHSPGYYDGRYWTMCXLTLFGCSESPVLLKEVVECRKEYPTAFI

SEQ ID NO: 17160 - protein, 147 aa, Oryza sativa
MGKNASRLAVAAVVVFALLLSLRQLEAADDVSVSCSDVVADVTPCLGFLQGDDDHPSGECCDGLSGLVAAAATTEDRQAACECLKSAVSGQFTAVEAAPARDLPADCGLSLPYTFSPDVDCSQSQGHNHAFKQPNNSSTGPQLPPRN

SEQ ID NO: 17161 - protein, 627 aa, Ustilago maydis 521
MRLSVSACSSAVTRALPLSRASQIRSIATAPATSSALPKQATTAPRTTAAKSTATLPVPLSVASPQPLISHNSALARFVSSSAIATAPVASSVSSSSEASPYASPLPTSSLINVTTLPNRVRVATEATPGHFSAVGVYIDAGSRYERPWVAGESGSSHLLDRLAFKSTTNRSSQQMTSEIEALGGNVMCSSSRETIMYQSSVFNKDVSAVLSILADTILNPLLSPEELDVQREAAAYEIQEIWSKPEMILPELLHTTAYQSNTLGNPLLCPIESLEQMTAENLRNFMSTWYKPERIVVAGSGMPHEQLVELSQKLFGDLKPSSDPGRLSSGSSSLSSSPASSTSTSSSSRSSSLSSLFSRSSSNFSTSSSSSATPSPAELADLVSTPSHYTGGELYIPQSDLEFTHVYVAFEGLSIHDKDIYALATLQILLGGGGSFSAGGPGKGMYSRLYTNVLNQHHSVDYCAAFHHCYSDSGLFGISASVHPSFNASIVHVIARELELCTSSIYQGSVTQAELNRAKNQLKSSLVMALESRLVEVEDLGRQIQAHGKKVSVEEMCQKIDQVDLSTLNRVATRVLRPQKMSVSAAKSPRGSGQATVVAQGQLEGLGDVRDLLARRGLGVSPKHAA

SEQ ID NO: 17162 - protein, 417 aa, Candida albicans SC5314
MSVASNPYGPNPSDFLSNVNKFEVIESTLREGEQFANAFFTTEKKIEIAKALDDFGVDYIELTSPVASEQSRRDCEAICKLGLKAKILTHIRCHMDDARVAVETGVDGVDVVIGTSQFLRQYSHGKDMNYIAQSAIEVIEFVKSKGIEIRFSSEDSFRSDIVDLLNIYRTVDKIGVNRVGIADTVGCANPRQVYELVKTLKSVVSCDIECHFHNDTGCAIANAYTALEAGAKLIDVSVLGIGERNGITPLGALMARMITADRDYVLSKYKLHKLRDLENLVADAVQINIPFNNPITGFCAFTHKAGIHAKAILANPSTYEILNPNDFGLTRYIHFANRLTGWNAIKSRVDQLNLHLTDDQVKEVTNKIKKLGDVRQLNIDDVDSIIKDFHAEQSTTNTPLLKPVEDDEGPEIKKQKV

SEQ ID NO: 17163 - protein, 447 aa, Alkaliphilus metalliredigenes QYMF
MFPYIPATEESKKKMLEDVGLNSVEDLFKDISHKVRLKGELNIPKHKSELEVSSYIKKLGKMNETTEDYTCFLGCGAYDHYIPSVVDAVISRSEYYTAYTPYQAEIAQGTLQTIFEFQSMMAGLTGMDVCNASVYDGSTAVYEAAYVAVASNRRKEVLISKSVHPEYRKVLKASLGAANIKYIEIEIKEGTTDLDDLKEKLTKDVSAVIVQSPNFFGLIEEVEEVVKESHENKSLVVMSTDPISLGLLKTPGEMGVDIAIGEAQALGIPLSFGGPYLGFITTTKALLRKVPGRLVGMTKDVDGKRGFVLTLQTREQHIRREKSISNICTNQALNATAATVYLSLMGKEGMKEVAKQNYDKAHYAHEQLISTGMFEDSWEKPFFKEFTLKYKGNLKALKEKLEENKILGGFHPKEDYQALENHLIIAVTEKRSKEEVDQLCTIVKEVE

SEQ ID NO: 17164 - protein, 578 aa, Deinococcus radiodurans R1
MPKSPPVSRYYDVKRDEQGQRYIEVKVTGLALLQNPLLNKTTGFTPEERRELGLEGLIPPHISSFEEQKHRTYLRYLEAPTDLARHEYLRALQDRNEVLYYAILEDHLEEMLPIIYTPTVGEAVKLYSNNYRYPRGFTVSTNDIERVEEMLDNVTVNDVRMIVATDSSAILGIGDQGFGGMAISIGKLSLYTAAGGVGPDKTLPVELDVGTNRQDLIDDPLYLGVHHRRWQGQQYDEFVDAFVEAVSARYPKAIIQWEDFSRGTAFRVLERYRKVVPSFNDDIQGTGAMALAGLLRASRMKGEFLTEQVFVVVGAGAAGIGVASAIRQGLEAEGLAPEEAGRRVYVVDRYGLLMEGQPDLEPQQMPFVRRRGDLEGWTFGGEYPTLHEVLVHARATALLGFTGVPGLFRQEDIEAMLAHTPRPIVFPLSNPSSHVEARPSDIVAWTRGGAIVATGSPFPDVPYDNERIPVGQGNNAFIFPGLGFGAVVSRAREITDNMVMAAALTLAEYTTQHHPHLVYPPISELRELSIHVAVRVAEQAIQDGVCAERRVRNMDREQLAALIRERAWLPRPLPLRRE

SEQ ID NO: 17165 - protein, 481 aa, Alkaliphilus metalliredigenes QYMF
MYEKVIYEISSKGKKGYMLPPQDVPQYEVPEKYLRKTDNHLPEVSEREVMSHFVNISSKNYHIDKGFYPLGSCTMKYNPKINEAMARLDGLANIHPYQDEKMVQGALRLMYELQGSLGEITGMDAFTLQPAAGAHGEKTGLMLMHQYHRGRNDLKRDKIIVPDSSHGTNPASAAMTGFKIIEVPSNERGGVDIEALKNVVGDDTAGLMLTNPSTLGLFEENITEIAGIIHGAGGLLYYDGANMNAIMGYARPGDMGFDIIHLNLHKTFTTPHGGGGPGAGPVGVKEFLKEFLPVPMIDKKDETYTLRYDMENSIGKVKSFYGNFGMLIRAYTYILTMGSDGLKHVSEMAVLNANYLKENLKEYYQLPYDILCKHEFVLSGKSMKKKYGVSTMDIAKRLIDYGYHPPSVYFPLIVEEAIMIEPTETESKETLDEFIKVMITIAKEAAENPDLLHEAPHHSPVRRLDDSGAARNPILKWQDIE

SEQ ID NO: 17166 - protein, 608 aa, Lupinus albus
MATGQLFSRTTQALFYNYKQLPVQRMLDFDFLCGRETPSVAGIINPGSEGFQKLFFGQEEIAIPVHATIEAACARHPTADVFINFASFRSAAASSMAALKQSTIRVVAIIAEGVPESDTKQLIAYARSNNKVVIGPATVGGIQAGAFKIGDTAGTIDNIIQCKLYRPGSVGFVSKSGGMSNELYNTIARVTDGIYEGIAIGGDVFPGSTLSDHVLRFNNIPQVKMIVVLGELGGRDEYSLVEALKQGKVTKPVVAWVSGTCARLFKSEVQFGHAGAKSGGELESAQAKNQALQEAGAAVPTSYEALEAAIKETFDKLVEEGKITSVKEFTPPPIPEDLNTAIKSGKVRAPTHIISTISDDRGEEPCYAGVPMSSIIEKGFGVGDVISLLWFKRSLPRYCTQFIEICIMLCADHGPCVSGAHNTIVTARAGKDLVSSLVSGLLTIGPRFGGAIDDAARYFKDARDRSLTPYEFVESMKKKGIRVPGIGHRIKNRDNKDKRVELLQKFARTHFPSVKYMEYAVEVETYTLTKANNLVLNVDGAIGSLFLDLLAGSGMFTKQEIDEIVEIGYLNGLFVLARSIGLIGHTFDQKRLKQPLYRHPWEDVLYTK

SEQ ID NO: 17167 - protein, 329 aa, Brucella melitensis 16M
MRGIPMTSQDNPHGGAYGGPASQMAANVSFGQPSAPANGGDLIKDTTTAGFQADVITESRKQPVLVDFWAPWCGPCKQLTPIIEKAVREARGAVKLVKMNIDEHPAIAGQLGIQSIPAVIAFVNGQPVDGFMGAQPETKVKEFIAKVGGPSDQEAALAEAIATAKELAQAGDFVQAAEIFSSILQVAPDNVDAVVGLATCMLESGDAEQARSLLGTLAAEKQNEAPVRALEARLALADQVKLIGDPVELERRLAADPGDYQARFDLAQVRNAQGRRDDAANELLAIMRADRAWNDDGARKQLLQFFEAWGHMDPATLTARRKLSSLLFS

SEQ ID NO: 17168 - protein, 631 aa, Arabidopsis thaliana; identical to SEQ ID NO: 520

SEQ ID NO: 17169 - protein, 370 aa, Brucella melitensis 16M
MASRKLLLLPGDGIGPEAMAEVRKVIAFLNSDLNLGFETEEGLVGGCAYDAHGQAISDADMEKALAADAVLFGAVGGPKWDSVPYEVRPEGGLLRLRKDMQLYANLRPAICYPALAHSSSLKPEVIEGLDILILRELTGGVYFGEPKEIIDLGNGQKRGIDTQVYDTYEIERIADVAFELARTRRNKVTSMEKRNVMKSGVLWNQGVTARHKEKHADVQLEHMLADAGGMQLVRWPKQFDVILTDNLFGDLLSDVAAMLTGSLGMLPSASLGAADSKTGKRKALYEPVHGSAPDIAGKGIANPIAMIASLAMCLRYSFGLVAEADRLEAAIAGVLDDGIRTADIWSEGNTKVGTTEMGDAILAKFKALSA

SEQ ID NO: 17170 - protein, 588 aa, Arabidopsis thaliana
MDYLSSMGSQTARFCLILLFLFYYLPCALSQDDLWGCGTPFRCGNITAGFPFLGGIRGEVCGHHSLKLNCNKHSNTTSLIFSGHNYTVLYIDNNNNSVTLGLSRQDFSGPFCSASFSSTLLSSGLFQNLPSYKSLTVFYACDPRRHFLGNFTCPVKGLGSIIQNSTYGILCDGSFSVPVPTSFVSEEEVLDLTHLESVLRKGFEVKLNIDEIPCPLECFSSRANCLFLAGSCCKYHDRTTTCGGDTGDLLRESMILLFAMFFISPLIVAEIIPNTRSILITIGQEVVGRGGFGTVYKGNLRDGRKVAVKILKDSNGNCEDFINEVASISQTSHVNIVSLLGFCFEKSKRAIVYEFLENGSLDQSSNLDVSTLYGIALGVARGIEYLHFGCKKRIVHFDIKPQNVLLDENLKPKVADFGLAKLCEKQESILSLLDTRGTIGYIAPELFSRVYGNVSHKSDVYSYGMLVLEMTGARNKERVQNADSNNSSAYFPDWIFKDLENGDYVKLLADGLTREEEDIAKKMILVGLWCIQFRPSDRPSMNKVVGMMEGNLDSLDPPPKPLLHMPMQNNNAESSQPSEEDSSIYSEV

SEQ ID NO: 17171 - protein, 572 aa, Magnaporthe grisea 70-15
MVLSRHVNPDDIVQHLHNSSLKEQDGDNDTRTQAAISHLTPYSSRYASNVSLPKYKLPKEGAEADTVYSMIRDELDLDGKPNLNLASFVGTYLEDNAQKLMVENIAKNLSDADEYPAMISMQQRCVSILAHLWNVQKGEKAIGSATTGSSEAIQLGGLAMKRRWQEARRAAGKDDSKPNIIMGANAQVALEKFARYFDVEARILPVSEKSRYRLDADMVRDNIDENTIGIFIILGSTYTGHYEPIEEISEILDKYQAETGHDIPIHVDGASGAFIAPFTHAQAGGPKWDFSLPRVKSINTSGHKYGLVTAGVGWIVWRDESFLPKHLIFELHYLGGTEESYTLNFSRPGAQVITQYFNLVHLGFSGYRAIMENCLANARLLSKSLEATGWYTCVSDIHRRVETAGSNGSNGKQKEPEVTPEHAKETSADYVAGLPVVAFCFSDEFRRQFPHVKQETVSVLLRARQWIIPNYALPPNEEKTEILRVVVRESMSLDLLDRLLSDICEVTQKLMDEDELDLNVLQGSRHKGPCTKADVSKEGRAQAKKERDDRHKKHQATGRTGRMETGVHRSTC

SEQ ID NO: 17172 - protein, 512 aa, Listeria monocytogenes
MKKIQFFDTTLRDGEQTPGVNFDVKEKIQIALQLEKLGIDVIEAGFPISSPGDFECVKAIAKAIKHCSVTGLARCVEGDIDRAEEALKDAVSPQIHIFLATSDVHMEYKLKMSRAEVLASIKHHISYARQKFEVVQFSPEDATRSDRAFLIEAVQTAIDAGATVINIPDTVGYTNPTEFGQLFQDLRREIKQFDDITFASHCHDDLGMATANALAAIENGARRVEGTINGIGERAGNTALEEVAVALHIRKDFYQAETNIVLNQFKNSSDLISRLSGMPVPRNKAVIGGNAYAHESGIHQDGVLKNPDTYEIITPALVGVDKNSLPLGKLSGKHAFNTRMEEMGYTLTEQEQKDAFKRFKQLADAKKEVTEEDLHALILGQSSESADDFELKHLQVQYVTGGVQGAIVRIEERDGALVEDAATGSGSIEAIYNTINRLMKQDIELTDYRIQAITAGQDAQAEVHVVIKNDKGAEFHGIGIDFDVLTASAKAYLQASGKSKTASKQADFEEVK

SEQ ID NO: 17173 - protein, 831 aa, Novosphingobium aromaticivorans DSM 12444
MNAPTSFSQKDQPAQARERLVVIGNGMAGCRAVEEILARDPARFDVTIFGAEPRVNYNRIMLSPVLAGEKAFDDIVINDASWYADNGITLVSGDPVVSIDRETQTVVARSGRVEPYDRLLIATGSDPFIIPVPGHDLPGVVTFRDLDDVERMLAASERGGSAVVIGGGLLGLEAAHGLALRGMKVTVVHLMPTLMERQLDEAAGYLLRSELERRGQTIVTGGDTAEILGRDGHVSGVKLKDGREFAADIVVMAVGIRPATGLARAAGLDVERGILVDDHMMTSDPAVMAVGECVQHRGQCYGLVAPLWDMCRALADCVTGNPSGYEGSVTSTKLKVSGIDLFSAGDFSGGEGAEDIVMRDASRGIYKRVIVREDRVVGAVLYGDTGDGSWYFDLLKKGEDISEIREALIFGQAFAAGGALADPNAAVAALSDDAEICGCNGVSKGKVVETIKGGACSLDAVRSQCKASASCGSCTGLVESLLRLTLGGEVEAGPKTMCKCTSFTHSDVRRLIVEKNLRLIPQVMQELGWSTPDGCASCRPALNYYLLCAWPGEYEDDQQSRFVNERMHANIQKDGTYSVVPRMWGGLTNPRELRAIADVVEKYNAPMVKVTGGQRLDIFGIRKEDLPAVWADLNAAGMVSGHAYGKSLRTVKTCVGSEWCRFGTQDSTGLGVKLEQMTWGSWMPHKFKIAVSGCPRNCAEATIKDFGVVCVDSGYELHVGGNGGIKVRATDLLCRVATEAEAMEVCAAFIQLYREQAWYLERTAPWIERVGLEHVKAALFDDPEAVATLAARFRHSQQFMQDDPWAKRARGADAELHQHLAEVRPFQMENA

SEQ ID NO: 17174 - protein, 350 aa, Listeria monocytogenes
MTYKITSLAGDGIGPEIMTSGLQVLEAVAKKYNHTFEIESHPFGGAGIDVAQDPIPSSTLKACQDADAILLGAIGGPKWDNAPKRPEDGLLALRKALGLFANIRPIQVPSSITHLSPLKKEIVENTDFVVVRELTGGLYFGEPKHWDESAAVDSLTYTRAEIERIIEKAFEIAATRNKKVTSVDKANVLASSKLWRKIAEEVASRHPDITLEHLYIDAAAMLMIQRPTTFDVIVTENLFGDILSDEASVITGSLGMLPSASHAENGPSLYEPIHGSAPDIANQNIANPMSMISSVSMMLRQSFSLFKEADAIDAAATRTMQAGFLTADLGGNTTTTDFTNEVLKQIEGGE

SEQ ID NO: 17175 - protein, 421 aa, Pyrobaculum islandicum
MERTGFLEYVLNYVKKGVELGGFPEDFYKILSRPRRVLIVNIPVRLDGGGFEVFEGYRVQHCDVLGPYKGGVRFHPEVTLADDVALAILMTLKNSLAGLPYGGAKGAVRVDPKKLSQRELEELSRGYARAIAPLIGDVVDIPAPDVGTNAQIMAWMVDEYSKIKGYNVPGVFTSKPPELWGNPVREYATGFGVAVATREMAKKLWGGIEGKTVAIQGMGNVGRWTAYWLEKMGAKVIAVSDINGVAYRKEGLNVELIQKNKGLTGPALVELFTTKDNAEFVKNPDAIFKLDVDIFVPAAIENVIRGDNAGLVKARLVVEGANGPTTPEAERILYERGVVVVPDILANAGGVIMSYLEWVENLQWYIWDEEETRKRLENIMVNNVERVYKRWQREKGWTMRDAAIVTALERIYNAMKIRGWI

SEQ ID NO: 17176 - protein, 336 aa, Deinococcus radiodurans R1
MARRRLPSMTHGNSSQSDRPRIISPLAPRADAAEVVRGVDLKGKTAVVTGGASGLGTETARALLLAGAHVILPVRDRAKGERVAAELRQSTGGTVELVDLDLGSLASVRRGAAEIRQLAPRIHILINNAGVMATPQSRTVDGFETQFGTNHLGHFLLTRELLPALMAAAPARVVALTSSGHRRSDIVWDDLNFERRPYDPWDAYGQSKTANALFAVGLTQRYADQGLTANAVHPGGIMTGLQKFVPLEDQRRMGWQDEHGTLNPVFKTPAEGASTSVWAATSPQLYGVGGLFLEDLQHSTPLDESAPNPLFGYKPYALDHESARRLWALSEALVGE

SEQ ID NO: 17177 - protein, 335 aa, Geobacillus stearothermophilus
MAVKVGINGFGRIGRNVFRAALKNPDIEVVAVNDLTDANTLAHLLKYDSVHGRLDAEVSVNGNNLVVNGKEIIVKAERDPENLAWGEIGVDIVVESTGRFTKREDAAKHLEAGAKKVIISAPAKNEDITIVMGVNQDKYDPKAHHVISNASCTTNCLAPFAKVLHEQFGIVRGMMTTVHSYTNDQRILDLPHKDLRRARAAAESIIPTTTGAAKAVALVLPELKGKLNGMAMRVPTPNVSVVDLVAELEKEVTVEEVNAALKAAAEGELKGILAYSEEPLVSRDYNGSTVSSTIDALSTMVIDGKMVKVVSWYDNETGYSHRVVDLAAYIASKGL

SEQ ID NO: 17178 - protein, 188 aa, Aspergillus nidulans FGSC A4
MRPLTEEETQTLFKKLAEYCGSGLKELIKPLDSSPNADRYVFRLSGNRVYYSLLSIANAATAFPRDQLLSLGICMGKFTKTGKFRLHITALPIIAEHARNKIWIKPNGVMPFLYGSNVAKAHVAKLPDEMAEHSGVIVCTQDDVPLGFGITARSTAEARRLDPTGIVCFRQADCGEYLRDEDTLFASG

SEQ ID NO: 17179 - protein, 644 aa, Arabidopsis thaliana
MESAPTGCFKCGRPGHWSRDCPSSAPVAGNNSVSSSSAPSQIPNNEFQRSSSKSGTSIAPAPKVTKTRVQRPKLTPELLLSEDGLGYVSDLGNLIRLYSEWHTHLLPYYSFDHFVHKVQQVASTKRVKNCINELRERVASGVDPNKLYEKQEENTVPSDDQDMDQPSHDEENIPSKSVDADTNADAFEDSMLNEIFDNASKLPSDEQNMDKSSELTEEQRARMEANRLKAMEKAQNISEEQRMSSSSIVIYLSTLHFLVGRRSITDAMWQMNLSSDETMETGSYPERPGEPDCSYYIRTGLCRFGSTCRFNHPRDRELVIATARMRGEYPERIGQPECEYYLKTGTCKFGVTCKFHHPRNKAGIAGRVSLNMLGYPLRSNEVDCAYFLRTGHCKFGGTCKFNHPQPQPTNMMVPTSGQQSYPWSRASFIASPRWQDPSSYASLIMPQGVVPVQGWNPYSGQLGSVSPSGTGNDQNYRNLQQNETIESGSQSQGSFSGYNPGSSVPLGGYYALPRENVFPERPGQPECQFYMKTGDCKFGTVCKFHHPRDRQAPPPDCLLSSIGLPLRPGEPLCVFYTRYGICKFGPSCKFDHPMRVFTYDNTASETDEVVETSTGKSRRLSVSETRQAATTSSGKDTTIDNTQQ

SEQ ID NO: 17180 - protein, 522 aa, Vibrio vulnificus YJ016
MLDQAIKQQLTQYLTNLKQDVRLVVSLDDSKGSQDILALANEIADLSPLITVVRDDAASTRKPVMTVTNPEKSTALRFAGLPMGHEFTSLVLALLHSGGHPIKLDAETIEQIAQLDKELDVEVFISLSCQNCPDVVQAFNMMAAINPKIRATMIDGALFQDEVKQRDILAVPSVFVNGELFGQGRMSLTEILNKLDDGAAEKAAASLNEKDPYDVLVVGGGPAGAAAAIYAARKGIRTGIVAQRLGGQVMDTMAIENFISVKHTEGPKLAANLGEHLKEYGVDIITEQQAEKLMGAQYTEDGKIHVNLQSGATLKSNSVILSPGARWREMNVPGEQEYRNKGVAYCPHCDGPLFKGKKTAVIGGGNSGIEAAIDLAGIVEHVTVLEFADTLRADQVLINKANSLPNVDIITMAQTTEVVGDGKRVTGLKYKDRNTDEIKQLDLAGIFVQIGLVPNTEWLKDSDVELSARGEIEIGSRGETSLEGVFAAGDATTVPYKQIIIAMGEGAKASLGAFDYLIRKQG

SEQ ID NO: 17181 - protein, 118 aa, Arabidopsis thaliana
MAGVMKLACLLLACMIVAGPITSNAALSCGSVNSNLAACIGYVLQGGVIPPACCSGVKNLNSIAKTTPDRQQACNCIQGAARALGSGLNAGRAAGIPKACGVNIPYKISTSTNCNAKP

SEQ ID NO: 17182 - protein, 540 aa, Synechococcus sp. WH 7805
MAHDPGRVLIFDTTLRDGEQSPGASLNLEEKLAIAQQLARLGVDVIEAGFPFASPGDFAAVQRIAQQVGGEQGPIICGLARASRGDIKACADAVAPAPRRRIHTFIATSDIHLEHKLRKSRQEVLAIVPEMVAYARSLVDDVEFSCEDAGRSDPEFLYEVIEAAIAAGASTINIPDTVGYTTPAEFGALIAGIDQHVPNIADAVLSVHGHNDLGLAVANFLEAVKNGARQLECTINGIGERAGNAALEELVMALHVRRRYFNPFFGREDDSPTPLTGVRTEEITKTSRLVSNLTGMVVQPNKAIVGANAFAHESGIHQDGVLKNRLTYEIVDARTVGLTDNRISLGKLSGRSAVRARLEELGYDLSREDLDDAFARFKELADRKRDITDRDLEAIVSEQVQQPDARYQLTSVQVSCGSNLQPTATVTLLDEEGQEQSEAAIGTGPVDAVCRALNALAGEPNELVEFSVKSVTEGIDAMGEVTIRLRRDGQLFSGHAADTDVVVAAAQAFVNALNRLVAGSLNPALHPQRDATPLDASPTL

SEQ ID NO: 17183 - protein, 542 aa, Medicago truncatula
MAKVFRAYFLKSLFIFWYRFLLRQLKNLIVFHRTISNTFANTTQSQIKYQKFSSLLNRSDLNDHTLIFDVENALLKSTSLFPYFMLVAFEAGGLFRAIVLVLLYPLIFLSGEKMGLNIMVMICFFGLKAKDFRIGRSVLPKFFLEDVGSEIFEVINQGGKKVGVSNLPRVMVESFLKEYLKIDFVAGRELKMVCGYYVGLMDETKNLHALKQVHEGKGSLDMIGITRFNNIHDDEIFSSCKEVYAVSQGDKRSWKKLATKKYPKSLIFHDGRLALTPTPLKSLAMLMWLPYGIILSVIRITLAFTLPFKISTPLLTFSGLRLTSSIPENAHKSNGHGHLYVCNHRTLLDPLYISFSLHKKLIAVTYSLSKMSEIIAPIKTVRLSRNRDIDAKMMKTLLQQGDVVVCPEGTTCREPYLLRFSSLFSEMCDEITPVAVDTHVSMFYGTTASGLKALDPVFFLADPFPAYTVELLTQVRPSQFPRVSENAEECRFEVANHIQAEIGNTLGFECTKLTRKDKYLMLAGNEGVVFNRRNSIPRNSQQ

SEQ ID NO: 17184 - protein, 483 aa, Acinetobacter sp. ADP1
MDLQQQPLFRQKALVAGQWCDADNAEKTPIFNPATQELIGYVPNMGRAETERAIEAAYASWEMWKTKTAKERSALLKKWYDLILLNLDVLAEILTTEQGKPFNEAKGEIIYAASFIEWFAEEAKRIYGDIIPSPYPDARIVVNKQPIGVVAAITPWNFPAAMITRKVAPALAAGCPCIVKPAPETPFTALALADLAIQAGIPAEIMSVVTGDAAQIGDAIFASDHVRKFTFTGSTPIGKLLLEKSAKTLKKVSLELGGNAPFIVFDDADIEAAVEGALIAKFRNAGQTCVCVNRFLVQSGVYEKFIQVFKAKIESLKIGNGLEAGSEIGPLINAQAVAKVQSHIEDALSKNGRLITGGQVHATGELFFEPTLIADANTEMMVATQETFGPLAAIFKFDTEQQAIQMANDTEFGLAAYCYTRDLGRAWRMSEQLEYGMVGINKGLISNEVAPFGGIKHSGLGREGSKYGIEDYLEIKYTLFGGL

SEQ ID NO: 17185 - protein, 266 aa, Mycobacterium sp. JLS
MTDTLTNPAALVERRGNVALITINRPEARNAVNGAVSTAVGDALAAAQSDPDVWAVVITGAGDKSFCAGADLKAVSRGENLYHAEHPEWGFAGYVHHFIDKPTIAAVNGTALGGGSELALASDLVVACESASFGLPEVKRGLMAGAGGVFRIVEQLPRKVALELIFTGEPMSSADALRWGLINQVAPDGAVVEAALALAERIAVNAPLSVQASKRVAYGADGDIIATEEPKWDRTTREFTALLESEDAKEGPLAFAQKRQPVWKGR

SEQ ID NO: 17186 - protein, 193 aa, Triticum aestivum
  misc_feature (76)..(76): Xaa can be any naturally occurring amino acid
  misc_feature (88)..(88): Xaa can be any naturally occurring amino acid
  misc_feature (96)..(96): Xaa can be any naturally occurring amino acid
  misc_feature (114)..(114): Xaa can be any naturally occurring amino acid
  misc_feature (122)..(122): Xaa can be any naturally occurring amino acid
  misc_feature (133)..(133): Xaa can be any naturally occurring amino acid
  misc_feature (138)..(138): Xaa can be any naturally occurring amino acid
  misc_feature (141)..(141): Xaa can be any naturally occurring amino acid
  misc_feature (155)..(155): Xaa can be any naturally occurring amino acid
  misc_feature (160)..(160): Xaa can be any naturally occurring amino acid
  misc_feature (164)..(164): Xaa can be any naturally occurring amino acid
  misc_feature (167)..(167): Xaa can be any naturally occurring amino acid
  misc_feature (173)..(173): Xaa can be any naturally occurring amino acid
  misc_feature (176)..(176): Xaa can be any naturally occurring amino acid
  misc_feature (178)..(178): Xaa can be any naturally occurring amino acid
MAPTVMASSATSVAPFQGLKSTAGLPVSRRSNGASLGSVSNGGRIRCMQVWPIEGIKKFETLSYLPPLSTEALLKXVDYLIRSKWVPXCLEFNKVXGFIFREAQTQSLGYYDGXYWTMWKLXMFGATDAKKVXLTRGXEVXKEYPDPLSAIIGFXKMRKXKWVXFNXLKPPGXKDXGXAKSPKGNKGIDFLNN

SEQ ID NO: 17187 - protein, 181 aa, Cryptococcus neoformans var. neoformans JEC21
MRPLTEEETKAVFEKLANYIGKNLVHLIDRDEDDEYCFRLHKDRVYYLPLPMLHLATSVARPNLVSLGTCFGKFSKTGKFKLGIMCLDYLAKYAKYKVWIKPSGELPFLYGNHVAKAHLGRITEDTPEHQGVVVYNMSDVPLGFGVTARSTLDTRKLDPTGIIVFHQADVGEFLRDEDTMF

SEQ ID NO: 17188 - protein, 227 aa, Zea mays
MASIPPPSSSVAALTRQPAQFLKGCSVSKETKASVCSFLATNSNSTRVKSVGLRVASSFKNDGGYPADGFSGNGNTLLPKSTSVRGEDHPAADPVLPMDSMMTPEILSANLALVMDKFSDDDTRTELDLDSPTEGFASIADAIDDVRQGKLVTVVDDESRENERDLIMAASLVTPEAMAFIVRHGTGIVCVSMKEDDLERLSLPLMVTTKENEEKLCTAFTVTVLIW

SEQ ID NO: 17189 - protein, 92 aa, Staphylococcus xylosus
MAEQVDFDIAIIGAGPAGMTAAVYASRANLSTVMIERGMPGGQMANTEEVENFPGFEMVTGPDLSTKMFEHAKKFGAKYQYGDIKSIEDKGS

SEQ ID NO: 17190 - protein, 591 aa, Vibrio vulnificus YJ016
MMYIKRYLQPISEAVIIFSVSSKTLLRHPMNNDKRPLYIPFAGPALLSTPLLNKGSAFSAEERISFNLEGLLPETTETIQEQVERAYMQYKAFESDMDKHIYLRNIQDTNETLFYRLVQNHITEMMPIIYTPTVGAACENFSNIYRRGRGLFVSYANRDRIDDILNNASNHNVKVIVVTDGERILGLGDQGIGGMGIPIGKLSLYTACGGISPAYTLPIVLDVGTNNPQRLADPMYMGWRHPRITGADYDAFVEEFIQAVQRRWPDALIQFEDFAQKNAMPLLERYKNRICCFNDDIQGTAAVTVGSLMAACQAAGSKLSEQRITFLGAGSAGCGIAEAIIAQMVSEGISDKKARSQVFMVDRWGLLQEGMPNLLDFQQRLVQKHSVTAKWETEANGFSLLDVVKNAKPTVLIGVSGAPGLFTQEVIQEMHKHCPRPIVFPLSNPTSRVEAVPADIIRWTNGDALVATGSPFDPVIHEGKTYPIVQCNNSYIFPGIGLGVLAVNAKRVTDEMLMESSRALATCSPLAINGKGALLPPLEEIHTVSKRIAYAVAKKAIEQGVALEIADDALQVAIEQHFWQPVYRRYKRTAF

SEQ ID NO: 17191 - protein, 224 aa, Arabidopsis thaliana
MNPFYSTFPDSFLSISDHRSPVSDSSECSPKLASSCPKKRAGRKKFRETRHPIYRGVRQRNSGKWVCEVREPNKKSRIWLGTFPTVEMAARAHDVAALALRGRSACLNFADSAWRLRIPETTCPKEIQKAASEAAMAFQNETTTEGSKTAAEAEEAAGEGVREGERRAEEQNGGVFYMDDEALLGMPNFFENMAEGMLLPPPEVGWNHNDFDGVGDVSLWSFDE

SEQ ID NO: 17192 - protein, 522 aa, Listeria monocytogenes str. 1/2a F6854
MTLTKFSEFGLDEKIVKSVNRMGFEEATPIQEKTIPLGLEGKDLIGQAQTGTGKTAAFGLPMIHKIDQKSNNVQALIIAPTRELAIQVSEELYKLSYDKHVRVLAVYGGSDISRQIRSLKKNPQIVVGTPGRILDHINRRTLKLDHVETLVLDEADEMLNMGFIDDIETILKEVPAERQTLLFSATMPDPIRRIGERFMHSPELIRIKAKEMTALLIEQFFVKVHEKEKFDVLSRLLDVQAPELAIVFGRTKRRVDELSRALDMRGYVAEGIHGDLTQAKRMSVLRKFKEGKIDVLVATDVAARGLDISGVTHVYNYDIPQDPESYVHRIGRTGRAGKEGMAITFVQPREMGYLRIVEETTKKRMQPLQAPTWDEAFAGQLRVATEKIQEAITEENLADYKTFANELLEKYDATDIAAAMLKMLAKEPDKTPVHITEERPLPSRGGGGYKGKNGKGGKGGGYRGGSGKGGSYRDRNNSGKGRRSGGGSGGGSGSGGGGNRDRRGGGEQRSGGNKGNYSQKSK

SEQ ID NO: 17193 - protein, 554 aa, Mycobacterium sp. JLS
MTGPTAVPRKPVILTVDDDPAVSRAVARDLRRHYGETFRIVRAESGPDALETLNELKLRGETVAVFVADYRMPQMSGIEFLEEAMDLYPMARRVLLTAYADTHAAIDAINVVDLDHYLLKPWDPPEEKLYPVIDALIEAWRATGDRAIPHTKIIGHPWNARSSEVREFLARNRLYSTWFRADEAKGRQLLEAAGQDGMTLPVVITEQGETLVDPSDAELGATLGLTTTPAEDFYDLVVIGGGPAGLAAAVYGASEGLKTVLIERTATGGQAGQSSRIENYLGFPDGLSGSQLAERARRQAEKFDAELITAAEVTALEIDGSARTVRLSDGRSIGARAVILAMGVEYRQLPAEGCDGLTGAGVYYGATSSVAADCEDDEVYVIGGANSAGQAAMYLSRSAKQVTIVSRRRLEDSMSHYLIQQIRANDKIRELPNTVVHAVKGDGHLEGICLENTLTGAREEHHCGRMFIFIGAEPRTDWLDGIVVRDDHGFILAGPDLRDVSGWMLDRPPHHLETSVPGVFVAGDVRAESAKRVAAAVGEGSMAVMLVHRYLAEA

SEQ ID NO: 17194 - protein, 107 aa, Synechococcus sp. WH 7805
MSSAAAVTDASFEQDVLQSDVPVLVDFWAPWCGPCRMVAPIVDEISKEFEGKIKVFKLNTDENPNVASQFGIRSIPTLMVFKGGQKVDTVVGAVPKATLSGTIAKYL

SEQ ID NO: 17195 - protein, 353 aa, Sinorhizobium meliloti 1021
MTQFKQLSFWSDAEPLECVTRTPEAPNVVTFSFQSPSGALFNHDPGQFVTLELPAPGGPLYRTYTISSAPSRPTALTITVKAQDGSTGTRWMLDNLHKGMRIRAIGPAGKFSIVHHPADKYLFISAGSGITPMVAMTTWLYDSGREPDVVFINCARRPSEIILRDRMELMASRIVGIDLKWVVEEPDPFRSWTGYRGMFNQIMLGLMAQDYLEREVFCCGPEPFMRAVREALAGLGYDMSRYHQESFTAEPGHAEDVPEDVIPDEQNHAEIAFALSGVTTRCSETDTILAAAKAAGLVIPSGCSMGICGTCKVRKTEGQVHMVHNGGITDEDVEDGYILACCSKPLRRVSVEA

SEQ ID NO: 17196 - protein, 467 aa, Listeria monocytogenes str. 4b F2365
MTSVMWFRRDLRVNDNKALYHACKENDLLLLFQVNPAQFITGSPSHQAFFASVAHFKQEIDKTAHLQIMFGEPIECFQQLKDSLPSWDKVYFNRDETGYGAKRDEAAQAFFDEQKIEVQAFHDSYLHSAEEVKKSPTEYYKIFTPYYKKWREEIKETPFKVTLKHENIRKESLFLKYEEQFAEMTSDLPILDIGERAANTRLANFIKHDVADYDKARDFPELDKTSHLSRYLRTGEISIRTIWQSLQETEATEGRATFEKELCWRDFYNMIYVSFPNQKNEPIQENYRFIEWENNREYFKAWQEGKTGFPLVDAAMRQLKETGWMHNRLRMITASFLTKDLLIDWRFGEKYFQQMLIDYDPASNIGGWQWAASTGTDAVPYFRIFNPTTQSQKFDSTGKFIRKYVKELANLPDKYIHQPEKMSETEQKEHGLLLGKDYPFPIVDHKERRKLAIARYEFSKEHSRGNI

SEQ ID NO: 17197 - protein, 417 aa, Burkholderia vietnamiensis G4
MALIVHKYGGTSMGSVERIKNVAKRVAKWHQAGHQMVVVPSAMSGETNRLLGLAKEISSQPSPRELDMIASTGEQVSVGLLSIALQEIGVEAVSYAGWQVPIKTDSAFTKARIHSIDDERVKADLNAGKVVIITGFQGVDPDGHITTLGRGGSDTSAVAVAAALGAEECLIYTDVDGVYTTDPRVVEEARRLDRVTFEEMLEMASLGSKVLQIRSVEFAGKYQVKTRVLSSLTDPLIALDEEMRSGTLITFEEDETMEKAVISGIAFQRDEARIAVMGVPDKPGIAYQILGPVADANVDVDMIIQNQSVEGKTDFTFTVGRGDYQKAMDILTNQVKGHVNAERVQGDPKVSKVSVVGVGMRSHVGVASKMFRTLSEEGINIQMISTSEIKISVLIDEKYMELAVRALHKAFELDQAP

SEQ ID NO: 17198 - protein, 498 aa, delta proteobacterium MLMS-1
ADYRCRGGGVELIYFGQRVNGQVLEALGELAAQAGVLEQYDLMRQGAVLNQIAGYASENRQVLHCSNRDIFAESPRQPEATARTANELAKLREFLEDLEAGRLANPAGKPFEAMLQVGIGGSDLGPRALYLALRAYAKPGRQVRFISNVDPDDAAAVLQELDLSRTLVKVVSKSGTTLETLANEELVRRAYQDAGLDPKDFFIAVTGQGSPMDNPEHYLRSFYMFDYIGGRYSATSMVGLVMLGFALGYEQVLEILRGAYEMDEAATQPDPTRNPPLLLALLGIWNRNFLGSQDVAILPYSQALSRFAAHLQQLDMESNGKGVSRAGEPLGWDSGPVVWGEPGTNGQHAFYQLLHQGTAVVPIEFIGFKESQYRRDLTVKGTTAQEKLLANLLAQSLALAVGQEEENPNRRFPGNRPSSILLADRLTPATMGALLALYEAKVVFQGFLWNINSFDQEGVQLGKRLADGLLAQYEARRRGTTPPEDPLGRALLALAASE

SEQ ID NO: 17199 - protein, 331 aa, Campylobacter upsaliensis RM3195
MAIKVAINGFGRIGRCVARIIAERDDLELVAINDTTELELTKYLLKYDTVHGEFNASVELENSDLLINNKKVKMFYTRDINELDFAKYGAELVFECTGAHLTQEKCQAFLNKGIKKVLMSAPAKDNTPTFVMGVNSHLYKGEAIISNASCTTNCLGPVCRVLQDNFGIEKGLMTTIHAYTNGQSIIDAKAKDKRRSRAAAQNIIPTSTGAAKAMKLVMPELDGKLHGQSMRVPVIDVSSVDLTALLSKKVSKEELNEAFRKASETNLKGILAVDDEERVSSDFITSPFGAVVASDLTQVISEDFVKIVAWYDNEWGYSSRLVDMAVYVMGA

SEQ ID NO: 17200 - protein, 119 aa, Brassica napus
  misc_feature (33)..(33): Xaa can be any naturally occurring amino acid
  misc_feature (65)..(65): Xaa can be any naturally occurring amino acid
  misc_feature (75)..(75): Xaa can be any naturally occurring amino acid
  misc_feature (78)..(79): Xaa can be any naturally occurring amino acid
  misc_feature (83)..(83): Xaa can be any naturally occurring amino acid
  misc_feature (90)..(90): Xaa can be any naturally occurring amino acid
  misc_feature (104)..(104): Xaa can be any naturally occurring amino acid
  misc_feature (110)..(110): Xaa can be any naturally occurring amino acid
MAGLMKLACLIFACMIVAGPITSNAALSCGTVXSGYVAPCIGYLAQNGAGRFPQRACSGVTSLNXNMARTTPDRXKAXXWPLXGAANALXLINVARGSWIPKGXGGVNIXPYKISKTTT

SEQ ID NO: 17201 - protein, 115 aa, Triticum aestivum
MARAAATQLVLVAMVAAMLLVATDAAISCGQVTSALSPCISYARGNGANPTAACCSGVRSLAGAARSTADKQAACKCIKSAAGGLNAGKAAGIPSKCGVSVPYAISAKVDCSKIR

SEQ ID NO: 17202 - protein, 644 aa, Oryza sativa
MATTAAAAAATLSAAATAKTGRKNHQRHHVLPARGRVGAAAVRCSAVSPVTPPSPAPPATPLRPWGPAEPRKGADILVEALERCGVSDVFAYPGGASMEIHQALTRSPVITNHLFRHEQGEAFAASGYARASGRVGVCVATSGPGATNLVSALADALLDSVPMVAITGQVPRRMIGTDAFQETPIVEVTRSITKHNYLVLDVEDIPRVIQEAFFLASSGRPGPVLVDIPKDIQQQMAVPVWDTSMNLPGYIARLPKPPATELLEQVLRLVGESRRPILYVGGGCSASGDELRRFVELTGIPVTTTLMGLGNFPSDDPLSLRMLGMHGTVYANYAVDKADLLLAFGVRFDDRVTGKIEAFASRAKIVHIDIDPAEIGKNKQPHVSICADVKLALQGLNALLDQSTTKTSSDFSAWHNELDQQKREFPLGYKTFGEEIPPQYAIQVLDELTKGEAIIATGVGQHQMWAAQYYTYKRPRQWLSSAGLGAMGFGLPAAAGASVANPGVTVVDIDGDGSFLMNIQELALIRIENLPVKVMVLNNQHLGMVVQWEDRFYKANRAHTYLGNPECESEIYPDFVTIAKGFNIPAVRVTKKSEVRAAIKKMLDTPGPYLLDIIVPHQEHVLPMIPSGGAFKDMILDGDGRTVY

SEQ ID NO: 17203 - protein, 317 aa, Synechococcus sp. WH 8102
MALTELRIASRRSQLAMVQTNWVKAELEKAHPGLTITVEAMATQGDKILDVALAKIGDKGLFTKELEAQMLVGRAEIAVHSLKDLPTNLPEGLMLGCITEREDPADALVVNAKNANHKLDTLPEGAVVGTSSLRRLAQLRHHYPHLSFKDVRGNVITRLEKLDSGDYDCLILAAAGLERLGFGNRIHQIIPGDISLHAVGQGALGIECVEDKPEVLEIIKVLEHTTTSRRCLAERAFLRELEGGCQVPIGVNSQINNEELTLTGMVASLDGKRLIRDEASGSAADPESIGIELAGKLKHQGAGAILKEIFDEVRPEA

SEQ ID NO: 17204 - protein, 644 aa, Oryza sativa (japonica cultivar-group)
MATTAAAAAATLSAAATAKTGRKNHQRHHVLPARGRVGAAAVRCSAVSPVTPPSPAPPATPLRPWGPAEPRKGADILVEALERCGVSDVFAYPGGASMEIHQALTRSPVITNHLFRHEQGEAFAASGYARASGRVGVCVATSGPGATNLVSALADALLDSVPMVAITGQVPRRMIGTDAFQETPIVEVTRSITKHNYLVLDVEDIPRVIQEAFFLASSGRPGPVLVDIPKDIQQQMAVPVWDTSMNLPGYIARLPKPPATELLEQVLRLVGESRRPILYVGGGCSASGDELRRFVELTGIPVTTTLMGLGNFPSDDPLSLRMLGMHGTVYANYAVDKADLLLAFGVRFDDRVTGKIEAFASRAKIVHIDIDPAEIGKNKQPHVSICADVKLALQGLNALLDQSTTKTSSDFSAWHNELDQQKREFPLGYKTFGEEIPPQYAIQVLDELTKGEAIIATGVGQHQMWAAQYYTYKRPRQWLSSAGLGAMGFGLPAAAGASVANPGVTVVDIDGDGSFLMNIQELALIRIENLPVKVMVLNNQHLGMVVQWEDRFYKANRAHTYLGNPECESEIYPDFVTIAKGFNIPAVRVTKKSEVRAAIKKMLETPGPYLLDIIVPHQEHVLPMIPSGGAFKDMILDGDGRTVY

SEQ ID NO: 17205 - protein, 259 aa, Bradyrhizobium japonicum USDA 110
MSTFEHIIVESQGAVGIIKLNRPKMLNALSFGVFREIAAAVDDLEGDDAIGCIVVTGSEKAFAAGADIKEMQPKGFIDMFSEDFAAIGGDRVARCRKPTIAAVAGYALGGGCELAMMCDFIIAADTAKFGQPEITLGTIPGIGGTQRLTRAIGKSKAMDLCLTGRMMDAAEAERSGLVSRIVPADKLMDEVMAAAEKIASMSRPAVAMAKEAVNRAFETTLAEGMSVERNLFHSTFALEDRSEGMAAFIEKRKPVNKNR

SEQ ID NO: 17206 - protein, 644 aa, Oryza sativa
MATTAAAAAATLSAAATAKTGRKNHQRHHVLPARGRVGAAAVRCSAVSPVTPPSPAPPATPLRPWGPAEPRKGADILVEALERCGVSDVFAYPGGASMEIHQALTRSPVITNHLFRHEQGEAFAASGYARASGRVGVCVATSGPGATNLVSALADALLDPVPMVAITGQVPRRMIGTDAFQETPIVEVTRSITKHNYLVLDVEDIPRVIQEAFFLASSGRPGPVLVDIPKDIQQQMAVPVWDTSMNLPGYIARLPKPPATELLEQVLRLVGESRRPILYVGGGCSASGDELRRFVELTGIPVTTTLMGLGNFPSDDPLSLRMLGMHGTVYANYAVDKADLLLAFGVRFDDRVTGKIEAFASRAKIVHIDIDPAEIGKNKQPHVSICADVELALQGLNALLDQSTTKTSSDFSAWHNELDQQKREFPLGYKTFGEEIPPQYAIQVLDELTKGEAIIATGVGQHQMWAAQYYTYKRPRQWLSSAGLGAMGFGLPAAAGASVANPGVTVVDIDGDGSFLMNIQELALIRIENLPVKVMVLNNQHLGMVVQWEDRFYKANRAHTYLGNPECESEIYPDFVTIAKGFNIPAVRVTKKSEVRAAIKKMLETPGPYLLDIIVPHQEHVLPMIPNGGAFKDMIPDGDGRTVY

SEQ ID NO: 17207 - protein, 277 aa, Coccidioides immitis RS
MHSPSTQLLRILRASITSFEGAIAQQPHLRRCPVSRPANPPFIVPILQQHRAISSSVALNGPESSNHGGNGRQPPLQPPRRAPPPQPRRRTELTTADLKPKSRYRGPPPPEDSDTNTSMRTDLGALDVFANVAAPSTAIDACLEDGFHLNNGVKITDGSGCLLVDGEVFAWKPWEAGKGAMVNEKGQWEVAEEAWGVLSLVWPKPDLLILGLGRTIRPISPETRRHINQLGIRIEIQDTRNAAAQFNLLATERGVREVAAALIPLGREAELSDSKIK

SEQ ID NO: 17208 - protein, 363 aa, Ginkgo biloba
SDSGKDAGRLSAAWQLYKAQEELIKVAKQFGIKLTMFHGRGGTVGRGGGPTHLAILSQPPDTIHGSLRVTVQGEVIEQSFEEEHLCFRTLQRFTAATLEHGMHPPISPKQEWRELMDEMAVVATEEYRSYVFHNKRFVEYFRLATPETEYGRMNIGSRPSKRKPSGGIESLRAIPWIFAWTQTRFHLPVWLGFGAAFRHVLEKDIRNLHMLQQMYNEWPVFRVTIDLVEMVFAEEDPGIAALYDKLLVSEDLWLFGSQLRSNFVETKDLLLKVAGHRELLEGDPYLKQRLRLRDSYITTLNGCQAYTLKRIRDPNFHGNLRPHLSKETSSTKPAADLVKLNPTSEYAPGLEDTLILTMKGIAA

SEQ ID NO: 17209 - protein, 541 aa, Synechocystis sp. PCC 6803
MTSIDTLWLLLCAGLVFFMQAGFMCLESGLTRSKNSINVAIKNFADFGISVALFWSFGFSIMFGLSQGGWWGTGYSFVDVGGEPTLAVFFLFQAMFCGTATTIISGAAAERLKFSAYLLVAGLASGLIYPLFGDWAWNGLATVAGIETTGGWLENLGFRDFAGSTVVHSVGAWIGLATILVVGPRQGRFPKTGKTLKIQGSNMPFSVLGTLILWFGWLGFNGGSTFGLTPEVPGIMVNTVLAGVGGMLMAGLISLLQDKMIQVEPLMNGSLAGLVAITASANVVMTPIAMVIGATGSAIAYLVGKKMLHWGVDDAVDAVAVHGGAGVWGTLCVGLFGQLPLVDTGLNRWQQCGVQLLGIGVCTLWAFGLAWVFLTLLNRVFALRISPEDEEIGLNVSEHQATTETYELFQVMDRQAKTHDLSLRVPVNPFTEVGHIAGRYNQVMDAFEARHHRSVEDLAQIYYVTAAIAAAIENNSFKADQLGLEEVTNRADELGALARTIQQMAEMLQQRDQELIAVKQQLVLQQQKQHHGNGESVDLSP

SEQ ID NO: 17210 - protein, 422 aa, Ehrlichia ruminantium str. Welgevonden
MSLNIYLPDQSLLRPRITVFGVGGAGGNAVNNMIQSNLHGVNFVVANTDAQALENSLSEKKIQLGIGLTKGLGAGSLPEIGKGAAEESINEIIEEIVDSNMLFITAGMGGGTGTGAAPVIAKAAKENKILTVGVVTKPFHFEGAHRMRTAEYGLEELQRYVDTLIVIPNQNLFRIANEKTTFADAFKLADTVLHTGVRGITDLMIMPGLINLDFADIRAIMSEMGKAMMGTGEAEGENRAILAAEAAISNPLLDNVSMKGAKGILINITGGLDMTLFEVDAAANRIREEVDSHANIIFGSTFDKESEGKMRVSVLATGIDNEEVVIQNKSMNKDREDHSINFSEVSNKNFNHSDNEIAYYKPNDPGEDNFNSMNHNKRHSHYKTDNHKSNTIPNSEHKKVYPNRNDYWDEDSFNIPTFLRKK

SEQ ID NO: 17211 - protein, 364 aa, Cycas revoluta
  misc_feature (252)..(252): Xaa can be any naturally occurring amino acid
SDSGKDAGRLSAAWQLFKAQEDLIKVAKQFGVKLTMFHGRGGTVGRGGGPTHLAILSQPPDTIHGSLRVTVQGEVIEQSFGEEHLCFRTLQRFTAATPEHGMHPPVSPKPEWRELMDEMAVVATNEYRSIVFQDKRFVEYFRLATPELEYGRMNIGSRPSKRKPSGGIESLRAIPWIFAWTQTRFHLPVWLGFGAAFKHVLEKDIRNLHILQQMYNEWPFFRVTIDLVEMVFARGDPGIAALYDKLLVSEDXWPVGAQLRSIYVETKNLLLQVAGHRDLLEGDPYLKQRLRLRDSYITTLNVCQAYTLKRIRDPNFHCNLRPHLSKETMSSTKPAAELVKLNPTSEYAPGLEDTLILTMKGIAA

SEQ ID NO: 17212 - protein, 365 aa, Cycas revoluta
SDSGKDAGRLSAAWQLYKAQEELIEVAKQHGVKLTMFHGRGGTVGRGGGPTHLAILSQPADTIQGSLRVTIQGEVIERSFGEAQSCFKTLQRYTAATLEHSMIPPLTPKQEWRALMDEMAVVATERYRSIVFREPRFVEYFRLATPELEYGRMNIGSRPSKRKPSGGIESLCAIPWIFAWTQTRVHLPVWLGFGESVRHVIDKDHKNLLMLQQMYNEWPFFRVTIDLVEMVVAKGNPGIAALYDKLLVSEELLPLGEQLRTAYNDTKSYLLRITGHNEILEGDPFLKQRLKLRTAYITTLNVRQAYTLKRIRDPSYQVPVRPPIAKEIMEGSVSSANQLVKLNPTSEYAPGLEDTLILTMKGIAA

SEQ ID NO: 17213 - protein, 652 aa, Vibrio vulnificus YJ016
MVCFCSSKAHFYDCLRIGENSEVQVFSVLSNDYHGKSRMIIIKEAFMSSATLQQINVYPVKSVGGIALTSAWVEKQGLAFDRRFMVATALGEMVTARKYPQMVTIRSALVADGIVFTYPDKPALMLKYQDFKRQETPAQVWKDNFTAYTTTDEADDWFSDILGIRVELLFSGEQSNRVREKIGHNVSFADGYPLLVISDASLKELNRRSPETHSMDQFRTNLVVSNCDAFAEDGWKKIRIGEVIFEAVKPCERCILTTVDVEKGQFRANKEPLNTLLTFRANEQGGVFFGQNLVALNEGMIQVGDRVEVLEVKEKEVYPDSACHDIRLTCVEKEAIARDFVTFWLEPEHGQLPAYLPGQHLPVEITVDGDTISRRYTLSSSPSRPGRYAISVKRIDGGRVSNWLIDHLEVGDELFAQSPQGQFHIQEDKHQPLLLLSAGSGVTPMLSMLRYLADHDLVEDVVFYHQCRSVEDIPCKEELDALKSRYPGLTVKISLTQAPIDWFGLKGRLSLSHLKQIKAVESRQVFVCGPEGFMQKAKNLLLKKGLPESHYHQEAFGVSTSPNSERKTVELEFNGETFTADNQQTLLEHVENHGLTIAHSCRAGFCGACKVNVISGQVHQPEVPALTEQEKREGKALACCCVPLTDVRFQSL

SEQ ID NO: 17214 - protein, 331 aa, Cycas revoluta
SDSGKDAGRITAAWELYKAQEDVVAVCKDYNIKLTLFHGRGGSVGRGGGPTYLAIQSQPPGSVMGTLRVTEHGEMIQAKFGLPQTAVRQLEIYTTAVLLATLHPPRSPRSDQWRAIMEEISEQSCKHYRGVVYQNPDFIPYFHEATPEAELGNLNIGSRPTRRKQSGGVSQLRAIPWIFAWTQNRSVLPAWLGLGAGLGTAFEKGFKEDVQSMYKEWPFFQSTIDLIEMVLAKADLAIAKHYEEVLVSPGRQQLGSKIHKDFCATEQCVLLVTGHQKLSENQGTERLIDNRLPYLNTLNMLQVEILRRLRQDETNEKLRDALLITMKGIAA

SEQ ID NO: 17215 - protein, 470 aa, Thermobifida fusca YX
MTSTAHPELEGLGTYEYGWADPDVAGASARRGLDEEVVRDISAKKNEPEWMLDLRLKALRLFTKKPLPTWGADLSRINFDNIKYFVRSTEKQARSWEELPEDIRRTYDRLGIPEAEKQRLVAGVAAQYESEVVYHQIREDLEAQGVIFLDTDTALKEHPDLFKEYFGTVIPPGDNKFAALNTAVWSGGSFIYVPKNVHVEIPLQAYFRINTENMGQFERTLIIVDEGAYVHYVEGCTAPIYKSESLHSAVVEIIVKKNARCRYTTIQNWSNNVYNLVTKRAVAYEGATMEWIDGNIGSQVTMKYPAVYLMGEHAKGETLSLAFAGEGQHQDTGSKMVHCAPNTSSTIVSKSVARSGGRASYRGLVQVQEGAERSKSTVKCDALLIDTISRSDTYPYVDVREDDVEMGHEATVSKVSEDQLFYLMSRGLDEDEAMAMIVRGFVEPIARELPMEYALELNRLIELQMEGAVG

SEQ ID NO: 17216 - protein, 111 aa, Bradyrhizobium japonicum
MKKIEAIIKPFKLDEVRSLSGVGLQGITVTEAKGFGRQKGHTDLYRGAEYIVDFLPKVKIEIVIGDDLVERAIDAIRRAAQTGRIGDGKIFVSNIEEAIRIRTGESGLDAI

SEQ ID NO: 17217 - protein, 364 aa, Kalanchoe daigremontiana
SDSGKDAGRLSAAWQLYKAQEDLVKVAKEFGVKLTMFHGRGGTVGRGGGPTHLAILSQPPDTIHGSLRVTVQGEVIEQSFGEEHLCFRTLQRYTAATLEHSMCPPASPEPEWRELLDEMAVAATKEYASIVFHEPRFVEYFRLATPEVEYGRMNIGSRPSKRKPSGGIESLRAIPWIFAWTQTRFHLPVWLGFGAAFKHVIDKDIKNLLMLQEMYTRWPFFRVTIDLVEMVFAKGDPGIAALYDKLLVSEDLWPFGEQLRNNYNETKNLLLQVAGHKDLLEGNPYLRQRLRLRDSYITTLNACQAYTLKRIRDPNYHVTVRPRLSKEIMESNKAAAELVKLNPTSEYAPGLEDTLILTMKGIAA

SEQ ID NO: 17218 - protein, 293 aa, Medicago truncatula
MEGNSGGGGGGGGGSSGGGGGGGADVELLCKTLQVEHKLFYFDLKENPRGRYLKISEKTSATRSTIIVPFSGISWFLDLFNYYVNSEDQELFSKELQLDTKVFYFDIGENRRGRFLKVSEASVSRNRSTIIVPAGSSRDEGWAAFRNILAEINEASRLFLLPNQQNSESSERLLSDDVGAGFISGHNTQPATSSELNVDRSVDLPAQDEIGNLGVSKVIRADQKRFFFDLGNNNRGHFLRISEVAGSDRSSIILPLSGLKQFHEIVGHFVEITKDRIEGMSVANVRTIDPPQR

SEQ ID NO: 17219 - protein, 1051 aa, Vibrio parahaemolyticus RIMD 2210633
MVGIFSWNNLSVKHKLFGLVLLPIISLFFLAGQHVHNLSTQAQDLQKAQLFSVYIDKVSYLFNLPNNPSIPNKAEKTAQLIQELKETTPRVFGDNSEVLPLLASFEEASLSMFTAIDIEEKLDIAEWRADTFEQILLNLDKVYFSNVSYETDRHLSSLMQLEWLMFWSTEERRLSEYLIYSANKRLHYDDAVRDEIQSLIQNQQLLVERFVALNANHNQVQLLIETFSNKVFQTSQEFRDKLLNQEELQALSPLKTGAGLAALNTRLALLHDINDTMEHELQTKLAQTIKATTQQRLVFIVLMSLVTILVISLTIRLVRKVTNNLHLVLEFLSRENYSEDSPLSELIKGKDELSKFAQEVEKLSHEREQAKQKLTKAKEDAERAKDDAIEASKAKSSFLANMSHEIRTPLNGVIGISEVLADTPLTATQRDYVDTIETSSQLLLSLINDVLDFSKIESGMLLISPHSTCVRESIYDIASIVSPKAKEKGIELTVSISPNTPYHIVIDDHRLRQVIMNFMSNAVKFTERGSVELSITTLESNESEAIIEFSVQDSGIGIDEQQQKRIFAPFAQEDDSTTRQFGGTGLGLAISTQLVELMGGSIQLESEKGRGSRFYFQLTAPISQAHFRARHTVNNQIWLVCDDSDLETKLRNELSFYQIQVHQSVHDLSALPTWINDKERIIILYVETTPDAAVKNTDLMRNLEHQHVQVCLIKHLHSQQLDFGHRVAAIITQPLLGQRLLKALESCAGRFTQSISVVQPATRLETLPKVLVVDDNTVNQKIAGLHVTKAGFSFDVAANGEEAVDLFRTSQYCLILMDCMMPVMDGFEATKQIRQIEQKENRTFRIPIIALTASVVDDDIQKCFDVGMDDYVPKPFKADLLKEKLDKAVGLRLPVTASTKLNQSSLTAFEEPEFKQRVGETLSAAPMRRERILLVEDNRVNQKVASLLLSKAGYQFEVAENGQIAVEMFQRDGGFDIILMDCMMPVMDGFEATKQIRAYEASLGLEKTPIIALTASVVDDDIQRCFDSGMDAYVPKPVRKEKLLHQIENVM

SEQ ID NO: 17220 - protein, 312 aa, Bacillus licheniformis ATCC 14580
MGKKKMGLLVMAYGTPYKEEDIERYYTHIRRGRKPEPDMLQDLKDRYKAIGGISPLAKITQEQTKQLEKRLNELQDDVVFKAYIGLKHIEPFIEDAVREMHKDGITEAVSIVLAPHFSTFSVQSYNKRAKDEAEKLGELSITSINSWYDEPKFIAYWADQVRKIYDEMPSEERENAVLIVSAHSLPEKIVEMGDPYPEQLKESAKLIAEAAGVKDYAVGWQSEGNTPDPWLGPDVQDLTRDLSEQKGYSAFVYAPVGFVADHLEVLYDNDYECKVVTDDIGASYYRPEMPNAKHEFIDALADVVLKQLEKEQ

SEQ ID NO: 17221 - protein, 112 aa, Synechococcus elongatus PCC 7942
MKKIEAIIRPFKLDEVKIALVNAGIVGMTVSEVRGFGRQKGQTERYRGAEYTVEFLQKLKLEIVVEDAQVDTVIDKIVAAARTGEIGDGKIFVSPVDQTIRIRTGEKNADAI

SEQ ID NO: 17222 - protein, 347 aa, Methanocaldococcus jannaschii
MMKVCVIEGDGIGKEVIPEAIKILNELGEFEIIKGEAGLECLKKYGNALPEDTIEKAKEADIILFGAITSPKPGEVQNYKSPIITLRKMFHLYANVRPINNFGIGQLIGKIADYEFLNAKNIDIVIIRENTEDLYVGRERLENDTAIAERVITRKGSERIIRFAFEYAIKNNRKKVSCIHKANVLRITDGLFLEVFNEIKKHYNIEADDYLVDSTAMNLIKHPEKFDVIVTTNMFGDILSDEASALIGGLGLAPSANIGDDKALFEPVHGSAPDIAGKGIANPMASILSIAMLFDYIGEKEKGDLIREAVKYCLINKKVTPDLGGDLKTKDVGDEILNYIRKKLKGY

SEQ ID NO: 17223 - protein, 420 aa, Streptococcus pneumoniae TIGR4
MTRENIKLFSEMHAEPSWLADLRQKAFDKIETLELPVIECVKFHRWNLGDGTITENEPSANVPDFTALDHHLKLVQVGTQTVFEQTPVELAEQGVVFTDFHSALEEIPELIEEFFMSSVKYDDDKLAAYHTAYFNSGAVLYIPDNVEITEPIEGIFYQDSDSNVPFNKHIMIIVGKNSKISYLERLESRGEGSDKATANITVEVIARSGAQVKFAAIDRLGENVTAYISRRGKLGNDASIDWAIGVMNEGNVVADFDSDLIGNGSHADLKVVALSSGRQVQGIDTRVTNYGCNSIGNILQHGVILEKATLTFNGIGHIIKGAKGADAQQESRVLMLSDQARSDANPILLIDENDVTAGHAASIGQVDPEDMYYLMSRGLDKATAERLVVRGFLGSVIVEIPVKEVRDEMIATIEEKLSKR

SEQ ID NO: 17224 - protein, 362 aa, Synechococcus sp. WH 7805
MSSPRKRRVFPFTAVIGQEEMKLALLLNVIDPRIGGVMIMGDRGTGKSTTIRALADLLPGIEVVAGDPYNSSPSDPDLQSSDVRQRLDHGETLATEERQVPMVDLPLGATEDRLCGTIDIEKALSEGVRAFEPGLLAKANRGLLYVDEVNLLDDHLVDVLLDSAASGWNTVEREGVSVRHPARFVLIGSGNPEEGELRPQLLDRFGMSVEVRTVRDPELRVQVVDQRTAFDTDPDGFSSAMEEGQQALQQRVVEAQQRLDQVEIDDDLRLRISAVCGELDVDGLRGDIVTNRAARALAAFEGRTEVTEDDVARVASCCLRHRLRKDPLEQIDSGDRVVKVFCKVFERNDSGDRTEFELALAA

SEQ ID NO: 17225 - protein, 162 aa, Shewanella oneidensis MR-1
MTSTIYRHNAIDIQGNPTPLTQYQGKVILIVNTASECGFTPQYKGLEALYQEYKARGFVVLGFPCNQFGAQEKANEQGIKSFCELNFGVSFPLFSKIEVNGEHTHPLYQYLKKAAPGMLGTERIKWNFTKFLINRQGEAVARFAPTTKPEDIRDKIESLLNK

SEQ ID NO: 17226 - protein, 470 aa, Streptococcus pneumoniae TIGR4
MAEERVEPKPIDLGEYKFGFHDDVEPVLSTGKGLNEGVIRELSAAKGEPEWMLEFRLKSYETFKKMPMQTWGADLSEIDFDDLIYYQKPSDKPARSWDDVPEKIKETFERIGIPEAERAYLAGASAQYESEVVYHNMKEEFQKLGIIFTDTDSALKEYPDLFKQYFAKLVPPTDNKLAALNSAVWSGGTFIYVPKGVKVDIPLQTYFRINNENIGQFERTLIIVDEGASVYYVEGCTAPTYSSNSLHAAIVEIFALDGAYMRYTTIQNWSDNVYNLVTKRAKAQKDATVEWIDGNLGAKTTMKYPSVYLDGEGARGTMLSIAFANAGQHQDTGAKMIHNAPHTSSSIVSKSIAKGGGKVDYRGQVTFNKNSKKSVSHIECDTIIMDDLSASDTIPFNEIHNSQVALEHEAKVSKISEEQLYYLMSRGLSESEATEMIVMGFVEPFTKELPMEYAVELNRLISYEMEGSVG

SEQ ID NO: 17227 - protein, 250 aa, Zea mays
MALNGGKTFVHDEEKQQLLLEEHTEKHFTAGEVVRDIIIGVSDGLTVPFALAAGLSGANASSALVLTAGLAEVAAGAISMGLGGYLAAKSEADHYNRELQREQDEIDTVPDVEAAEIADILSEYGLGPQEYGPVVTSLRNNPKAWLEFMMKFELGLEKPEPRRALVSAATIALSYVAGGLVPLLPYMFVPEAGRAMAVSVAVTLAALLFFGFVKGRFTGDRPFFSAVQTTVVGALASAAAYAMARAVQSI

SEQ ID NO: 17228 - protein, 816 aa, Arabidopsis thaliana
MAITDFFAGEIATELLKQLFTISTTAWRYKNTAKQLLTLIDSIRPTIKEIQYSGVELPAHRQAQIGMLFDTLEKGKKLTDKVLSSKRWNLYRQLTLARKMEKLEKTISNFLKNEVFTHILADVHHLRADTSVRLDRVDMSLDRVIQQVGSMKIGGGGLISEAMKRAEAMEIETNDDSEKFGVGLELGKVKVKKMMFESQGGVFGISGMGGVGKTTLAKELQRDHEVQCHFENRILFLTVSQSPLLEELRELIWGFLSGCEAGNPVPDCNFPFDGARKLVILDDVWTTQALDRLTSFKFPGCTTLVVSRSKLTEPKFTYDVEVLSEDEAISLFCLCAFGQKSIPLGFCKDLVKQVANECKGLPLALKVTGASLNGKPEMYWKGVLQRLSKGEPADDSHESRLLRQMEASLDNLDQTTKDCFLDLGAFPEDRKIPLDVLINIWIELHDIDEGNAFAILVDLSHKNLLTLGKDPRLGSLYASHYDIFVTQHDVLRDLALHLSNAGKVNRRKRLLMPKRELDLPGDWERNNDEHYIAQIVSIHTGEMNEMQWFDMEFPKAEILILNFSSDKYVLPPFISKMSRLKVLVIINNGMSPAVLHDFSIFAHLSKLRSLWLERVHVPQLSNSTTPLKNLHKMSLILCKINKSFDQTGLDVADIFPKLGDLTIDHCDDLVALPSSICGLTSLSCLSITNCPRLGELPKNLSKLQALEILRLYACPELKTLPGEICELPGLKYLDISQCVSLSCLPEEIGKLKKLEKIDMRECCFSDRPSSAVSLKSLRHVICDTDVAFMWEEVEKAVPGLKIEAAEKCFSLDWLDE

SEQ ID NO: 17229 - protein, 554 aa, Saccharomyces cerevisiae
MSNNSFTNFKLATELPAWSKLQKIYESQGKTLSVKQEFQKDAKRFEKLNKTFTNYDGSKILFDYSKNLVNDEIIAALIELAKEANVTGLRDAMFKGEHINSTEDRAVYHVALRNRANKPMYVDGVNVAPEVDSVLKHMKEFSEQVRSGEWKGYTGKKITDVVNIGIGGSDLGPVMVTEALKHYAGVLDVHFVSNIDGTHIAETLKVVDPETTLFLIASKTFTTAETITNANTAKNWFLSKTGNDPSHIAKHFAALSTNETEVAKFGIDTKNMFGFESWVGGRYSVWSAIGLSVALYIGYDNFEAFLKGAEAVDNHFTQTPLEDNIPLLGGLLSVWYNNFFGAQTHLVAPFDQYLHRFPAYLQQLSMESNGKSVTRGNVFTDYSTGSILFGEPATNAQHSFFQLVHQGTKLIPSDFILAAQSHNPIENKLHQKMLASNFFAQAEALMVGKDEEQVKAEGATGGLVPHKVFSGNRPTTSILAQKITPATLGALIAYYEHVTFTEGAIWNINSFDQWGVELGKVLAKVIGKELDNSSTISTHDASTNGLINQFKEWM

SEQ ID NO: 17230 - protein, 522 aa, Streptococcus sobrinus
MKFTELHLAEDILQAVEKAGFVEPSPIQELTIPLALEGKDVIGQAQTGTGKTAAFGLPTLNKIDIDNNVIQALVIAPTRELAVQSQEELFRFGREKGVKVRSVYGGSSIDKQIKALRSGAHIVVGTPGRLLDLIKRKALKLNHIETLILDEADEMLNMGFLEDIEAIISHVPDERQTLLFSATMPDAIKRIGVKFMKEPEHVKIAAKELTSDNVEQFYIRVKEREKFDTMTRLIDVEQPELSIVFGRTKRRVDELTRGLKLRGYRAEGIHGDLDQNKRLRVIRDFKNDNLDILVATDVAARGLDISGVTHVYNYDIPQDPESYVHRIGRTGRAGKSGKSVTFVSPNEMGYLSIIENLTKKRMKGLKPASAQDAFQAKKAVALKKIERDFSDESIRSNFDKFKGDALKLAEEFSPEELALYILSLTVQDPETMPEVEISRERPLPFKPSGANRGDGKGGRNNNRGRGGRDRYRRDNRDGNGRRDFKRKSNKNFRDFDKKDNKRPHRTSSEKKNGFVIRNKGDR

SEQ ID NO: 17231 - protein, 119 aa, Oryza sativa (japonica cultivar-group)
MGPQQDRSAAKPYANGSTAAAAAAGRKENNKVVRYRECQRNHAASIGGHAVDGCREFMASGADGTAAALLCAACGCHQSFHRREVEAAAAECDCSSDTSSGTGRRFLQQLVLSWWLSSA

SEQ ID NO: 17232 - protein, 475 aa, Physcomitrella patens
MAVPSSKLPLKAIPGDYGVPYFGAIKDRLDYFWLQGEEQFYRSRMAKYNSTVFRVNMPPGPPISEHPQVICLLDQKSFPILFDVSKVEKKDVFTGTYMPSVSFTSGYRVCSYLDPSEERHTKLKQWCFEVIAMNGRNFLPEFHKSIEESMVLWETSLAKGEKTSVSDEVKQFAFNFLMRAVCHHDPAAPGEYSLGRNGGPYATAWANPQLAPIAGQTGLPHVVEELVLHTVPLPSALVKKNYDALYNFIKNYATEALDRAEAMGIERNDATANLLFFLCFNAYGGFSIFFPLITILISSCGPELMHDLHDEVTKAVAATDGKVTLQSIENMPLVKSVVYEAFRFKPPVPYQYGKAKFDFTIENHENSFEVKKGEMLYGYQPIVMHDPKVFSDPDQFLPRRFMGPDGEKLIKYIFWSNGYETDEPTTANKQCAGKDLVVTMARAFVAEMFLRYKEYTLTMEGAGNATKVFFSDLKK

SEQ ID NO: 17233 - protein, 114 aa, Glycine max
MFRSTSTRGGPSKYERLEKELADNGTSNEEFKRSTSLPSRAMGSTFRDINLQRNPTKNANSKPKEKKSHPLFSFFDLRRKKKTTARPEFARYLEYVKEGGMWDLNSNKPVMYYK

SEQ ID NO: 17234 - protein, 450 aa, Salmonella typhimurium
MPTHLVWFRRDLRLQDNLAAAACRDASARVLALYISTPQWQAHDMAPRQAAFISAQLALQTALAEKGIPLLFHEVAFNASIETVKNVCRQHDVSHFYNYQYEFNERQRDRAVEKLPSVICEGFDDSVILAPGAMTGNHEMYKVFTPFKNAWLRLKEDIPPCVPAPKIRVSGLSTPLTPVSLNYPQQEFDALFPVEENAVIAQLRQFCAQADEYALRRDFPAVDGTSRLASLATGGLSPRQCLHRLLAQPQALDGGPGSVWLNELIWEFYRHLMTWYPALCKHQPFRWTKRVAWQENPHYFQAWQGETGYPIVDAAMRQLNATGMHNRLRMITASFLVKDLLIWRLGERYFMSQLIDGDLAANGGWQWAASTGTDAAPYFRFNPTTQGERFDRDGEFIRQLPALRDIPGKAIHEPWRWAKAGVVLDYPRPIVEHKQARATLSAYEAARKGA

SEQ ID NO: 17235 - protein, 450 aa, Deinococcus radiodurans R1
MTKFNDQLTQTGGPEWLTAKRQQGLDLFTSLDVPTEGVEAWKYTRVDVDFDALNPHPKREATTDTTKLPASVQKRLSSTDVGAFLVLDGPDVVYRTELPAELTAKGVIFTDLKTAVEQHADKVQQYLYSVVPAEVPDDTTIAAPGTTPSKSPDPSEGKFSALAAALWTNGAFVYVPRGVEVELPLGSFRVMSEAGTYTATRTLVVCEENAQVTFIDEQDSEELPGTYAIGAVELVVKQAARLRYVSIQNWGKGVTHIQRQRGDVERDGTLNSLVVTMGGTLSRTEMQSYLRGQGADSEMLALYFANDDQHFDHYTLQHHAAAHAHSDLLYKGVNDDTSVGVFSGMIKVDLDAQKTDAYQKHRTLMLSSEARNFSVPQLEINANDVRCSHGSTTGPVDQEALFFLRSRGISREVAEKMLVTAFLEDVLARVPLQSVVKYIEGIIAEKVGAA

SEQ ID NO: 17236 - protein, 274 aa, Spinacia oleracea
MAQAMLLMMPGVSTTNTIDLKRNALLKLQIQKIKPKSSTSNLFFSPLPSSSSSSSTVFKTLALFKSKAKAPKKVEKPKLKVEDGLFGTSGGIGFTKENELFVGRVAMIGFAASLLGEGITGKGILSQLNLETGIPIYEAEPLLLFFILFTLLGAIGALGDRGRFVDEPTTGLEKAVIPPGKDVRSALGLKTKGPLFGFTKSNELFVGRLAQLGFAFSLIGEIITGKGALAQLNIETGVPINEIEPLVLLNVVFFFIAAINPGTGKFITDDEEED

SEQ ID NO: 17237 - protein, 479 aa, Escherichia coli
MISGRHDRKPYYAGEAAIMAINSPLNIAAQPGKTRLRKSLKLWQVVMMGLAYLTPMTVFDTFGIVSGISDGHVPASYLLALAGVLFTAISYGKLVRQFPEAGSAYTYAQKSINPHVGFMVGWSSLLDYLFLPMINVLLAKIYLSALFPEVPPWVWVVTFVAILTAANLKSVNLVANFNTLFVLVQISIMVVFIFLVVQGLHKGEGVGTVWSLQPFISENAHLIPIITGATIVCFSFLGFDAVTTLSEETPDAARVIPKAIFLTAVYGGVIFIAASFFMQLFFPDISRFKDPDAALPEIALYVGGKLFQSIFLCTTFVNTLASGLASHASVSRLLYVMGRDNVFPERVFGYVHPKWRTPALNVIMVGIVALSALFFDLVTATALINFGALVAFTFVNLSVFNHFWRRKGMNKSWKDHFHYLLMPLVGALTVGVLWVNLESTSLTLGLVWASLGGAYLWYLIRRYRKVPLYDGDRTPVSET

SEQ ID NO: 17238 - protein, 424 aa, Bdellovibrio bacteriovorus HD100
MEHKIEPLYDGPLFRNAIQTLDEAAKIINCDPNILERLKRPRRCITVSVPVRMDDHSVKVFTGYRVQYSPTLGPYKGGIRYHQNVDLSEVVGLAALMTFKNSVLGLPLGGAKGGITVDPTKLSRTEKQNLTRRYASEIGPFVGPTKDIPAPDVGTDPQTMAWFMDTYSQEQGGFAQPGVVTGKPVEIGGSLGRNHATGLGVVYVAEKAFEVCNMSMKGASIAIQGFGNVGSFAAKFAHERGARIVAVSDVSGGIFNGDGLDINEVNEYIKAHKFLKGYPKAQPISNEELLEVKCDALFPCALENQIDTHNAEKIQAKIIVEGANGPITNAATKILHKRGVFIAPDVIANGGGVIVSYFEWVQDTMSYFWDEDEVNGRLKGIITKAFDKGYSLAKEKNIDMRSAAMAVSVQRLERAMLLRGLYPR

SEQ ID NO: 17239 - protein, 308 aa, Oryza sativa
MYAAMYPETFGFSAYPQQQQPPPDAASCIYTTALPLIADPPDILGNMAQPSFLSEYDLGGEGDLFKAPEPIIEEPVLSLDPVAAAISMMSGSENVMDETIEVADISDIQNDSLLSEVLYECEKELMEKSAIEETISELLDVKIPMLQVEEFPRETQVQLPAMEKEKPSVPECCSLQKSVSSGCLNSADWINGPARPNFLDFQGLDFETAFGLRRAYSEGDIQNLGASTPRPGNSGNAQLASCERLVTISDLKSEERKQKLSRYRKKKVKRNFGRKIKYACRKALADSQPRVRGRFAKIEEGDLLKPRK

SEQ ID NO: 17240 - protein, 566 aa, Brucella melitensis 16M
MSCNDRKHRQGARCQPIETNGNNMTVKTIATTPYQDQQPGTSGLRKKVPVFQQPNYAENFIQSIFDVLEGFKGKTLVVGGDGRFYNREVIQKLIKIAAANGFGRIMVGQGGILSTPAASNMIRKYKAFGGMILSASHNPGGPTQDFGIKYNIGNGGPAPEKITEAIFARSKVIDQYKIADAADIDIDKIGTSKIGDTEVVIFDPVADYAELMESLFDFAAIRAMIKGGFQMKFDAMHAVTGPYAKEIFERHLGAPEGSVVNFVPLPDFGGHHPDPNLVYAKDLYDLLMSSHAPDFGAASDGDGDRNLILGRGIFITPSDSLAMLAANAHLAPGYKGGIKGIARSMPTSAAADRVAEKLGIGMYETPTGWKFFGNLLDSGKVTICGEESSGTGSDHVREKDGLWAVLLWLNILAVRKESVKAIADDHWARFGRNYYTRHDYEAVDSDIATKLVADLRGKLAGLPGTSVNGLRIEKADDFAYHDPVDGSTSEHQGIRIYFEGGARIVLRLSGTGTSGATIRIYIERYEADPAKHNLDTQATLAPLIDAAEQIAEVKKRSGRTEPSVVT

SEQ ID NO: 17241 - protein, 375 aa, Nocardia farcinica IFM 10152
MSADPAGLVPDYAARRGALRSLLVENEVDALLVTDLVNIRYLTGFTGSNAALLVHSWDMRNAEDRTVLGTDGRYRDQVAAQVPDLRAEIARATARRIVELAGEWQLGRIGFESHAVTVDQHRGFVEQRTGLEFVATPGLVEQLRMVKDAYEVEQLRRACAAGDAGLAALLARGGLRPGRTERQVARDLEWAMFEHGAEAVSFETIVATGVNSAIPHHRPTDAVLAPGDFVKIDFGAVVDGYHSDMTRTFVLGHAADWQREVYELVAEAQRAGSKALRPGVAAGEVDAASRSVIEAAGHGKLFVHGLGHGVGLRIHEAPGIAKNAPGTLLSGVAVTVEPGVYFPGRGGVRIEDTLVVREGGPELLTHTSKDLTVVD

SEQ ID NO: 17242 - protein, 351 aa, Wolbachia endosymbiont of Anastrepha fraterculus
  misc_feature (210)..(210): Xaa can be any naturally occurring amino acid
VVANTDAQALEKSLCDKKIQLGINLTKGLGAGALPDVGKGAAEESIDEIMEHIKDSHMLFITAGMGGGTGTGAAPVIAKAAREARAAVKDRAPKEKKILTVGVVTKPFGFEGVRRMRIAELGLEELQKYVDTLIVIPNQNLFRIANEKTTFSDAFKLADNVLHIGIRGVTDLMAMPGLINLDFADIETVMSEMGKAMIGTGEAEGEDRAXSAAEAAISNPLLDNVSMKGAQGILINITGGGDMTLFEVDAAANRVREEVDENANIIFGATFDQAMEGRVRVSVLATGIDGRNNKSETSPISQSEDSEKEKFKWPYSQSESTQDKTLETKPAEQVSEGAKWGSNIYDIPAYL

SEQ ID NO: 17243 - protein, 364 aa, Kalanchoe daigremontiana
SDSGKDAGRLSAAWQLYKAQEDLVKVAKEFGVKLTMFHGRGGTVGRGGGPTHLAILSQPPDTIHGSLRVTVQGEVIEQSFGEEHLCFRTLQRYTAATLEHSMCPPASPEPEWRELLDEMAVAATKEYRSIVFHEPRFVEYFRLATPELEYGRMNIGSRPSKRKPSGGIESLRAIPWIFAWTQTRFHLPVWLGFGAAFKHVIDKDIKNLLMLQEMYTRWPFFRVTIDLVEMGFAKGDPGIAALYDKLLVSEDLWPFGEQLRNNYNETKNLLLQVAGHKDLLEGNPYLRQRLRLRDSYITTLNACQAYTLKRIRDPNYHVTVRPRLSKEIMESNKAAAELVKLNPTSEYAPGLEDTLILTMKGIAA

SEQ ID NO: 17244 - protein, 287 aa, Triticum aestivum
MRALTAATISSPIRALLLHHPSFRSTLRLPLTMNPSSSSSSGYRSNAAAFASTHQPHGGRGGGRRPGGRGDGGGDGGNRIDALGRLLTRVLRHMAPELRLNMRSDGYVRVRDLLRLNLETFAKVPLNSHTVDEIREAVRRDNKQRFGLLEEDGELLIRANQGHTVTTVTSESLLKPILSADEVSVCVHGTYRKNVDSILKHGLKRMARLHVHFSSGLPSDGGVISGMRSGANILIYLNVRKALQDGMKLYISDNKVILTEGFDGVVPIKYFEKIETWPGRAPIPFQR

SEQ ID NO: 17245 - protein, 364 aa, Kalanchoe daigremontiana
SDSGKDAGRLSAAWQLYKAQEDLVKVAKEFGVKLTMFHGRGGTVGRGGGPAHLAILSQPPDTILGSLRVTVQGEVIEQSFGEEHLCFRTLQRYTAATLEHSMCPPASPEPEWRALLDEMAVTATKEYRSVVFQEPRFVEYFRLATPELEYGRMNIGSRPSKRKPNGGIESLRAIPWIFAWTQTRFHLPVWLGFGAAFKHVIDKDIKNLLTLQEMYKRWPFFRVTIDLVEMVFAKGDPGIAALYDKALVSEDLWPFGEQLRNNYNETKTLLLQVAGHKDLLEGDPYLRQRLRLRDSYITTLNVCQAYTLKRIRDPHYNVTVRPHLSKEITESNKPAAELVKLNPTSEYAPGLEDTLILTMKGIAA

SEQ ID NO: 17246 - protein, 414 aa, Oryza sativa (japonica cultivar-group)
MGGPPPPPQGAAGQPPQWGAIPPPMPPHQYGAPPPQQPPAMWGQPPPQAHYGQVPPPQPYYAAPPPQAMPAPAAADEVKTLWIGDLQPWMDESYIYNCFAATGEVQSVKLIRDKQSGQLQGYGFVEFTSRAAADRILQTYNGQMMPNVEMVFRLNWASAGEKRDDTPDYTIFVGDLAADVTDYLLQETFRVHYPSVKGAKVVTDKMTMRSKGYGFVKFGDPTEQARAMTEMNGMLCSSRPMRIGPAANKKTTGVQERVPNAQGAQSENDPNNTTIFVGGLDPNVTEDVLKQVFAPYGEVVHVKIPVGKRCGFVQYVNRPSAEQALAVLQGTLIGGQNVRLSWGRSLSNKQPQHDSNQWGAGAGAGGYYGGYGQGYEAYGGYAQPQDPNMYGYGAYAGYPNYQQQQVAQQQPPQQ

SEQ ID NO: 17247 - protein, 1353 aa, Thermosynechococcus elongatus BP-1
MPAAPLPANEPERQRALEQYQVLDTPPEPIFDEITNLAAAICETPIALISLVDRQRQWFKSKVGIDACETPRNVAFCAHVILQDQLVIVPDARLDPRFADNPFVTGPPYIRFYAGMPLVTPQGYGIGTLCVVDYQPRQLNPVQQQTLRTLARQVINELEIRHHLEVTQQQLAYIQQMSSLQEAVFNSSNHAIIATRTDGIITLMNRAAQQWLGYPASELVGKATPERFHDPQEMERYAQILSAQLGEPIPAGFETLVARARRGLADEQEWTFVRRDGSCFPVSLSVTPMHDRQGQLIGFLESAVDITDKKQIEAALRLRERAIIASTNGIVITDYRQPDNPVIYVNPAFERMTGYRATEVIGKNCRFLQGSDRHQPGATAIRNAIKKGQSCRVVLRNYRKNGQLFWNELAISPIYNEFGEITHYIGIQSDVTERQRAQLFLQQQVKRTLLLNRITEEIRQQIEREHICRTAVQQVGVTLNVSRCLLFVYQENAPTPMELVAEYCGPGVPSVNECDLDLTQMRAPFLASVFASDEVFSCDDVQNDDRLAPLHAYCEALRVKSALIVRTAYRNQANGLLILHQCDRQRRWTDAIQSLLKSVAAQVGIGLAQVQLLEQETRQRQQLQQQMQRALLLNQITEQIRQSLDTETVFATTVTQIGQAFGVNRCLIHRYDPGPPPHIPDVAEYLQPGYASMRGISIPVENNPHALAVLSGDTAVVSNDVTQDPLLANAMHLCHQFQIQSMLAIRTSYKGVPNGIIGLHQCDRQRQWTPEEIELLEAVAAQVGIAIAQAELLRHEQQQRQLLAQQNQELEQARLQAELANRAKSEFLATMSHEIRTPMNAVLGFTNLLLDTPLNEQQRDFLQTLHQAGEALLTIINDILDFSKIESGKLVLEQQPFDVRECVEDVLSLLASKAQEKELELLYTCTPETPAQIKGDVTRLRQILVNLVGNGIKFTHEGQVAVHVGVLKREGKDFLQFQVQDTGIGIPRDRLDRLFKPFSQVDASTTREYGGTGLGLVISKRLCELMGGDMSVESTEGQGTTFTFTILAEGQKPYVPPKVHPALEGKRVLVIDDNAASRENLCTLLHNWGMVPIGYSDPRLVLEAAPPWDLAVIDLNMPQMTGLQLAERLQSEPNFNQQPMILLTPLSWLETASRKELITAHVPKPIRPLTLRQTLIRTLSSESATQPALTKTGIDLNLGNRFPLRILLAEDNAVNQKVALHILKRMGYRADVAANGLEVLEALQQRPYDVILMDVQMPKMDGLETTERICAQWPPSQRPWIIAMTANALAGDRERCFAAGMDDYISKPIKIEALAAALNRCRCLNPKSTYPQLCDQINIDSDQGHQSATESMT

SEQ ID NO: 17248 - protein, 478 aa, Zea mays
MQAAAASVKSSTTAAAAAATCKAGFKPLHLPPLPAAGSRPLSLSVSARPLYRQDHVLATTVAMAAAGRSDRAASPAPPSATADGARPVVEVAAPAETARRAKIGVYFATWWALNVIFNIYNKKVLNAFPYPWLTSTLSLAAGSAIMLASWATRIAEAPQTDLDFWKALTPSSRGRGRPAEQVAIAHTIGHVAATVSMAKVAVSFTHIIKSGEPAFSVLVSRFFLGEHFPAPVYFSLLPIIGGCALAAVTELNFNMVGFMGAMISNLAFVVRTIFSKKGMKGKSVSGMNYYACLSIMSLVILLPFAVAMEGPKLWAAGWQQAVAEIGPNFVWWVAAQSVFYHLYNQVSYMSLDEISPLTFSIGNTMKRISVIVASIIIFQTPVQPINALGAAIAILGTFIYSQAQGSMAVPDGKRRAICTLRSSRWIQRWSVADLSLCALADCSFGSAHFCCSAWAFGRADMPSSQAGATFGALWAVAF

SEQ ID NO: 17249 - protein, 180 aa, Amaranthus hypochondriacus
MASSLMSNAITAVVGASGAQANMVAPFNGLKSIASFPVTRKSNDITSIASNGGRVQCMQVWPPVGKKKFETLSYLPPLSDAQLLAQVQYLLNNGWIPCIEFELEHPFVYRENHRSPGYQDGRYWTMWKLPMYGCTDPAQVLNEVEEAKKAYPSAFIRIIGFDNKRQVQCVSFIAFKPPGY

SEQ ID NO: 17250 - protein, 184 aa, Amaranthus hypochondriacus
MASSMMSNAATAVAVAATSGGAQANMVAPFNGLKSIASFPVTRKSNDITSIASNGGRVQCMQVWPPVGKKKFETLSYLPPLSDAQLLAQVQYLLNKGWIPCIEFELEHPFVYRENHRSPGYQDGRYWTMWKLPMYGCTDPAQVLNEVEEAKKAYPTAFIRIIGFDNKRQVQCVSFIAYKPADSY

SEQ ID NO: 17251 - protein, 364 aa, Clusia uvitana
SDSGKDAGRLSAAWQLYKAQEDLIKVAKQFGVKLTMFHGRGGTVGRGGGPTHLAILSQPPDTIHGSPRVTVQGEVIEQSFGEEHLCFRTLQRFTAATLEHGMHPPDSPKPEWRALLDEMAVVATEEYRSVVFKEPRFVEYFRLATPELEYGRMNIGSRPSKRKPSGGIESLRAIPWIFAWTQTRFHLPVWLGFGAAFKHIIKKDIRNLHMLQEMYNAWPFFRVTIDLVEMVFAKGDPGITALYDKLLVSEDLWAFGENLRTNCEETKKLLLQIAGHKDLLEGDLYLKQRLRLRDSYITTLNVCQAFTLKRIRDPSYNVKFRPHISKEIMETSKSANELLILNPSSEYAPGLEDTLILTMKGIAA

SEQ ID NO: 17252 - protein, 362 aa, Arabidopsis thaliana
  misc_feature (94)..(94): Xaa can be any naturally occurring amino acid
MEATYDRASEVKAFDELKIGVKGLLDAGVTQIPRIFHHPHLNLTDSNLLLSSTTMVIPTIDLKGGVFDEYTVTRESVIAMIRDAVERFGFFQVXNHGISNDVMEKMKDGIRGFHEQDSDVRKKFYTRDVTKTVKYNSNFDLYSSPSANWRDTLSCFMAPDVPETEDLPDICGEIMLEYAKRVMKLGELIFELLSEALGLNPNHLKEMDCTKGLLMLSHYYPPCPEPGLTFGTSPHSDRSFLTILLQDHIGGLQVRQNGYWVDVPPVPGALLVNLGDLLQLMTNDQFVSVEHRVLANKGEKPRISVASFFVHPLPSLRVYGPIKELLSEQNLPKYRDTTVTEYTSHYMARGLYGNSVLLDFKI

SEQ ID NO: 17253 - protein, 112 aa, Methylobacillus flagellatus KT
MKFISAIIKPFKLDEVREALSAIGVQGITVTEVKGFGRQKGHTELYRGAEYVVDFLPKVKLEVAIEDSLLDQVIDAIEQSASTGKIGDGKIFVFDLEQAYRIRTGETGGDAL

SEQ ID NO: 17254 - protein, 754 aa, Oryza sativa (japonica cultivar-group)
MAMATTALSASLPRLLPPRRRRFPTPSSSSPSAASTSTSRVVRLRAAAASAPSEVLDSTNGAIPSGKGGGGQQYGREYFPLAAVVGQDAIKTALLLGAIDREIGGIAISGKRGTAKTVMARGLHAMLPPIEVVVGSIANADPNYPEEWEEGLANQVQYDADGNLKTEIIKTPFVQIPLGITEDRLIGSVDVEASVKSGTTVFQPGLLAEAHRGVLYVDEINLLDEGVSNLLLNVLTEGVNIVEREGISFRHPCKPLLIATYNPEEGSVREHLLDRIAINLSADLPMSFDDRVAAVDIATQFQESSKEVFKMVEEETEVAKTQIILAREYLKDVAISTEQLKYLVMEAIRGGCQGHRAELYAARVAKCLAAMEGREKVYVDDLKKAVELVILPRSILSDNPQEQQDQQPPPPPPPPPPQDQDSQEDQDEDEEEDQEDDDEENEQQDQQIPEEFIFDAEGGIVDEKLLFFAQQAQRRRGKAGRAKNLIFSSDRGRYIGSMLPKGPIRRLAVDATLRAAAPYQKLRREKDRDKTRKVFVEKTDMRAKRMARKAGALVIFVVDASGSMALNRMQNAKGAALKLLAESYTSRDQVSIIPFRGDFAEVLLPPSRSIAMARNRLEKLPCGGGSPLAHGLSTAVRVGLNAEKSGDVGRIMIVAITDGRANVSLKKSTDPEATSDAPRPSSQELKDEILEVAGKIYKAGISLLVIDTENKFVSTGFAKEIARVAQGKYYYLPNASDAVISAATKTALSDLKSS

SEQ ID NO: 17255 - protein, 558 aa, Haemophilus somnus 129PT
MNGANLVVECLKAHGVTSLFGYPGGAIMPVYDAIYDSGLDHLLCRNEQGAAMAAIGYARSTNKVGVCVATSGPGATNLITGLGDALMDSIPIIAITGQVASNFIGTDAFQEADILGLSLACTKHSFIVQHIDELPEIIAKAFQIAQSGRPGPVLIDLPKDVQFAPTSLKPIVYPKIADSLQNLVALEQAKNLLSQAKRPVLYVGGGVGMAKSSDGMSGVKAIRTFLDITNIPSVSTLKGLGTIPPKHPLYMGMIGMHGTKAANYAVQECDLLIACGARFDDRVTGKLDTFAPHAKVIHIDIDVAEINKLRKADVGLQGDLVEAITNLAQLLDIEPWRKDIEQLKASFDFNYIENTEDKEIEPCALLHTLSERKAKNAVITTDVGQHQMWSAQHMKHYEPENYITSAGFGSMGFGLPAAIGAAKARPQDPVILITGDGSLMMNIQELGSIKRGNLPIKILLLDNQRLGMVRQWQSLFFHGRHSHTVLDDNPDFVTLASAFGIAGERIEKVSEVSDALDRLLNAKEAYLLHVCIPDEENVWPLVPPNTCNSNMIEEDIGV

SEQ ID NO: 17256 - protein, 465 aa, Mycoplasma penetrans HF-2
MIEKKEVDQEYKYGFSDGENSILNTKKGLSVDVIKQISKIKNEPEWMLDIRLKAYEKFLQTPNPDWGADLSNINYDDIIYYTSSTKKMESYWDKVPEQIKKTFEKLGIPEAEAKFLNGVSAQYDSETVYKKLEEELVQKGVIFTNVETAVLKYPKLVKKFFGKLVPYDDNKFAMLNTAVWSGGSFVYVPKNVHLEKPLQAYFRINGISSGQFERTLIIVDEGASVHYVEGCTAPVYSESNLHAAVVECYVHKNAKLKYTTIQNWSKNVLNLVTKRAIVHENANMSWIDGNIGAGINMKYPSSVLAGKYASSDCISIAIASNNVVQDAGAKMIHLAPYTKSRIVSKSVSFNGGDTRYRGLVKMEKDAVHSHSRVECDTLLLDEISRSDTIPLEIIKNKQSFLEHEAKVSNISEEQLFYFMNKGISKDEAEYLIVMGFLEPFSKELPMEYAIELNRLIKLDMEGSVG

SEQ ID NO: 17257 - protein, 564 aa, Bradyrhizobium japonicum USDA 110
MVWCSSASFEGYRGVAVAEVDPAAGKPVAPSALANIPRLVTAYFAGKPDVADPAQRVAFGTSGHRGTSFRNTFNEGHILATTQAICDYRKEKGLTGPLFIGIDTHALAEPALVSAVEVFAANGVDVMVDKDGGYTPTPVISHAILTYNKGRTSGLADGVVVTPSHNPPEDGGYKYNPPHGGPADTDATSVVEKRANAYLADGLKGVARMDYARAKKSATVHAYDFITPYVADLGNVVDLDLVKSAGINIGIDPLGGAAVHYWHPIIERYGLKATVVNEAIDPTFRFMTVDWDGKIRMDCSSPYAMASLIAMRDRFDVAFANDTDADRHGIVTRTGGLMNPNHYLATAISHLFAHRPNWSKDAAIGKTVVSSSIIDRVAKKLGRKLVETPVGFKWFVDGLLTGGFGFGGEESAGASFLRRDGTVWTTDKDGIILGLLAAEIMAKTGRDPSQLFGDLTAEFGVPHYARIDVAATTPQKNILKSVTPEQFGLKDLAGDPVRATLSKAPGNGQPFGGIKVETDFGWFAARPSGTEDVYKIYAESFRSTEHLKRIQEEAQAGLAKVFGV

SEQ ID NO: 17258 - protein, 162 aa, Haemophilus influenzae
MFIDTSELCDLYAEQVDVVEPIFSSFGGVSNFYGKVTTVKCFESNGLIAEVLEENGEGRVLVIDGGGAVRRGLIDAELAQLAVDNGWEGIIVYGAVRQIQQLENLDIGIHALAPIPVSADESSAGESDIPVNFGGVTFFPEDYIYADLTGIILSQEPLDLED

SEQ ID NO: 17259 - protein, 455 aa, Bacteroides fragilis YCH46
MARFEIKMPKLGESITEGTILSWSVQVGDVVNEDDVLFEVNTAKVSAEIPSPVAGKVVEILFKEGDTVPVGTVVAIVDMDGEGSGEASETAGSVETASAPKAAEVSGTASVPKVQAEVTAPKVERWYSPAVLQLAREAKISQEELDSIPGTGYEGRLSKKDIRTYIEMKKGAPAADVSTTVVSTVSANNSGSSPVPSAEVQKKAAAAAPQAQHGQSASAVSSDASVEVKEMDRVRRIIADHMVMSKKVSPHVTNVVEVDVTRLVRWREKTKDDFFRREGVKLTYMPAIAEATAQALAAYPQVNVSVDGYNILYKKHINVGIAVSQDDGNLIVPVVHDADRLNLNGLAVAIDSLAKKARVNKLMPDDIDGGTFTITNFGTFKMLFGTPIINQPQVAILGVGVIEKKPAVVETPEGDVIAIRHKMYLSLSYDHRVVDGSLGGNFLHFIADYLENWKE

SEQ ID NO: 17260 - protein, 351 aa, Gibberella zeae PH-1
MSSTKDIVLVTGANGFIGARTVEAFLAADYFVRAAVRSESSASSLFSALPVYASSGYLTAAIVHDISATGAFDDAVQGATAIAHLAAPVNFSNRDIDYVIKASMQGTLSILESAIKEPGLKSFVYMSSIVTVRGQSPKYPDKGYTEEDWNDQIEDALSKAGTDATGHQIYVASKLKAERAFWEFQKTHADKVNFTMTAVNPVWVAGPPLILPDDPEKLSETAIVAYRIMNGQDMPSTGPGNGTHVDVRDVARLIVFAVEKKQVADGQRYIVGGNGNYANIQAYRDLLRKAYPGRKNIISEGEPGKGYNQDYSTPEGGFLVDGSKAVQATGQDWISFDQMTLNAAKAYERYF

SEQ ID NO: 17261 - protein, 522 aa, Zea mays
MNTLRRNKVRSQSEFSEDELVSSVLMKNGKKVVCGTPSGALLLYSWGYFNGCWYTMEGAGRDANPLSGYRIGKTLGIGSFGKVKIAEHILTGHKVAIKILNRKKIRSMDMEEKVKREIKILRLFMHPHIIRLYEVIDTPADIYVVMEYVKSGELFDYIVEKGRLHEEEARHFFQQVAFLHITMFIPKIAQCIAITVLKNCSMIISGVEYCHRNIVAHRDLKPENLLLDSKCNVKIADFGLSNIMRDGHFLKTSCGSPNYAAPEVISGKLYAGPEVDVWSCGVILYALLCGTLPFDDENIPNLFKKIKGGIYTLPSHLSPSARDLIPRMLVVDPMKRITIREIREHVWFKIRLPRYLAVPPPDTAQQVKKVDEETLNDVIKMGFDKNQLIESLQNRLQNEATVAYYLLLDDRLCTTSGYLGSDFQESMDSSFSQVITETPTSATELQQHVFTEGTFGCLPLPCFAWLSIKIHRLVGLLPVSVLALSRIFIASPSDLKPLSAAGKPGLAERGEASWPHKPTKRA

SEQ ID NO: 17262 - protein, 678 aa, Bacteroides fragilis YCH46
MKKYDIKTTDEQTLRKWYHLMTLGRALDEKAPAYLLQSLGWSYHAPYAGHDGIQLAIGQVFTLGEDYLFPYYRDMLTVLSAGMTPEELILNGISKATDPGSAGRHMSNHFAKPEWHIENISSATGTHDLHAAGVGRAMVYYGHKGVAITSHGESATSEGFVYEAINGASNERLPVIFVFQDNGYGISVPKKDQTANRKVADNFSGFKNLRIIHCNGKDVFDSMNAMTEAREFAIANRTPVIVHANCVRIGSHSNSDKHTLYRDENELAYVKEADPLMKFRRMLLRYKRLTEEDLQQIEAAAKKELAAANRKALAAPDPIPESIYDFVLPEPYIPQKYKDGLPGPVEGEKSFMVNAINETLKEEFRRNPDTFIWGQDVANKDKGGVFNVTKGMQQEFGDARVFSAPIAEDYIVGTANGMCRFDPKIHVVIEGAEFADYFWPAVEQYVECTHEYWRSNGKFTPNITLRLASGGYIGGGLYHSQNLEGALTTLPGARIVCPSFADDAAGLLRTSMRSKGFTLYLEPKALYNSVEAAAVVPEEFEVPFGKARIRREGTDLTIITYGNTTHFCLDVAERLAREEVGSVEVIDLRSLIPLDKEAIFASVRKTGKVMVVHEDKVFSGFGAEIAAQIAGEMFRYLDAPVQRVGSTFTPVGFNPILERAILPNDEKIYKAAKELLEF

SEQ ID NO: 17263 - protein, 131 aa, Brucella melitensis 16M
MAKAIHTMIRVLDADKSVAFYNQAFGLDIAERIDFETFTLIYLRNEEADFEVELTVNKGRTEPYNLGDGYGHLAVAVDDVDAEHARFRELGFKAGNLVDFRNNGALLARFFFVEDPDGYKIEVLQRAGRYV

SEQ ID NO: 17264 - protein, 399 aa, Saccharomyces cerevisiae
MSFDREEDQKLKFKTSKKLKVSSTFESMNLKDDLLRGIYSYGFEAPSSIQSRAITQIISGKDVIAQAQSGTGKTATFTIGLLQAIDLRKKDLQALILSPTRELASQIGQVVKNLGDYMNVNAFAITGGKTLKDDLKKMQKHGCQAVSGTPGRVLDMIKKQMLQTRNVQMLVLDEADELLSETLGFKQQIYDIFAKLPKNCQVVVVSATMNKDILEVTRKFMNDPVKILVKRDEISLEGIKQYVVNVDKEEWKFDTLCDIYDSLTITQCVIFCNTKKKVDWLSQRLIQSNFAVVSMHGDMKQEERDKVMNDFRTGHSRVLISTDVWARGIDVQQVSLVINYDLPEIIENYIHRIGRSGRFGRKGVAINFITKADLAKLREIEKFYSIKINPMPANFAELS

SEQ ID NO: 17265 - protein, 149 aa, Glycine max
MDSSTFLAATSLDQGKPFPVSRQPSKQKKKTASANKAIKVRYISNPMKVKTCASKFRELVQELTGQDAVDQPEPVFSPSTVSDLSPSPPPPENLAPRVLDPEPFDDRVCEYFEPLDGEEMFLPQMSAGFSGFFSNGFYNVNDFGRIDSM

SEQ ID NO: 17266 - protein, 195 aa, Glycine max
EHIAMVKGDIGDGHDVLVRVHSECLTGDIFGSARCDCGNQLALAMQQIEAAGRGVLVYLRGHEGRGIGLGHKLRAYNLQDDGRDTVEANEELGLPVDSREYGIGAQILRDLGVRSMKLMTNNPAKYVGLKGYGLTISGRIPLVSLITKENKRYLETKRVKMGHVYGSEFNSKLNHQDTGNGKANSDDDSNAAAGL

SEQ ID NO: 17267 - protein, 313 aa, Bradyrhizobium japonicum USDA 110
MALAQTEEIARRLTAAVPGLDVEIVKFDTTGDLDQTSKLLPHGGKGGAFVAQIRAAVLSGELQAAMHSLKDMPGNEDTPGLVIGATLSRDPPSDALVLRDGVTLEALRQSRGKGFKIGTNAVRRAAYARRLFPDVEVIHFRGAADTRVRKLDNGEKQRLPDGGAVGPADALIMARSGLDRVGLASRIAYEFTPAEMLPAAGQGIVAVECAAQDWQTRKILSSIDDPAAHACADAEREVLWVLNGHCNSPVAGFSTIAGDQMSLTASVLDLSGNTIIEASRTGSANRPRELGRAVGLELLGKGAAEIIERSRPR

SEQ ID NO: 17268 - protein, 328 aa, Magnetospirillum magnetotacticum MS-1
GPSWLLVIGGGPAGLTARSICARFRRRFQVVDAGASRAALIPTSHNHAGFPEGIHGKALLSRMTEQARKYGAHIVPGSVTRLERRPDGVFLATLDGEPIPARTILLATGVVDREPDLPDVPDVIRRGLVRHCGICDGYEALGKRVAVIGHGSSGLHEALFLRTYTADITLLSLGRSLVLTEEEGRQAAQAEIAIVEEPVRRVVVEGDQVRALDMLGGACRSFDVLYAALGSDARSDLVRGLGTRLDDKGCVVTDEHQRSSTDGLFAAGDVVRSLDQISVAMGQAAIAATAIHNRLRGVPSPRGAPDDTLSFSPQDLCTCCSRPDARRH

SEQ ID NO: 17269 - protein, 322 aa, Carica papaya
DFSIVGYSQDDLTSTERLIQLFNSWMLNHNKFYENVDEKLYRFEIFKDNLNYIDETNKKNNSYWLGLNEFADLSNDEFNEKYVGSLIDATIEQSYDEEFINEDIVNLPENVDWRKKGAVTPVRHQGSCGSCWAFSAVATVEGINKIRTGKLVELSEQELVDCERRSHGCKGGYPPYALEYVAKNGIHLRSKYPYKAKQGTCRAKQVGGPIVKTSGVGRVQPNNEGNLLNAIAKQPVSVVVESKGRPFQLYKGGIFEGPCGTKVDGAVTAVGYGKSGGKGYILIKNSWGTAWGEKGYIRIKRAPGNSPGVCGLYKSSYYPTKN

SEQ ID NO: 17270 - protein, 272 aa, Triticum aestivum
  misc_feature (204)..(204): Xaa can be any naturally occurring amino acid
  misc_feature (214)..(214): Xaa can be any naturally occurring amino acid
  misc_feature (265)..(265): Xaa can be any naturally occurring amino acid
VDSIEQVCTKKQAGTAPEFPGISSTHASGGAEGTVFQLTFACNAPLSWQSMSGSLDSPLFSCKKIQIFEKRGLTLGAVLIIVQSGSEELFKSRVEAALKSATKKHRKNSGGGGGGVKLPFGLCGCQEEGSRNFDEESMFDPEDGQVLDNEPARRPYLPTPLPQSSVFVSVDEWQTVRSGGEELGRWIVSSEEIEFVDWVGPNSXRGVHRGRKVXVNKMRGCNMGSAYDVEIRQDLLQLMSCGQKNILQVHGICFNESHGLCIVTXMMEGSSV

SEQ ID NO: 17271 - protein, 364 aa, Clusia uvitana
SDSGKDAGRLSAAWQLYKAQEDLIKVAKQFGVKLTMFHGFGGTVGRGGGPTHLAILSSSLDTIHGSLRVTVQGEVIEQSFGEEHLCFITLQRFTAATLEHGMHPPDSPKPEWRALLDEMAVVATEEYRSVVFKEPRFVEYFRLATPELEYGRMNIGSRPSKRKPSGGIESLRAIPWIFAWTQTRFHLPVWLGFGAAFKHIIKKDIRNLHMLQEMYNAWPFFRGTIDLVEMVFAKGDPRITALYDKLLVSEDLWAFGENLRTNCEETKKLLLQIAGHKDLLEGDLYLKQRLRLRDSYITTLNVCQAFTLKRIRDPSYNVKFRPHISKEIMETSKSANELLILNPSSEYAPGLEDTLILTMKGIAA

SEQ ID NO: 17272 - protein, 334 aa, Thermus thermophilus HB27
MAYRICLIEGDGIGHEVIPAARRVLEATGLPLEFVEAEAGWETFERRGTSVPEETVEKILSCHATLFGAATSPTRKVPGFFGAIRYLRRRLDLYANVRPAKSRPVPGSRPGVDLVIVRENTEGLYVEQERRYLDVAIADAVISKKASERIGRAALRIAEGRPRKTLHIAHKANVLPLTQGLFLDTVKEVAKDFPLVNVQDIIVDNCAMQLVMRPERFDVIVTTNLLGDILSDLAAGLVGGLGLAPSGNIGDTTAVFEPVHGSAPDIAGKGIANPTAAILSAAMMLDYLGEKEAAKRVEKAVDLVLERGPRTPDLGGDATTEAFTEAVVEALKSL

SEQ ID NO: 17273 - protein, 314 aa, Glycine max
  misc_feature (304)..(304): Xaa can be any naturally occurring amino acid
MWPFSRKGASGFSSSSTAEQVTEGIDGTGLTAIVTGASSGIGTETTRVLSLRGVHVIMGVRNMLAAKDVKETLLKEIPSAKVDAMELDLSSLESVKKFASEFKSSGLPLNMLINNAGIMACPFKLSKDKIELQFATNHLGHFLLTNLLLDTMKKTSRETKKEGRIVNVSSEAHRFTYSEGIRFDKINDESSYSNWRAYGQSKLANILHANELTRRLKEDGVDISANSLHPGVIATNLSRHISPVNGLTKAIARLVLKNVQQGAATTCYVALHPQVKGTSGKYFSASNVAKTTSQGTDADLAKKXLWDFSMDLTK

SEQ ID NO: 17274 - protein, 364 aa, Clusia uvitana
SDSGKDAGRLSAAWQLYKAQEDLIKVAKQFGVKLTMFHGRGGTVGRGGGPTHLAILSQPPDTIHGSLRVTVQGEVIEQSFGEEHLCFRTLQRFTAATLEHGMHPPDSPKPEWRALLDEMAVVATEEYRSVVFKEPRFVEYFRLATPELEYGRMNIGSRPSKRKPSGGIESLRAIPWIFAWTQTRFHSPVWLGFGAAFKHIIKKDIRNLHMLQEMYNAWPFFRVTIDLVEMVFAKGDPGITALYDKLLVSEDLWAFGENLRTNCEETKKLLLQIAGHKDLLEGDLYLKQRLRLRDSYITTLNVCQAFTLKRIRDPSYNVKFRPHISKEIMETSKSANELLILNPSSEYAPGLEDTLILTMKGIAA

SEQ ID NO: 17275 - protein, 363 aa, Mesembryanthemum crystallinum
SDSGKDAGRLSAAWQLYKAQEELVKVAKKYGVKLTMFHGRGGTVGRGGGPTHLAILSQPPETINGSFRVTVQGEVIEQSFGEERLCFRTLQRFTAATLEHGMLPPISPKPEWRAILDEIAVVATEEYRSVVFKEPRFVEYFRLATPELEYGRMNIGSRPSKRKPRGGIESLRAIPWIFAWTQTRFHLPVWLGFGAAFKHILQKDIRNLQVLKEMYNEWPFFRVTLDLLEMVFAKGDPGIAALYDKLLVSDELKSFGEQLRANYEETEQLLLQVAGHKDLLEGDPYLKQRLRLRESYITTLSVCQAYTLKRIRDPNFQVHMRAPLSKEILDSNKPAELVKLNPTSEYAPGLEDTLILTMKGIAA

SEQ ID NO: 17276 - protein, 180 aa, Oryza sativa
MASALAASTAVCSSPLASASASASSARRLRAVPPSRGIRYQALRADSGFAGNRRGGGRGASVVCAVQGQDTSIQVPEVTKSTWQSLVMESELPVLVGYWATWCGPCKMIDPVVGKLSKEYEGKLKCYKLNTDENPDIASQYGVRSIPTMMIFKNGEKKDAVIGAVPESTLIASIEKFVER

SEQ ID NO: 17277 - protein, 481 aa, Vibrio parahaemolyticus RIMD 2210633
MSKGMTMQQIQNQSLVSFMVANPQQGIAVTNPATGELLGYAPVSTENDILNSIERAHVAQKEWSALPAKTRAGMLNRWFQLLLENKADLGRLMTLEQGKPLAEAQGEVLYGASFIEWFAEEAKRTYGETIPAPSADKRLVTIKQPIGVACAITPWNFPIAMITRKAAPALAAGCSFVVKPSESTPLSAFAVAELAYQAGIPRDVLQVVLGENSRQVGAIFTSHPLIRKLSFTGSTQVGRVLMQQSAADIKRTSMELGGNAPFIVFDDADIDAAVAGAMASKFRNAGQTCVCANRFYVHSKVYDEFVAKFDAAVQQLKVGNGLEEGVNIGPVISESAKQGIQALIDGAIEQGAKPVSALKELDGLFMQPVVLKGVTHDMKIVSEEIFGPVAPVIRFDSDEQLIEMANDTIYGLASYFYSQNIHRVWKIAEALEYGMVGINEGMISTEVAPFGGVKQSGIGREGAKQGIDEYMDVKYLCFGGN

SEQ ID NO: 17278 - protein, 366 aa, Mesembryanthemum crystallinum
SDSGKDAGRLSAAWALYKAQEELVQVAKEYGVKLTMFHGRGGTVGRGGGPTHLAILSQPPETVNGSLRVTVQGEVIEQSFGEEHLCFRTLQRFTAATLEHGMHPPISPKPEWRALLDEIAVVATEKYRSIVFKEPRFVEYFRLATPELEYGRMNIGSRPSKRKPSGGIESLRAIPWIFAWTQTRFHLPVWLGFGAAFGYAIQKDVKNLSVLQKMYNEWPFFRVTIDLVEMVFAKGDPGIAALYDKLLVSEELWPFGERLRADFEETKGLILKIAGHKDLLEGDPYSRQRLRLRDSYITTLNALQAYTLKRIRDPNYNVQLRPHISKEYMDSTSNKPAAELVKLNPSSEYAPGLEDTLILTMKGIAA

SEQ ID NO: 17279 - protein, 244 aa, Buchnera aphidicola
YDTEFRHYAHVDCPGHADYIKNMITGAAQMDGAILVVAATDGPMPQTREHILLGRQVGVPYIIVFLNKCDMVDDEELLELVEMEVRDLLTQYDFPGDDTPIIRGSALKALEGDPEWESKIIDLSKFLDSYIPEPKRAIDQPFLLPIEDVFSISGRGTVVTGRVEKGVIKVGEEVEIVGIKKTTKTTCTGVEMFRKLLDEGRAGENVGVLLRGTKRDEIERGQVLAKPGSIHPHTTFESEVYVLS

SEQ ID NO: 17280 - protein, 132 aa, Methanocaldococcus jannaschii
MPGTKQVNVGSLKVGQYVMIDGVPCEIVDISVSKPGKHGGAKARVVGIGIFEKVKKEFVAPTSSKVEVPIIDRRKGQVLAIMGDMVQIMDLQTYETLELPIPEGIEGLEPGGEVEYIEAVGQYKITRVIGGK

SEQ ID NO: 17281 - protein, 216 aa, Brassica napus
  misc_feature (160)..(160): Xaa can be any naturally occurring amino acid
  misc_feature (166)..(166): Xaa can be any naturally occurring amino acid
  misc_feature (173)..(173): Xaa can be any naturally occurring amino acid
  misc_feature (175)..(175): Xaa can be any naturally occurring amino acid
  misc_feature (178)..(179): Xaa can be any naturally occurring amino acid
  misc_feature (187)..(187): Xaa can be any naturally occurring amino acid
  misc_feature (196)..(196): Xaa can be any naturally occurring amino acid
MDSSSWINHPSVISSRRCQSRSDLYIGGGYEDLEGEDESKSEFICPFCADVFDIVGLCCHIDEEHPVEAKNGVCPVCTKRVGLDIVGHITTQHANFFKVQRRRRLRKGGYGSPYLALKKELREANLQSFFGGFTRFTSSTNLDYDPLLSSFMFSSPSTKXVTPVVXGTSATKXSXKEXXKREIQEAXLSGEDQEKXKKSEFVRGLLLSTMLGVGDS

SEQ ID NO: 17282 - protein, 324 aa, Triticum aestivum
RAEFGTSFHTLCMALSVSLFFFLFAIPIFWPLLVPYMLYCMYSTSSTSGDLSHRSPFLRSLSVWDLFATYFPARLHRSQNLIATRKYIFGYHPHGIISMGAFAAFCTESLGFATLFPGIENTLLTLDSNFRIPIYRDYALAMGLASVSKESCENLLSKGGINNEGMGRAITIVIGGARESLNAQPGTLRLVLKRRKGFVKMAFRTGADLVPVLGFGENDLYDQVQPDEYPNIYRLQLLVKKLLGFTIPLFHARGIFNYDMGLMPYRRPMNIVVGRPILVEQNHDPGQEQIDHVHEQYVQELERIWNMWKNEYAPYRKEELVFVR

SEQ ID NO: 17283 - protein, 364 aa, Mesembryanthemum crystallinum
SDSGKDAGRLSAAWQMYKVQEELLKVSKKFGVKLTMFHGRGGTVGRGGGPTHLAILAQPAETIGGSLRVTIQGEVIEQSFGEQHLCFRTLQRYTAATLEHGMNPPKSPKPEWRALLGQMAVVATEEYRSIVFKEPRFVEYFRLATPETEYGRMNIGSRPSKRKPSGGIESLRAIPWIFAWTQTRFHLPVWLGVGGALKHVLEKDIRNHNMLRDMYNNFPFFRVTIDLLEMVFAKGDPEIAALYDKLLVSEELQSFGERLRANYEDTKRRLLEVAGHKDLLEGDPYLKQRLRLRDPYITTLNVCQAYTLKRIRDPDFKVTERPHLSKEIMDAHKAAAELVKLNPTSEYAPGLEDTLILTMKGIAA

SEQ ID NO: 17284 - protein, 622 aa, Prochlorococcus marinus str. MIT 9312
MCGITGIISFQSSIDPQNIHNMNETLMHRGPDHRDIWINEYSTVFLGHTRLSILDLSDNGNQPFHSKDGRFHLTFNGEIYNYKNLKDYLKTNGISNFKSNSDTEVLIELIALRGITNASKMLNGMFAFAVWDSLEKKIHLVRDRFGEKPLFYTLQKDTLYFGSEIKSILKIPTISKIINKEALSHYLRFNYIKNPLTIYKDIYKLEPGHILSIDQNITYKKYSYKNKNKKTIKLANQKEAEDLLQNQIIKSCLSRTISDVPIACFLSGGIDSSLVTSIIQRNSKQRIKTFTIGFDDQSIDESNYAEKIANFLGTDHTTINIEEKELLNNIDLQSEIYGEPFADQSSIATNILCKYASRDVKVCLSGDGGDEMFIGYDRYYKVNQLRLFLKAIKFYKKFKTIDRILEVLIHKIESNKNFSIKIDKIIKLISLLSDANDDNIYEKFNSLYRDQYFPLTPQNNQKHYIYKDLKNIQEMCEYDFETYLPDCILTKVDRASMHNSLEVRAPFLDHEIPEIIDSINPTYKKKLLNRKFILKKLLNKYLPKNIYERPKKGFSAPLNNWIKGPLKELTLDYLSIESLKKHNLLDIDIIERIKYEHYSGIRSWHNQIWNLLIFQQWYNKNF

SEQ ID NO: 17285 - protein, 244 aa, Buchnera aphidicola
YDTEFRHYAHVDCPGHADYIKNMITGAAQMDGAILVVAATDGPMPQTREHILLGRQVGVPYIIVFLNKCDMVDDEELLELVEMEVRDLLTQYDFPGDDTPIIRGSALKALEGDPEWESKIIDLSKFLDSYIPEPKRAVDQPFLLPIEDVFSISGRGTVVTGRVEKGVIKVGEEVEIVGIKKTTKTTCTGVEMFRKLLDEGRAGENVGVLLRGTKRDEIERGQVLAKPGSIHPHTTFESEVYVLS

SEQ ID NO: 17286 - protein, 119 aa, Zea mays
MARLAVAIAVVAAAAVVVLAATTSEAAISCGQVSSAIAPCLSYARGQGSAPSAGCCSGVRSLNSAARTTADRRAACNCLKNAARGISGLNAGNAASIPSKCGVSVPYTISTSTDCSRVS

SEQ ID NO: 17287 - protein, 453 aa, Mycobacterium sp. JLS
MTDLDLDLQALPLAPKNPLPYRQLLPLVRHFHTGQEVLRQAAGPVIRLKLGPKWMIPEIVVVTSPAGIRDVLGRNHASAERCRVHDEVRDLGGESLFVLPNDPWIPRRRALQPVFTKPSVRGFGGHMSRAAEMVGERWGQTAEVNLDEECRRLTMRSLGRSILGLDLDAKADVIAGPLPVAAGYAADRALKPVRAPRWLPTPQRRRANAAVATMKAVTNDILQACRADPTRDAPLVHALINASDPETGRSLSDDDICNELLVFMLAGHDTTATLLTYALWALGHHPDIQDRVAAEAYALGDRLPTPDDVGRLGYTVQVLNESLRLCPPAAGVGRLALRDVEVDGYRVEAGSLVGIGIYAVHRDPELWDRPLEFDPERFSPENVKDRDRWQFIPFAGGPRACIGQHFAMLEATLALATLIRSHEIRSIDDDFPLETPYTTVAAGPIWARVHRRT

SEQ ID NO: 17288 - protein, 244 aa, Buchnera aphidicola
YDTELRHYAHVDCPGHADYIKNMITGAAQMDGAILVVAATDGPMPQTREHILLGRQVGVPYIIVFLNKCDMVDDEELLELVEMEVRDLLTQYDFPGDDTPIIRGSALKALEGDSEWESKIIDLAKFLDSYIPEPKRAIDQPFLLPIEDVFSISGRGTVVTGRVEKGIIKVGEEVEIVGIHKTTKTTCTGVEMFRKLLDEGRAGENVGVLLRGTKRDEIERGQVLAKPGSIHPHTTFESEVYVLS

SEQ ID NO: 17289 - protein, 357 aa, Zea mays
MEGGAGASEKGKVLVTGASGFVGSWLVMKLLQAGYTVRATVRDPANVGKTKPLMDLPGATERLSIWKADLAEEGSFHDAIRGCTGVFHVATPMDFLSKDPENEVIKPTVEGMISIMRACKEAGTVRRIVFTSSAGTVNLEERQRPVYDEESWTDVDFCRRVKMTGWMYFVSKTLAEKAALAYAAEHGLDLVTIIPTLVVGPFISASMPPSLITALALITGNAPHYSILKQVQLIHLDDLCDAEIFLFENPAAAGRYVCSSHDVTIHGLAAMLRDRYPEYDVPQRFPGIQDDLQPVRFSSKKLQDLGFTFRYKTLEDMFDAAIRTCQEKGLIPLATAAGGDGFASVRAPGETEATIGA

SEQ ID NO: 17290 - protein, 244 aa, Buchnera aphidicola
YDTELRHYAHVDCPGHADYIKNMITGAAQMDGAILVVAATDGPMPQTREHILLGRQVGVPYIVVFLNKCDMVDDEELLELVEMEVRDLLTQYDFPGDDTPIIRGSALKALEGDSEWESKIIDLSKFLDSYIPEPKRAIDQPFLLPIEDVFSISGRGTVVTGRVEKGIIKVGEEVEIVGIKKTTRTTCTGVEMFRKLLDEGRAGENVGVLLRGTKRDEIERGQVLAKPGSIHPHTTFESEVYVLS

SEQ ID NO: 17291 - protein, 323 aa, Pyrococcus horikoshii OT3
MVKSVTDKIKFYEFEGGLSVFKKYGVPIREEDLEEIRKMDAILFGATTTPFDVPRYKSLIITLRKELDLYANLRIIPNFKLRKEIIIVRENSEGLYSGEGAYDSNKVVDFRIITRKGAERIAKFAVKLAKDRSTFLTFVHKANILESDRFFRKIVLDIARKEDVKVREEIVDSFTIKLVKDPWNLGIILSENMFGDILSDLATIHAGSIGIVPSGNYGEDIALFEPIHGSAPDIAGKGIANPIGAILSAAMMLDYLGLDGSIIWKAVGRYVRRGNLTPDMEGRATTLEVTNGIISEIYRLDEYEIDEVWRDEVRLGRILLEIS

SEQ ID NO: 17292 - protein, 572 aa, Triticum aestivum
  misc_feature (314)..(314): Xaa can be any naturally occurring amino acid
MGKSSKKSAAPTVVAPAAVLTKGKAGKKREADDEIKKAVSAKKQKAAPAKAVPGPKEAAKKAKKQPPPKKVESSSSEEQSSESEEEEVPKKTAKPVKHESSDDSSDDSSSDEEPAKKPSAKPVTPAASNGSKKGKPESSSSSSEDESDDDEKPAALVKKTPVIESDSSESDSDDSSDEDVPAKTPAAAAKKVDSSDSSESESESEDEEKSKKAAQATKIAPAAAKRKEEPSDSSDSDESDEEPPQKKLKDAAKVTPKSAKKDSTSDDDSSDESSDDEPKKKVTTASKSQKEEPKTPASNKGQATGSKTLWMGNXLSFNIEYDQVKQFFAQIGEVVDVRLATHEDGHPKGFGHVEFATAEDAQKALDSLNGGDLMGRPVRLDMAAERGATPRTRDGGSFGKPSGGPSLSVFVKGFDSSQQEDAIRSSLQEHFSKCGEITRVSVPMDYENGASKGIAYMDFTDESSFSKALELSGSDLGGCNLYVAEAKPKGQFGGVGGRSGGRDGGRSGGGRFGRSGGRDGGGRFGRSGGRDGGGRFGRSGGRDGGRGGGRGFQSRQSAGTASAGKKTTFGDD

SEQ ID NO: 17293 - protein, 204 aa, Brassica napus
LSNPKPVSSDLQHLTTIPTFDLGGRIFEDETKRKNVVQGIKEASEKWGFFQVINHGVPLDLLERMKDGVRGFHEQPPDVRKQYYGRDFSRTFRYSSNFDLFSSPAANWRDTFSCTIAPDPPKPEDLPEICRDVMLEYTKHVVNLGEFLFEMLSEALGLEPNHLNEMDCSKGLLMLNLYYPPCPQPDLTLGATQHSDNSFLTVLL

SEQ ID NO: 17294 - protein, 333 aa, Zygosaccharomyces rouxii
MVNVSVNGFGRIGRLVTRIAISRKDINLVAINDPFISTDYAAYMFKYDSTHGRFDGEVSHDKDHIILNGKKVAVFNEKDPAALPWGKLGVDVAIDSTGIFKEMDSANKHIEAGAKKVVITAPSGSAPMYVMGVNEETYTPDQKIVSNASCTTNCLAPLAKVIHNEFGIKEGLMTTVHSMTATQKTVDGPSHKDWRGGRTASGNIIPSSTGAAKAVGKVLPSLQGKLTGMAFRVPTVDVSVVDLTVNLAKETSYDEIKAALKKASEGSMKGILGYTEDDVVSSDFLGDAHSSIVDAAAGIQLTPTFVKLVSWYDNEFGYSTRVVDLVEHVAKSA

SEQ ID NO: 17295 - protein, 337 aa, Zymomonas mobilis
MAVKVAINGFGRIGRLAARAILSRPDSGLELVTINDLGSVEGNAFLFKRDSAHGTYPGTVTTEGNDMVIDGKKIVVTAERDPANLPHKKLGVDIVMECTGIFTNTEKASAHLTAGAKKVLISAPAKGDVDRTVVYGVNHKDLTADDKIVSNASCTTNCLAPVLHVLQQKIGIVRGLMTTVHSFTNDQRILDQIHSDLRRARTASASMIPTSTGAARAVALVIPELKGKLDGISIRVPTPDVSLVDFTFVPQRDTTAEEINSVLKAAADTGDMTGVLGYTDEPLVSRDFYSDPHSSTVDSRETAVLEGKLARVVAWYDNEWGFSNRMVDTAAQMAKTL

SEQ ID NO: 17296 - protein, 361 aa, Pyrococcus horikoshii OT3
MILDSTLREGEQTPGVNYSPEQRLRIALALDEIGVDFIEVGHPAVSKDVFIGIKLIASQDLNANLLAHSRALLEDIDYVIQADVEWVGIFFCLSNACLRKRFRMSLSQALERISKAIEYAKDHGLKVRFTPEDTTRTEWENLRRAIELAKELKVDRISVADTTGGTHPLRFYTLVKKVVNFGIPVNVHCHNDLGLALANAIMGIEGGATVVDATVNGLGERAGIVDLAQIVTVLYYHYGVKKYRLDKLYEISRMVSEITGIALQPNYPIVGENAFTHKAGLHVSAVLKDPRFYEFLPAEVFGRERTIYVDRFAGKDTIRYYLQKLGINDEEFVKVLLKRVKSSREPFTWDKFIEEVRRLKT

SEQ ID NO: 17297 - protein, 814 aa, Burkholderia pseudomallei K96243
MRKMKLVMVGNGMAGVRTLEELFKLAPDLYDVTVFGAEPHPNYNRILLSPVLAGEQTLEQIVLNDYAWYASHGVTLHVGKKIVKIDRMKRVVIADDGTEAAYDRLLLATGSNPFMLPVPGAQLDGVLGYRDIADTQAMIDAAARHTHAVVIGGGLLGLEAANGLKLRGMDVTVVHLAPTLLERQLDAKAGGLLRASLEARGLTFLMPKQTQALVGDEHGRVRAVHFKDGGECKADLVVMAVGIRPNTALAESAGLYCNRGIVVNDTMQTYDPRIYAVGECVSHRGIAYGLVAPLFEQAKVAANHLAQFGIGRYTGSVTSTKLKVTGIDLFSAGDFLGGDDTEDITLSDPIAGVYKKLVIKDDRIVGACLYGDTADGAWYFKLLREGRNIADIRETLMFGETSLGDTGHSGATRAMTMADDAEVCGCNGVCKGTIVSAIKEKGLFTLDDVRKHTKASASCGSCTGLVEQILMSTLGGDYSASPKAKPVCGCTDHTHAEVRAAIREHKLLSVPEAMRFLEWRTPNGCSSCRPALNYYCISTWPHDAKDDPQSRFINERAHANIQKDGTYSVVPRMWGGVTSADELRRIADVVDKYAIPTVKVTGGQRIDLLGVKKEDLPGVWRDLGMPSGHAYAKALRTVKTCVGSEWCRFGTQDSTLMGQQLERALWRMYAPHKVKLAVSGCPRNCAESGIKDVGVIGVDSGWEIYVGGNGGIKTEVAQFFCKVKTHEEVLEYAGAFLQLYREEGWYLERTVHYLERVGLDHVKARVLDDAENRRALWDRLQFALKDEPDPWHDTQDAKVDLRQFIPIAVAPADA

SEQ ID NO: 17298 - protein, 183 aa, Panax ginseng
MASSVISSATVAAVSRAVPAQASMVAPFTGLKSTAAFPVTRKVNDITSLPSNGGRVQCMKVWPPLGLKKFETLSYLPQLTQEQLSKEVDYLLRSGWVPCLEFELEHGFVYREHHHSPGYYDGRYWTMWKLPMFGCTDSSQVLKEVEECKKEYPNAYIRIIGFDNVRQVQCISFIAFKPPSAST

SEQ ID NO: 17299 - protein, 1454 aa, Arabidopsis thaliana
MAPSRKRGGGRAAAASSARREWKVGDLVLAKVKGFPAWPAVVDEPEKWGHSADSKKVTVHFFGTQQIAFCNHGDVESFTEEKKQSLLTRRHAKGSDFVRAVKEITESYEKLKQQDQASGPKYAEETTAGSSGNTSQLPQACENLIGSRLDTQIESSSSHGRDELTLLSEDASAAEQMLALRHNTLAHNGACDSAAAKDLCEIATYSSRRRNERVRALKYAPQSIILPVEHSKISSRLELDRVQRSMLQCSDGGPSVNSINGKAIRRRKRIRTSGQSESDDVVSSDLNLHGSDEDNASEIATVESNNNSRNEGNGVDSGSKVEYSDAVGEGCDGGHELNKGLDFHISTMVKRKKRKPTRKRETSDIIDPPAKVEAEGLGPNACDSCQRSQNSHERLNERPCEENGDEHLPLVKRARVRMSRAFYADEKVNASSQVEERSSKDTLLSAALQTSPSVNHENGIGSGHDTSAAEEFNSFELSAKLSGVMVDVVPSHMEKPSDRMSPSVACVQTVGDRQTAVNFHENEFTMTLDDEVTRAQSNQLSSLVETEARVPEVVQGCSEESQTGNCLISETDPIDIQCSHQSEKHETPLNPDIVDSSANKSPGLCSSLDMTTTVVPAQSPHQHKIQEYDSSDHSLVIVGDSLNGKCEKIDYCMTQVVQSQALEPPPPLFCSVVNYQEVENLQETENTLWKENQGSPGKELDSDKQAHMIQNPVLSATESEMIVDDAEPQYETVYSHCADAVENRELEKSCEVDEQKEQMQATNSISVSENFSREKLNSSPARGTPNCNSVCRISTAESENAMQNNSYYSTNVQYGENKSLNVDTVKEESKVETGTTQVKKVVSSDVQCTVESFETALDSLVRTKETIGRATRLAMDLAKFGVSAKAMEILAHTLESESNLQRRVDLFFLVDSIAQCSKGLNGDAGGVYLSSIQAMLPRLLTAAVPAGATTQENRKQCLKVLRLWLERRILPESIVRHHIRELDSLSNVPACLYSRRSARTERALDDPVRDMEGILVDEYGSNSTLQLHGFCIPPILRDEDEGSDSDGGDFESVTPEHESRSLEEHVTPSITERHTRILEDVDGELEMEDVAPPWEGGSSASAITDQADNRESANCLLVPGTSHQNVTSSSPPARPSQNAQLAMSNSYSNGFDYRRNPSMQGDYHAGPPRMNPPMHYGSPEPSYSSRTIGDIIRPLLMVHDIMTDTKDLINRAHTVGITVTQEGCRTIGGVILRVHITIDTLITISSIRKVLGRGGRGIKGEWETRDEEGQSFFCAIEIDREMGASSSSSVSEKSIHQFTVKDSSGKEVDLSVYQGKVLLVVNVASKCGFTESNYTQLTELYRKYKDQGFVVLAFPCNQFLSQEPGTSEEAHQFACTRFKAEYPVFQKVRVNGQNAAPVYKFLKSKKPSFLGSRIKWNFTKFLVGKDGQVIDRYGTTVSPLSIQKDIEKALAQEL

SEQ ID NO: 17300 - protein, 366 aa, Saccharomyces cerevisiae
MFSRLPTSLARNVARRAPTSFVRPSAAAAALRFSSTKTMTVREALNSAMAEELDRDDDVFLIGEEVAQYNGAYKVSKGLLDRFGERRVVDTPITEYGFTGLAVGAALKGLKPIVEFMSFNFSMQAIDHVVNSAAKTHYMSGGTQKCQMVFRGPNGAAVGVGAQHSQDFSPWYGSIPGLKVLVPYSAEDARGLLKAAIRDPNPVVFLENELLYGESFEISEEALSPEFTLPYKAKIEREGTDISIVTYTRNVQFSLEAAEILQKKYGVSAEVINLRSIRPLDTEAIIKTVKKTNHLITVESTFPSFGVGAEIVAQVMESEAFDYLDAPIQRVTGADVPTPYAKELEDFAFPDTPTIVKAVKEVLSIE

SEQ ID NO: 17301 - protein, 362 aa, Zygosaccharomyces rouxii
MSKNIVVLPGDHAGQEIAQEAIKVLEAISEVSPEAKFNFQHHLIGGAAIDATGSPLPDDALAAAKKADAVLLGAVGGPKWGTGSVRPEQGLLKIRKELQLYANLRPCNFASESLLDLSPLKPQHAKGTDFVVVRELVGGIYFGERKEDEGDGVAWDSEKYTKPEVQRLTRMAAFLALQHNPPLPIWSLDKANVLASSRLWRKTVEETIKNEFPQLKLNHQLIDSAAMILVKSPTQLNGIVLTSNLFGDIISDEASVIPGSLGLLPSASLASLPDTNEAFGLYEPCHGSAPDLPKGKVNPIAMILSAAMMLKLSLNLSKEGEAVEKAVKQVLDSGVRTGDLGGSNSTSEVGDAIAKAVKEILA

SEQ ID NO: 17302 - protein, 387 aa, Methanocaldococcus jannaschii
MNRNDYDVVIIGGGPVGCITGEYIKNGRVLIVEEHQSIGVPLQCAGLISKNGVKELGNPKGVVNKVRGAYIYSKNSMVKIGNEGIRAYIFERKVMDKDIAIRAAKKCDFLLKAYGKIEKDKNGYKVEITHLGEKITLNPKIIVGADGAKTITGKKLGLVNNKNREILSSCQFEMVNAEVDDDFVYIFLDRKYSERFFTWIIPMGKDRVRVGLIDRGNCYNKLIRFINENKIAKEILKNATITEFSTGSLPIGYLDKTFKDNVLLVGDAACHVKPLSGGGLYFGAMGGKIAGEVISKYLNEDIENLELYDKRWKETFGSEIKNGLRVRKLFLKLGNDTLDKIIEKLSKSDLIDYINKHGDMDRQASLSIKVLKSLDIGLGFRILRDLL

SEQ ID NO: 17303 - protein, 516 aa, Methanosarcina mazei Go1
MYTLKEGIDFYIEPMQSKKVTVFDTTLRDGEQTPGVSLTSTQKLEIAHQLDKLGVDIIEAGFPISSEGDKESVKSISNAGLDTTVCGLARVLKKDIDACFESDVGLVHTFVPTSDVQRIYTIKKSREEVIQLAVEAVQYIKDHGLKCMFSAMDATRTDPEYLIEVFKAVQEAGCDIINVPDTVGVMVPSAMYRQIKGIAAEITIPIDVHCHNDFGLAVANSLMAVEAGASQVQVTINGIGERAGNADLSQTVMSLTSIYGAKTNIRTEYLVETSKMVENYTGIRLPPNTPVVGQNAFSHESGIHSQGVLEKSDTFEPGIMTPEMVGHRRRIVLGKHTGKHAVKQSLESAGIKTNDNQLDEIVIRIKEIANKGKQITDADLYAVASAVLGKASSEEELIKLKEVSVMTGNILTPTAVVKADIEGKEIIAARTGVGPVDAALHAVRDILGESNHFRLQDFRIDAITGGADALADVYIGLENEKGRIVTARSANPDIVMASVEALVNAMNLLYKKENKS

SEQ ID NO: 17304 - protein, 299 aa, Bartonella henselae str. Houston-1
MNNIIDGKKLAEKIIMKVKAETTKLRNNYKIQPGIAVIIVGNDPASQVYVTSKSKKAEECGFFSIKHMISKETQEKELLHLIATLNSDPQIHGILVQLPLPDHINTNRITQAIAFQKDVDGFHYINIGKLAANALEDAIIPCTPAGAMMMIEQQCGQDLSGLDAVVVGRSNIVGKPMAALLTAANATVTIAHSRTRDLDDVCRSADILVTAIGRPQMIKKDWVKNGAIIIDVGINRIAAPEKGVGKTRLVGDVDFEEIKEKAAAITPVPGGVGPMTIAMLMVNTLKAAARLHNLPIPKF

SEQ ID NO: 17305 - protein, 502 aa, Oryza sativa
MAAANGGDSKGFEVPKLEIKFTKLFINGRFVDAVSGKTFETRDPRTGEVIAKIAEGDKADIDLAVKAAREAFDHGPWPRMSGFARGRILHKFADLVEQHVEELAALDTVDAGKLFAMGKLVDIPGGANLLRYYAGAADKVHGETLKMARPCHGYTLKEPVGVVGHIVPWNYPTTMFFFKASPALAAGCTMVVKPAEQTPLSALFYAHLAKLAGVPDGVLNVVPGFGPTAGAAISSHMDIDKVSFTGSTEVGRLVMEAAAKSNLKPVSLELGGKSPVIVFDDADLDTAVNLVHMASYTNKGEICVAGSRIYVQEGIYDAFVKKATEMAKKSVVGDPFNPRVHQGPQIDKEQYEKILKYIDIGKREGATLVTGGKPCGENGYYIEPTIFTDVKEEMSIAQEEIFGPVMALMKFKTVEEAIQKANSTRYGLAAGIVTKNIDVANTVSRSIRAGAIWINCYLGFDPDVPFGGYKMSGFGKDMGMDALEKYLHTKAVVTPLYNTPWL

SEQ ID NO: 17306 - protein, 723 aa, Oryza sativa
MEAAAMAKSLLLSSLLAVVAAEVVGTGLNPQYCPPSSCGHLGNISYPFRLEGDSRQCVATPRPWYNLSCNNGRAAIQINKGTYYVTSINYTGEEFWVVDATLQDDDTNGSSCPLPRSDHLPYTKNYWRLYSGKTSTDSYGAIDLYTVSRNWACFVNCFRAITDIMPRYRPVTCLLPNNSFVFVSFDDCAVGEFQPSCRYLAMIPFDGWHISDSQLQNASYTDIIGFIRKGVSVSFPIGPYQSNDISVTECLKVLFRLLLGSLVIFIFLAHKYWKTRITIDAVEKFLRMQQMIGPMRFAYTDIIAITSHFRDKLGQGGYGSVYKGVLLPGNLHIAVKMLTGSSSCNGDEFISEVSTIGRIHHVNVVRLVGFCTEEMRRALIYEYMPRGSLDKYIFSPEKSFSWDKLNEIALGIARGINYLHQGCEMQILHFDIKPHNILLDDNFVPKVADFGLAKLYPRDKSFVPVSAARGTVGYIAPEMISRSFGVISSKSDVYSFGMLLLEMAGGRRNADPNAANSLQAYYPSRVYRELTRRETSEISDIADMHELEKKLCIVGLWCIQMRSCDRPTMSEVIEMLEGGSDELQVPPRPFFCDDEQFPGVESYNMPSDLTAISEEHEDDDDESICLFESYHQTNARTAQEGATATFRVDCVGWNGTAHSNSTETDSDLGPVFHQIRLAHELVILTTHRAQQMHGHAKAHQQNEVSVAIELQFSNFIVECISGG

SEQ ID NO: 17307 - protein, 337 aa, Synechocystis sp. PCC 6803
MTRVAINGFGRIGRNFLRCWLGRTDSQLEVVGINDTSDPRTNAHLLRYDSMLGKLDADISADENSITVNGKTIKCVSDRNPLNLPWAEWNVDLVIEATGVFVTHEGATKHVQAGAKKVLITAPGKGPNIGTYVVGVNAHEYKHEEYEVISNASCTTNCLAPIAKVINDNFGIIKGTMTTTHSYTGDQRILDASHRDLRRARAAAVNIVPTSTGAAKAVALVIPELQGKLNGIALRVPTPNVSVVDLVVQVEKNTIAEQVNGVLKEAANTSLKGVLEYTDLELVSSDFRGTDCSSTVDGSLTMVMGGDMVKVIAWYDNEWGYSQRVVDLAEIVAKNWK

SEQ ID NO: 17308 - protein, 364 aa, Mesembryanthemum crystallinum
SDSGKDAGRLSAAWQLYKVQEELLKVSKKFGVKLTMFHGRGGTVGRGGGPTHLAILAQPAETIGGSLRVTIQGEVIEQSFGEQHLCFRTLQRYTAATLEHGMNPPKSPKPEWRALLDQMAVVATEEYRSIVFKEPRFVEYFRLATPETEYGRMNIGSRPSKRKPSGGIESLRAIPWIFAWTQTRFHLPVWLGVGGALKHVLEKDIRNHNMLRDMYNNFPFFRVTIDLLEMVFAKGDPEIAALYDKLLVSEELQSFGERLRANYEDTKRRLLEVAGHKDLLEGDPYLKQRLRLRDPYITTLNVCQAYTLKRIRDPDFKVTERPHLSKEIMDAHKAAAELVKLNPTSEYAPGLGDTLILTMKGIAA

SEQ ID NO: 17309 - protein, 366 aa, Mesembryanthemum crystallinum
SDSGKDAGRLSAAWQLYKAQEELIEVAKQHGVKLTMFRGRGGTVGRGGGPTHLAILSQPADTIQGSLRVTIQGEVIERSFGEAQLCFKTLQRYTAATLEQGMIPPLTPKQEWRALMDEMAVVATERYRSIVFREPRFVEYFRLATPELEYGRMNIGSRPSKRKPSGGIESLRAIPWIFAWTQTRFHLPVWLGFGGAFKHVIKKDIRNHSVLREMYNDWPFFRVTIDLLEMVFAKGDPGIAALYDKLLVSDDLQSFGERLRANYEDTKRRLLEVAGHKDLLEGDPFLKQRLKLRTAYITTLNVCQQAYTLKRIRDPSYRVPVRPPIAKEIMEGSVSSANQLVKLNPTSEYAPGLEDTLILTMKGIAA

SEQ ID NO: 17310 - protein, 657 aa, Aspergillus nidulans FGSC A4
MSDKLTRIAIVSTDKCKPKKCRQECKKSCPVVRTGKLCIEVTPESKIAFISERLCIGCGICPKKCPFGAIHIINLPTNLESQVTHRYSANSFKLHRLPMPRPGQVLGLVGTNGIGKSTALKILSGKLKPNLGRYDNPPDWEEILRYFRDYFTKVLEDDLKAVVKPQYVDQIPRAVKGPTKNVGDLIKARAQLDNMEATLDNLELRQVQNRDIDHLSGGELQRFAIGLVCVQKADVYMFDEPSSYLDVKQRLAAARSIRDLLRPDDYVIVVEHDLSVLDYLSDFICVLYGKPAVYGVVTLPSSVREGINIFLDGHIPTENLRFREESLTFRLAEAGDDFVIDKARAFRYPTMEKTLGNFHLKIDAGDFTDSEIIVMMGENGTGKTTFCKMLAGAEKPDGNVSIPRMNISMKPQKITPKFQGTVRQLFFKKIKAAFLSPQFQTDVYKPLKIDDFIDQEVQNLSGGELQRVAIVLALGMPADIYLIDEPSAYLDSEQRIVAAKVIKRFIMHTKKTAFIVEHDFIMATYLADRVIVFDGKPSVDAHANAPESLVTGCNSFLRSLDVTFRRDPNSYRPRINKYNSQMDQEQKLSGNFVILPRGREMKRASQRDMTHQRLGYDDVPGAVLSFSAMRRERPRRMTKRARLQRQAWFDLKQECGS

SEQ ID NO: 17311 - protein, 364 aa, Mesembryanthemum crystallinum
SDSGKDAGRLSAAWQLYKAQEDLIKVAKQFGVKLTMFHGRGGTVGRGGGPTHLAILSQPPDTIHGSLRVTVQGEVIEQSFGEEHLCFRTLQRFTAATLEHGMHPPDSPKPEWRALLDEMAVVATEEYRSVVFKEPRFVEYFRLATPELEYGRMNIGSRPSKRKPSGGIESLRAIPWIFAWTQTRFHLPVWLGFGAAFKHIIKKDIRNLHMLQEMYNAWPFFRVTIDLVEMVFAKGDPGITALYDKLLVSEDLWAFGENLRTNCEETKKLLLQIAGHKDLLEGDLYLKQRLRLRDSYITTLNVCQAFTLKRIRDPSYNVKFRPHISKEIMETSKSANELLILNPSSEYAPGLEDTLILTMKGIAA

SEQ ID NO: 17312 - protein, 343 aa, Astragalus sinicus
MGCNKQLYYISLALLMCLGLWAVQVTSRTLQDASMYERHQQWMGQYAKIYNDHQEWEKRFQIFKENVNYIETSNKEGGRFYKLGVNQFVDLTNEEFIAPRNRFKGHMCSSIIRTNTYKYENVTTVPSNVDWRQKGAVTPVKDQGQCGCCWAFSAVAATEGIHQLSTGKLISLSEQELVDCDTKGVDQGCEGGLMDDAFKFIIQNHGLDTEAKYPYQGVDGTCNANEASINAATITSYEDVPTNNEQALQKAVANQPISVAIDASGSDFQFYTSGVFTGSCGTELDHGVTAVGYGVSDDGTKYWLVKNSWGTSWGEEGYIRMQRGVDAVEGLCGIAMQASYPIA

SEQ ID NO: 17313 - protein, 244 aa, Buchnera aphidicola
YDTEFRHYAHVDCPGHADYMKNMITGAAQMDGAILVVAATDGPMPQTREHILLGRQVGVPYIIVFLNKCDMVDDEELLELVEMEVRDLLTQYDFPGDDTPIIRGSALKALEGDPEWESKIIDLSKFLDSYIPEPKRAVDQPFLLPIEDVFSISGRGTVVTGRVEKGIIKVGEEVEIVGIKKTTKTTCTGVEMFRKLLDEGRAGENVGVLLRGTKRDEIERGQVLAKPGSIHPHTTFESEVYVLS

SEQ ID NO: 17314 - protein, 346 aa, Pyrococcus horikoshii OT3
MNLRGKMIVIKFGGSSLRSEFKSAVSLIKALSEEKDVVVVVSALKGITDLLEKYTDTFDSRYAVEVSKTYLEFGKRMGIDTSSLSPYLKQLFNPPDLPPQALRDYILSIGELLSAAMIAEKANGAVIFPWDLFVAHGSFGNGFIDIKKSKRNVKLVKEALESGKIPIIPGFIANLNGYRVTLGRGGSDYSAVALGVLLNSELVAIMSDVEGIFTADPKMIPYSLLIPYMSYDEILIASKYGMEAIQWKAAKLAKEYEALILFGRASDWRMGTVVSNSSSHMPLLSYDQGKLLVMNMDSEIPYEVVEEGEFWRVYRVPKRDSIKIIKELHRKIIYQENAQLLGRVKA

SEQ ID NO: 17315 - protein, 244 aa, Arabidopsis lyrata
MSFSPVSPSQFPSVTKLQVDSVTFDPSVKSPASSNPLFLGGAGVRGLDIQGKFVIFTVIGVYLESNAVPSLSVKWKGKTTEELSESVPFFREIVTGAFEKFIKVTMKLPLTGQQYSEKVTENCVAIWKSLGIYTDCEAKAVEKFLEIFKEETFPPGSSILFALSPTGSLTVAFSRDDSIPETGIAVIENKLLAEAVLESIIGKNGVSPGTRLSIAERLAKLMTKNKVEEDASNHSIDEKLAKEN

SEQ ID NO: 17316 - protein, 209 aa, Medicago truncatula
MDISSSHRKRTLLKVIVLGDSGVGKTSLMNQYVYKKFSQQYKATIGADFVTKELLVDDKLVTLQIWDTAGQERFHSLGAAFYRGADCCVLVYDVNIHKTFDTLNNWHDDFLKQADTGNPDAFPFVLLGNKVDVDGGNSRRVTEKKAREWCASRGSIPYFETSAKEGYNVDDAFLCVAKVASENDHDLDIYFRGISETPSEAEQRSNCAC

SEQ ID NO: 17317 - protein, 244 aa, Medicago truncatula
MALASRLASKSKLLYGSQILLQREFAVPVRHFAKGSEGSDLPALKGDEMLKKIYLEVKNKFETSIGILRKEKITIAPEDPAAVSQYAKVMKTIREKANLLSVAQDVKADIDIETQDIPDARTYLLTLKEIRTKRGLTDDLGAEALMFDALEKIEKDLKKPLLRNDKKGMDLLLAEFDKINNKLGIRKEELPKHEEQLELKIAKAQLEELKKDAVEAMETQKKREEFKDEPAAVDVKTLDIRNFL

SEQ ID NO: 17318 - protein, 312 aa, Arabidopsis thaliana
MWFFGSKGASGFSSRSTAEEVTHGVDGTGLTAIVTGASSGIGVETARVLSLRGVHVVMAVRNTDSGAKVKEDIVKQVPGAKLDVMELDLSSMQSVRKFASEYKSTGLPLNLLINNAGIMACPFMLSKDNIELQFATNHLDTMKSTSRESKREGRIVNLSSEAHRFSYPEGVRFDKINDKSSYSSMRAYGQSKLCNVLHANELTKQLKEDGVNITANSLHPGAIMTNLGRYFNPYLAVAVGAVAKYILKSVPQGAATTCYVALNPQVAGVSGEYFQDSNIAKPLPLVKDTELAKKVWDFSTKLTDSQSGESSS

SEQ ID NO: 17319 - protein, 335 aa, Streptococcus pneumoniae TIGR4
MKRIAVLTSGGDAPGMNAAIRAVVRQAISEGMEVFGIYDGYAGMVAGEIHPLDAASVGDIISRGGTFLHSARYPEFAQLEGQLKGIEQLKKHGIEGVVVIGGDGSYHGAMRLTEHGFPAIGLPGTIDNDIVGTDFTIGFDTAVTTAMDAIDKIRDTSSSHRRTFVIEVMGRNAGDIALWAGIATGADEIIIPEAGFKMEDIVASIKAGYECGKKHNIIVLAEGVMSAAEFGQKLKEAGDTSDLRVTELGHIQRGGSPTARDRVLASRMGAHAVKLLKEGIGGVAVGIRNEKMVENPILGTAEEGALFSLTAEGKIVVNNPHKADIELSSLNKSLS

SEQ ID NO: 17320 - protein, 296 aa, Candidatus Blochmannia floridanus
MNTKIIDGTYIAERIKKDITQKVYADMNMGKRAPGLAMLLIGNNPISKIYIAHKKKVCKQVGFKSFLYNLPITATKTELLQLINILNNDKNIDGILIQLPLPDKLNDIKILEHIIPDKDVDGFHPYNVGRLCQRSPMLRPCTSRGIMTLLKWYNINTFVLNAVIIGASNIVGRPMLMELLLAGCTVSITHRFTQNLQVYVKNADLLIVAVGKANFLPSSWIKPGAIVIDVGINRLKNGNIVGDVHFPSAYKRAAYITPVPGGVGPMTVISLIQNTLQAYHAHVCCDSKKKIHFKKF

SEQ ID NO: 17321 - protein, 170 aa, Glycine max
MAHTKVDMGLVLVVMAMLCAGAAAQSQSSCTNVLVSLSPCLNYITGNSSTPSSGCCSQLASVVRSQPQCLCQVLSGGGSSLGININQTQALALPVACKVQTPPTSQCNNAAASPPTGTVAESPNSAPSGTGGSKNLPTTDNGSSSGNSIKLSIPLILILAATYVSTFTTY

SEQ ID NO: 17322 - protein, 355 aa, Burkholderia thailandensis E264
MRFDLEPPSHASAAHRVAVLLVNLGTPDEPTPRAVRRYLAQFLSDPRVVEIPQLVWQVILRTLILPLRGRASAKKYAAVWLPEGSPLRVYTERQVESLKPLFAANGYRVIVDYAMRYGTPSIADVLAQLKRAGAERVLLLPMYPQYSASTTATAFDAAFAALGRMRNQPEVRTVRHYADHPAYIHALAEQVRQYWAAHGRPAFDSGDKLVLSFHGVPKRTLDLGDPYHDQCQQTAALLMSALGLTTFECRVTFQSRFGKAEWLQPYTAPTLKELGAAGVRRADVFCPGFTADCLETIEEIGMEVRDEFLHGGGKEFHRIPCLNASHAWIAALGEIAAENLQGWPVRVATAPEAVT

SEQ ID NO: 17323 - protein, 350 aa, Oryza sativa
MARLLLPLPIAAAAASRLRLPVLSSSVARREALLFGGRVAAARAPVRLARRGVSAGAEAGGSSSAAAAAQVIGQDEAVEWVKKDRRRMLHVVYRVGDLDKTIKFYTECLGMKLLRKRDIPEERYTNAFLGYGPEDSHFVVELTYNYGVESYDIGTAFGHFGIAVEDVAKTVDLIKAKGGTVTREPGPVKGGKSVIAFIEDPDGYKFELIERGPTPEPLCQVMLRVGDLDHAINFYEKAFGMELLRKRDNPQYKYTIAMMGYGPEDKNAVLELTYNYGVKEYDKGNAYAQIAISTDDVYKTAEVIRQNGGQITREPGPLPGINTKITACTDPDGWKTVFVDNVDFLKELEE

SEQ ID NO: 17324 - protein, 250 aa, Gibberella zeae PH-1
MAPFTEPTAEISLLAKSDGSATFSYGGYAVIAAVNGPVEAQRRDENAFEALVDVIVRPAAGVGGTRERQLESIMQAALRQLIPVRDYPRSVIQITLQVAETPENAYVNAKIVQAQLNLPIIPALLHSAILGLLSAAIPLKTIGAATLIAVPEEEGKDIIVDPSAVDIDRAKSVHALAFTSHDELLLSESEGAFTPDEWTKVLQLGQRVCCEHQQPGLDTAMSGDDIESPSMRQFIRSAMGTKVAEDLYWK

SEQ ID NO: 17325 - protein, 591 aa, Zea mays
MGTRPRGVVLAPWAVVLVLVLVLALRLAGASHVIHRSLEAEVPPSVPASIVSPLLRTGYHFQPPMNWINDPNAPLYYKGWYHLFYQYNPKGAVWGNIVWAHSVSRDLINWVALEAAIYPSIPSDKYGCWSGSATILEDGTPAILYTGIDRPDINYQVQVLALPKDASDPLLREWEKPEEYNPVATPAAGINATQFRDPTTAWRHAGAGHWRMLVGSVRGARGMALVYRSRDFRTWTKAKHPLHSAALTGMWECPDFFPVSGPGLQAGLDTSAPGTKYVLKSSLDLTRYDYYTIGSYDGGKDRYYPDDPAGDYRRRLRYDYGNYYASKTFYDPVERRRVLLGWANESDSVPDDKAKGWAGIHAIPRKIWLDPTGKQLLQWPIHEVEKLRGKAVSVDAKLVKPGDHFEVTGIATYQADVEVSFELEAGTSLLEKAEAFDPAYDDDAQKLCGVKGADARGGVGPFGLWVLASADLQERTAVFFRVFRDGHGKPKVLMCTDPTKSSLSPDLYKPTLAGLVDADISSGKITLRSLIDRSVVESFGAGGKTCILSRVYPSIAVGKDAHLYVFNNGEVDVTVSGLTAWEMKKPLMNGA

SEQ ID NO: 17326 - protein, 269 aa, Oryza sativa
  misc_feature (104)..(104): Xaa can be any naturally occurring amino acid
HGEPPLQPLLPSRLPLLLSSPLPSTQPHAAHGSASHMASTTAAAARFTCLAPATRPASASAGRFLLPAQHWGAATAHGSSAAVPVPVVAAAPSRRWAPGVAYAXTAATGKSVHDFTVKDIDGKDVALSKFKGRALLIVNVASQCGLTTANYTELSHLYEKYKTQGFEILAFPCNQFGAQEPGSNPQIKQFACTRFKAEFPIFDKVDVNGPNTAPIYKFLKSSAGGFLGDLVKWNFEKFLVDKTGKVVERYPPTTSPFQIEKDIQKLLAA

SEQ ID NO: 17327 - protein, 318 aa, Heliobacterium chlorum
NGFGRIGRQSFKAMLEYYPEEFEIVAINDLTDAQTLAHLLRYDSTYGAFDGEVTVTEKAIVVEQDDIRYELLTLAERDPAALPWKELGVDIVIESTGRFTDAEKAKAHLAAGAKKVIITAPAKGEDITICLGVNDAKYDHEKHHIISNASCTTNCLAPVAKVLNDRFGIERGLMTTIHSYTMDQNLQDNVHKDLRRARAAAINMVPTTTGAAKAVALVIPELKGKFHGYAVRVPTPTVSMVDFSVLLSTKTSVEEINQAFIEASESEELEGILGVSHDPLVSTDFIGTTYSSVVDLPLTMSMGDDFFKIVAWYDNEWG

SEQ ID NO: 17328 - protein, 439 aa, Staphylococcus epidermidis RP62A
MDIKMPKLGESVHEGTIEQWLVSVGDHVDEYEPLCEVITDKVTAEVPSTISGTITELVVEEGQTVNINTVICKIDSENGQNQTESANEFKEEQNQHSQSNINVSQFENNPKTHESEVHTASSRANNNGRFSPVVFKLASEHDIDLTQVKGTGFEGRVTKKDIQNIINNPNDQEKEKEFKQTDKKDHSTNHCDFLHQSSTKNEHSPLSNERVVPVKGIRKAIAQNMVTSVSEIPHGWMMVEADATNLVQTRNYHKAQFKQNEGYNLTFFAFFVKAVAEALKVNPLLNSTWQGDEIVIHKDINISIAVADDDKLYVPVIKNADEKSIKGIAREINDLATKARLGKLAQSDMQNGTFTVNNTGSFGSVSSMGIINHPQAAILQVESVVKKPVVIDDMIAIRNMVNLCISIDHRILDGVQTGKFMNLVKKKIEQYSIENTSIY

SEQ ID NO: 17329 - protein, 188 aa, Arabidopsis thaliana
MMSDEEHHFESSDAGASKTYPQQAGNIRKGGHIVIKGRPCKVVEVSTSKTGKHGHAKCHFVAIDIFTAKKLEDIVPSSHNCDVPHVNRVDYQLIDISEDGFVSLLTDSGGPKDDLMLPTDDGLSALMRRGFDEGKDIVVSVMSPMGEEHICAVKEVGGGNGTSIIRYIITSLTTDVNVIRTQRCFSFS

SEQ ID NO: 17330 - protein, 245 aa, Arabidopsis thaliana
MARLPKLREFAAENNLKVVSIADLIRYRRKRDKLVERASAARIPTMWGPFTAYCYRSILDGIEHIAMVKGEIGDGQDILVRVHSECLTGDIFGSARCDCGNQLALSMQQIEATGRGVLVYLRGHEGRGIGLGHKLRAYNLQDAGRDTVEANEELGLPVDSREYGIGAQIIRDLGVRTMKLMTNNPAKYVGLKGYGLAIVGRVPLLSLITKENKRYLETKRTKMGHMYGLKFKGDVVEKIESESES

SEQ ID NO: 17331 - protein, 112 aa, Rhodobacter capsulatus
MKKVEAIIKPFKLDEVKEALQEAGIQGLSVIEVKGFGRQKGHTELYRGAEYVVDFLPKVKIEMVLPDEMVDIAIEAIVGAARTEKIGDGKIFVSSIEQAIRIRTGETGEDAV

SEQ ID NO: 17332 - protein, 493 aa, Methanosarcina mazei Go1
MKSMGSNSGAKGTEGGSSRTEGEIQENISENASSNSRTEKEFAKVVIIGGGACGMATATKIRRQSDFDITVLSWDSHTAYSHCGIPFVLGKEIESLKKLIVKPLAFFRENKINVKLNEKVTSIDLNGQVVITGEGTYPFDRLVIATGSLPFIPRESRANILPYGIFTLRSLADGMLFEKALETARTVCIIGGGTIGIECASALTKRGIRTTLITRGNDLLTRQFDSDMSAIVREHLESLGVEVITGESVILPENFWKQKTLILRDRQLPADLVLLATGVKPETWLSRETGITIGKAGGIIVNEMLQVKAGEKFLSHVYAGGECAEVIDLITGESRLSQLGTTARSMADVIGNNITGKHSTFGPLADPWVAVAGDLQFGGVGLTSGQAEKQGIKTVTGFSRGRTRASYYPGRKDLYIKLLFKNNCLAGAQLAGGEGIKERIDALSLAIRKEATIKDLLNLETCYAPPVSTLVDPLTPAVKAAARNMRKIKGKGN

SEQ ID NO: 17333 - protein, 313 aa, Glycine max
MWLFGRKGASGFSSSSTAEQVTEGIDGTGFTAIVTGASSGIGTETTRVLALRGVHVIMGVRNMLAAKDVKETILKEIPSAKVDAMELDLSSMKSVRKFASEFKSSGLPLNILINNAGIMACPFSLSKDKIELQFATNHIGHFLLTNLLLDTIKKTSRESKKEGRIVNVSSEAHRFAYSEGICFDKINDESSYNNWRAYGQSKLANILHANELTRRLKEDGVDISANSLHPGTITTNLFRHNSAVNGLINVIGRLVLKNVQQGAATTCYVALHPQVKGISGKYFSDSNLAKTTAQGTDSDLAKKLWDFSMDLTK

SEQ ID NO: 17334 - protein, 384 aa, Zea mays
MLAARSFASPARQCLRQANRSRWAPALSQVSARTYASEVAKFHGTKGSDGKYCVTLIEGDGIGPEIAQSVKDIYSAANVPIKWESVDVTPRLNEEGKTVISDESIASVKKNLVALKGPLATPIGKGHVSLNLTLRRTFNLFANVRPCRSIAGYKTPYDDVDTVLIRENTEGEYSGIEHIVVDGVVQSIKLITREASERVLRYAFQHARDIGRKKVRAVHKATIMKMSDGLFLSTAREIAKDFPDIEFDAELLDNTCLKMVTDPVPYNDKVLVMPNLYGDILSDMCAGLIGGLGLTPSGNIGDNCSIFEAVHGSAPDIAGKQLANPTALLLSSIMMLRHMGLNSEAANIEQAIFKVLAEGKTITGDLGGKAKTFEYADAVIKALK

SEQ ID NO: 17335 - protein, 365 aa, Triticum aestivum
  misc_feature (31)..(31): Xaa can be any naturally occurring amino acid
TFSYSILSDPHKRRQYDTSGFEAIETDSQEXLELDLSSLNTVNTMFAAIFSKLGVPLKTTVSATVLEEALNGSIVVSQLQLGNSVRKKVEKQTAHFYSIDITEQEAKKGLVCRVHSTEKSKFKLLYFELEENGGLSLALQEDSVKSSKVSSAGMYFLGFPVYRFEQNNSAPAAKDPDSAFFKRLDSFQPCDINELKPGTHFFAVYGDNFFKSATYTIEIVCAESFPTEKEKLQSVEAKILTKRAELSKFETEYREVLAKFTEMTSKYTQEMQMIDELLNERNVIHASYTNNPPLKRTSSRNKSKSSPSFKYDEEKNQRKEKKVKDQHMEACGSEDDDSSDKKTKERFPRKRWLNIPFKVDRRKPC

SEQ ID NO: 17336 - protein, 319 aa, Picrophilus torridus DSM 9790
MITLVGGTFNCIHIGHKRLLRTAISFKDDLIIGLTSDDYTRKNKSYKIPYEKRKMELERFISKYTERFIIRPIDSPYGSTLEVNEPARIVVSPETYLNALKINERRAELGLMPINIVRVPFVLAEDLFPVSSTRILNNEITKTGKRKKTIKISISTGNDVKERALKVFLSNHMKNFRVTRNSDYKLEAEQPFGSDTERFAVERALSGLKDNDYSVGVESGLYYNKINDRYYDVHFCAVIDRYGRITTGYSRGFEIPYKIVDYIKSGVSAPYEKYTGIENIGKKNGIIGEITFNKIRRFDLIYDSIEMAFAPRINPSIYI

SEQ ID NO: 17337 - protein, 264 aa, Magnaporthe grisea 70-15
MAAATERPFVLPGEAIDPSLIPTHPKRPLRLGPGLRHIPPDEIVPTVAGKLVVNPAKPSLSLDYNGGRYVPEPNDLVIGQVHHSSADFHFVTLAPHTTNALLPVLAFEGATRKTRPVLPAGSLVYARVASASRHMDAELECFSQTTGKADGLGPLNPPAAAAPGAGAVAAAAPTGTVFNVSLGMARRLLMPQAERDAGLVVLDALAAEGLAFETAVGRNGKVWVASESVPTLVLVGRALAEVDEKGLDMDAQRRLVKKLVREMS

SEQ ID NO: 17338 - protein, 410 aa, Bifidobacterium adolescentis
MVSEIAQTDNFNDKTNIKVVGVGGAGGNAVNRMIAEGLQSVEFIAINTDAKDLLRSDADVKISLNDASSRGLGAGADPEKGAKAAQDHQSDIEEALKGSDMVFVTCGEGGGTGTGASPIVARAAHQQGALTIAVVTRPFSFEGPQRSASAALGIENLRKEVDALIVIPNDRLLELSDRTIGIVDAFKTADTALLAGVQGITDLITSNSYIHVDFNDVNAILRGAGTALFGIGSARGEDRATQAAEIAISSPLLEESIEGAHGALINIAGPTDLKLQEAAAAVALVQKAIHPEAQIIWGLSLDDAYGDEVRVTVIAAGFDANSKKPDQPAEEKPAAAKGNTVPLSALSAGVQAPAQQPQPVQTPAVPQVQPLSSYIPSTPDQNVASFDQTTEHEVVSANDPGDLDIPDFLR

SEQ ID NO: 17339 - protein, 338 aa, uncultured bacterium 443
MTVAYPFTAIVGQDDMKLALSIAAVDPSIGGVLVFGERGTGKSTTIRALAQLLPKIAAVKDCPYQCDPQAPSKSLCAQCQKTTPLKSHKIAIPVVDLPLGATEDRVLGALDIEKAIHNGEKAFQPGLLAAANRGFLYIDEVNLLEDHIVDALLDVAASGINVVEREGLSVRHPARFVLVGSGNPEEGELRPQLLDRFGLSLDVRTPRDIPTRVEIIKLRDAFDHDPEGFSKRFSRKEGALRRKIDTARAAVDAVDIPTEILEKAASLCLELGTDGLRGELTLIRSARALAALKGQDVATLQHLKQVALFVLRHRLRRDPMDESSADARVERAIATSLS

SEQ ID NO: 17340 - protein, 593 aa, uncultured bacterium 443
MSNAQSQPHSPEPNGAGLWRDADLAAALIAVLGHAGGGVRVVAQPGPVRDFWLENLNSRIDQSPRRVPGATPTERLIGGMDITESMRLGKPVLAQGVFAECHNRHIVLPMAERLPKEFTGHWCAAMDTGTVKVARDGLSQTSNAMITVIALDEGIDEETPPAALLERLSLSINLDEISIRCVDEPLFSKGDIKHAQERMDTVALDDKTLLLLTQLAASMGIHSIRVLRFAVIACKALTLLLETSETDDAVIHPIIRLIFLPRATHIPAPPEEPEPPEDTPPLPEESQQPDSAQQQGEHQEADETVQSAIAELPTDLLATLLKRAERSRMRQNKAGNSGQIAQDKHRGRPIGVRRGELKRGHRIDIPATLRAAAPFQAVRARWDTSNHQQASLYIDPQDIRVKRFEQRKSSVMIFAVDASGSSAHQRMAEAKGAIELLLADCYSHRTEVALISFKGESADLLLPPTRSLVRAKRTLAQLPGGGGTPMAAALQTIYDVATTVEAMGATPTYVLLTDGASNVARDGTKSRTAGTEDALRVAKKVAATRYRGVLVDTAVRPSPRARELSNALDATYLPLPNASAQSINASIRALNEE

SEQ ID NO: 17341 - protein, 188 aa, Neottopteris nidus
NAVNRMIGSGLQGVEFWAINTDAQALVQSTASQRLQIGKQITRGLGTGGKPELGEQAAEESREAIQEAAANADLVFITAGMGGGTGSGAAPVVARMSKEAGHLTVGVVTYPFNFEGRRRAVQALEAIERLQKSVDTLIVIPNDRLLDVAQEQTLLQEAFLLADDVLRQGVQGISDIITVPGLVNVDFA

SEQ ID NO: 17342 - protein, 555 aa, Mycoplasma penetrans HF-2
MKIFQEKNPSSMHANVNPLSKAWLESNRISNKYKELILKMNEEEIDKYFSYSKLSFGTAGIRATMGPGTNQINVFTYQQMSEGVARWLLNKKSNPTVIVAHDNRMNADYYAMVIAKTLTSFGIKVFLYKENQIKATPIISYSVRETGVDAAIIATASHNPKNYLGFKVYNHTGGQILDSEANEIVSSMPECQTIIDNVYTPNMDLISYFDDTITESYFEASYRCLINTNIYRQKNFPVILTTHHGTASYDLPYLLKSIGYENIILAAQQCVPDPNFTYSANFNPEDKASFDLSLKYAEKYRANIMLGVDPDSDRLAVVVRHKNKWHYLTGNQMGIIFTHYVLTNKKFDKTPFVVSTFVSTNYIDRIAEKYNAKVFRTPTGFKWVGNEMNKHIDKMDFVVGFEEAIGSLNSDIGRDKDGFQAAALALEVYTMLYDQEKTLVDYLDEIFEEFGAWTGETVSYKIESLNWKEEMQEKMDKFANVKNKDILGLEIKGIRWNEPAQALEWYLENDMWVKFRLSGTEPKFKIYYEIYGETKEICDQILKALKDEFEYMLRS

SEQ ID NO: 17343 - protein, 318 aa, Zea mays
MATEEWELREEDAYAYEFEFDLENPFTSPADEPIASLLDAEGHHAPSISAAASATRRAAAPVRFGGELAVHPRVAYLALNYVDRFLSKRQLAVRTRHSRAMGLLSVKCEQQPWAPRLLAISCLSLAAKMQRVATFSTADIQRDEDFMFDAVTIRRMERVVLGALEWRARSVTPLAFLGFFLSACYPPPQHPPQVAAVKARAVDLLLHAQPEVKMAEFSPSVVAAAALLAAAGEVAAANLHAFQASLAACPFVNSEKLRECGEVLAAAGGVGRGRAAPSADTPVTVLGHQRSASSASETDWINGGDAKKRCMGPPSQWG

SEQ ID NO: 17344 - protein, 145 aa, Rhodopseudomonas palustris CGA009
MSDHLVVCTHCGGVNRLPEQRPALDGKCGKCGHRLFEGHPADVSAELFDKQVSRSSVPVLVDVWAPWCGPCRAMAPAYEQAARELEPNVRLIKLNSDNEQQVAGRLGIQGIPTMILFDNGRERARTSGAMPAGEIVRWVRQHLPA

SEQ ID NO: 17345 - protein, 501 aa, Beta vulgaris subsp. vulgaris
  misc_feature (382)..(382): Xaa can be any naturally occurring amino acid
LFYQYNPNGVIWGPPVWGHSTSKDLVNWVPQPLTMEPEMAANINGSWSGSATILPGNKPAILFTGLDPKYEQVQVLAYPKDTSDPNLKEWFLAPQNPVMFPTPQNQINATSFRDPTTAWRLPDGVWRLLIGSKRGQRGLSLLFRSRDFVHWVQAKHPLYSDKLSGMWECPDFFPVYANGDQMGVDTSIIGSHVKHVLKNSLDITKHDIYTIGDYNIKKDAYTPDIGYMNDSSLRYDYGKYYASKTFFDDAKKERILLGWANESSSVEDDIKKGWSGIHTIPRKIWLDKLGKQLIQWPIANIEKLRQKPVNIYRKVLKGGSQIEVSGITAAQADVEISFKIKDLKNVEKFDASWTSPQLLCSKKGASVKGGLGPFGLLTLASXGLEEYTAVFFRIFKAYDNKFVVLMCSDQSRSSLNPTNDKTTYGTFVDVNPIREGLSLRVLIDHSVVESFGAKGKNVITARVYPTLAINEKAHLYVFNRGTSNVEITGLTAWSMKKANIA

SEQ ID NO: 17346 - protein, 423 aa, Zymomonas mobilis subsp. mobilis ZM4
MARIVMKFGGTSVAGLERIRNVARRVQKEVEDGNEVAVVVSAMSGETDRLVGFCREAAPLYDPAEYDAVVSSGEQVTSGLLAIVLKSMGVKARSWFGWQIPIHTTDAYANSRIESIDTERLIKAMSSKEVAVVAGFQGVSDEGRVTTLGRGGSDTSAVALAAALDADRCDIYTDVDGVYTTDPRIVSRARRLDRVTYEEMLELASVGAKVLQTRSVGLAMKAKTRLRVLSSFGDPDLSPEGGTLIVSEDEIKENTMERQIITGIAYDKSEAKVTLTGVPDKPGAVAQIFSLLADANIHVDMIVQIAYEGHITDVTFTVPKAQLSQVLDILEKGKEKIGFQKALKNDNVCKVSIVGVGMRSHPGVAATMFDALAKRGINILAITTSEIKVSVLIDDAYTELAVRVLHTAYGLDADNKPVEEAIA

SEQ ID NO: 17347 - protein, 404 aa, Propionibacterium freudenreichii subsp. shermanii; identical to SEQ ID NO: 506

SEQ ID NO: 17348 - protein, 434 aa, Raphanus sativus
MKGVRKTYNNSYTLSFLLAFFVFILFRLAFSINTLSSTESLTISSNRTLVSPGDVFELGFFRTNSRWYLGIWYKKLSERTYVWVANRDNPLSNSIGTLKISGNKLVILGHSNKSVWWTNITRGNESSPVVAELLANGNFVMRDSNNNSASGFLWQSFDYPTDTLLPEMKLGYDLRKGLNRFLASWRSSDDPSSGDFLYKLETGRIPEFYLSSGIFRLHRSGLWNGIRFSGIPEDQKLSYVVYNFTENREEVAYTFRMTNNNIYSRLTLSYSGYIERQTWNPSLGIWNVVWSFPLDSQCDVYRMCGPYSYCDVNTSPICNCIQGFNPSNVEQWDLKSWSGGCIRRTPLSCSRDGFNRMKNVKLPETTMAIVDRSIGVKECEKRCLSDCNCTAFANADIRNGGTGCVIWTGALEDIRTYFAEGQDLYVRLAAADLV

SEQ ID NO: 17349 - protein, 431 aa, Geobacter metallireducens GS-15
MPTDITMPKLSDTMTEGRLVSWKKSVGERVERGEIIAEVETDKATMELEAFASGTLAEQRVKPGELVAVGTVIGVIGAGGEIPPVAPEKPTPSPEEPKPSPEESKPSPQKAEPQPTPEATPAAPAGDVPERVMELPEEKASAPAPPEAERGEGERAAPVVRRMARERGIDLSLVTGSGPEGRILQEDLERYLTEKPAPESAVATGEGAEGEPLSRMRGAIARVTSQAWQTIPHFYETVEIAMEEGVEIVRELKGSGNEVTFNDLVVKAAAMALAKYPRLNASFAGDRIVTHCEVNIGIAVAVDDGLLVPVVKGCQGLALKEIALETVRLADRARSGRISQEEISGGTFSISNLGMFGIDEFAAVIFPPQAAILAVGNVADRPVVRDGRVVAAKTMRVTLSCDHRIVDGAYAARFLGEFRRIVEKPVLMLLQ

SEQ ID NO: 17350 - protein, 436 aa, Raphanus sativus
MKGVRKTYDNSYTLSFFLLFFVFILFRPAFSMNTLSATESLTISSNKTLVSPGNVFELGFFRTNSSSRWYLGIWYKKLTNRIYVWVANRDNPLSSSTGTLKFSGNNLVLLGDSNKSFWTTNFTRGNGDLRWVAELLANGNFVMRDSNNNDSSGFLWQSFDFPTDTLLPEMKLGYDLKKGLNRFLISWRSSDDPSSGEYSYKLEPRSFPEFYVFSDDIRVHRSGPWNGIQFSGIQEDQKSSYVVYNFTENGEEVAYTFQMTNNSIYSRLIISSAGYFQRLTWNPSSETWNMFWSSPASLQCDPYMVCGAYAYCDVNASPMCNCIQGFDPRNMEKWNLRSQSSGCIRKTRLSCSGDGFTRMKNMKLPETTMATVDRSIGVKECEKRCLSDCNCTAFANADIRNGGTGCVIWTGELEDIRTYVADGQDLYVRLAAADLV

SEQ ID NO: 17351 - protein, 328 aa, Geobacter metallireducens GS-15
MHEMTYRDALNKALKEEMRRDPSVVAWGEDVALYEGSFKVTRGLLAEFGEERVKDTPISENTIIGVSIGAAMGGLRPVAELMTVNFALLAMDQIVNHMAKISSMFGGQTHLPMVVRAPGGGGSQLGAQHSQSLETYFMHCPGIHVAVPATPADARGLLKASIRDNNPVMFLEHELLYNSKGEVPDDPEFLVPLGKAEVKREGKDVTIVAYSRMTILALQAAAELEKEGSSCEVVDLRTLAPLDTETFVASVQKTGRAVVVEECWRAAGLGGHLASIIAEECFDRLLAPVRRVSGLDVPMPYSRKIEKLCIPQVETIAAAVRDVMSQKY

SEQ ID NO: 17352 - protein, 480 aa, Pyrococcus horikoshii OT3
MCLIAGGFKLYTDEIIRIIELGKHRGPDSFGVWSEREVIKSSDFSALEEVKGGDKVLIQCRLAMTGSKEYTQPFYNEIALVHNGEIYNHEKLRAYLVERGISFESDVDSEVILRLLEYLLFDRNLSPWNAIKKLMWMLRGDYAVAFHYNGKFYLFRDPLGIRPLYYSSQGHFGSEKKVLWGLGEEATPVMPGEAVEISKFGINRVRLYDVTAIKSFGSEYFDGLRNLLIDSVKIRSSKKIGILFSGGLDSTLIAFIASRYSNVTLYVSGTEDSKDVEWARKVSQELGLKLKEYIFSKEEVEKELKRIMFAIEEPNPMNLSIAIPLYFSTKLAREDGVKILLSGQGADELFGGYAKYLENPNLMISDVANLGERNLARDDKVSMINGVEVRYPYLDLPFAVLALNTPLQHKIKDGKRKIILREIAKSLGLPEWIAEREKKAAQYGSNAQKILEKIAKSRGIRLKELASLLFSEVFRGIHNR

SEQ ID NO: 17353 - protein, 580 aa, Zea mays
MADEAKAKGNAAFSAGRFEEAARHFTDAIALAPGNHVLYSNRSAALASLHRYSDALADAQKTVELKPDWAKGYSRLGAAHLGLGDAASAVAAYEKGLALDPSNEGLKAGLEDAKKAPPAPPRRGPSGPDAIGQMFQGPELWSKIASDPTTRAYLNEPDFMQMLREVQRNPSSISMYLSDPRMMQVLSLMLNVKIQRPEASEPSQSTPPPPPQQQQQTSPLQTKAREVEPEPEPEPMDFTDEEKERKERKAAAQKEKELGNTAYKKKDFEAAIQHYTKALEHDDEDISYLTNRAAVYIEMGKYDECIKDCDKAVERGRELRADFKMISRALTRKGTALVKLAKTSKDFDIAIETYQKALTEHRNPDTLKKLNEAERAKKELEQQEYYDPKLADEEREKGNEFFKEQKYPEAIKHYTEALKRNPKDPRVYSNRAACYTKLGAMPEGLKDAEKCLELDPTFTKGYTRKGAIQFFMKEYDKAMETYQAGLKHDPKNQELLDGVRRCIEQINKANRGEISQDELQERQNKAMQDPEIQNILTDPIMRQVLNDFQENPRAAQEHLKNPGVMQKIQKLVSAGIVQMR

SEQ ID NO: 17354 - protein, 128 aa, Zea mays
  misc_feature (8)..(8): Xaa can be any naturally occurring amino acid
  misc_feature (12)..(12): Xaa can be any naturally occurring amino acid
  misc_feature (25)..(25): Xaa can be any naturally occurring amino acid
  misc_feature (28)..(28): Xaa can be any naturally occurring amino acid
  misc_feature (30)..(30): Xaa can be any naturally occurring amino acid
  misc_feature (38)..(39): Xaa can be any naturally occurring amino acid
  misc_feature (42)..(42): Xaa can be any naturally occurring amino acid
  misc_feature (44)..(44): Xaa can be any naturally occurring amino acid
  misc_feature (47)..(48): Xaa can be any naturally occurring amino acid
  misc_feature (59)..(60): Xaa can be any naturally occurring amino acid
  misc_feature (73)..(73): Xaa can be any naturally occurring amino acid
  misc_feature (80)..(81): Xaa can be any naturally occurring amino acid
  misc_feature (88)..(88): Xaa can be any naturally occurring amino acid
  misc_feature (92)..(93): Xaa can be any naturally occurring amino acid
  misc_feature (98)..(100): Xaa can be any naturally occurring amino acid
  misc_feature (102)..(102): Xaa can be any naturally occurring amino acid
  misc_feature (104)..(104): Xaa can be any naturally occurring amino acid
  misc_feature (109)..(109): Xaa can be any naturally occurring amino acid
  misc_feature (111)..(111): Xaa can be any naturally occurring amino acid
  misc_feature (114)..(115): Xaa can be any naturally occurring amino acid
  misc_feature (120)..(121): Xaa can be any naturally occurring amino acid
MAAVLNSXKTPXVVAVLVAAALLAXSAXAXITCGQVGXXLAXCXPYXXGRASALPASCXXGVKSLNSAARTSXDRQAACXXLKSLANXVKSXXMGTVXXXPXKXGVFVXFXISXXTDCNXXSLYTGRP

SEQ ID NO: 17355 - protein, 436 aa, Raphanus sativus
MKGVRKTYDNSCTLSFLLVFFVLILFRSAFSINTLWSTESLTISNSRTLVSPGNVFELGFFRTTSSSRWYLGIWYKKVSERTYVWVANRDSPLSDSNGTLKITGNNLVILGHSNKSVWSTNLTRINERSPVVAELLANGNFVMRYFNKIGASGFLWQSFDFPTDTLLPEMKLGYDLKKGLNRFLTSWKNSDDPSSGEISYKLDTQRGMPEFYILKDGLRSHRSGPWNGIRFSGIPEDQKSSYMVYSFTENSEEVAYTFRMTNSSIYSRLKISSEGFLERWTTLESIPWNLFWSAPVDLKCDVYKTCGPYSYCDLNTSPLCNCIQGFMPSNVQQRDLRDPSGGCIRRARLSCSGDGFTRMRNMKLPETTMAIVDRSIGVKECEKRCLSDCNCTAFANADIRNGGTGCVIWTGELEDIRTYLADGQDLYVRLAAADLV

SEQ ID NO: 17356 - protein, 332 aa, Campylobacter coli RM2228
MAVKVAINGFGRIGRCVARIISKRDDIELVAINDTTDIELTKYLFKYDTVHGEFEGSVENEGDDLIINGKKIKVFKSRDIKELDFAKYGAQIVLECTGAHLTIEKCQGFLDMGVQKVIMSAPAKDDTPTYVLGVNSQNYKGENIISNASCTTNCLGPVCRVLQDDFGIEKGLMTTIHAYTNGQSIIDAKTKDKRRSRAAAQNIIPTSTGAAKAMKLVMPELNGKLHGQSMRVPVIDVSSVDLTAQLSKKVSKEELNEAFRKAAATNLKGILMVDDDERVSSDFITCSYGAVVVSDLTQVIADDFVKVVAWYDNEWGYSSRLVDMAVYIANKA

SEQ ID NO: 17357 - protein, 463 aa, Streptococcus pneumoniae
MNIFRTKNVSLDKTEMHRHLKLWDLILLGIGAMVGTGVFTITGTAAATLAGPALVISIVISALCVGLSALFFAEFASRVPATGGAYSYLYAILGEFPAWLAGWLTMMEFMTAISGVASGWAAYFKGLLSQYGIAFPQALNGTFNPQAGTFVDLLPILVLVLVTSLVLLNAKAALRFNSILVILKFSALALFVLVGIWNIKFDNWSNFAPYGFGQIYGASTGIMAGASLMFFGFLGFESISMAVDEVKTPQKNIPRGIVLSLSIVTILYALVTLVLTGVVHYSHLNVDDAVAFALRSVGISWAANYVSLVAILTLITVCISMTYALSRMIYSLARDGLVPAAFKELTKTSKIPKNATILTGLASAVAAGMFPLASIAAFLNICTLAYLIMLAYGLIRLRKEKGMPKAGEFKTPLVPLLPILSIIICLSFMLQYNMNTWIAFLVALLVGSIIYFTYGYKHSTIEE

SEQ ID NO: 17358 - protein, 312 aa, Rhodopseudomonas palustris CGA009
MVDIVTLTPNPAIDLSTSVERLVPSRKLRCAAQKRDPGGGGINVARVVQRLGGNVEAIFPAGGFTGKLLKLLLDEENVPNRIVEAVAETREDFSVSENATGEQFRFVLPGLPLAEHEWRGMLETLAATSPAPKIVIGSGSLPPGVPVDFYAQAAAVAKQLGAKFFLDTSGKPLTAALAQGVTLIKPNLREMQELAGRPLGCEKEWVDAARAHITAGQVEIVALSLGHLGALLVTKDEALRSPALPVTPVSTVGAGDSFLAAIAHRLAQGGSVADAFRLGLAAGSATLTVHGTQLCGPAEVERLYGQVIIEPI

SEQ ID NO: 17359 - protein, 439 aa, Raphanus sativus
MKGVRKTYDNSYTSSFLLVFFVLVLVHPAISMYINTLSATESLTISSNRTLVSPGDVFELGFFRTTSSSRWYLGMWYKKFSERIYVWVANRDNPLSNSIGTLKISGNNLVLLDHSNKSVWSTNFTRGNERFPVVAELLANGNFVMRDSNNNDASGFLWQSFDYPTDTLLPEMKLGYDLKKGRNRLLTSWRNSDDPSSGDYSYKLEPRRLPEFYLLQGDVRAHRSGPWNGIEFSGIPEDQKLSYMVYNFTENSEEVAYTFRMTNSSFYSRLTISSEGYLERLTWAPSSAVWNVFWSSPNHQCDTYRICGPYSYCYVNTSPSCNCIQGFNPENVQQWALRISISGCKRRTRLSCSGDGDGFTRMKNMKLPETTMAIVDRSIGVKECKKRCLSNCNCTAFANADIRNGGTGCVIWTGQLDDMRNYVADGQDLYVRLAAADLV

SEQ ID NO: 17360 - protein, 970 aa, Hydrilla verticillata
MASTARNPNHLERMASVDAQLRMLAPSKVSEDDNLVEYDALLLDRFLEILQDLHGEDLRETVQSCYELSAEYESTLDPQKLEELGNMLTSLDPGDSIVVASSFSHMLNLGNLAEEVQIAFRRRIKLKKGDFADENSAATESDIEETLKKLVVQLKKSPQEVFDALKNQTVDLVLTAHPTQSIRRSLLQKHSRIRNCLAQLYAKDVTPDDKQELDEALQREIQAAFRTDEIRRTPPTPQDEMRAGMSYFHETIWKGVPKFLRRVDTALRNIGINERVPYNAPLIQFSSWMGGDRDGNPRVTPEVTRDVCLLARMMAANLYYSQIEDLMFELSMWRCSDELRVRATALHRSSRSVAKHYIEFWKQIPPNEPYRVILGEVRDKLYKTRERARQLLSNGFSDIPEESTFTNIEEFLEPLELCYRSLCSCGDQPIADGSLLDFLRQVSTFGLSIVKLDIRQESDRHTDVLDAITNHLGIGSYRDWSEEKRQEWLLSELRGKRPLFGPDLPKTDEIADVLDTMHVIAELPFDNFGAYIISMATAPSDVLAVELLQRECHVKKPLRVVPLFEKLADLETAPAAVARLFSIDWYLNRINGKQEVMIGYSDSGKDAGRLSAAWQLYKAQEELIKVAKQYGVKLTMFHGRGGTVGRGGGPTHLAILSQPPDTINGSIRVTVQGEVIEQSFGEERLCFRTLQRFTAATLEHGMHPPLSPKPEWRALMDEMAVVATDEYRSIVFKDPRFVEYFRSATPELEYGRMNIGSRPSKRRPSGGIESLRAIPWIFAWTQTKFHLPVWLGFGSAFKHVIDKDPKNLQMLQEMYNEWPFFRVTIDLVEMVFAKGDPGIAAMYDKLLVSKDLLPFGERLREKYTETKNLLLKVAGHKDLLEGDPYLRQRLQLRDSYITTLNACQAYTLKRIRDPGYNVQLRPHLSKEMVDSSKSAAELVKLNPGSEYAPGLEDTLILTMKGIAAGMQNTG

SEQ ID NO: 17361 - protein, 488 aa, Symbiobacterium thermophilum IAM 14863
MKEEKSFVKEITPQSEDFSRWYIDVIRKADLMDYTPVRGCIVFKPDGYELWERIQAGLDKRFKETGHRNAYFPMLIPESFFQKEKEHVEGFNPELPWVTEAGGEKLEERLALRPTSETIIGHMYAQWIQSYRDLPVLINQWANVFRWEKRTLPFLRTSEFLWQEGHTAHATEEEAREETMRMLEVYRDFVETEMAIPLYVGQKTPSEKFAGAVDTYSIEAMMKDGKALQAGTSHYLGQNFAKGFEIKFLDRDNQLKYVHTTSWGVSTRLIGALIMVHGDDRGLALPPRLAPIQVIMIPVGPPKFRDKVMARFDPLFDALKAAGVRVKADLREETPGWKFNEWEMRGVPLRIEIGPRDVDNKQCLMVRRDTGEKIPVPLDEAVERVQALLEEIQRNMFVKAKEFRDAHSHLHINTLAELKAHIARCEETGEIAGFVLAGWCGDAACEAKVKEETKFTSRNIPFHPPARKQVCLCCGKEAQHTVWFARAY

SEQ ID NO: 17362 - protein, 330 aa, Methanosarcina mazei Go1
MRLAVIEGDGIGREVIPAAVEVLDAFGLEFEKVPLEIGYARWERTGTAMSEEDMEIIKSCNAVLFGAVTTVPDPGYKSVLLTIRKELDLYANVRPVKPLSGVVGVSGRSDFDFIIVRENTEGLYSGIEEIGHDLSWTKRVITRKGSERISEYACELAKKRSGKLTIVHKSNVLKSDKLFLDVCRETASSYGVEYGDMLVDSMAYSLIMHPEKYDVVVTTNLFGDILSDMCAALVGSLGLVPSANIGKKYAFFEPVHGSAPDIAGKGISNPLAAILCVKMLLEWMGKPEARLIDAAIADLLQKKIITPDLGGRASTAEVGNAVAKYIMQNL

SEQ ID NO: 17363 - protein, 438 aa, Raphanus sativus
MKGVRKTYDNSYTCFLLVFSGLILLHPALSMYFNTLSSTESLTISSNRTLVSPGNVFELGFFTPESSSRWYLGIWYKKLSERTYVWVSNRDNPLSSSIGTLKISNMNLVLLDHSNKSVWSTNLTRGNERSLVVAELLANGNFVVRYFNNNDTSGFLWQSFDYPTDTLLPEMKLGYDHKTGLNRFLTSWRNSDDPSTGEISYFLDTQTGMPEFYLLQSGARIHRSGPWNGVRFSGIPGDQELSYIVNNFTENSEDVAYTFRMTNKSIYSRLKTSSEGFLERLTWIPNSITWNMFWYLPLENQCDFYMICGPYAYCDVNTSPLCNCIQGFNRSNEERWAMQDWSSGCIRRTRLSCSGDGFTRMKKMKLPETTMAVVDRSIGVKQCRKRCLSDCNCTAFANADIRNGGTGCVIWTGELEDIRTYLADGQDLYVRLAAADIG

SEQ ID NO: 17364 - protein, 201 aa, Cicer arietinum
AILITLAVNDRIIMPLWKKMKGKPGFTNLQRIAIGLLLSTFGMAAASLCEVKRLSVAKSVKGNQATIPISVFLLIPQFFLVGSGEAFIYTGQLDFFITQSPKGMKTMSTGLFLTTLSLGFFISSFLVSVVKKVTGTRDGQGWLADNINKGRLDLFFALLTILSFINFVAFLVCAFWYKPKKAKPSMQMGAINNGSSVEEKC

SEQ ID NO: 17365 - protein, 364 aa, Alkaliphilus metalliredigenes QYMF
MLEFDVAMEQFAQIKVIGVGGAGNNAVNRMIESGLKGVEFIAINTDKQALFTSKAEHKIQIGEKLTRGLGAGANPDVGQKAAEESREDISQILQGADMVFVTAGMGGGTGTGAAPVVAEIAKELGILTVGVVTKPFTFEGKRRMLHAEQGTAQLKERVDTLVTIPNDRLLQVIEKKTTMLEAFRMADDVLKQGVQGISDLIAVPGLVNLDFADVKTIMLEQGLAHMGIGRASGENRAAEAAKQAIQSPLLETSITGAKGVLLNITGGANMGLFEVNEAAELVTEAADEDANIIFGAVIDEELKDEIRITVIATGFEKSLLSKDPRDEKKNPLSQDEEVAATKEDKLKSERNDDLDIPIFLRRKK

SEQ ID NO: 17366 - protein, 314 aa, Anabaena sp.
NGFGRIGSNFARCWLGRENSNIDLVAVNDTSDPRTNAHLLKYDSMLGKLKDVDITADDNSIIVNGKTIKCVSDRNPENLPWKEWEIDLIIEATGVFTSKEGALKHVNAGAKKVLITAPGKNEDGTFVIGVNHHEYDHNVHHIISNASCTTNCLAPIAKVLHEKFGIIKGTMTTTHSYTGDQRLLDASHRDVRRVRAAAINIVPTSTGAAKAVALVIPELKGKLNGVALRVPTPNVSMVDFVIQVEKRTITEEVNQALKDAAEGPLKGILDYSELPFVSSDYQGSDASSIVDANLTLVMDNDLVKVMAWYDNEWG

SEQ ID NO: 17367 - protein, 319 aa, Streptococcus mutans UA159
MSQQKIGVLLVNLGTPEHPTAPAIRKFLKPFLADSRVIDYPKFLWKPILYSFILPFRPRKVKPLYQHVWTNEGSPLYANAIGQEKALQAHFDQSEHGVLVRATMAYSKPSISDVVDEFLKEKVAKMIVLPLFPQYSSTTTAAIFDAFAQSLKKKKDIPPFDFIHHYYERPSYIQALAQTIHLQENEHLLFSFHGIPQRYVIEGDYYTEHCQQTAQLIAVAAGLSEEQWQVSYQSRFGPEEWTRPYTDETLIQLPKQGKKKLAVICPGFAADCLETLEEIDITNRKHFMAAGGQAYRYIPALNASPAHIQLLAELISERL

SEQ ID NO: 17368 - protein, 315 aa, Stanieria cyanosphaera PCC 7437
NGFGRIGRNFVRCWLGRENSQLELVGINDTPDPRTNAHLLRYDSMLGVLKGVDIEADANSIIVNGKTIKCVSDRNPLNLPWKDWGVDLIIEATGVFVDEAGASKHLEAGAKKVLITAPGKGGGIGTYVIGVNHKDYEHGKDSIVSNASCTTNCLAPVVKVLHENFGIIKGTMTTTHSYTGDQRILDASHRDLRRARAAAINIVPTSTGAAKAVALVLPALKGKLNGIALRVPTPNVSVVDFVAQVEKKTITEEVNEALKRAAEGELKGILGYNDLPLVSCDYRGTDESSIVDASLTLVMDGDMVKVVAWYDNEWG

SEQ ID NO: 17369 - protein, 119 aa, Arabidopsis thaliana
  misc_feature (52)..(52): Xaa can be any naturally occurring amino acid
MAGVMKLACMVLACMIVAGPITANALMSCGTVNGNLAGCIAYLTRGAPLTQXGCCNGVTNLKNMASTTPDRQQACRCLQSAAKAVGPGLNTARAAGLPSACKVNIPYKISASTNCNTVR

SEQ ID NO: 17370 - protein, 328 aa, Leifsonia xyli subsp. xyli str. CTCB07
MASQDWFDKDFYKVLGVSKDVSDAELKKTYRKLARKYHPDSNPGDSAAEAKFKEISEAYSVLSDAEERKEYDQVRAMGSGARFTAPGSGAPGGGFDDVFGGMFGGGQQRGQYYAGGGNFDDVLGGLFGNGRFGTTTGGYRGYGGPARGRDITAHTAIDFLTATKGETISLQAADGKPFKVKIPAGVADGQKIKLRGKGEPSPDGGEAGDIVLTVSVRKHPVFERDGLNLRVTVPVTFAEAALGATIEVPTLGGDPVKLRVAPGTPSGRVLRVRGRGVQTAKGTGDLLAVVQIAVPSHLSGEAKEALEAFAEKLLDENPREDLLAKARS

SEQ ID NO: 17371 - protein, 314 aa, Fischerella muscicola UTEX 1829
NGFGRIGSNFMRCWLGRENSNIDLVAINDTSDPRTNAHLLKYDSMLGKLKNADITADDNSIIANGKTVKCVSDRNPENLPWKEWEIDLIIEATGVFTAKEGAMKHVNAGAKKVLITAPGKNEDGTFVIGVNHHDYDHDKHHIVSNASCTTNCLAPIAKVLHEKFGIIKGTMTTTHSYTGDQRLLDASHRDVRRARAAAINIVPTSTGAAKAVALVLPDLKGKLNGVALRVPTPNVSMVDFVIQVEKPTIAEEVNAALKSASENELKGILDYSELQLVSSDYQGTDASSIIDASLTLVMGGDMVKVMAWYDNEWG

SEQ ID NO: 17372 - protein, 265 aa, Mycobacterium tuberculosis
MANTGSLVLLRHGESDWNALNLFTGWVDVGLTDKGQAEAVRSGELIAEHDLLPDVLYTSLLRRAITTAHLALDSADRLWIPVRRSWRLNERHYGALQGLDKAETKARYGEEQFMAWRRSYDTPPPPIERGSQFSQDADPRYADIGGGPLTECLADVVARFLPYFTDVIVGDLRVGKTVLIVAHGNSLRALVKHLDQMSDDEIVGLNIPTGIPLRYDLDSAMRPLVRGGTYLDPEAAAAGAAAVAGQGRGGVPRGAAALEHHHHHH

SEQ ID NO: 17373 - protein, 393 aa, Yarrowia lipolytica CLIB122
MLRLKTPARHLFAQARRFQSTTASNGNGTAVVLVNMGGPSTVPETYDFLLRLFSDKDLIPLGPFQGPLAKFIAWRRTPVIEKHYGEIGGGSPIRKWSELQAAEACKKLDTLSPETAPHKPYVAFRYANPLTPDTYAQMKKDGIKRAIAFSQYPQYSLSTTGSSLNELYRVRKELDPNEEIEWSVIDRWPTHPGLTKAMADNVKEQLAAYEKEGINPEDVTILFSAHSLPMEVVNKGDPYPAEVAATAYAVMTNLGFSNPYKLVWQSQVGPKPWLGAQTQKMVDEYQKAKKPIILVPVAFTSDHIETLHELDLEVRGEAEHPELIRRAESLNDNPLFLDAMADIVHTHLRILNGDVTAAEVAKEKGLQSKILRIKGPGAQGERGAFHEAINASG

SEQ ID NO: 17374 - protein, 185 aa, Helicosporidium sp. ex Simulium jonesii
MQCVQGISGTRVRASCVGARPNRQVRGCQRGVAGRAEAPSRQRPDYVPHHISDPNYVRIFDTTLRDGEQSPGATLTSKEKMEIAKQLAKLGVDIIEAGFPMSSPDDFQAVKSIAQEVGTHVVDGYSPVICGLARCREPDLERSWDAVRHARLARVHYFIATSPIHMEYKLRMSKEQVLRAAVRGA

SEQ ID NO: 17375 - protein, 315 aa, Lyngbya aestuarii PCC 7419
NGFGRIGRNFVRCLLTRENSNLDLVAINDTSDPKTNAHLLKYDSMLGTLKDVDIQADENSLTVNGKTIKCVSDRNPLNLPWADWGVDLIIESTGVFVTEEGASKHLEADAKKVLITAPGKGGKIGTFVMGVNDNTYKHEDYNIVSNASCTTNCLAPFTKVLHEHFGIIKGTMTTTHSYTGDQRILDASHRDLRRARAAAINIVPTSTGAAKAVALVIPEMKDKLTGIAMRVPTPNVSVVDLVVQVEKNTFTEEVNRVLQEAAEGPMKGILEYSDLPLVSSDYRGRDASSIVDASLTMVMGGDMVKVIAWYDNEWG

SEQ ID NO: 17376 - protein, 917 aa, Pseudomonas chlororaphis
MLKKLGIKGRVLLLTLLPTSLMALVLGGYFTWMQQSDLQTQLLQRGEMIAEQLAPLVAPALAHQNTALLERIATQSLEQQDVRAVSFLAPDRTPLAHAGPSMLNQAPTGNGSQMLQRTGSDATRYLLPVVGRHRNLAGDLIPDESDRLLGWVELELSHNSMLLRGYRSLFASLLLITAGLICTGLLALRMGRTINNPLSQIKQAVTQLKDGNLETRLPLLGSQELDELASGINRMAGTLQNAQEELQHSIDQATEDVRQNLETIEIQNIELDLARKEALEASRIKSEFLANMSHEIRTPLNGILGFTHLLQKSELTPRQLDYLGTIEKSADSLLGIINEILDFSKIEAGKLVLDSIPFNLRDLLQDTLTILAPAAHAKQLELVSLVYRDTPLSLVGDPLRLKQILTNLVSNAIKFTREGTIVARAMLEEEHEDSVQLRISIQDTGIGLSNQDVRALFQAFSQADNSLSRQPGGTGLGLVISKRLIEQMGGEIGVDSTPGEGSEFWISLRLPKTRDDAEDLPAPPLLGRRVAVLENHELARQALQHQLEDCGLEVTPFNTLEALTNGVTGVHQTEQAIDLAVLGITTNDMPPERLNQHIWDLEHLGCKVLVLCPTTEQTLFHLSVPNPHSQLQAKPACTRKLRRALADLVNPKAVRSEPSEPIASRPPRVLCVDDNPANLLLVQTLLEDMGAKVLAVDSGYAAVKAVQNESFDLVMMDVQMPGMDGRQSTEAIRQWESERNCTPLPVIALTAHAMANEKRALLQSGMDDYLTKPISERQLAQVVLKWTGLALRNQGPERTGEPSGNGHELQVLDHDEGLRLAAGKADLAADMLAMLLASLEADREAIRAARAANDHNALIERVHRLHGATRYCGVPQLRAACQRSETLLKQEDIKAFAALDELERAINRLATEARINA

SEQ ID NO: 17377 - protein, 341 aa, Moorella thermoacetica ATCC 39073
MLKYDAVVAGAGPAGSTAARVVAAAGARVLLIEKRARVGYPVQCAEYVPALIASEVDFGEKSIALAVGTLVTFFPDGTVTSTPAPGYILNREVFDASLAEGAVKAGAELWLKATVEDLTDTSLIIRQANGRRQEVEAGVIIGADGPLSLVARTRGWPRATLAAAVQVEMALPEPMQVTRVYFDPLYRGGYAWVFPKGKTANVGVGLVPGEITPAAALTHFLRRLGWQQQNIVRRTGGLIPVAGPYQEVHRGRVLLCGDAGGFTHPVTGAGILTAILSGRLAGEAAAAYLGSGAPLATYEESWRDLLGPALARGQAGRRRWQEEWARDGAALSKLLRQTWMV

SEQ ID NO: 17378 - protein, 313 aa, Helicosporidium sp. ex Simulium jonesii
DPNYVRIFDTTLRDGEQSPGATLTSKEKMEIAKQLAKLGVDIIEAGFPMSSPDDFQAVKSIAQEVGTHVVDGYSPVICGLARCREPDLERSWDAVRHARLARVHYFIATSPIHMEYKLRMSKEQVLRAAVRGAEHLRSLGCRDIEFSAEDATRSDPDFLVDVLSAAIEAGATTINIPDTTGWALPSEFGGLIQTLRQRVRGAANVVFSTHCQNDLGLSTANSLAGAWAGARQVEGTINGIGERAGNASLEEIIMAIALRGEEQLGGLWTGARPVHIAPTSKMVCDFSGMAIQPHKAIVGANAFAHETGIHQDG

SEQ ID NO: 17379 - protein, 443 aa, Thermotoga neapolitana
MKYDVVIVGGGPAGLVAAFTTKRFYKDKKILVVKKTEKETVPCGIPYIFHTLSGVENDYMGIEERFKSAGIDLLIDVVVDGNTDEKKLLTKTGKEIFYEKLIIATGSTPNVPNIPGVDLEGVFTVPKDANYLKMLYEKIKDSKNVVIIGGGFIGVEVADELKKSGKNVTLVEIMDSLLPVSFDPDFGEIARKEIEAENLKVLTGRKVTEIYGSKRVEGVRLDNAETILADAVILATGYRPNSDLARKLGLKVTEYGFIETDEYMRTSKPDVFAAGDCVQHRDFLTGRPSRLMLASAAVLDARIAASNLYGLKVIRANKGSLNAYSTVIGSKAFGSVGITERVAKEEGFEIVVGRAEAPDRHPGKFEDTTKLIVKLIFSEDSKILLGAQVCGGKSVGEIVNILSLGMQKGITANDLFTMQIGTHPLLTSAPTVYPLAKAAEMVL

SEQ ID NO: 17380 - protein, 369 aa, Thermosynechococcus elongatus BP-1
MSSSRKRLGVFTSGGDCPGLNTAIRAIVAHATLSYGWEVLGILHATQGLIERKAIPLNAEGLGGMDVLLNMGGTILGAINKGDTLGHADEVIAGYYELGLDALIAICGDGSLRILHQLAQKGNWNFLAIPKTIDNDVALTDRAIGFDTAVNTVVEALNRITSTAASHDRVFVVEVMGRTAGHLALYSGIAGGADIILIPEIPYSIEGICQHLQKLRDRWGRQFALIVVAEGSKQLEEDANHPRHCSIGQYIADKIAQHSPIPIELRVSVLGHIQRGGAPMAMDRLLAAGMGNTAVDLAAQGTFGRMVAWQAGQVVTVPIADVVAKCPRHVDPNSFLIRTAQGLGIYVGDKPMLPYVDPTLCRDQVICAI

SEQ ID NO: 17381 - protein, 337 aa, Mycobacterium tuberculosis
MSKLAIIAGDGIGPEVTAEAVKVLDAVVPGVQKTSYDLGARRFHATGEVLPDSVVAELRNHDAILLGAIGDPSVPSGVLERGLLLRLRFELDHHINLRPARLYPGVASPLSGNPGIDFVVVREGTEGPYTGNGGAIRVGTPNEVATEVSVNTAFGVRRVVADAFERARRRRKHLTLVHKTNVLTFAGGLWLRTVDEVGECYPDVEVAYQHVDAATIHMITDPGRFDVIVTDNLFGDIITDLAAAVCGGIGLAASGNIDATRANPSMFEPVHGSAPDIAGQGIADPTAAIMSVALLLSHLGEHDAAARVDRAVEAHLATRGSERLATSDVGERIAAAL

SEQ ID NO: 17382 - protein, 364 aa, Euphorbia tirucalli
SDSGKDAGRLSAAWQLYKTQEELVKVAKQYGVKLTMFHGRGGTVGRGGGPTHLAILSQPPDTIHGSLRVTVQGEVIEQSFGEEHLCFRTLQRFTAATLEHGMHPPVSPKPEWRTLMDEMAIMATKEYRSIVFQETCFIEYFRRATPELEYGRMNIGSRPSKRKPSGGIESLRAIPWIFAWTQTRFHLPVWLGFGAAFKHVIEKDVKNLHMLQDMYNQWPFFRVTIDLVEMVFAKGDPGIAALYDKLLVPEELRPFGEQLRHNYEETKQLLLQIAGHKDLLEGDPYLKQRLRLRDAYITTLNVCQACTLKQIRDPDYHVTVRPHLSKEYIESSKPAAELVKLNPTSEYAPGLEDTLILTMKGIAA

SEQ ID NO: 17383 - protein, 306 aa, Lactobacillus sakei subsp. sakei 23K
MAKSYDVIVIGAGPGGMTAALYASRSNLSVLMLDRGIYGGQMNNTAEVENYPGFKSILGPELGEKMYASATQFGAEYGYGTVNSIEDKGEFKLVHTDEGDFQARAVIIATGSEHKKVGIPGEDEYGGRGVSYCAVCDGAFFKNKEVVVIGGGDSAIEEGLYLTQLASKVTVIHRRDQLRAQKILQDRAFVNDKMAFVWNAQVKTIEGDDKKVAAVTYVDKESGETKGVPASGVFIYVGIDPMTSAFKDLGILTEAGWVKTDDHMATSVPGIFAIGDVREKDLRQITTAVGDGGIAGQEVFKYIQSI

SEQ ID NO: 17384 - protein, 452 aa, Thermobifida fusca YX
MSANLDEKLSPIYEEILRRNPGEVEFHQAVREVLECLGPVVAKNPDISHAKIIERLCEPERQLIFRVPWMDDSGEIHVNRGFRVEFSSSLGPYKGGLRFHPSVNLSIIKFLGFEQIFKNSLTGLPIGGAKGGSDFDPKGRSDAEIMRFCQSFMTELYRHLGEHTDVPAGDIGVGQREIGYLFGQYKRITNRYESGVFTGKGLSWGGSQVRREATGYGCVLFTAEMLRARGDSLEGKRVSVSGSGNVAIYAIEKAQQLGAHVVTCSDSNGYVVDEKGIDLELLKQVKEVERGRVSDYAKRRGSHVRYIDSSSSSVWEVPCDIALPCATQNELTGRDAITLVRNGVGAVAEGANMPTTPEGIRVFAEAGVAFAPGKAANAGGVATSALEMQQNASRDSWSFEYTEKRLAEIMRHIHDTCYETAERYGRPGDYVAGANIAAFEIVAEAMLAQGLI

SEQ ID NO: 17385 - protein, 390 aa, Chlorobium tepidum TLS
MHIGVLTGGGDAPGINACIKTIVTISTEKGYRVTGIRRGWNGLLAFDPDDPASRTEHIVDLDSELVRRIDRTGGTLLHTSRINPGNLKKKEIPPFLRNSPHLLRTGLHHSGNFDLTDHVLRSIDALGLDVIIVIGGDDTIGYADHLAKAAVKVIGVPKTMDNDVYGSDYCIGFGTAVTRSVQYIHQLRTSSGSHERITIVELFGRSTGETCLVSAYLAGVDRALIPEVPFDPETLADYVIQDKAANPSQYAMIAISEGARMIGSKMIEYCGRRYDEDGHEPAGIGQLTRETISMLTGQDVICQQLGYLMRSGIPDALDLMVGFNFAQLAVELIAEGTFGVMVALQKGIYTCLPLAEVSSNTKQVDISELYDPRYYRPKMRSVMGKPMFLY

SEQ ID NO: 17386 - protein, 364 aa, Euphorbia tirucalli
SDSGKDAGRLSAAWQLYKTQEELVKVAKQYGVKLTMFHGRGGTVGRGGGPTHLAILSQPPDTIHGSLRVTVQGEVIEQSFGEEHLCFRTLQRFTAATLEHGMHPPVSPKPEWRTLMDEMAIIATKEYRSIVFQETCFIEYFRRATPELEYGRMNIGSRPSKRKPSGGIESLRAIPWIFAWTQTRFHLPVWLGFGAAFKHVIEKDVKNLHMLQDMYNQWPFFRVTIDLVEMVFAKGDPGIAALYDKLLVPEELRPFGEQLRHNYEETKQLLLQIAGHKDLLEGDPYLKQRLRLRDAYITTLNVCQACTLKQIRDPDYHVTVRPHLSKEYIESSKPAAELVKLNPTSEYAPGLEDTLILTMKGIAA

SEQ ID NO: 17387 - protein, 316 aa, Agrobacterium tumefaciens str. C58
MIIGSGPAGYTAAIYAARAMLKPVLIAGMEQGGQLMITTDVENYPGFADPIQGPWLMDQMLKQATHVGAEIVSDLVTEVETNVRPFVVRTDSGQVWTADTLIIATGAKAKWLGIESEQHFQGFGVSACATCDGFFYRNKDVIVVGGGNSAVEEALYLAHIAKSVTVVHRRDSFRSEKILQERLFAKENVKILWNTEIAEITGAPAKPPMPPSVSGVRLRDTKTGAISDTPIDGVFVAIGHAPAVELFKGKVKLKDNGYMWTAPDSTATDVEGIFAAGDVTDDIYRQAITAAGMGCMAALEAERYLTAQQPLAVAAE

SEQ ID NO: 17388 - protein, 364 aa, Euphorbia tirucalli
SDSGKDAGRLSAAWQLYKTQEELVKVAKQYGVKLTMFHGRGGTVGRGGGPTHLAILSQPPDTIHGSLRVTVQGEVIEQSFGEEHLCFRTLQRFTAATLEHGMHPPVSPKPEWRTLMDEMAIIATKEYRSIVFQETCFIEYFRRATPELEYGRMNIGSRPSKRKPSGGIESLRAIPWIFAWTQTRFHLPVWLGFGAAFKHIIEKDVKNLHMLQDMYNQWPFFRVTIDLVEMVFAKGDPGIAALYDKLLVPEELRPFGEQLRHNYEETKHLLLQIAGHKDLLEGDPYLKQRLRLRDAYITTLNVCQAYTLKQIRDPDYHVTVRPHLSKEYIESSKPAAELVKLNPTSEYAPGLEDTLILTMKGIAA

SEQ ID NO: 17389 - protein, 518 aa, Bifidobacterium adolescentis
MTGFTPDAPVLHEIKNHSEELTKAEAGVAAFAAKRNNRWYPKFHIASNGGWINDPNGLCFYKGRWHVFYQLHPYGTQWGPMHWGHVSSADMVNWKREPIMFAPSLEEEKDGVFSGSAVIGDDGKLKFYYTGHRWANGKDNTGGDWQVQMLAEPDNDELTSATKRGMVIDCPTDKVNHHYRDPKVWKTGDKWYMTFGVSSAEKRGQMWLFSSDDMVKWTYEQVLFEHPDSNVFMLECPDFFPIKDVEGNEKWVIGFSAMGAKPSGFMNRNVNNAGYMIGTWTPGEQFKPETEFRLWDCGHNYYAPQSFNDGKRQIVYGWMSPFVEPIPMQDDGWCGNLTLPREITLGADGDLHTAPVAEMEGLREDTVDFGAIDLDVSGEKTIVDDAEAVEIEMTIDLANSTAERAGLRVHATEDGAYTSVAYDDQIGRVVVDRQANAQGDRGYRTAPLSEAELAAGELKLRVYVDRGCVEVYVNDGRQVLSSYSYASEGPRAIKLVAESGTLKVKSLVLHHMKSIGLE

SEQ ID NO: 17390 - protein, 652 aa, Oryza sativa
MMDGAAPLLPETSPESRQQRDPERGKRRTPVLPAVVASAVVLLGLAALFLVYGFHDGGDGRAAVLAPGTVEVAASSSRGVVEGVSEKSTTPALRLGGGAVRDYAWTNSMLSWQRTAFHFQPPNNWMNGPLYYKGWYHLFYQWNPDSAVWGNITWGHAVSRDLIHWLHLPLAMVPDHWYDINGVWTGSATQLPDGRIVMLYTGATEESVQVQNLAEPADPNDPLLREWSKAEANPVLVPPPGIGLTDFRDPTTAWRNPADSAWRITIGSKDRDHAGLALVYKTEDFLHYDLLPTLLHVVKGTGMWECVDLYPVSTSPAVEDGLETSTPPGPGVKHVLKASLDDDRNDYYAIGTYDGETDTWTPDNADIDVGIGLRYDYGKFYASKTFYDPVGRRRVLWGWIGETDSERADILKGWASLQSIPRTVMLDTKTGSNLLQWPVVEVENLRMRGKSFDGLDVSPGSVVPLDVGKATQLDIEAVFEVDTSAADGVVTEAGAAAYSCGTGGGAVGRGLMGPFGLLVLADDQLSERTAVFFYLVKGVDGNLTTFFCQDELRSSKANDLVKRVYGSLVPVLDGENLSIRILVSLSSNVDHSIVEGFAQGGRTCITSRVYPTKAIYESAKIFLFNNATNVRVTAKSLKIWELNSAYIRPYVD

SEQ ID NO: 17391 - protein, 344 aa, Scopolia parviflora
MATLVSNWSSNNVSESFIAPLEKRAEKDVPLGNDVPMIDLQQEHHLVVQQITKACQDFGLFQVINHGFPEKLMAETMKVCKEFFALPAEEKEKLQPKGEPAKFELPLEQKAKLYIEGEQLSNEEFFYWKDTLAHGCHPLDEKLVNSWPEKPATYREVVAKYSVEVRKLTMRMLDYICEGLELKLGYFDNELSQIQMMLTNYYPPCPDPSSTLGSGGHYDGNLITLLQQDLPGLQQLIVKDGNWIAVEPNPTAFVINLGLTLKVITNEKFEGSIHRVVADPTRDRVSIATLIGPDYSCTIEPGKELLSQDNPPLYKPYPYTEFAEIYLSDKSGYMLVLSHIKSNA

SEQ ID NO: 17392 - protein, 295 aa, Kineococcus radiotolerans SRS30216
MSATVLDGKAAAAAVKADLKERVAALRERGVVPGLGTVLVGDDPGSASYVRGKHRDCAEVGIASIQVELPATATQGEIESEIAQLNANPDCTGFIVQLPLPAGIDANRILEQVDPDKDADGLHPTNLGRLVLRVREEITSPLPCTPRGVIDLLLRHDVPLDGAEVVVVGRGVTVGRPIGLLLTRRHPNATVTLCHTGTRDLESHLRRADVIVAAAGVAGLVTKENVKPGAAVLDVGVSRVLDPATGKSKLAGDVALDVAEVAGFVAPNPGGVGPMTRALLLTNVVESAERAAGLR

SEQ ID NO: 17393 - protein, 365 aa, Euphorbia tirucalli
SDSGKDAGRLSAAWQLYKAQEELIEVAKKHGVKLTMFHGRGGTVGRGGGPTHLAILSQPADTIQGSLRVTIQGEVIERSFGEAQLCFKTLQRYTAATLEHGMIPPLTPKPEWRALMDEMAVVATERYRSIVFREPRFVEYFRLATPELEYGRMNIGSRPSKRKPSGGIESLRAIPWIFAWTQTRFHLPVWLGFGEAFKHVIDKDNKNLLMLQQMYNEWPFFRVTIDLVEMVFAKGNPGIAALYDKLLVSEELLPLGEELRTAYNDTKSYLLKITGHNEILEGDPFLKQRLKLRTAYITTLNVCQAYTLKRIRDPSYQVPVRPPIAKEISESSVSSANQLVKLNPTSEYAPGLEDTLILTMKGIAA

SEQ ID NO: 17394 - protein, 859 aa, Legionella pneumophila str. Paris
MSGILIMQQVVIKFGGTSVSSRATWNNIAAITQKHLNTGVQPVIVCSALTQISNKLEKAIEAALLDEHHSLFNDIQSSHLNLAEQLEVNHQLIANDLHQLQQWLTGISLLKQAPAKTHAQILSLGELMMTRLGHAFLEKQGIKVKWYDARELLTSTPTLGGETMNYLSARCESEYDPALVEKFLSTGAQAIITQGFFAANPHGETVLLGRGGSDTSAALLAGKLQAASCEIWTDVPGIYTANPHQLPHARLLKQLNYDEAQEIASMGAKVLHPNCIPPVRKANIPMVVKYTHLPEHSGTLITKDIDESAPLIKSIQVKHSILLISIDTLNMWQQVGFLADVFAAFKKHGFSVDLLSSSEFNVTLSLDVNAKIHDRPAINALLDDLNQFGRAKLIEPCSAVSLVGHHIRTVLPHLGPALEVFEAKQVYLMSLASNDLNLTFVVDESHADKLCQRLHHLLIESNPQIFYYSKSWHEEFGKPNVRPTPWWEIERDRLLTTSAIHSPCYVYHSPTQATRARQLSALESIDSLFYAIKANPFPSILKTLEKEGIGFECVSIQELELVLKLFPNIKKERILFTPNFAPKSEYEFALQTGCYVTIDSLYPLENWPKLFKDREVIVRIDPGTGAGHHKHVSTGGNESKFGITQNDISKILSHTKANHIKVIGLHAHSGSGILSTDLWQQTAVMLASLTDQFPEVRSINLGGGLGIVEKPGQHPIDFAALDAQLMAVKSQYPGLAIWLEPGRFFVAESGVILAKVTQCKEKGKVKFIGIETGMNSLIRPSLYGAYHEIINLTRLHEEKAGFAHIVGPICESGDTLGYDRLLPVTREGDVILIANTGAYGHCMSSHYNLRPPAQEIVLE

SEQ ID NO: 17395 - protein, 655 aa, Oryza sativa
METRDDVADASALPYSYSPLPAGDAASADLAAARRSRRRPLCVALFLASAAVILAVAVLSGVRLAGRPATTTMVVPGVVEMEMASRGPESGVSEKTSGAEEMVRLMGGAAGGEAFPWSNAMLQWQRTGFHFQPERNWMNDPNGPVYYKGWYHLFYQYNPDGAVWGNKIAWGHAVSRDLVHWRHLPLAMVPDQWYDVNGVWTGSATTLPDGRLAMLYTGSTNASVQVQCLAVPSDPDDPLLTNWTKYHANPVLYPPRTIGDRDFRDPTTAWRDPSDGDWRIVIGSKDEHHAGIAVVYRTADFVTYDLLPGLLHRVEATGMWECIDFYPVAGGEGVDMTEAMYARNKGVVHVMKASMDDDRHDYYALGRYDPARNAWTPLDAAADVGIGLRYDWGKFYASKTFYDPAKRRRVLWGWVGETDSERADVAKGWASLQLDTKTGSNLLQWPVEEVETLRTNSTDFGGITVDYASVFPLNLHRATQLDILAEFQLDPLAVDAVLEADVGYNCSTSGGAAGRGALGPFGLLVLADKRHRGDGEQTAVYFYVAKGSDGGVTTHFCQDESRSSHADDIVKRVVGNVVPVLDGETFSLRVLVDHSIVESFAQGGRSTATSRVYPTEAIYANAGVFLFNNATSARVTAKKLVVHEMDSSYNQAYMA

SEQ ID NO: 17396 - protein, 365 aa, Microcoelia exilis
SDSGKDAGRLSAAWQLYKAQEDLVKVAKEFGVKLTMFHGRGGTVGRGGGPTHLAILSQPPDTIHGSLRVTVQGEVIEQSFGEEHLCFRTLQRYTAATLEHSMCPPASPEPEWRELLDEMAVAATKEYRSIVFHEPRFVEYFRLATPELEYGRMNIGSRPSKRKPSGGIESLRAIPWIFAWTQTRFHLPVWLGFGAAFKHVIDKDIKNLLMLQEMYTRWPFFRVTIDLVEMVFAKGDPGIAALYDKLLVSEDLWPFGEQLRNNYNETKNLLLQVAGHKDLLEGNPYLRQRLRLRDSYITTLNACQAYTLKRIRDPSYQVPVRPPIAKEIMEGSVSSANQLVKLNPTSEYAPGLEDTLILTMKGIAA

SEQ ID NO: 17397 - protein, 291 aa, Pisum sativum
MSVTSTTPLFKSLTIAALFHNKTKPTSFSLPSKPFKFHISLNSSPSLTLSLKTNRATPLFAAQEGETLTTEEGVVETEGLIDWEPEAAENETGGEDYAGGDFAEPSEDAKLFVGNLPYDVDSEKLAMLFEPAGTVEIAEVIYNRETDQSRGFGFVTMSTVEEAEAGAAKFNRYDYNGRPLTVNKAAPRGSRPEREERPPRTFEPVLRVYVGNLSWELDDSRLEQVFSEHGKVVSARVVYDRETGRSRGFGFVTMSDEKEMNDAIAALDGQILEGRTIKVSVAEDRPRRGSF

SEQ ID NO: 17398 - protein, 288 aa, Raphanus sativus
DEFMNEVTLIARLQHINLVQILGCCIDADEKILIYEYLENLSLDSYLFGKTQSPKLNWKERFDITSGVARGLLYLHQDSRFRIIHRDLKVSNILLDKNMIPKISDFGMARIFARDETEASTMKVVGTYGYMSPEYAMNGIFSEKSDVFSFGVIVLEIVTGTRNRGFYNLNYKNNFLSYAWSNWREGRALEIVDPVILDSLSPLTLTFQRQEVLKCIQIGLLCVQELAEDRPTMSTVVWMLGSEATEIPQPKPPDYCVGKSPYETASKQLDDDESWTVNQYTCSVIDAR

SEQ ID NO: 17399 - protein, 469 aa, Burkholderia pseudomallei
MQTESNGRPGAGGGAARPALQQTLGTWQLWGIAVGLVISGEYFGWSYGWASAGTLGFVVTALFVAAMYTTFIFSFTELTTSIPHAGGPFAYARRAFGPAGGYLAGVATLVEFVFAPPAIALAIGAYLHVQFSGLEPKHAAMGAYLVFMALNIVGVQIAATFELVVTLLAIFELLVFMGVVSPGFAWSNFVKGGWAGADHFSAGAFHGMFAAIPFAIWFFLAIEGVAMAAEEAKHPKRSIPIAYVAGILTLVALAIGVMVFAGGAGDWTKLANINDPLPQAMKYIVGANSGWMHMLVWLGLFGLVASFHGIILGYSRQIFALAREGYLPEWLAKVHPRFKTPYRAILAGGVVGIAAIYSDELIQFGGQTLTANIVTMSVFGAIVMYIVSMAALFKLRRVQPRMERPFRAPLYPFFPAFALVAALVCLGTMVYFNALVASIFVAFVALGYGYFLATRAQREAAPADALLEE

SEQ ID NO: 17400 - protein, 570 aa, Rhodococcus erythropolis
MRGDDFQSGDHFGQFERADLHTALTSGSLIRSLRRTSQRRQSATARHPQGRRETTKEQYMPGVGIWRTKSVEQSIADTDEPETKLKKELTAKDLTVFGVAVVIGAGIFTLTARTAGNVAGPSISLAFVLAAIACGLAALCYAEFASTVPVAGSAYTFSYATFGEFAAWIIGWDLILEFALASAVVGKGWSLYLGNVIGASGSTTAHIGSISFDWGALLIIGAITLILAIGTKVSSRVSAIITAIKIAVVLLVIVVGAFYIKKENYSPFIPPSEGSESAASGIHQTLFSWLTGAGGSSYGAYGLLAAASLVFFAFIGFDVVATTAEETKNPQKSLPRGIFGSLAIVTVLYVAVTLVLTGMVKYTELKDGSPLVGDSSATLATAFEANGIGWAQTAINFGGLAGLTTVVMVMMLGQTRVLFAMSRDGLMPRSLAKTNAKGIPMRITLIVGGIVAVLAAFFPMGTLEEMVNIGTLFAFVLVCVGVIVLRRTRPDLPRGFRVPLVPFVPIVAVLACGWLMLNLSVETWIRFLVWMAIGVLVYFAYGHRKSVLGRKLKDGTAIPSANADPVLVKD

SEQ ID NO: 17401 - protein, 422 aa, Erythrobacter sp. NAP1
MKFGGTSMAGTERIRRVANIVRAQAAGKDGEANEVAVVVSAMAGETDRLVNFCREANALYDPAEYDVVVSSGEQVTSGLLALTLQSLGCKARSWLGWQLPVKTEEAHAKARISSIEAPDMVASLEAGEIAVVPGFQGITEEGRVSTLGRGGSDTSAVAVAAAVKADRCDIYTDVDGVYTTDPRIVAKARKLKAVTYEEMLELASVGAKVLQTRSVGLAMKEGVRIQVLSSFVDDDAALADDLPGTLIVSDEEMDQMVERGEMERQLVTGIAHDKNEAKVILTRVPDKPGAVAHIFEPLADASINVDMIIQNVGRDKGETDVTFTVPQADLARAQALLEDRREDIGFNRIITDSQIAKISVVGVGMKSHAGVASTMFRSLSDRGINIQAISTSEIKVSVMIDEDETELAVRVLHTAYGLDAEE

SEQ ID NO: 17402 - protein, 288 aa, Raphanus sativus
DEFMNEVTLIARLQHINLVQIIGCCIEADEKILIYEYLENLSLDSYLFGKTQRPKLNWKERFNITNGVARGLLYLHQDSRFRIIHRDLKVSNILLDKNMTPKISDFGMARTFTRDETEANTMKVVGTYGYMSPEYAMYGKFSEKSDVFSFGVIVLEIVSGKKNRGFNYGNNLLSYAWSHWKEGRALGIVDPVIIDSLPSLPLKFGQEEVLKCIQIGLLCVQELAEDRPTMSSVVWMLGSEATEIPQPKPPCHCFERSPYELDPSLSRQCYDDESWTVNQYTCSLIDAR

SEQ ID NO: 17403 - protein, 507 aa, Zymomonas mobilis
MARIANKAAIDAAWKQVSACSEKTLKQLFEEDSNRLSGLVVETAKLRFDFSKNHLDSQKLTAFKKLLEACDFDARRKALFAGEKINITEDRAVEHMAERGQGAPASVARAKEYHARMRTLIEAIDAGAFGEVKHLLHIGIGGSALGPKLLIDALTRESGRYDVAVVSNVDGQALEEVFKKFNPHKTLIAVASKTFTTAETMLNAESAMEWMKKHGVEDPQGRMIALTANPAKASEMGIDDTRILPFAESIGGRYSLWSSIGFPAALALGWEGFQQLLEGGAAMDRHFLEAAPEKNAPILAAFADQYYSAVRGAQTHGIFAYDERLQLLPFYLQQLEMESNGKRVDLDGNLIDHPSAFITWGGVGTDAQHAVFQLLHQGTRLVPIEFIAAIKADDTLNPVHHKTLLTNAFAQGAALMSGRDNKDPARSYPGDRPSTTILMEELRPAQLGALIAFYEHRTFTNGVLLGINSFDQFGVELGKEMAHAIADHPENSDFDPSTKALIAAALK

SEQ ID NO: 17404 - protein, 556 aa, Pseudomonas syringae pv. syringae B728a
MTMLKDPSKKYRAFPTIDLPDRTWPSKTIDAVPIWCSSDLRDGNQSLIEPMDAAKKLRFWKTLVSVGVKEIEASFPSASQTDFDFVRTLIEDGHIPDDTTIQVLTQAREDLIARTFESLRGAKKAIVHLYNATCPSFRRIVFNQDKAGVKEIAVNAAKLFVKYAAQQPETQWTFQYSPETFSATELEFAKEVCDAVIEVWNPTPENKVILNLPATVEVATPNIYADQIEWFGRNITRRDSVLISLHTHNDRGTGVAATELGLMAGADRVEGCLFGNGERTGNVDLVTVALNLYTQGINPGLDFSDIDGVRKVVEECNQIPVHPRHPYVGDLVHTAFSGSHQDAIRKGFTQQKEGELWEVPYLPIDPADIGRSYEAVIRVNSQSGKGGIAYLLEQEYGISLPRRMQIEFSQVVQGETDRLGLEMTAEQIHSLLRREYLQANVPYALISHKLQEENGNSSVDAEVHVDGETQHWRGKGKGALEALVAGLPVAVEIMDYNEHAIGSGTTAKAAAYIELRVNGERAVHGVGIDENITTASFRALFSALNRSLSQTQAKAA

SEQ ID NO: 17405 - protein, 291 aa, Raphanus sativus
DEFMNEVTLVARLQHVNLVQILGCCIDADEKMLIYEYLENLSLDSYLFGENRRSKLNWKERFDITNGVARGLLYLHQDSRFRIIHRDLKVSNILLDKNMTPKISDFGMARIFAREETEANTMKVVGTYGYMSPEYAMHGIFSEKSDVFSFGVIILEIITGKRNRGFYNLNYENDLLSYAWSNWKEGRALEIVDPVIIDSFSPLSSTYQPQEVLKCIQIGLLCVQDLAENRPTMSFVVWMLGNEATEIPQPKWPGYCVRRSPYELDPSSSRQCDDDESWTVNQYTCSVIDAR

SEQ ID NO: 17406 - protein, 112 aa, delta proteobacterium MLMS-1
RDGGNATVTLCHTRTKDIAAHTRRADIIIAAVGVPRMLTADMVKDGVAVIDVGVNRMGVSESGKAILAGDVDFEAVKEKASCITPVPGGVGPMTITMLMKNTVQAARRAAGV

SEQ ID NO: 17407 - protein, 504 aa, Ralstonia metallidurans CH34
MNHCADVSGAGVAKFPRRILSSLILASLIGPLAGTAWSQTPGEAPTTATSASPRQGPPPTQPTATVGQAQAGTTEFRLSNGLRVIVKEDHRAPTVAHMIFYRVGGFDEVSGTTGVAHMLEHMMFKGTPKVPVGEFSRQIALLGGRENALTNRDFTLYYQQISKQYLPKMMELEADRMANLIFKKEEFEREMKVVMEERRLRTDDSPRGTVYEQLLATVYTAMPYRHPVIGWMDDLVNMRVEDVHDWYKTWYVPNNAMVIVTGDVKPDEVRALAERYYGKLKPHPLPLRKTQIEAPQKGIKRIWVKAPAENPYMVMAYKVPRLRDVEKDVDPYALEVLSAVLNGYDNARLTRELVRERRLADDVNVGYDSINRADSLFVLDGTPANGHTTEEIEAALREEIQRIAKNGVSEEELKRVKAQVVAGQIYKRDSVFGQGMEIGVSEISEISWRQIDRMLDKIKEVTPAQVQAVAAKYFSDDNLTVATLLPQPIDPNKPKTPVPEGLRH

SEQ ID NO: 17408 - protein, 256 aa, Triticum aestivum
  misc_feature (216)..(216): Xaa can be any naturally occurring amino acid
HYRTSLYKKAGWYRSGIPGISSTHASGLFSIDWYRERINGKQEVMIGYSDSGKDAGRLSAAWQMYKAQEDLVKVAKQFGVKLTMFHGRGGTVGRGGGPTHLAILSQPPDTINGSLRVTVQGEVIEQSFGEEHLCFRTLQRFTAATLEHGMRPPISPKPEWRALLDEMAVVATEEYRSIVFQKHASSRISPCNPETEFGRIILGSRPSKKKPIGGLXKPPLAIQWNFRWNTNLFHLPSGVGFSGPLHTFFAKHFLDF

SEQ ID NO: 17409 - protein, 313 aa, Pseudanabaena sp.
NGFGRIGRNFLRCWAGRTDTNIELVGLNDTSDPRTNAHLLKYDSMLGKFAGDVSADDTTITVNGKTIKTVSDRNPDNLPWKDWVIDLVIESTGVFIDKEGASRHINAGAKKVLITAPGKNEDGTYVVGVNEDQYNHDIHNIISNASCTTNCLAPVAKVLLENFGIVKGVMTTTHSYTGDQRLLDASHGDLRRARAAALSIVPTSTGAAKAVALVLPELAGKLNGIALRVPTPNVSVVDFVVEVEKKAIAQEVNEAFRAAAEGPMKGILEYNELPLVSIDYRGTDASSIVDSSLTMVMGGNMVKVVAWYDNEWG

SEQ ID NO: 17410 - protein, 509 aa, Vicia faba
MLQRSRTLPSKIYQGVIEERKDGRHYIELEPLPKMETETKPITIQSKCLDDDGRVKRTGTFWTASAHIITAVIGSGVLSLSWAIAQLGWAVGPVVMVLFAVVNLYTSTLLTQCYRSDDSVAGPRNYTYTDAVKSILGGKKFKICGVIQYVNLFGVAIGYTIAASVSMMAIKRSNCYHESHGNDPCHMSSNVYMIAFGIAEVILSQIPDFDQVWWLSIVAAIMSFTYSAVGLGLGVAKVAENGTFHGRLMGISIGTVTPAGTVTGTQKVWRSLQALGAMAFAYSFSIILIEIQDTIKSPPAEHKTMKKATMLSIMVTTVFYILCGSMGYAAFGDHVPGNLLTGFGFYNPYWLLDIANFAIVVHLVGAYQVFSQPFFAFVEKWSAHKWPKNKFVTEEYDIPIPCIGVYKLNLFRLIWRTIFVLLTTLIAMLLPFFNDVVGLLGAFGFWPLTVYFPIDMYISQKKIGRWTNRWLGLQMLSGCCLIISTLAAVGSIAGVVLDLKTYKPFKTSY

SEQ ID NO: 17411 - protein, 387 aa, Triticum aestivum
MAMVTAKLSSPAAARLAPVRSAQPARRASLVRVRASGGSYADELVSTAKTVASPGRGILAIDESSATCGKRLASIGLDNTEVNRQAYRQLLLTTAGLGEYISGAILFEETLYQSTTDGKTFVDVLKDQNIMPGIKVDKGLVPLPGSNNESWCQGLDGLASRCAEYYKQGARFAKWRTVVSIPCGPTALAVKEAAWGLARYAAIAQDNGLVPIVEPEILLDGDHGIERTLEVAEKVWSEVFFYLAENNVLFEGILLKPSMVTPGAEHKEKASPEAIAKNTLTMLRRRVPPAVPGIMFLSGGQSELEATMNLNAMNQSANPWHVSFSYARALQNSVLKTWQGQPENIEAAQKALLVRAKANSLAQLGSYTGEGESDEAKKGMFQKGYTY

SEQ ID NO: 17412 - protein, 478 aa, Cucumis sativus
MASSSPELPLKPIPGGYGFPFLGPIKDRYDYFYFQGRDEFFRSRITKYNSTVFHANMPPGPFISSDSRVVVLLDALSFPILFDTTKVEKRNILDGTYMPSLSFTGGIRTCAYLDPSETEHTVLKRLFLSFLASHHDRFIPLFRSSLSEMFVKLEDKLADKNKIADFNSISDAVSFDYVFRLFSDGTPDSTLAADGPGMFDLWLGLQLAPLASIGLPKIFSVFEDLIIHTIPLPFFPVKSRYRKLYKAFYSSSGSFLDEAEKQGIDREKACHNLVFLAGFNAYGGMKVLFPTILKWVGTGGEDLHRKLAEEVRTTVKEEGGLTFSALEKMSLLKSVVYEALRIEPPVPFQYGKAKEDIVIQSHDSCFKIKKGETIFGYQPFATKDPKIFKDSEKFVGDRFVGEEGEKLLKYVYWSNERETVEPTAENKQCPGKNLVVMMGRIIVVEFFLRYDTFTVDVADLALGPAVKFKSLTRATASV

SEQ ID NO: 17413 - protein, 66 aa, Helicosporidium sp. ex Simulium jonesii
KYSTVQNWYAGDEQGRGGIYNFVTKRGLAGDRAKISWTQVETGSAITWKYPSVVLKGEASVGEFYS

SEQ ID NO: 17414 - protein, 409 aa, Arabidopsis thaliana
MTKISDLPRDLAEEVLSRVPVTYLRAIRFTCKKWNTLTKRRSFTKKLIGQEKAEAKVKEFHAIMTLNSRLHLMSVNLDGIHKDENVESSIKQKGKLISLTVADPDRIVISQVYHCDGLLLCITNEINSRLVVWNPYSGQTRWIEPRTSYREWDIYALGYESKNNAKRSYKILRYLDAYEDMGDMSVEPRTRVCEFEIYSLDTNSWKVIEVTTDWDLCFLHRGVTLKGNTYWFAREKIPPPPRERVIEDIPLGEAEINVEIPSFLLCFDFTIEKFGSRLPLPFRPCVDDTITLSSVREEKLAVLYQRWDITWTGIWISNKIEPNAVSWSKLFFPMGRIRPLEAASGTFFVDEENKLVVLFDKGESILNPTRNTAYIVGEDGYIKPVDLGESVHKYCFPLACSYVPSSVQI

SEQ ID NO: 17415 - protein, 365 aa, Microcoelia exilis
SDSGKDAGRLSAAWQLYKAQEDLVKVAKEFGVKLTMFHGRGGTVGRGGGPTHLAILSQPPDTIHGSLRVTVQGEVIEQSFGEEHLCFRTLQRYTAATLEHSMCPPASPEPEWRELLDEMAVAATKEYRSIVFHEPRFVEYFRLATPELEYGRMNIGSRPSKRKPSGGIESLRAIPWIFAWTQTRFHLPVWLGFGAAFKHVIDKDIKNLLMLQEMYTRWPFFRVTIYLVEMVFAQGDPGIAALYDKLLVSEDLWPFGEQLRNNYNETKNLLLQVAGHKDLLEGNPYLRQRLRLRDSYITTLNACQAYTLKRIRDPSYQVPVRPPIAKEIMEGSVSSANQLVKLNPTSEYAPGLEDTLILTMKGIAA

SEQ ID NO: 17416 - protein, 411 aa, Nocardia farcinica IFM 10152
MTIVSPSALGAPAELEAHHAEVVRATLPVIAAHIDDITALFYRKLFTAHPELLANLFNRGNQAQGAQQRALAASIATFAAHLVDPALPHPADLLARIGHKHASLGVVAEQYPIVHEHLFAAIVAVLDADTVTPEVAAAWDRVYWLMADALIGFEGELYRAAGVAPGDVFRETVVVDRVEDPSGVVTFVVESADPAAPLPDFLPGQYVSVGARLLDGARQLRQYSLVAAPGGGRLAFAVRRVEPTPEQPAGEVSTWLHTQVRPGDTLEITLPFGDLVVDTDAATPLVLISAGIGITPMIGILEHLAAATPNRRVLAVHADRTPDTHPLRAVQADLIAALPAATLELWYEHPTPGAHAGMPTLTDLTLPPDADIYLCGGPAFLQSARAQLAAIGIPTARIHFELFTPNDWLLD

SEQ ID NO: 17417 - protein, 365 aa, Microcoelia exilis
SDSGKDAGRLSAAWQLYKAQEDLVKVAKEFGVKLTMFHGRGGTVGRGGGPTHLAILSQPPDTIHGSLRVTVQGEVIEQSFGEEHLCFRTLQRYTAATLEHSMCPPASPEPEWRELLNEMAVAATKEYRSIVFHEPRFVEYFRLATPELEYGRMNIGSRPSKRKPSGGIESLRAIPWIFAWTQTRLHLPVWLGFGAAFKHVIDKDIKNLLMLQEMYTRWPFFRVTIDLVEMVFAKGDPGIAALYDKLLVSEDLWPFVEQLRNNYNETKNLLLQVAGHKDLLEGNPYLRQRLRLRDSYITTLNACQAYTLKRIRDPSYQVPVRPPIAKEIMEGSVSSANQLVKLNPTSEYAPGLEDTLILTMKGIAA

SEQ ID NO: 17418 - protein, 339 aa, Corynebacterium efficiens YS-314
MIITEGVDSFVFPHRSGPRVGLCRIFHVFGAVGFDFFDTVQGVAPRCVEHEGPRGIFPILAPMKTIVITGASDGIGAAAARIISTACPEDRLVLVGRNPGKTEGVAKQLDAEWHTADYADLDQVRRLAGELAALDRIDVLANNAGGIFAGPKKTVDGFELTWQINVVAPYLLTNLLMPVLLESRASVVATSSNGALFAKFDESDPNTFKGFTSDRAYGNAKLGNILFTKELHRRYHSAGMNAVAFHPGIISSNFGQEDAGLLGRMFQSPVSRFFSTPEFGGENLAYHIAGVPGIHWESGRYYDEKRRPGRQRAIAHDLDVARRVFDDMAASLEVEWPEG

SEQ ID NO: 17419 - protein, 290 aa, Leptotes bicolor
IEQSFGEEHLCFRTLQRYTAATLEHSMCPPASPEPEWRELLDEMAVAATKEYRSIVFHEPRFVEYFRSATPELEYGRMNIGSRPSKRKPSGGIESPGPIPWIFAWTQTRFHLPVWLGFGAAFKHVIDKDIKNLLMLQEMYTRWPFFRVTIDLVEMVFAKGDPGIAALYDKLLVSEDLWPFGEQLRDNYNETKNLLLQVAGHKDLLEGNPYLRQRLRLRDSYITTLNACQAYTLKRIRDPSYQVPVRPPIAKEIMEGSVSSANQLVKLNPTSEYAPGLEDTLILTMKGIAA

SEQ ID NO: 17420 - protein, 372 aa, Hordeum vulgare subsp. vulgare
MGNCAGVQGNAEINPTFSAPNTSGNNSKSSSSNATDTSTFGKSSSSSVPPTPRSEKEILQSSNLRKFTFSELKSCTRNFRTDSLLGEGGFGSVFKGWIDERTFTPVKPGTGMIVAVKKLKLDSFQGHKEWLAEVNYLGQLSHPNLVKLIGYCLEDEQRLLVYEFMPRGSLEHHLFRRAPHFQPLSWNLRMKVALEAARGLAFLHSDEAKVIYRDFKTSNVLLDSEYNAKLSDFGLAKDGPSGDKSHVSTRVMGTQGYAAPEYLATGHLTTKSDVYTYGVVLLELLTGQRALDKNRPPGQHNLVEWARPYINSKRRVIHVLDPRLGSQYSLPAAQKAAALAMQCLSMDARCRPDMDQVVTVLQKLPEVKKTYK

SEQ ID NO: 17421 - protein, 241 aa, Leptotes bicolor
SDSGKDAGRLSAAWQLYKTQEELVKVAKEYGVKLTMFHGRGGTVGRGGGPTHLAILSQPPDTIMGSLRVTVQGEVIEQSFGEELLCFKTLQRYTAATLEHGMKLPFSPKPEWRALMDEMAVVATNEYRSIVFQEPRFVEYFRSATPELEYGRMNIGSRPSKRRPSGGIESLRAIPWIFAWTQTRFHLPVWLGFGAAFKHVIQKDLKNLNMLREMYNEWPFFRVTIDLIEMVFTKGSPGIAA

SEQ ID NO: 17422 - protein, 243 aa, Lycopersicon esculentum
KRLMTDVPFGVLLSGGLDSSLVASVTARYLAGTKAAKQWGAQLHSFCVGLEGSPDLKAAKEVADFLGTVHHEFHFTVQDGIDAIEDVIYHIETYDVTTIRASTPMFLMSRKIKSLGVKMVISGEGADEIFGGYLYFHKAPNKEEFHRETCRKIKALHQYDCLRANKATSAWGLEARVPFLDKEFINVAMSIDPEWKMIKHDQGRIEKWVLRKAFDDEEQPYLPKHILYRQKEQFSDGVGYSWI

SEQ ID NO: 17423 - protein, 486 aa, Nocardioides sp. JS614
MARNFGREVPGLGQHFRRTLAVHWACRHGIGGRAPYRRDHGEVDITITLSLRVRVPTYRADSDQISVISVTSTDIRTRAARGEPAVAAAQNYLAIIKVVGIGGGGVNAVNRMIEVGLKGVEFIAINTDAQALLMSDADVKLDIGRELTRGLGAGANPEVGARAAEDHADEIEEVLKGADMVFVTAGEGGGTGTGGAPVVARIARSLGALTIGVVTRPFAFEGRRRANSAEEGIAGLREEVDTLIVIPNDRLLSISDRNVSVLDAFKQADQVLLQGVSGITDLITTPGLINLDFADVKSVMSNAGSALMGIGSARGEDRSVAAAEMAVSSPLLEASIDGAHGVLLSIAGGSDLGLFEINEAAALVAEAVHAEANIIFGATIDDALGDEVRVTVIAAGFDGGMPKRTGEGTVLRREPKQAPAPQQTQQETRAAAQAIAAGSDDADKEKVAAGAQSRPQGGTTPDAATRPAPRQVQFDDDDLDIPDFLK

SEQ ID NO: 17424 - protein, 358 aa, Zea mays
  misc_feature (48)..(48): Xaa can be any naturally occurring amino acid
MSPTEEAAGGGGDDYDRLSELKAFDDSKAGVKGLVDAGVTTIPAIFRXPSPSGRAEVAREEVVAQLKAAAETVGFFQLVNHGVPSELLCEMLPSVRRFNEEPHEVKRPYYTRDARRKVRFNSNFDLFQSPAANWRDTLFCEAAPEPPRAEELPVAVRHVMLEYGGAVREVAARVLGLLSEALGLSPGHLAGMGCAEGLSLVCNYYPPCPEPDLTLGCSRHSDPSFLTVLLQDSHAQGGLQALLASRWLDVPPVAGALLVNVGDLLQLVSNGRFKSVEHRVVANRSRDTARVSVACFCNADIARSTRLYGPIAELIAADDSDGAGRALYRNVTVPEFLAHYDKKGLDGRPALHRFQLLQ

SEQ ID NO: 17425 - protein, 372 aa, Halobacterium sp. NRC-1
MDDGTIETFKAFRSQFNGDRGPYKGGIRYHPGVTRDEVKALSGWMVYKTAVADIPYGGGKGGIILDPEEYSDSELERITRAFATELRPFIGEDKDVPAPDVNTGQREMNWIKDTYETLEDTTAPGVITGKALENGGSEGRVNATGRSTMFAAREVFDYLDRDLSDATVAVQGYGNAGSVAAKLIADQGADVVAVSDSSGAVHNPDGLDTRAVKAFKTETGSVSGYEGATEELSNEALLTMDVDLLVPAALENAIDEDLAHDVDADVVVEAANGPLTPDADDVLTERGVTVVPDILANAGGVTVSYFEWVQNRQRFQWTEDRVNEELEAIITDAFDAMTDAHEDAGTPNLRTAAYVVAVQRVVDAYEGSGSWP

SEQ ID NO: 17426 - protein, 364 aa, Leptotes bicolor
SDSGKDAGRLSAAWQLYKAQEDLIKAAKEFGVKLTMFHGRGGTVGRGGGPTHLAILSQPPDTIHGSLRVTVQGEVIEQSFGEEHLCFRTLQRFTAATLEHGMRPPISPKPEWRALLDEMAVVATEEYRSIVFQEPRFVEYFRLATPEMEYGRMNIGSRPSKRKPSGGIESLRAIPWIFAWTQTRVHLPVWLGFGTAFKYAIEKDIKNLHMLQEMYNAWPFFRVTIDLVEMVFAKGDPGIAALYDKLLVSDDLWSFGERLRASYEETKNLLLQVAGHRDLLEGDPYLKQRLCLRDSYITTLNVCQAYTLKRIRDPNFHVNLRPHISKEIMDSNKTAAELVKLNPTSEYAPGLEDTLILTMKGIAA

SEQ ID NO: 17427 - protein, 296 aa, Candidatus Blochmannia floridanus
MSILIDQNTKVICQGFTGKKASFHSRQSLLYGTKILGGVTPGKGGYTHLGLPVFNTVHEAICHTNATVSVIYVPALFCKDAILEAIDSKIKLIVCITEGMPILDMLIIKNQLKKQNSCIMIGPNCPGIITPNQCKIGIMPGYIHNAGNIGIVSRSGTLTYEVVKQITDIGLGQSTCVGIGGDPILGSDFIDILRLFEKDPQTELIIMIGEIGGQSEQEAASYIKKYITKPIVAYIAGLTAPKGKRMGHAGAIISGKHSGAHEKCTVLSKSGVHIVNNFAYIGKTISKILTNRQNHP

SEQ ID NO: 17428 - protein, 564 aa, Zea mays
MAAAAVTSNGGAVAANGPAPGRLASVYSEVQTSRLLHTLPLPSVLRSNFSVVDGPASSAAGNPDEIAKLFPNLFGQPSASLVPSAEPAATRPLKVGVVLSGGQAPGGHNVICGIFDYLQERAKGSTLLGFKGGPAGIMKCKYVELTSDFVYPYRNQGGFDMICSGRDKIETPEQFKQAEDTANKLDLDGLVVIGGDDSNTNACLLGEYFRSRNLKTRVIGCPKTIDGDLKCKEVPTSFGFDTACKIYSEMIGNVMTDARSTGKYYHFVRLMGRAASHITLECALQTHPNAALIGEEVAAKKETLKNVTNYITDIICKRADLGYNYGVILIPEGLIDFIPEVQKLIAELNEILAHDVVDEAGAWKSKLQAESRELFEFLPKTIQEQLMLERDPHGNVQVAKIETEKMLISMVETELEKRKAEGRYSAHFRGQAHFFGYEGRCGLPTNFDSNYCYALGYGAGALLQSGKTGLISSVGNLAAPVEEWTVGGTALTSLMDVERRHGKFKPVIKKAMVELDAAPFKKYASLRDEWAIKNRYISPGPIQFSGPGSDDSNHTLMLELGAEL

SEQ ID NO: 17429 - protein, 105 aa, Pisum sativum
MVVVSAPMAEAAISCGAVTAAVAPCFAYLKGAPSPSLQCCGGVRRLNGIPDRKGVCNCLKGAAGSVPGLKPGNVAALPANVVLDFLSRLAPLPTVMPSVFKKKCG

SEQ ID NO: 17430 - protein, 298 aa, Mycoplasma penetrans HF-2
MKNTQRLDILVSSKFSLSRSIAKHKIENNLVTVNGKIISKPNTKVDEESEIILKEEKIVEETKVLTPWKKDIEIVYEDKYILIVNKPNDIIVHPTSYDLSNTLANIIKYIFDSKKIKYNGDPLRMGIVHRLDKCTEGLVIVAKSLDSFNAFTKLFLDQKIEKKYLALLHNHLQTRTVEVDAPIKRVETSTRREVSRDIDAKEARTIFKEINKYKNFTLAEVELFTGRTHQIRVHAEFIKNHVINDPIYGPKHINKTTKYGQYLVAYKLKFIHPFTQKEVNINLDMPKEFKEYIKKYGK

SEQ ID NO: 17431 - protein, 291 aa, Raphanus sativus
DEFMNEVRLVARLQHINLVRILGCCIDADEKMLIYEYLENSSLDSFLFGKKRSSNLNWKDRFDITNGVARGLLYLHQDSRFRIIHRDMKVSNILLDKNMIPKISDFGMARIFAREETEANTKKVVGTYGYMSPEYAMNGIFSEKSDVFSFGVIVLEIVSGKRSRGFYNLNHENNLLSYAWSHWTEGTALEIVDPIIIDSSSSLPSTFQKKEALKCIQIGLLCVQERAEHRPTMSSVVWMLGSEATEIPKPNPPGYYVGRCSYENNPSSSRLCDDYESWTVNQYTCSVIDAR

SEQ ID NO: 17432 - protein, 130 aa, Pyrococcus horikoshii OT3
MNEREFKRLLKVRARLKRKKPRFLRQEWWRYPKFKNDPKWRRPKGIDSKMRLKLKGKPRSPSIGWSSPRLVRGLHPSGYEEVLIHNVKELERLDPRRQAARIAHTVGKKKRIEILKRAEELGIKVLNPRL

SEQ ID NO: 17433 - protein, 289 aa, Raphanus sativus
DEFMNEVTLVARLQHKNLVQILGCCIDANEKMLIYEYLENLSLDSYLFGKTRRPKLNWKERFDITNGVARGLLYLHQDSRFRIIHRDLKVSNILLDKNMIPKISDFGMARIFAREETEANTMNVVGTYGYMSPEYAMHGIFSEKSDVFSFGVIVLEIVTGKRNRGFNNLNYEHNLLNYAWSNWKEGRAIEIVDPDIVDSLSPLSSTFQPQVIKCIQIGLLCVQERAEHRPTMSSVVWMLGSEVTEIPQPKPPGYCVRSSYELDPSSSRQCDDDQSWTVNQYTCSVIDAR

SEQ ID NO: 17434 - protein, 1214 aa, Zea mays
MWSRSELVVVVGLVASFLFSMESGCFLIWNVRGLNNRAKRDFVKSLVVSLKPAVICLQETKMCSVSDFDILSILGSGYSNFVYGPAHGSRGGLLVAWHDGSFASVASVVKDNSVSVQLKSVSGPLWWFTGVYGPYQDSLKPAFLQELRDIRNACVGPWIIAGDFNQIYKSEDKNNSNVNRALLGNFRDLINSLDLKEIPLNGRRFTWSNQRENPTLVKLDHVFCSTCWEEAFPDCFLYSSASETSDHCPLILKLSLDLKGKRRFHFESFWPKLPGFMEEVAASWDQPVQASCPFERVSIKFKRLARRLQSWGHNAVGNVSSQLGVAREVLHRMEMAQDSRVLSSEEVWLLRKLKQHCLVLASLERTVARLRSRVHYLREGDANTKFFHLQARHRKKRNFISHLEDEGRLVTSHDQMQEVLDDFFSNLLGSIVQRPFTLDLASCHRDAIDLSLLEAPFSEKEVQDTIGALPSDKAPGPDGFTGRFYKRCWHIIKSDLLAAINSLHQGNAYKLGLLNSAFIALLPKKIDALTARDFRPISLIHSFAKLVTKMLANRLGPHLQELVAANQSAFVRGRSIHDNFMLVQHSIKSLHKKKVSSLFLKLDISKAFDSVSWAFLTEVLSHLGFGPVWRSMISNLLTSSSTQVLLNGSPGIPIKHRRGLRQGDPLSPMLFVLVMDVLNSLFKLAENRGLLHRLEGANIRNRLSIYADDVVLFVQPFEEDLHCVRTILDCFGSASGLVSNLQKSYVIPIRCNQQAVQVGCNILQCSSSSFPCTYLGLPISDKKLRRNDLMVWVDKIADRLPNWKARLLNLAGRTAIVRFVLSAIPVYLLIAMNIPKWVINSIDKIRRGFLWKGRKEVTGGCCLVSWDIITRPLYLGGLGISNLLYQSWALQTKWLWLKKTDPNRPWVGLKFPIQQHVRRFFASSIITLVGDGSTTLFWTDRWLDGSCIHDLAPDVVASVGKRASSSRTVAHALENWQWVSDLETPLNLIGLQQYLQLWDALRGVVLTQEADRHVWIHSSSGQFSSRSCYKAFFMGSITFEPWKRLWESWAPPKCKFFLWLAIRNKCWTADRLQKRGLDHPEVCPLCDQEPENIQHLLCSCIFARQFWHCILAPLGLANLSPASIEISFAEWWRKVCKQVHKSKRRGINSVIIMGAWCLWIHRNKAVFEGVSPSISRIQKVFLEELECWGLAGAKHLEGLGLGAAIIRSREFLGE

SEQ ID NO: 17435 - protein, 99 aa, Triticum aestivum
MARVALLAVFAVLAALAVAEMASGAVTCGDVTPSAGCCSGVRTLNAKASTSADRQAACRCLKKLAGSGISMGNAANIPGKCGVSVSFPINTKVDCNTLH

SEQ ID NO: 17436 - protein, 291 aa, Raphanus sativus
DEFMNEVRLIARLQHINLVRILGCCIDADEKLLIYEYLENSSLDSYLFGKKRSCKLNWKHRFDITNGVARGLLYLHQDSRFRIIHRDMKVSNILLDKNMIPKISDFGMARIFGRDTSEASTRNVVGTYGYMSPEYAMYGVFSEKSDVFSFGVIVLEIVSGKRSRGFYQLNNDNNLLSYAWSHWTEGRALEIVDPVIVDSLSSLPSTSQPKEVLKCIQIGLLCVQERAEHRPTMSSVVWMLGSEATEIPQPKPPVYRLAKSFYANNPSSSRHCEDNESWTVNQYTCSVIDAR

SEQ ID NO: 17437 - protein, 453 aa, Rickettsiella grylli
MPFVPHTDVEIQEMLATLGVHTIDDLFDEIPPHLKTIEFSQIPSGFTEMELTQIIEKRSQENKKGLCFIGAGAYEHYIPAAVWEITSRGEFLTAYTPYQAEASQGSLQLIYEYQTMMARLTGMDYSNASLYDGATALAEAVLMAIRSNKKTHSIKILIPRTVHPHYRHTLQTIVTQQAIELIELDYCPEQGKILLSTLENDPKNDMCALVIPQPNFFGVLESVDELTDWAHSQNAFVIAVSNPLSLALLKEPGSWGTQGADIVCGEGQALGVPLAGGGPYFGFMCCKKPWLRQMPGRIVGRTRDKNNRPGFTLTLQAREQHIRRAKATSNICTNQGLLVTAATIYMSLLGSKGLQHVASLSHQRSRQLAALLTQLPEIEFIFNSPFFHEFVIRVPQPARDLLRELTTVGIHGGYDLSHHYPELGNALLVCATETKSQSDLKVYQHALLKLLSN

SEQ ID NO: 17438 - protein, 125 aa, Arabidopsis thaliana
KNRPCKVVEVSTSKTGKHGHAKCHFVAIDIFTAKKLEDIVPSSPNCDVPHVTRVDYQLIDIPEEGFVSLFPDSGGPKDDFKLPPDDGLPAQMRLGFDEGKDIVVSVMSSMGEEQICPVKEVGGGK

SEQ ID NO: 17439 - protein, 288 aa, Raphanus sativus
DEFMNEVRLIARLQHINLVRILGCCIDADEKMLIYEYLENSSLDYFLFGKKRSSNLNWKDRFAITNGVARGLVYLHQDSRFRIIHRDMKAGNILLDKNMIPKISDFGLARIIARDQTEASTDNPIGTYGYMSPEYAMYGILSEKTDVFSFGVIVLEIVTGKRNRGFYQSTPEDNLVCYAWTHWAQGRALEIVDPVIVDSLSSTFQPKEVLKCIQIGLLCIQERAVHRPTMSSVVWMLGSEATAIPQPKPPVYCLIPSFYANNPSSSRPSDNDESWTMNEYTCSVIDAR

SEQ ID NO: 17440 - protein, 170 aa, Glycine max; identical to SEQ ID NO: 630

SEQ ID NO: 17441 - protein, 656 aa, Polaromonas sp. JS666
MCGLAGYFSGQWPADGEQASARLKAMTDAIAHRGPDSDGYWLDAATCMALGHRRLAILELSAAGAQPMHAASGRYVIAYNGEIYNHLDLRADLQKSGQSPAWRGHSDTETLLAGFDAWGIQGAVERTVGMFAFAVWDRQERMLTLGRDRLGEKPLYYGWQGSGSSAVFLFGSELKALRAHPAFGAQINRDALCLYMRHNNVGGSHSIYQGIHKLPPGTLLTVSRQTPEPVIRPYWSGAEVARCGVAQPFGGTSGEAVDALEALLKDAVRQQMMADVPLGAFLSGGVDSSAVVALMQTQSLRPVKTFSIGFHEAAYNEAEHAKAVAQHLGTEHTELYVTPEQAMAVIPRLPTLYDEPFADSSQIPTFLVSQLARQHVTVSLSGDAGDELFGGYNRYQLTASLWRKLSAAPLPLRRAAAWGLTRFSPQSLNSLAALMPASARWAHMGDKLHKGAGVMAGRTVEDLYLGMVSDWHDPAAVVIGGREPATLLRGRRPDLPGLTDVERMMALDMLSYLPDDILTKVDRAAMGVSLETRVPFLDHRVVEFAWRLPLHYKLRQEGGRYTTKWALRQVLYRHVPQALIDRPKMGFGVPIDRWLRGPLRDWAEDLLSETRLKREGYFKPAPIRQKWAEHLGGQRNWAPHLWTALMFQAWLQANHA

SEQ ID NO: 17442 - protein, 205 aa, Yarrowia lipolytica CLIB122
MPPKKRTMLKVVILGDSGVGKSSLMQQYVNNKFSTQYKATIGADFLNKELTLEGRKVNMQIWDTAGQERFQSLGLAFYRGADCCVLVYDVNNSKSFDALTLWRDEFLLLANPRDPENFPFVVIGNKVDVEESKRAVSAKRAQAFCKATGNIPYFETSAKEDTGVDQAFETVARNAMAQVDSEDYTDDFADTINIHLDNEQSNCAC

SEQ ID NO: 17443 - protein, 406 aa, Alkaliphilus metalliredigenes QYMF
MNIVVQKFGGTSVSTKERRTQVINKILQTKQKQKNIVVVVSALGRKGDAYATDTLRNLLLEENPLCSLKTLDLLMSCGEIISATLLGSALEALGEKVIVLTGAQAGILTDDHFSNAEIIAIDEKRSLSYLEKDYIVVVPGFQGATASGEVTTLGRGGSDTTATALAVALNAEYVEIYTDVDGIMTADPNVVPRARILDQVNYNEVFQMAEKGAKVIHPRAVEIAQKKNIPVNIRNTMSEHPGTRIHSFTGDKESLYCSQPKKNLLTAITHKDGISQVSVHMENNLAHDSLLLSTLAESKVSIDMINFFLDKKIFTISTEQINIVQIQLKKLNFSHEIRTHCSKVTVVGNRITGIPGVMATIVGALSSEDIQILQSSDSHSTISCLVDESDAKKAVNALHSAFHLDC

SEQ ID NO: 17444 - protein, 505 aa, Hordeum vulgare
MAAPPAIPRRGLFIGGGWREPTLGRHIPVINPATEDTIGDIPAATAEDVELAVAAGGPVLARRREPWARASGATRAKYLNAIAAKITGKIAYLALLETVDSGKPKDEAVADMDDVAACFEYYAALAEALDGKQHAPISLPMEEFKTYVLKEPIGVVGLITPWNYPLLMATWKVAPALAAGCTAVLKPSELASLTCLELGAICEEIGLPSGVLNIITGLGPDAGAPIASHPHVDKIAFTGSTATGKTIMTAAAQMVKPVSLELGGKSPLVTFDDVADIDKAVEWPMLGCFFNGGQVCSATSRLLLHEKIAEPFLDRLVEWAKNIKISDPLEEGCRLGSVISKGQYEQIKKFISTARSEGATILHGGDRPKHLGKGFFIEPTINTGVSTSMQIWREEVFGPVICVKVFKTESEAVELANDTHYGLAGGVISDDLERCERIAKVIHSGIVWKNCSQPTLVQAPWGGNKRSGFGRELGEWGLENYLSVKQVTRYCKDELYGWYQRPSKL

SEQ ID NO: 17445 - protein, 331 aa, Arabidopsis thaliana
MGVDYYNVLNVNPSATEDDLKKSYRRLAMKWHPDKNPTSIKQEAEAKFKQISEAYDVLSDPNKRQIYDQYGEDGLTATEATASSQQHNYSSGNNNNYNAGFRYYPRDAEDIFAEFFGASEKVFDGGVGGGGRFKSAEAGSQTNRKTPVNRKAPAIESKLACTLEELYKGGRRKMKISRVVPDGLGKSKPVEEILKIDITPGWKKGTKITFPEKGNQEPGVTPADLIFVIDEKPHSVYKRDGNDLIVDKKVSLLEALTGITLSLTTLDGRNLTIPVLDIVKPGQEIVIPSEGMPISKEGSKRGDLRINFEICFPSRLTSEQKTDLKRVLGGS

SEQ ID NO: 17446 - protein, 121 aa, Helicosporidium sp. ex Simulium jonesii
FTPQYAELEQLQQEFGAQGFDVLGFPCNQFMNQEPGDSCSIRDAARAKHGATFPMFAKIKVNGSEADPLYKWLKEQKGGILTSAIKWNFAKFLVDRQGKVVGRYAPTTSPKDIANDIKKFL

SEQ ID NO: 17447 - protein, 543 aa, Bdellovibrio bacteriovorus HD100
MNNERNSRNMATDVKLPELGEGVTEGELVKWLVKPGDAVKADQAIAEVLTDKATVEVPSPVAGVVKDLKFKSGDVVKVGATMITLDGAGAAKPAAAQPAAAAPAPAASTPAPAAGGGKAQDVKLPELGEGVTEGELVKWLVKPGDSVKADQAIAEVLTDKATVEVPTPVAGVVKELKFKSGDVVKVGSTMIILEGAGGAAAPKAAPAAAAAPAPAAAPATKAAAPVATASSDIFPPVADSKVLATPATRRLAREMGVDINSLTGTGLAGRVTREDVMSSGGGAAPAAAKAAPAAASMTIPKPAYQGPAGAAEERVPMIGIRKKIAENMQRSKHVIPHFTIMDEAKVDAMVALRESLKEHAEKNGTKITYLPIIMKALIATIREFPMFNASIDDAAGEIVYKKYFNLGFAADTPNGLVVPVIKNADQKSILEISKEILDLSKRARDGKLKPDEMKGATITVTNIGSIGGTYATPVINHPEVAILGMYKIDEKVVLKNGQVSAIKVMNYTMTADHRLIDGAVAARFLAAFIGRIENPGKLLVELI

SEQ ID NO: 17448 - protein, 400 aa, Caulobacter crescentus CB15
MSRLSEALTRLKAGGMIVLVDDEDRENEGDLVMAAEFADAAAIAFMAKRASGLICLTLEAETIDRLCLAPMVSDNRTSRQTAFTVSIEAATGVDTGISAFDRARTIAAAIAPDAQAADLVSPGHVFPLRARPGGVLVRNGHTEASVDLMRMAGLRPAGVICEIMKDDGSMARRPDLEVFCREHDLPLLTIAELVAHRKATELLVDEVAAARLPSDHAGQAFSVRAFRSRIDGGEHLAMVAGPLTGAPLVRVHSECLTGDALGSRRCDCGEQLRESLRQISDSGNGALIYLRNHEGRGLGLANKIAAYALQDQGLDTVQANHALGFADDQRDYGVAAQILRALGVGEVKLLSNNPRKAAGLRANGVTVRREVPLLIPANPDNAAYLETKRDKLGHSLARAS

SEQ ID NO: 17449 - protein, 560 aa, Oryza sativa (japonica cultivar-group)
MASHIILPKEEEAALGVAVEEDHDSPAAPGYQHQQGPPVAKALPFSATCVRISRDSYPNLRALRNASAMSLPDDDAAYAKLEEGDYGYLLDDVPHFTDYLSDLPTFPNPLQDHPAYSTVKQYFVNADDTVPEKVVVQKDSPRGVHFRRAGPRQRVYFESEDVKACIVTCGGLCPGLNTVIRELVCGLSHMYNVNDIFGIQNGYKGFYSSNYLPMTPKSVNDIHKRGGTVLGTSRGGHDTKKIVDNIQDRGINQVYIIGGDGTQKGAYEIYKEIRRRGLKVAVAGVPKTIDNDIAVIDKSFGFDSAVEEAQRAIDAAHVEASSAENGIGLVKLMGRYSGFIAMYATLASRDVDCCLIPESPFYLEGEGGLFEYIEKRLKENNHMVIVVAEGAGQDLIAKSIAAADQIDASGNKLLLDVGLWLTHKIKDYCKNKKMEMTIKYIDPTYMIRAIPSNASDNVYCTLLAHSAIHGAMAGYSFTVGMVNGRHAYIPFHRVTSTRNKVKITDRMWARLLSSTNQPSFLSQKDIDAAREADKLASKSPVPVNTKEHGENVKKPANGEK

SEQ ID NO: 17450 - protein, 142 aa, Deinococcus radiodurans R1
MSDILTCTHCQAKNRVGAVPAGQVPSCARCGAALPWLHDGTDATFEQDLQTSVPVLVDFWAPWCGPCRVMGPVLEDLARDLPGKVRVVKVNVDENPRTAARFEVRSIPTLLMFKDGEEVDQMVGVTQKAALRARVEHLNQLS

SEQ ID NO: 17451 - protein, 445 aa, Porphyromonas gingivalis
MKTQEIMTMLEAKHPGESEFLQAVKEVLLSVEEVYNQHPEFEKNGIIERIVEPDRVFTFRVPWVDDQGKVQVNIGYRVQFNNAIGPYKGGIRFHPSVNLSILKFLGFEQMFKNALTTLPMGGGKGGADFSPKGKSEAEIMRFCQSFMTELWRNIGPDTDIPAGDIGVGGREVGYMFGMYKKLAREHTGTLTGKGFEFGGSRLRPESTGFGAVYFVQNMCKQNGVDYKGKTLAISGFGNVAWGVAQKATELGIKVVTIYGPDGYVYDPDGINTPEKFRCMLDLRDSGNDVVSDYVKRFPNAQFFPGKKPWEQKVDFAMPCATQNEMNLEDAKTLHKNGVTLVAETSNMGCTAEASEYYVANKMLFAPGKAVNAGGVSCSGLEMTQNAMHLVWTNEEVDKWLHQIMQDIHEQCVTYGKDGNYIDYVKGANIAGFMKVAKAMVAQGVC

SEQ ID NO: 17452 - protein, 701 aa, Eremothecium gossypii
MATVGASAEQLLQDINCEGYLGAFRKYEISSVDQLQHLDHEILEQVGIRSIGDRIRILNKSRTLQAGRDKGLLEELQQVIGKINALSAGPMAISEELVTDRHSVIFILNDGSAKKVNVNGCFNADSIKKKLIKRLPPEFVAVAQNGEETSSQDYDVFVVDYAKNVLHLLYDVELVTICHSSDRVEKNRLIFVSKDQTPSDKAILTSKKLYLKTMSAIHQLGSLPTMLQTQGATTVGNYATPGAEAPAGDEDSLRIDNSKESLRRIFNQRPPSELISTNLPEYFPHTDFKRLQKTLRSSFRQSVRMSMLRPGAPLPEGNNVGNILVNQNQAVDRALLQSLDGTKTSSRSSGRSSVDGDASSMGSERRTNASKSTTLDGRDSDAGGRIELLNSESESECDDDNIVSLPTKVVTPKSWLKGARIGSGSFGSVYLGMNAHTGELMAVKQVELEPTTVMASSDDKKSHPSSNAVVKKLTDPPQDGGRASSTKMNLLKELHHENIVTYYGSSQEGGNLNIFLEYVPGGSVSSMLNSYGPFEEPLVKNFTRQTLVGLTYLHRKNIIHRDIKGANLLIDIKGSVKITDFGISKKLSPLNKKQNKRASLQGSVYWMAPEVVKQVVTTEKADIWSVGCVVVEMFTGKHPFPDFSQMQAIFKIGTNTIPELPSWASDGAKAFLYQTFELDYKKRPSSVELLQHKWLDTTTML

SEQ ID NO: 17453 - protein, 403 aa, Listeria monocytogenes
MKIIVQKFGGTSVQNEKSRLMAFNHIKQVLKEGYKVVVVVSAIGRYGDPYATDTLLELIGAKNTKLTAREQDTLLSVGETISASVFTNMLKEANIKAEAFSGGQAGIITSDDHLNAKITEVDTARLKDALTNLDVAVVAGFQGITANGDISTLGRGGSDTSAAALGVSLQANYIDIFTDVDGMMTADPRIVEHARSLPRVSYNEVSNMAYQGAKVIHPRAVEIAMTAKIPMRIRSTYLESTGTLVTSLADDSGHFDVKERMVTGVAHVTNLTQISVQADTVKAQQLAFKILADAGISLDFINISTNSVIFTVPEEKSHVVKQLLEDADLQTTVRQACAKVSIVGAGITGVPGVTAKIVGALSEKNIPILQSADSHTTIWVLVREKDLISAVNALHDVFCLEIK

SEQ ID NO: 17454 - protein, 580 aa, Nocardia farcinica IFM 10152
MSATAFPTLSTPAGEIPATAPAWNRQRRSQMPSHRYRDVHSRVAVPLTDRQWPTRRLTEAPLWVPVDLRDGNQALAEPMDPARKRRFFELLVAMGYKEIEVGYPSASQTDFDFVRLLADTDLAPDDVTVVVFTPARRDLIERTVESIRGITNPVVVHMYTATAPTWREVVLGHDRAALRALILDGGREVLRCAGDLPTVRFEFSPEVFNLTEPDFVLEICDAMTELWQATPQRPVILNLPATVEVATPNVYADQIEYMHRNLARRDSVILSVHPHNDRGTGIACAELAVLAGAQRVEGCVFGNGERTGNVDIATLALNLHAQGVDPMIDFSDIDEIRRTVEYCNRVEIHARHPYVGDLVHTAFSGTHQDAIKKGLAEHRARAAARGVPEREIDWRVPYLPIDPADIGRSYDAVIRVNSQSGKGGIAYLLESEYGTVLPRRLQIDFARHVQQHTDDTGREVTAAELWSLFSAVYLREGEADAPQADLGNRLGIDGVVASGASAAELGAALRRHGVELEVLAVHHTTVTGELLALVEYRDGAGVRWSAGRGRTAGEAVGNAVAAAVGPATAPARAVAEVRPG

SEQ ID NO: 17455 - protein, 865 aa, Nostoc sp. PCC 7120
MSNVDQVNYELADELTALRQRIAELEQLEKQYQHKQVELERHIEDLQAKLRTLHITNVDIESHLEPVTLQRLQQEISQRQQVDAALTESEERWRLALDAANLGFWDWNVLTAKVVWSENHERLFGLVSGSFDGTYETFLSCVHPEDRESVIQVIGVCLENKTDYYDEFRIVWPDKSIHWIAAKGRFFYNDQGQPVRMIGVCMDITKSKRTEENNRQLATQVQEQANVLNAILATSVDHIYIFNRTGHYQYVSHGGAAVLGLYPQQMIGKTVQELNLPQELIDKVNGQFLAVMKAGKPVKDECEYVAADGKHYYEYILTPLRNIDHNIEGVITVSRDMTEHKRAEQSIRNSEARFRRLFESNLIGVAFWNVDGFITDANDAYLQLVGYTREQFNTLGKINWRELTPPDYKHLDDRAIAEVKTNGISRIYEKQYIQRNGRRVSIVLGIALLDDSDEQGVAFVLDISERKLAEQQRDRLLCAERIARKDAEIANRIKDEFLAVLSHELRTPLNPILGWSKLLRSRQFDAATTDRALETIERNATLQTQLIEDLLDVSRILQGKLSLNICPVSLPIVIGAAIDTVRLAAEAKEIKIQNVFDPNLGQVMGDANRLQQVVWNLLSNAVKFTSPGGTVEIHLKAVNDQAQIQVIDTGKGITPEFLPYVFDYFRQADGTTTRNFGGLGLGLAIVRQVVELHGGTVQAKSPGDGLGATFTVNLPLSPKNEAMNHEDKNPVSANFQPATLSGVRVLIVDDEPDIRDLVTFILEDYDVKVIAVSSAQEALEALSQSLPDIIVSDIGMPDVDGYMLMRQLRQRSPQEGGNLPAIALTAYAGEINQKQALAAGFQLHISKPVDPDALIEAIGNLVNNQ

SEQ ID NO: 17456 - protein, 362 aa, Leptotes bicolor
SDSGKDAGRLSAAWQLYKTQEELVKVAKEYGVKLTMFHGRGGTVGRGGGPTHLAILSQPPDTIMGSLRVTVQGEVIEQSFGEELLCFKTLQRYTAATLEHGMKLPFSPKPEWRALMDEMAVVATNEYRSIVFQEPRFVEYFRSATPELEYGRMNIGSRPSKRKPSGGIESLRAIPWIFAWTQTRFHLPVWLGFGAAFKHVIQKDLKNLNMLREMYNEWPFFRVTIGLIEMVFTKGSPGIATLYDKLLVSPELLPFGEQLRAKYEETKRLLLKVAGHKELLEGDPYLKQRLRLRYPYITTLNVCQAYTLKRIRDPSYHPTAKPHLPTEIMNYEAAELVKLNPTSEYAPGLEDTLILTMKGIAA

SEQ ID NO: 17457 - protein, 362 aa, Leptotes bicolor
SDSGKDAGRLSAAWQLYKTQEELVKVAKEYGVKLTMFHGRGGTVGRGGGPTHLAILSQPPDTIMGSLRVTVQGEVIEQSFGEELLCFKTLQRYTAATLEHGMKLPFSPKPEWRALMDEMAVVATNEYRSIVFQEPRFVEYFRSATPELEYGRMNIGSRPSKRKPSGGIESLRAIPWIFAWTQTRFHLPVWLGFGAAFKHVIQKDLKNLNMLREMYNEWPFFRVTIDLIEMVFTKGSPGIATLYDKLLVSPELLPFGEQLRAKYEEAKRLLLKVAGHKELLEGDPYLKQRLRLRYPYITTLNVCQAYTLKRIRDPSYHPTAKPHLPTEIMNYEAAELVKLNPTSEYAPGLEDTLILTMKGIAA

SEQ ID NO: 17458 - protein, 175 aa, Xylella fastidiosa Ann-1
MHPKNFQHQLKTIPQPPDETRDFVFNHTMLRVKEINASLDFYARILGFRLIDQRDFPEAQFSLYFLALLPQTVHISDNDTERRLWMSGIPGVLELTHNYGTETQEGQIYHNGNSEPRGFGHICISVPDLYSACARFDTLQVPYQKRLTDGRMKNIAFIKDPDGYWVEIISNTPLP

SEQ ID NO: 17459 - protein, 241 aa, Kalanchoe fedtschenkoi
ERYRSIVFREPRFVEYFRLATPELEYGRMNIGSRPSKRKPSGGIESLRAIPWIFAWTQTRFHLPVWLGFGEAFKHVIDKDNKNLLMLQQMYNEWPFFRVTIDLVEMVFAKGNPGIAALYDKLLVSEELLPLGEQLRTAYNDTKSYLLKITGHNEILGGDPFLKQRLKLRTAYITTLNVCQAYTLKRIRDPSYQVPVRPPIAKEILEGSVTSANQLVKLNPTSEYAPGLEDTLILTMKGIAA

SEQ ID NO: 17460 - protein, 411 aa, Tropheryma whipplei TW08/27
MSRQVVVTGLGVCCPLGIGTELAWQALLDGESGVRTLPDRCTKGFDLPVTFAGLVPDGVEDLLARTEVNRLDRAGQISLIAARQAVEDAGDIKQNPERTAVSWGTGIGCINTVLSAWDRLAEKGPGRVLPMTVPMLMPNAPAVAVGMKMQARAGIHTSVSACAASTESIAVGFDMIRSNKADVVIAGGSESAINPLTISAFASLSALSTYSGNPEHASRPFSKNRDGFVVSEGAAVLILEEKTRAKARGAKIYAEISGALFNSDAHHITAPEPDGKMATTAMRNTLKMGGLSPEEITYVNAHATATILGDISEYKALLALFEDHLANVYVSATKASTGHLLGGAGALEAVFTVKAVSESIIPPTINCDEQDPDIQLRIQRQPKKLSRPFAAISNSFGFGGHNAVVAFTPTD

SEQ ID NO: 17461 - protein, 581 aa, Corynebacterium efficiens YS-314
MPVKRYLPFEVEVEDITLPDRTWPDKKITQAPQWCAVDLRDGNQALIDPMSPERKRRMFELLVKMGFKEIEVGFPSASQTDFDFVREIIEKNMIPDDVTIQVLVQAREHLIRRTFEACEGAKNVIVHFYNSTSILQRDVVFRMNKDQVKTLATDAAELIKTIAQDYPDTNWRWEYSPESYTGTEVEYAKEVVDAVVEVMDPTPENPIIINLPATVEMITPNVYADSIEWMHRNLNRRDSIILSLHPHNDRGTGVAAAELGYMAGADRIEGCLFGNGERTGNVCLVTLALNMLTQGVDPQLDFSDIKHIRRTVEYCNQLRVPERHPYGGDLVFTAFSGSHQDAINKGLDALAAKVKPGASSTEVAWEELRSTEWEVPYLPIDPKDVGRDYEAVIRVNSQSGKGGVAYIMKTDHGLKMPRSMQVEFSAVVQNVTDAEGGEVNSKEMWDIFATEYLDRSAPVEQIALRVENAQTENDDATITAELVVDGENQTVSGRGNGPLAAYANALESLNIDVEIQEYSQHARTSGDDAEAAAYVLAEVNGRMVWGVGIAGSITYASLKAVTSAVNRALDFKHQQLQNGGV

SEQ ID NO: 17462 - protein, 139 aa, Parietaria judaica
QETCGTMVRALMPCLPFVQGKEKEPSKGCCSGAKRLDGETKTGPQRVHACECIQTAMKTYSDIDGKLVSEVPKHCGIVDSKLPPIDVNMDCKTVGVVPRQPQLPVSLRHGPVTGPSDPAHKARLERPQIRVPPPAPEKA

SEQ ID NO: 17463 - protein, 365 aa, Kalanchoe fedtschenkoi
SDSGKDAGRLSAAWQLYKAQEELIEVAKKHGVKLTMFHGRGGTVGRGGGPTHLAILSQPADTIQGSLRVTIQGEVIERSFGEAQLCFKTLQRYTAATLEHGMIPPLTPKPEWRALMDDMAVVATERYRSIVFREPRFVEYFRLATPELEYGRMNIGSRPSKRKPSGGIESLRAIPWIFAWTQTRFHLPVWLGFGEAFKHVIDKDNKNLLMLQQMYNEWPFFRVTIDLVEMVFAKGNPGIAALYDKLLVSEELLPLGEQLRTAYNDTKSYLLKITGHNEILGGDPFLKQRLKLRTAYITTLNVCQAYTLKRIRDPSYQVPVRPPIAKEILEGSVTSANQLVKLNPTSEYAPGLEDTLILTMKGIAA

SEQ ID NO: 17464 - protein, 964 aa, Lycopersicon esculentum var. cerasiforme
MTTRNLDKLASIDAQLRQLVPAKVSEDDKLVEYDALLLDRFLDILQDLHGEDLKGTVQDCYELSAEYEAKHDPKKLEELGNVLTSLVPGDSIVIAKAFSHMLNLANLAEEVQIAYRRRQKLKKKGDFGDESNATTESDIEETFKKLVGDLKKSPQEVFDAIKNQTVDLVLTAHPTQSVRRSLLQKHGRIRDCLAQLYAKDITPDDKQELDEALQREIQAAFRTDEIRRTPPTPQDEMRAGMSYFHETIWKGVPKFLRRVDTALKNIGIDERVPYNAPLIQFSSWMGGDRDGNPRVTPEVTRDVCLLARMMAANLYYSQIEDLMFELSMWRCSEELRVRAHKLQRSWRDEKHYIEFWKQVPPNEPYRVILGDVRDKLYQTRELARQLLGHGYSEIPEEATYTNIEQFLEPLELCYSSLCACGDLSIADGSLLDFLRQVSTFGLSLVRLDIRQESDRHTDVLDAITQHLEIGSYREWSEERRQEWLLSELSGKRPLFGRDLPKTEEIADVLDTFHVIAELPADCFGAYIISMATAPSDVLAVELLQRECRVRQPLRVVPLFEKLADLDAAPAAVARLFSIEWYRNRINGKQEVMIGYSDSGKDAGRLSASWQLYKAQEELIQVAKEFDVKLTMFHGRGGTVGRGGGPAHLAILSQPPETIHGSLRVTVQGEVIEQSFGEEHLCFRTLQRFTAATLEHGMHPPVSPKPEWRALMDEIAVVATEKYRSIVFKEPRFVEYFRLATPELEYGRMNIGSRPSKRKPSGGIESLRAIPWIFAWTQTRFHLPVWLGFGAAFKYAIEKDIKNLRMLQEMYNAWPFFRVTIDLVEMVFAKGDPGIAALFDKLLVSEDLLSFGELLRSNYEETKSLLLQIAGHKDLLEGDPYLKQRLRLRDSYITTLNVCQAYTLKRIRDPDYSVTPRPHISKEYMESKPATELVNLNPTSEYAPGLEDTLILTMKGIAAGMQNTG

SEQ ID NO: 17465 - protein, 138 aa, Brassica napus
  misc_feature (133)..(133): Xaa can be any naturally occurring amino acid
MSDSEEHHFESKADAGASKTYPQQAGTVRKNGFIVIKNRPCKVVEVSTSKTGKHGHAKCHFVAIDIFNGKKLEDIVPSSHNCDIPHVNRTEYQLIDISEDGFVSLLTSDGNTKDDLRLPPTDETLVAQIKEGXESGKD

SEQ ID NO: 17466 - protein, 488 aa, Rickettsiella grylli
MLIFELSQTGRVAKSQIRAFDSKDTTFNTQLTSIPENYLRKTKLCLPEVSELQVVRHFTRLSQKNFSIDTHFYPLGSCTMKYNPRGVHRLASLPAFLHQHPLLPETSCQATLRCLYEFQEILKDITGMSGVSLTPMAGAQGEFAGVAMIKAYHASRGDTARTEFLIPDAAHGTNPASAAMCGYSVREIPTNPAGDIDLDALYSAVGSHTAGIMLTNPSTLGVFEQHIEQIASIIHQAGGLLYYDGANLNAILGKVRPKDMGFDVMHLNLHKTFATPHGGGGPGAGPVAVGERLLPFLPIPIVAFEKNRYRWLHLQDRPQSIGRLSTFMGNTGILLRAYFYACLLGREGLKRVSEFATLNANYLLKQLQRIGYIPAFPQRRASHEFILTLKNLSKQANVTAMDVSKRLLDFGFHAPTTYFPLLIPECLLIEPTETESKQELDQFISAMEKILIEAKKNPTHLNNAPHHLRLKRLDDVKAVRELDLTWEN

SEQ ID NO: 17467 - protein, 227 aa, Methanocaldococcus jannaschii
MNNVEKAIEALKKGEIILVYDSDEREGETDMVVASQFITPEHIRIMRKDAGGLICTALHPDICNKLGIPFMVDILEFASQKFKVLRELYPNDIPYDEKSSFSITINHRKTFTGITDNDRAFTIKKLAELVKEGRFNDFGKEFRSPGSVTLLRAAEGLVKNRQGHTEMTVALAELANLVPITTICEMMGDDGNAMSKNETKRYAEKHNLIYLSGEEIINYYLDKYLKD

SEQ ID NO: 17468 - protein, 365 aa, Kalanchoe fedtschenkoi
SDSGKDAGRLSAAWQLYKAQEELIEVAKKHGVKLTMFHGRGGTVGRGGGPTHLAILSQPADTIQGSLRVTIQGEVIERSFGEAQLCFKTLQRYTAATLEHGMIPPLTPKPEWRALMDDMAVVATERYRSIVFREPRFVEYFRLATPELEYGRMNIGSRPSKRKPSGGIESLRAIPWIFAWTQTRFHLPVWLGFGEAFKHVIDQDNKNLLMLQQMYNEWPFFRVTIDLVEMVFAKGNPGIAALYDKLLVSEELLPLGEQLRTAYNDTKSYLLKITGHNEILGGDPFLKQRLKLRNAYITTLNVCQAYTLKRIRDPSYQKPVRPPIAKEILEGSVTSANQLVKLNPTSEYAPGLEDTLILTMKGIAA

SEQ ID NO: 17469 - protein, 964 aa, Lycopersicon esculentum var. cerasiforme
MATRNLEKFASIDAQMRLLVPTKVSEDDMLVEYDALLLDRFLDILEDLHGEGIKTTVQECYELSAEYENTHDKKKLEELGSVLTTLDPGDSIVVAKSISHMLNMANLAEEVQIANSGRAKSKKGELSDESNLMTESDIEETLKRLVVNLNKSPREVFNALKNQTVDLVFTAHPTQAIRRSLLQKHARIRNCLSQLYAKDITPDDKEELDEALEREIQAAFRTDEIRRTPPTPQDEMRAGMSYFHETIWNGVPKFLRRVDTALKNIGIDERVPYNAPLIQFSSWMGGDRDGNPRVTPEVTRDVCLLARMMAANLYYSQIDDLMFELSMWRCNDELRDRADELHRSLKRDEKHYIEFWKQVPPSEPYRVIIGDVRDKLYHTRERTRQLLSHGFSEIPEEATYTNIKQFLEPLELCYRSLCACGDRPIADGSLLDFLRQVSTFGLSLVRLDIRQESDRHTDVLDAITQHLEIGSYREWSEERKQEWLLSELSGKRPLFGPDLPKTEEIDDVLNTFHVISELPSDCFGAYIISMATAPSDVLAVELLQRECHVKQPLRVVPLFEKLDDLDAAPAAIARLFSIEWYKNRINGKQEVMIGYSDSGKDAGRLSAAWQLYKAQEELIKVAKQYDVKLIMFHGRGGTVGRGGGPSHLAILSQPPDTIQGSLRVTVQGEVIEQSFGEEHLCFRTLQRFTSATLEHGMYPPFPPKPEWRALLDEISVVATEKYRSIVFKEPRFVEYFRLATPELEYGRMNIGSRPSKRKRNGGIETLRAIPWIFAWTQTRFHLPVWLGFGAAFKYALNKDKKNLNMLRDMHKKWPFFRVTADLIEMVFAKGDPGIAALYDKLLVSEDLWSFGELLRSDYEETKSLLLKVAGHKELLENDPSLKQRLRLRDSYITTLNVCQAYTLKRIRDPTYKVTPRPHITKEYIESKPAAELVSLNPQSEYAPGLEDTLILTMKGIAAGMQNTG

SEQ ID NO: 17470 - protein, 428 aa, Corynebacterium efficiens YS-314
MNERCARVALVVQKYGGSSLESAERIRNVAERIVATKKAGNDVVVVCSAMGDTTDELLDLAAAVNPVPPAREMDMLLTAGERISNALVAMAIESLGAEAQSFTGSQAGVLTTERHGNARIVDVTPGRVREALDEGKICIVAGFQGVNKETRDVTTLGRGGSDTTAVALAAALGADVCEIYSDVDGVYTADPRIVPNAQKLERLSFEEMLELAAVGSKILVLRSVEYARAFNVPMRVRSSYSNDPGTLIAGSMEDIPMEEAVLTGVATDKSEAKVTVLGIPDKPGEAAKVFRALADAEINIDMVLQNVSSVEDGTTDITFTCPRSDGPRAMELLKKMQQQGDWTNVLYDDQVGKVSLVGAGMKSHPGVTAEFMEALRDVNVNVELISTSEIRISVLIREDDLDKSAKALHEKFQLGGDEEATVYAGTGR

SEQ ID NO: 17471 - protein, 642 aa, Rickettsiella grylli
MDFEQQQSRLRELITHGKKQGFVTYAEINDHLLEDIISEAEQEQLQLDEIILMLNDIGIPVYEVPPDMETLLSSSIVNNAEEENSSENVTILGNITTELGRTTDPVRMYMREMGTVELLTREGEIKLAKRIEDGLQAILAALAQYPVNISHILNEYTRYEQQEIRLNDIISGFLDLEELSIPLELPSGKNITSTETPDERFNRSDKRTDDKDNDEGDDAKSKISATDDDEGFGELDGGPDPELAHTRFAELKAHYEAYIAAQKKWGRHDKKTIKQAVLLADAFTKFKLIPRQLDKLTRNMRGLLEKIRLQERIIMRLCVNEAKMPRLLFINTFPKNETNENFLKKHIHAKKSYSSRLKELLAPITAAQNKLHELEKTIGMTITEIKEINRQMSAGETKARRAKKEMVEANLRLVISIAKKYTNRGLQFLDLIQEGNIGLMKAVDKFEYRRGYKFSTYATWWIRQAITRSIADQARTIRIPVHMIETINKLNRISRQILQATGKEPSPEDLSKKMGLPEDKIRKILKIAKEPISMETPIGDEDGDSHLGDFIEDAAALSPIDAATIEGLRETAQRVLASLTPREAKVLRMRFGIDMNTDHTLEEVGKQFDVTRERIRQIEAKALRKLRHPTRSEPLRSFLDQE

SEQ ID NO: 17472 - protein, 142 aa, Brassica napus
  misc_feature (11)..(11): Xaa can be any naturally occurring amino acid
LEDNLKAIIKXPQYVDHIPKAVRGNVGEVLDQKDERNMKAELCADLELNQVIDRDVVNLSGGELQRFAIAVVAIQNAEIYMFDEPSSYLDVKQRLKAAQVVRSLLRPNSYVIVVEHDLSVLDYLSDFICCLYGKPGAYGVET

SEQ ID NO: 17473 - protein, 333 aa, Cytophaga hutchinsonii
MKVAINGFGRIGRISYRALLKKKNIEVVAINDLTDTKTLAHLFKFDSSHGVFDGEVSYDAENLIINGKKVKVLSVKNPADLPWKALGVDVVLESTGFFTEKEKAEAHITAGAKKVIISAPATGDLKTIVLGVNDNILDGSETVISNASCTTNCLAPMVKVLEDNFGIESGFMNTIHAYTSDQRLQDAPHKDLRRARSAALSIIPTSTGAAKALGLVIPSVQGKLNGTSLRVPVPVGSITDFTATLKRTVTKDEINAAFKKAAEEGSLKGYLAYSEDPLVSVDIVGNPASSIFDSELTMVQGNNVKVFGWYDNEFGYSNRTADLIELVGKQIKA

SEQ ID NO: 17474 - protein, 527 aa, Shewanella oneidensis MR-1
MLDANLKNQLQTYLQNLKRPVELVVSADESKKSQELKSLVNDIVSLSTFVSLKEAQGQRTPAMTVVNPALNTQISFAGLPMGHEFTSLVLALLHSGGHPIKLSDDIIEQIRNLPGKYEFETYVSLTCQNCPDVVQALNMMAAINPNITNVMIDGALFQDEVASRNIMAVPSVYLNGEVFAAGRISIGEILNKLDTGAASRKAEELSQKAPYEVLVVGGGPAGAAAAIYAARKGLRTGIVADKFGGQVAETVGIENFISVKATEGPKLVANLEAHVRDYEVDIMDNQKAVKLASDGLFELELASGAKLRSRTVLLATGARWREMNVPGEKEYRGKGVAYCPHCDGPLFKGKRVAVIGGGNSGIEAAIDLANIVEHVTVLEFDSKLRADDVLQRKAASMGNIKIITQAMTTEVTGDGTRVNGLNYTDRATGESHHIALAGIFVQIGLVPNAEWLKGTVDLTPRGEIIVDERGQTSVPGVFAAGDVTNSPYKQIIIAMGSGANASLGAFDYLIRHSDDSTETKTTDTKAA

SEQ ID NO: 17475 - protein, 227 aa, Schizosaccharomyces pombe
MSLSDEQVQAEMHKMVSFIKQEALEKAKEIHTLSEEEFQVEKAKIVREQCDAIDQTYDMKLKRASMAQKIAKSNVLNKSRLEILNSKQKVIDDIFSRVEKKLDGIEQKKDAYTKFMADLIVQAMELLGEPVGIVYSRQRDAEIVKAAIPKATEVLKSKNGSIDYELDAETDDFLNDSVLGGVVLVGLGGKIRVDNTLRARLEIVKEEALPEIRRLLFGENPNRKFDN

SEQ ID NO: 17476 - protein, 425 aa, Magnetospirillum magnetotacticum MS-1
MGKEKFSRTKPHCNIGTIGHVDHGKTSLTAAITKVLAESGGATFTAYDQIDKAPEEKARGITISTAHVEYETQNRHYAHVDCPGHADYVKNMITGAAQMDGAILVVSAADGPMPQTREHILLARQVGVPALVVFLNKVDMVDDEELLELVELEVRELLSKYDFPGDDIPITKGSALMALEDKEPKIGRDAVLALMATVDAYIPQPERPIDMPFLMPIEDVFSISGRGTVVTGRVERGIVKVGETVEIVGIRPTTTTTVTGVEMFRKLLDQGQAGDNVGVLLRGTKREDVERGQVVCKPGSVKPHQKFKAEAYILTKEEGGRHTPFFTNYRPQFYFRTTDVTGVCTLPEGTEMVMPGDNVTMDVELIVPVAMEEKLRFAIREGGRTRRCRRRRRHQRLPPPQAHRQGRRGAGPRARPSNVSAEVRS

SEQ ID NO: 17477 - protein, 135 aa, Arabidopsis thaliana
  misc_feature (20)..(20): Xaa can be any naturally occurring amino acid
  misc_feature (31)..(31): Xaa can be any naturally occurring amino acid
  misc_feature (55)..(55): Xaa can be any naturally occurring amino acid
RAGHSRPLKLLIKILVFLPXTEKNFLFVEKXPMAVNQNPKLKLNPWSVLAMCWEXPVHLRKPGKVPVGETPLKRLGPSLFKSGFVAKHFEVANFPLLETIKERIPEMCAPLLNVSCVQVYDHLVAVFKAELISST

SEQ ID NO: 17478 - protein, 496 aa, Pisum sativum
MAATGVLAEIIDGDVYKYYADGEWNKSTSGKSVAIINPTTRKPQYKVQACSQEEVNKVMDSAKSPQKSWAKTPLWKRAELLHKAAAILKEHKAAIAECLVKEIAKPAKDAVTEVVRSGDLVSYCAEEGVRILGEGKFLVSDSFPGNERTKYCLTSKIPLGVILAIPPFNYPVNLAVSKIAPALIAGNSIVLKPPTQGAVAALHMVHCFHLAGFPKGLISCVTGKGSEIGDFLTMHPGVNCISFTGGDTGIAISKKSGMIPLQMELGGKDACIVLEDADLDLVAANIIKGGFSYSGQRCTAVKVVLVMESVADALVEKVKVKVAKLSVGPPEDDSDITPVVSESSANFIEGLVNDAKEKGATFCQEYKREGNLIWPLLLDNVRPDMRIAWEEPFGPVLPVIRINSVEEGIHHCNASNFGLQGCVFTKDINKAIMISDAMESGTVQINSAPARGPDHFSFQGIKDSGIGSQGITNSINMMTKVKTTVINLPSPSYTMG

SEQ ID NO: 17479 - protein, 483 aa, Methanosarcina mazei Go1
MRDGEQTPGVALTKEKKLLIARALDEMKINVIEAGSAITSAGERESVRAVANAGLSAEICSYCRIVKTDVDHALECDVDSIHLVVPVSDLHIRTKIKKDRDTVRQIAADVTEYAKEHGLIVELSGEDSSRADLGFLKAVYSDGIDAGADRLCFCDTVGLLVPEKTTEIFRDLSSSLKAPISIHCHNDFGLATANTVAALAAGAKQAHVTINGLGERAGNASLEEVVMCLEWLYKYDTGIKHEQIYRTSRLVSRLTGIPVSPNKALVGGNAFTHEAGIHVHGLLADKATYEPMSPEYIGRQRQIVLGKHAGRSSITLALKEMGLEADDAQTEEIFNRVKQMGDQGKHVTDADLQIIAETVLDIYKEPLVKLEEFTIVSGNRVTPTASIKLNVKDKEIVQAGIGNGPVDAVINAIRRAVSSCAEDVILEEYHVDAVTGGTDALVEVRVKLSKEGKSITASGARTDIIMASVEAVMNGLNRLVRAE

SEQ ID NO: 17480 - protein, 426 aa, Symbiobacterium thermophilum IAM 14863
MTFYRKTTLPNGLRVVTEAIGHVRSAAVGVYVGTGSLYEAPAEMGVSHLIEHMLFKGTERRSALEIARAIDGRGGALNAYTAKEYTCYYARVLDEHLPLALDVLADMILNSRFDPDDLAREKDVICEEIRMYDDVPDDLVHDLFAGALWRGHALGRPIVGTVERVQAMSRADILAYKNRHYVPANMVVAAAGHLEHERVVEWVAELFGAAAAEADGRPAPDAPPVPRTPAIAVRQKEIEQAHLVLGTTALSLDDPNIYALHVLNAIVGGSSSSRLFQEVREKRGLAYSVYSYHSSYRSAGAFGVYAGVSPRMVGATLDVVTGVLSELGRRGVTEEELAEAREQLKGQLMLGLESTSSRMSRLGRGELIRGFVHSPDEVIARVEAVTLEQVNELAHRLFVEEARVMAAVVPHALQYDFAQYGEVLHD

SEQ ID NO: 17481 - protein, 374 aa, Yarrowia lipolytica CLIB122
MLTDAQIKIIKDSAPFLAENGTDFAAKMYKYMFATYPEVIRFFNQSDQKNLAQPKILAHALVAYASNIDNLGVLSDFVEQIVVKHVGLQIQPEQYPIVAASIIHTLKEMLGEAATPEFIEAWTVAYTQLANILIDAEKKLYEKQASLAGGWEGFRDFVVTKVEDESSNVKSVYFKSADGKPVSTPIPGQYVTFLFTFNGQETMRSYTVSQKVTGDEYRISVRKVKGGLVSTYIHTEVKPGTQLKVAPPTGRFTYTDDGKKILFVAGGIGITPLISIIEETKGKEGNALIYCDRSPETQPFGKWLQDAGVKTTNVYSETADKRHISKDDFAGVDLSNVNVYLLGPPPFMTTVRKLLSELGFSGEIKTEFFGPVEV

SEQ ID NO: 17482 - protein, 480 aa, Chara vulgaris
MATATMAASGAATATATSKLNVRAPRGSSSSSSSGRKSSAIAAQALPCARSSQKGAGLCEYKGLKASTAHVFGGVTGRDAADASDLFVDSVTRDVSSKVIGSGHRGETEAKLRVAINGFGRIGRNFLRCWHGRPDSPLEVIAINDSGGVKQATHLLKYDSMLGTFNADVKTVDETHISVDGKVIQIVSNRDPLKLPWAELGIDIVIEGTGVFVDGPGAGKHIQAGAKKVIITAPAKGSEIPTYAVGVNEGDYHHDVSNIISNASCTTNCLAPFVKVLDEEFGIVKGTMTTTHSYTGDQRLLDASHRDLRRARAAALNIVPTTTGAAKAVALVLPKLKGKLNGIALRVPTPNVSVVDLVVNVENKGCTAEDVNDAFRKAANGPLKGVLAVCDEPLVSVDFRCTDVSSTVDSSLTMVMGDDMVKVVAWYDNEWGYSQRVVDLAHLVAAKWPGAKPAPDGKDADPLGTYCESNPDDAECRVFE

SEQ ID NO: 17483 - protein, 122 aa, Helicosporidium sp. ex Simulium jonesii
TAFTVTVDAREGITTGISAQERARTIQALADPTTTAANLRRPGHIFPIRARPGGVLERRGHTEAGVDLARLAGCTPAGVLCEIVEEDGSMARGPSLQRFARRWNLKCVTIADLVHYREVMSV

SEQ ID NO: 17484 - protein, 293 aa, Brucella melitensis 16M
MPVQFAPRNFKAGQPCRHIIPDEPGCHALMKEERVYMAYETIIVETRDSVGLIRLNRPQALNALNRAVLEELTDALAAFDADGKVGAVVLTGSEKAFAAGADIKEMQLINFVDAYLQDMFADWQKVDRIRKPIIAAVSGYALGGGCELAMMCDFIIAGSNAKFGQPEITLGAIPGMGGSQRLTRYVGKSKAMDMCLTGRMMDAAEAERCGLVSRVVAPEALLEEALKAAERIASFSRVSVYMAKEAVNRAYETTLDEGLRFERRLFHSLFATEDQKEGMSAFVDKRTPSFKNR

SEQ ID NO: 17485 - protein, 626 aa, Oceanospirillum sp. MED92
MSEVTLSSINVFPIKSLGGLNLSDVFVSEQGLSFDRRFMLSNPDGELLSARQIPSLLQYSVLLRDDGIEVIAPDGDHLSIKYPELFQNYKQVTVWGTEINAQHCGIGFDEWFTEKLGRDCHLLFFGEQSERFTSRRPEKPVAFADGYPILVISQASLDDLNSRSSTPITMDHFRTNLVVDGCEPFAEDSWKRIRIGEVEFEAVKPCSRCVMTTFNPSTGEKIPQGEPINTLAKYRLGADNEVYFGQNLIPLNEGKISTTDRVEVLETQASETYPNNAPIIRSNDSSIEENSWQAGQEVTLQCLQRVDETRDVVTFRFALPKGLRAEYIAGQFITLNLMIDDSPVSRCYTLSSSPSRPQDIAITVKRVTDGKISNWLHKNLQPGDQIQALAPIGEFNEAVTGNGSLLLLSAGSGITPMLSAVRQLTDTHSERDIVFYHQARTEADLICEDELLWLTRQNPKLRLIFSLSQPEPDWLGIKGRISREQLIHHIPDLPQRTVMCCGPEGFMSHAKDYCRQLGLAEQRWFEESFGAPPGIDPTADSHSVQVTLNGDSFTGDNQQTLLEQAEENGFSIPAGCRSGVCGACKVQLIAGDAHRSSEIPLTEEEKAKGIVLACSCTPETDVVIEY

SEQ ID NO: 17486 - protein, 299 aa, Methanopyrus kandleri AV19
MAKPYDVIVIGAGPAGLSAAIHAARAGAEVPVVAQELGGQLTTAPEVGNYPGFPPAPGYELVDRMVEHAETVGVELNVKYSNRVEGIELTDGTFRVLDEECRAVVIATGARPKRLGVPGERELEGRGVSYCAICDGPAFQNRIVAIVGSGTHAANTALFLSEIAERVYVITPDGKLESPDRALIERVLSCRNVEVVHDEVRRIVGDERVEGVELSDGDILPCEGVFIAAGKVPNSEPFRDLVETDDRGYIVVDSEMRTSLEGVYSAGDVTTIPHRNVPSAVYQGSVAGINAAEYALKSR

SEQ ID NO: 17487 - protein, 346 aa, Bifidobacterium adolescentis
MSDSAKKYTIAVIPGDGIGKEVTPWAQKALEKAAEGVAEFEYEHFDLGAERYLRDGAILPEEEEDRIKKTDAILLGAVGDPRIKAGILERGLLLKLRFDLDQYVNLRPSKLYKGVTSPLANPGDIDFVVVREGTEGLYCGAGGAVRRGTPNEVATEVSINTAYGVERVVRYAFQLAMKRRKHVTLVHKKNVLVNAGDMWQRIVNKVAEEYPEVSHDYLHIDATTIFLVSNPSRFDVILTDNLFGDIITDEAGAVVGGVGYSASGCINASNEYPSMFEPIHGSAPDIAGQNKANPTAAILSAAMLLEHLGFDDAAKKIHTAVEADIEELGSTTRTTDEVGRDILARM

SEQ ID NO: 17488 - protein, 386 aa, Picrophilus torridus DSM 9790
MYTLKVPPIGEGVSEGEIVKWNVKEGDTIEKDQEIVEIMTDKITIKIPSPVSGKVLKLIEPEGKTVKVGDSIATIDSQEGNEEINNENNAQESKEIKIENKNEGSNVKNVELVKATPAVRAYARQKGIDLSNVRPSRPDGRIRKEDIDSYISMKNKTVQENVEIQNDEVYKPSGIRKIIFDKMTKSKQIIPHFTITDFISTENIEKAIDYYSKKGYVSFTSFFAKACTIAFKEFPKMNALYNDDGTYTIKKRYNIGIAVDSPYGLTVVVVKDVDKKSIFEISMEIRELAEKARSNKLEMDDVRDSTFSVTNIGAIGGIYSTPIINYPEVAILAVNTRTNAFIDGSMRSGVYVTLACDHRLIDGAEAARFIKKIKEIIEQPMLYIGD

SEQ ID NO: 17489 - protein, 321 aa, Picrophilus torridus DSM 9790
MTEMNMVKALNSALDTMLERDKNVILLGEDIAKDGGVFRVTDGLYAKYGGERVISTPLSELGIVGMGIGMAMDGLRPVPEIQFLDFIYTAMDQIVSQMAKIRYRTNGDYTLPMVLRTPYGGGVSGGPYHSQSSEAYFAHTAGLVVVTPSNPYDAKGLLISAIESNDPVMFLEPKRIYYSIKNDVPDNYYKVDIGRAKRILEGDDVTLITYGPMVPLVKSVVQKNNVNADVIDLITLNPFDVNSIINSVKRTGRAVIVHEAPKMFGAGAEIAATIAEKAIDYLQAPILRVTGMDIPVPFILEDYYVPNEKRIMNAINKVINY

SEQ ID NO: 17490 - protein, 346 aa, Nocardia farcinica IFM 10152
MSTPTRTVTLVDTTLRDGMSSVSHRFTPNDVAAIAAGLDRAGVRTIEVAHGIGLGASSIQYGFAAATDPEYVRAAVDAVDHADIAVLYVPGIATLAELRAAVEAGIRTVRVAVHCTEADCAQQPVEWAKDHGLTVMTFLMMSHKLDPEPLAEQAVKLESYGADVVYVVDSAGAMVPRHAGDRVAALRRAISAEIGFHAHNNLGVGIANALTAAENGATFIDGSLRGLGASAGNAQTEVLAAAFERAGWHTGVELFPLIDTAEQVVAPLMTEPQIVDETALVLGYAGVYSTFFHPTKRAAAKFGVPTRDILLELGRRGVIGGQEDMIVDVASELAGRTYDLPARAGI

SEQ ID NO: 17491 - protein, 460 aa, Chlorobium tepidum TLS
MQVKFGTDGWRAIIAKEYTYDNLKLAALASGKYFLSHPDKSNGVCVGYDTRFMSKEFARYTAEVLSSMGLKVFLSSSFVSTPAVSLYTREHKLAGGVMITASHNPPIYNGFKVKASYGGPAHPEVIDEIEKNLSGIDPSTLVKPAENLITMTDIKSEYIAYLESKLDLKLIRESGLKIAHNAMYGAGQDIVTRLLDESMVNCYHCSVNPGFDGINPEPIPPYITDFVEFFKEVETDVAIINDGDADRIGMLDEKGEFVDSHKLFAIVLKYLVEQKGQRGEVAKTFALTDIIDRICQKHDLKMHLLPVGFKYVSRLMTTNDILIGGEESGGIGITSFLPERDGVYTGLLMLEIMARRQKTLTGLVEELYDEYGFFSYNRLDLRVAESKKAAIIEAASGGKLKSIAGYPVTSFNDLDGFKYHFEGGWLLIRASGTEPVLRIYCEADSTEKVEKVLAFASRLA

SEQ ID NO: 17492 - protein, 128 aa, Heliobacterium gestii
MKEIVAFIRRHQVPATKKALEEAGFPALTIQSVEGRGKQKGIGGWAAEVDPELNQFTSTALQSMEPEIKWIPKRMLTIIVQDDQVPAAVDAIMAANKTGHIGDGKIFVCPLEEVVRVRTQERGSEAVI

SEQ ID NO: 17493 - protein, 383 aa, Arabidopsis thaliana
  misc_feature (44)..(44): Xaa can be any naturally occurring amino acid
MDIASSSLSQAHKVVLTRQPSSRVNTCSLGSVSAIGFSLPQISXSPALGKCRRKQSSSGFVKACVAVEQKTRTAIIRIGTRGSPLALAQAYETREKLKKKHPELVEDGAIHIEIIKTTGDKILSQPLADIGGKGLFTKEIDEALINGHIDIAVHSMKDVPTYLPEKTILPCNLPREDVRDAFICLTAATLAELPAGSVVGTASLRRKSQILHKYPALHVEENFRGNVQTRLSKLQGGKVQATLLALAGLKRLSMTENVASILSLDEMLPAVAQGAIGIACRTDDDKMATYLASLNHEETRLAISCERAFLETLDGSCRTPIAGYASKDEEGNCIFRGLVASPDGTKVLETSRKGPYVYEDMVKMGKDAGQELLSRAGPGFFGN

SEQ ID NO: 17494 - protein, 704 aa, Methanosarcina acetivorans C2A
MKNHNIINYPFTAIVGQEKMKKALVLNLINPKVGGVLIRGEKGTAKSTAVRALASLLPEIEVVEGCKFKCDPNHTNEFCEECLGKLNAGTLRVSQVKMKVVDLPVSATEDRVVGTLDIEYAIKTGEKRFEPGVLAMAHRGILYVDEINLLDDHLVDVLLDSAAMGVNTIEREGISFTHPANFVLVGTMNPEEGELRPQLLDRFGLCVDIRGINDLSLRVELIKYRLSYEADPEAFAAKWKAAETELCEQILNAKQLLPEVRISDDMLELISQICIDMGVDGHRADLTMMKTSITLAAFYGRTEVTEDDVREAAELTLSHRMRRKPFDNQPEKQDKLDESIEKQKEKQKEKKKEKPENKEEKPKNEEEKEKKKEKHEHQNKEQHESPDQQQRQAEGSPPEESESQNAEQPDASTETTFEIGEIYQVKQLSPEFRKEQRNGSGRRSKTLTRSKKGRYIKSSIPHEKTTDLAFDATLRAAAPFQLTREKKGNSVAIHESDFREKIREKKIGNLVLFVVDASGSMGARQRMVASKGAVLSMLMDAYQKRDKVGLIAFKGESAELLLPPTSSVELAQKYLQEMPTGGKTPLSRGLAKGYEVIKNELRRDPDTCPFMVLISDGRANVSMNGEPPLQETKTIASLFRDRGIQSAVIDTENSMIKFGLAQEISSALGANYLALEDLKADSIVDAVRVSAPFDFKPEFSSSSM

SEQ ID NO: 17495 - protein, 284 aa, Sorghum bicolor
MSGAAEEALLREYVIGEEVGRGRFGTVRRCYAASTGEPFALKTTPKAALRELEADPLDLALAEQEPKVHLLASAASRHVVALHAAFEDADAVHLVLDLCAGGDLFALVSARGPLPEPEAAGLVAQLADALAGCHRRGVAHRDVKPDNLLFDASGALRLGDFGSADWFGDGRPLTGLVGTPYYVAPEVVAGREYTEKVDVWSAGVVLYMMLSGTVPFSGATAGDVFQAVLRGNLRFPPRAFPAVSPEAKDLMRRMLCKDVWRRLSAEQVLSHPWIVTRGGSVAVA

SEQ ID NO: 17496 - protein, 318 aa, Cucumis sativus
  misc_feature (125)..(125): Xaa can be any naturally occurring amino acid
MDFPVINMNNLNGESRVSFLNQINDVCENWGFFELVNHGIPHELMDKVEKMTKEHYRKCMEQRFKEMVASKGLDSVETEINDTDWESTFFLRHLPVSNMSEIGDLDEEYKKVMKEFAAELEKLAXEILNLLCENLGLEKGYLKKVFYGSKGPNFGTKVSNYPPCPKPELIKGLRAHTDAGGLILLFQDDKVSGLQLLKDGKWVDVPPMHHSIVINLGDQLEVITNGKYKSVMHRVIAQEDGNRMSIASFYNPGNDAVIYPAPALVEGEQEKTKLYPKFVFDDYMKLYMGLKFQAKEPRFEAMKAMESTNINMGPIATV

SEQ ID NO: 17497 - protein, 468 aa, Rickettsia typhi str. Wilmington
MSFLRKKSFESVKEIGSSSGLSKTLGAFDLILLGLGAMIGTGVFVVTGIIAAKFSGPAVMISYMIAGITCIFVALVYTELAAMLPTSGSIYTYSYVAFGEVFAWMIGSVIILELGVSAGIVAAGWSGYVQGILEAGGIYLPKVLTTVPSNGGVINLPAFLISAFIGFILFLGTKDSKKINAILVFIKMAAIFAFVLASAPHFDATNWSNFMPFGFGSVVMGSSILFLAFTGFGTIATAAEECKNPKRDILIGIIGSLILTTLVYVIMSGLVTGIAPFDQLNNDRPLAYALTINNSKIGSAIVSTGAVCGMMTVLMMNIYGTSRIFYAIARDGLLPKSFAKLHPKYDSPYITIIIFSALAAFLGGFCPTEIITQLTSMGALIDYIVVAIIVMMFRIKLPTAQRSFKCPIVFIIAPFILLACIYLLLTQMYGDEIYKGNFNLLTSGRVLIYWFITIFVLYLIRSFFMKKE

SEQ ID NO: 17498 - protein, 133 aa, Arabidopsis thaliana [sequence omitted]

SEQ ID NO: 17499 - protein, 327 aa, Oryza sativa
MSAAPIPREWVGLQQFPAATQTKLHELLGKLKEENVSTLTILVMGKGGVGKSSTVNSIVGERVATVSAFQSEGLRPMMCSRTRAGFTLNIIDTPGLIEGGYINEQAVEIIKRFLLGKTIDVLLYVDRLDAYRMDTLDDQVIRAVTNSFGKAIWRRTLVVLTHAQLSPPDGLDYNDFFTKRSESLLRYIRAGAGVSKRELGDFPLPIALVENSGRCKTNENGEKVLPDGTPWIPNLMKEITTVVSNGSKSIHVDQKLIDGPNPNNRWKMFIPLILMVEYFLVVKGIRRAIHADISNGKLDDWEQRYRDLVGSKDPVDQKGSSSGNRKA

SEQ ID NO: 17500 - protein, 295 aa, Rhodopseudomonas palustris CGA009
MTARIIDGKTISAEVRARVAAEVTRLKTDHGITPGLAVVLVGNDPASEVYVRSKHKQTQEAGMASFEHRLPADVPQAELMALIAKLNADPAVHGILVQLPLPKGLDSNAVIDAIDPAKDVDGLNPTNAGRLASGLFALTPCTPLGSIIMAKTVHASLEGMNALVIGRSNLVGKPLVQLLLNENATVTIAHSRTRDLPALCRQADLVFAAVGKAEMVKGDWIKPGATVIDVGINRTPGKDGGKDKLLGDVAFAEAKEVAGAITPVPGGVGLMTVACLLVNTVRAACAIHGLPKPAV

SEQ ID NO: 17501 - protein, 481 aa, Burkholderia vietnamiensis G4
MANVTYTDTQLLIDGEWVDAASGKTIDVVNPATGKAIGKVAHAGIADLDRALAAAQRGFEAWRKVPAHERAATMRKAAALVRERADAIAQLMTQEQGKPLTEARIEVLSAADIIEWFADEGRRVYGRIVPPRNLGAQQMVVKEPVGPVAAFTPWNFPVNQVVRKLCAALATGCSFLVKAPEETPASPAALLRAFVDAGVPAGVVGLVYGDPAEISSYLIPHPVIRKVTFTGSTPVGKQLAALAGQHMKRATMELGGHAPVIVAEDADVALAVKAAGGAKFRNAGQVCISPTRFLVHNSIRDEFTRALVAHAQGLKIGNGLDEGTTLGALANPRRLTAMASVVENARKVGASIETGGERIGSEGNFFAPTVIANVPLEADVFNNEPFGPVAAIRGFDKLEDAISEANRLPFGLAGYAFTRSFANVHLLTQRLEVGMLWINQPATPWPEMPFGGVKDSGYGSEGGPEALEPYLVTKSVTVMAV

SEQ ID NO: 17502 - protein, 235 aa, Rickettsia typhi str. Wilmington
MKDIEYWDKNFESCKYSDKLIERLLFLNNKVKQPIDIREVKKGIYYARKYHGKQMRQSGDPYYSHPIAVTIMVAEFVAKEVPKLFTSRILQAALLHDTIEDTELTKDMISSIFDEEVARHVEGLTRIKPCGKISSAKSLILLIKQKRYDTALIKLFDRIHNLQTLEAKSPEKAHKIIKETLKSFLVLSEILEIPSVSELIYAECYKNNLKFNINATFNKIINFDSSPFAQNKLLP

SEQ ID NO: 17503 - protein, 613 aa, Bacillus licheniformis ATCC 14580
MCGITGWVDFKKPLVREQSIMEKMTDTLSKRGPDDTNIWGKRHVLFGHKRLAVVDLEGGRQPMTRTHQGYDYTICYNGELYNTEDLRKELRRRGHQFKSHSDTEVLLHSYMEWKEECIDRLNGIFAFAVWDEKRDLLFAARDRLGVKPFFYTEQGSSFLFGSEIKAILAHPEVKAKVDRSGLAEIFGLGPSRSPGSGVFKGVKEIRPGHAMIFSKDGLTVWRYWNVKSEKHTDSFDETVENVRSLFQDAVTRQLVSDVPVCTFLSGGVDSSAITATAAKHFEREGKAPLHTFSIDYEDNEQYFTSSSFQPNADGPWIKKMSDAFGTVHHNCVISQEELAAYLEEAVLVRDLPGMADVDSSLLWFCREIKKDFVVSLSGECADEIFGGYPWFHSAEDVKGFPWMRSMEERIGLLQDGWQKKLNLSEYVKAKYEETVKETPLLEGETGAEKRRRELFYLNMLWFMTTLLDRKDRMSMGASLEVRVPFADHRLVEYVWNIPWDVKMHGSREKGIFRKALEGILPDEVLYRKKSPYPKTHHPAYTKAVIRWLESLLEQKDSALYAFLEKKKLERLIETEGASFQVPWYGQLMKGPQLIAHLAQIHTWFESYRIDIEE

SEQ ID NO: 17504 - protein, 425 aa, Arabidopsis thaliana
MDRLEGPPRLILVADLDCTLVDHDDPENNDLLRFNALWEAHYRHDSLLVYCTGRSFSSYSSLRKKRPLLTPDIAVTSVGSEIVYGGGESTVSDVVWTARLDYKWNRDIVVEETLKFPKLEPQPDKSQEEHKVSFFVGREDAVEIMKVLPGILEERGVDVKLVYSNGYAFDVLPRGAGKQGALTYLLDKLDIEGKQPSNTLVCGDSGNDAELFNISDVYGVMVSNSHEELLQWYEENAKDNPKIFHASERCGAGMIEAIQRFNLGPNVSPRDVMDTENFHGESLNPAHEVVQFYLFYERWRCGEVEKSDKYLQNLKSLSSPLGIFVHPSGVEKPIHEWIDEMENLYGDGKEKKFRIWLDNVTSSHISSDTWLAKFVKHELSEGKVRSCSTKVLLSYKEEKQRLTWMHIHQSWLDESSSDDQEKWIF

SEQ ID NO: 17505 - protein, 425 aa, Bacillus licheniformis ATCC 14580
MTWVAIGTLLVFFMHAGFAMVESGFTRAKNTLNILMKNFLTISIGSILYFFAGYAFMFGDSAGGFIGTSGFALAGDQDVGFFVFQAVFAATCATIISGAVAERMKLGSYMILTLFMTGLIYPVVGHWTWGEGWLYDLGFVDFAGSSIVHLTGAAGAVAAVMFLGPRIGKYTNGKVNAIPGHSIPLGALGVFILWFGWFGFNGGSTLAADPAAVPHVITTTLLAASGGVVSSALFTYFRYGRIDPSLTLNGALGGLVGITAGADGVSFTGSILIGFIAGVILVVGVQFIDQVLKLDDPVGALAVHGICGVWGTLAVGLFNTSSGLFYGGGAAQLGIQAVGILSIAAWTLAATYAVAAAMKALAPIRVSKEEEISGLDYAEHGSSAYEYKESYIDQDDVDVSSAFGTDLVSRLNNLKPGPSSKTEQV

SEQ ID NO: 17506 - protein, 447 aa, Ulva pertusa
MFGALSKAVGSVCSRQGQAAVTGLGSVTGHQVRRAGHAENTNTFIREALAVLDLPPAMEKIVITPQREMTVELIINRDDGKPESFMGYRVQHDNARGPFKGGLRFHKDADLDDVRSLASLMSFKTALLDVPFGGAKGGITVDTKALSEHEIEKLTRKFVQEIKDIIGPFRDIPAPDVGTDGRVMAWIFDEYSKFEGYSPGVVTGKPTWLHGSHGRESATGRGTVFGIKNMLQAFGEGPPADKTFAIQGFGNVGAWAGRLLAEQGGIVKAVSDASGCVYDDGPSGIDVPKLLRHLHRGDDLSKYPHGQQLLRDEIFDVKCDVFVPAALGGVITDPVARKISCKYIVEAANGPTTPSADLILRDRGIPVLPDIYTNAGGVTVSFLEWVQNLQNFKWTTEQVNDQLKTRMDEAFQSMWDSSQEHGVPLRTGAFTVSLRRVVRATVNRGFN

SEQ ID NO: 17507 - protein, 549 aa, Enterococcus faecalis V583
MKIVIIGGVAGGMSAATRLRRLMEDAEIVVMEKGPFVSFANCGLPYYVSGEIAEREQLLVQTPEALKARFNLDVRPHHEVVAIDPIEKVITVKHETEILTEHYDKLILSPGAKPFVPPITGLAEAKNVFSLRNVPDLDQIMTALTPETKRAVVIGAGFIGLEMAENLQKRGLEVTLVEKAPHVLPPLDEEMAAFVKAELSKNNVQVITGQSAVAFEEEGQVIRLEDGQTLASDLTILSVGVQPENTLAVEAGVATGLRGGIVVDEHYQTNQPDIYAVGDAIVVKQQITQEDALISLASPANRQGRQVADVIAGLERKNQGSIGTAIVRVFDLTAASTGLSERAAKAAGLTTAVVHISGKDHAGYYPGATDLQLKLVFHPTTGEIYGAQGIGAKGVDKRIDILATAIKGQLTIFDLPELEFTYAPPFGSAKDPVNMLGYAAMNLVEGLSENVQWYELSNELANGAVLLDVRNPAERANGQFKNAVSIPLNELRERLEELDKSTEYIVSCHSGLRSYIAERMLKQAGISAKNLDGAFALYRMVKPEELENV

SEQ ID NO: 17508 - protein, 268 aa, Streptomyces coelicolor A3(2)
MSDTGHLPPPDLGTDLVLLDVTDRVAILTLNRPAKLNAVTPGMSRALVRAIEWCDTTDEVRALVVTGAGERSFSVGSDIGALDQYATPWDFRNRVDYCDAIRAARTPTVAAVGGYALGGGLETALSCDIRLAADTASFGAPEITLGWIGGGGMTAFLSRAAGPGNAALMLLTGERIDAERALAWHLVSEVVPRAGLLDRARALAAVIASRAPVAAETAKINLRAAGNLPEDQALAYERDLQTICFATEDAAEGRRAFAEKRSPVFHKR

SEQ ID NO: 17509 - protein, 421 aa, Ulva pertusa
MFGALSKAVGSVCSRQGQAAVTGLGSVTGHQVRRAGHAENTNTFIREALAVLDLPPAMEKIVITPQREMTVELIINRDDGKPESFMGYRVQHDNARGPFKGGLRFHKDADLDDVRSLASLMSFKTALLDVPFGGAKGGITVDTKALSEHEIEKLTRKFVQIFDEYSKFEGYSPGVVTGKPTWLHGSHGRESATGRGTVFGIKNMLQAFGEGPPADKTFAIQGFGNVGAWAGRLLAEQGGIVKAVSDASGCVYDDGPSGIDVPKLLRHLHRGDDLSKYPHGQQLLRDEIFDVKCDVFVPAALGGVITDPVARKISCKYIVEAANGPTTPSADLILRDRGIPVLPDIYTNAGGVTVSFLEWVQNLQNFKWTTEQVNDQLKTRMDEAFQSMWDSSQEHGVPLRTGAFTVSLRRVVRATVNRGFN

SEQ ID NO: 17510 - protein, 503 aa, Oryza sativa
MENLEPSCGYLAMIPVSWTPASGKKYQYFAELMRKGFSVRFPFVLDHPTAFELIKQCLNRSIRGFREEPFSTTAHVKNRIADIVFMDLIFWACIIGKTSQTSDYFETPLYMVEMLHGKRIFYSGFVLQLVMWTVKWIYGTLQYTCLPLALLTFLAQRYWKTRITIDAVEKFLRMQLMLGPTRYTYTDIIAMTSHFRDKLGQGGYGSVFKGVILPGDVYVAIKMLDNYNCNGEEFISEVSTIGSIHHVNVVRLVGFCAEEMRRALVYEYMPHGSLDKFIFAPEKSFSWDKLNEIALGIARGINYLHQGCDMQILHFDIKPHNILLDSNFVPKVADFGLAKLCPRDNNYVPVSAARGTVGYIAPEMISRSFGVISSKSDVYSFGMLLLEMAGGRRNSKQNMSSSTQVYYPSLVYNQLIQQEMGEITNTLNMHELERKLCVVGPHCIQVKPPDRPTMSEVIEMLEGDVDGLQLPSRPFFCDDEPLPLLVDSYRFSSELTEISEEDG

SEQ ID NO: 17511 - protein, 463 aa, Bacillus clausii KSM-K16
MFSKPYNEVYIFLGVVPLEKEQQLKRTLTLVPLLVIGLAYMDPLVVFDTYGVVAQLTQGHVATSYLFTIAALLLTAYSYGRMVQAFPKAGSAYTYAQQSIHPNVGFAAGWSLLLDYLFLPMVNFAIGMAYLNAAFPEVPAFIWVVILAAAITTVNILGIQLTANITGLFVAFQVLVAAVFVVFMIRGLMNGLGTGELLSPVPFFSDTFAFQTAFTGASILCFSFLGFDAISTLSEETKNPKKTVPLAIVLVVLIGGALFVAVSYLLQLVYPNYDAFISAEAASLEIAQYVGGAFMHAFFLAGTMVAVVSSSMSSHASASRLLFAMGRDNTLPKRFFGYVHPRFKTPTFNIVLIGLLSLTAIFGELEIIYSFISFGALIGFISVNASVVFHYYIREKRRSLKGTVANLLLPALGAAFCIWLLYSIDRHALTIGVIWTILGLIYFLVRRKNSPHFTADAANRHKE

SEQ ID NO: 17512 - protein, 457 aa, Marchantia polymorpha
MASITVGASAVSSKLTLQAQATSAARSSNVAAQAASFKRSSLGEFSGLKASSAVTFGKSSSENGFFDAVASQVAVKAGASGAIKGETSAKLRVAINGFGRIGRNFLRCWHGRGDESPLEVVAVNDSGGVKNAAHLLKYDSMLGIFKADVKVGDDTTLLVDGKPITVVSNRDPLKLPWAELGIDIVIEGTGVFVDGPGAGKHIQAGAKKVIITAPAKGADIPTYVMGVNEGDYSHEVANIISNASCTTNCLAPFVKVLDEKFGIVKGTMTTTHSYTGDQRLLDASHRDLRRARAAALNIVPTSTGAAKAVSLVLPQLKGKLNGIALRVPTPNVSVVDLVINTEKKGLTAEDVNNAFREAANGPLKGILAVCDIPLVSIDFRCSDVSSTVDSSLTMVMGDDMVKVVAWYDNEWGYSQRVVDLAHLVAAQWPGVAKPSGDPLEEFCVTNPDTDECRLHDV

SEQ ID NO: 17513 - protein, 902 aa, Clostridium thermocellum ATCC 27405
MDCRVKNEVRDDLNVNLEVMVAGNDEEFAASLKNALLDVGCKHSVKSAATFNEFKNYLRKNNFHIVFFDCSSDISFADVMESFENLKKEMPVVAVLEEDGSRHGFEMIKLGACEYLEKKDSSRLRSIIFKRCRELERERERIRFEKRLKEENERLLTTLESIGDGVIVTDKAGCVIMMNKAAQELTGYLSCNSIGKPLSEVFVIINGVNREPEPDPYERVLSERKTVGLRKNTMLVSKDGTLRYVSASTAPIKSSDREIMGVVVVFRDITRIRKAEEKLQKLSQAVEQSPGIIVMADTRGNIEYVNPRFTEVTGYSFDEVKGKSLFFMELEENGEEKCKDMIQAVFSGKEWRSEIRHKSKNNVVFWEYAYYSPIINSEGVVTNYLKVSEDITERKLMSENLFKAKEAAEAANRAKSEFLANMSHEIRTPLNGIIGMTNLTLQTELTDEQRENLNIVNSCAELLLRVINDILDYSKIEAGKMTLENVKFDFFNLLEKTYKAHIVQANEKGLRLSYTVQKGIPRILVGDPGRLQQVLNNLISNAVKFTDIGEVRIDVDIIEKRDDSVKLKFTVSDTGIGIDGDKMNMLFKSFSQVDSSITRKYGGTGLGLAISKQLVEMMGGEIWVESQKGKGSTFYFTAGFKRKAKSSVKAECTSNADERVLGRKLNILLAEDDKVNQQVIAGMLKKEQCSLTIAENGFEAIKLFEENEFDLILMDVQMPEMDGIEATKRIRKMEEGTFRHIPIIAVTAFAFENDREKILEAGMDDYISKPFSFDDIYAAINRVLYKDEQSSDDMQKEKEDEKGSLDPDEKVNETLSESGTVNETGPDYSLKDIMERLDLSILNGNFTAIDKSALAVKEFAQNRGFDKVKNLAFKIQLSARKNQLEDVKKLYEVLKQEISKFN

SEQ ID NO: 17514 - protein, 1209 aa, Pseudomonas syringae pv. syringae B728a
MQSVVRETGSTSRCRAWRRVWMLLALVFAGAANAAQSLPFSLTAPFVASADMVLEDQDRAWLDQRKVLQVGIAIADYEPIDITSDRNRYQGISADYLGLVSDQLNLPVQVTGFAKRDEAIEALRDGKIDLLTSANGFERGVKGLSFSTEYMPDRSVVVGRGNDLSPSSSLAGKKVVLLDGYADSDVLHRIYPDSQIIIAPNLYSALEALSQGEVDVFIGNEVIVRTYTALRPYLGLQIKFESRLPPVGFSFAVRDDEQRLLNFINRALDSIAPSTSREVLGRWTMGLGADVEGQRIRLTSAERRWLLKHPSVTIATVQHPPYIYKDNNGHWVGLNADVLSRISRMTGLQFVHQESLSTQQSIDMLRAGQADMNTTLAENTERRRFLDFTYSFGGNSWMFVVRSDHSSRISLDSLAGKVLALPARHALEDLIRREHPLIQLRLVNTYDQARALVESGAADATIQNEVGAYLFPSGELKVARSVEGQWSPDRFSVIKTQPELLGILNKALEEFPVAELRSIRLKWLGSALPQPSLWARIPPWVFWVVSLALLTGLVSLTWSSRLKVQIRQRQRAQRQLNDQLAFKHALLDGIPNPIYVRDLKGRLISCNRSYEQSLGISFEQMNGRRLTDVNLIPRALAEQMHTDYLNLLENHQPVFSDRTIELPGKRMDVWQWTVPFFAADGQLQGLLGGWIDITERKQLEQQLQEATRLAAQANEAKSAFLASMSHEIRTPMGAIIGLLELECEQALRLGTMPSQGLQVAHRSATELVALIGESLDLARIEAGGMQLSLAVTSLQGLFDGVIELFSAQAREKGVELRLEFSAQARGDYWLDPLRLRQVLHNVLGNALKFTRQGAVVVRLDVTSDSPESTRVRIGIQDSGEGIDPQRQQQVFQPFTQANDDTAAHYGGSGLGLSITRQLVELMRGDISLHSEPGKGTLVTIDLPLTRVSEPVLPADDVTDAPVDTRSLHLLVVDDMSANRLVLTRQLEFLGHQVTAVEDGKAALSNWCEGAFDAVITDCNMPGISGYALTQAIRQIEEKEQRQRCPVIGCTANAMSDEAARCEQAGMDGLLIKPLSLARLAQELADRVREPTFDIGTLQAMTQANPQQMQRLLSELWKNLRHEHALLEPAVSANDWKTLGACLHRLKGAASLVDAVPLAKACAALDDSVRLQSAARLAERWQVLEVAMTGLRADIELQLVAVPETAVPGA

SEQ ID NO: 17515 - protein, 1431 aa, Anabaena variabilis ATCC 29413
MAALMRSRDWSQTSLGAVETWSQSLKTAVRIMLTCRQAMFVWWGNNLINLYNDAYRAILGGKHPEALGQRAAVVWQEIWDQVGPRAETALFQNQGTYDEALLLIMERNGYPEETYYTFSYSPVPNDDGGIGGIICANTEDTSRIIGERQLALLKDLAAKTADAQTFDEACIFSTKCLATNPYDLPFAMIYLVDPKQQCVTLAGTCGIERGHQAVPETVALEENSFWRFAEVLTTHKPYLISDLQLQFPDLPTGAWNRPPHQAAVVPIAPSGRMGKAGVLVAALNPFRLFDDNYQGFLNLVSAQIAASIGNAQAYEEERKRAEKLAELDRAKTTFFSNVSHEFRTPLTLMLSPLEELLTADDLSQEQRQEMTLIHRNGLRLLKLVNTLLDFSRIEAGRVQAVYEPTDLSTFTAELASIFRSAIEQAGLQFSVTCEPLPELVYVDRQMWEKIILNLLSNAFKFTFSGAIALTLRQVQHQVEITVTDTGIGIPQAELPHLFERFHRVEGARGRTQEGSGIGLALVQELVRLHGGQVQVDSLEGLGTTFTITVPMGIAHLPPERIQATRTLVSTALGAAPYIEEALSLLPAIKNSEASYLSPLTHNLSSSARILLVDDNADMREYVKRLLSRHYVVETATDGLAALEALADHLPDLVLTDVMMPRLDGFGLLSALRSNNRTREIPIILLSARAGEEAKVEGLEAGADDYLIKPFSARELLARVEATLKLAQLRRDAMEQQQTLRQEAETAKQNVETILSSINDGFYVLDRDWRFTYVNDRLCKIISMEREDILNHSIWDLFADTIGTDIDLQFQRAFNEQTSVQFEYLYVTWNRWYEHRVYPSPDGLTVFAADITERKQAELEREQLLALERHYINQLQGLTRAALAINSALSVEQVLQVITDQAASIIGSHQSVTSMTIGQNWSQAISAIFLSDKYTQWQNYDVKPDRSGIYGCVGHLNRPMRMTQAELEAHPQWRGFGKEAKNHPPLRGWLAAPLVGRNGQNIGLIQLSDKYDGEFTAADEAVLVQLAQMASVSVENVRLYEAEKQARSAAEASREEAEAANRIKDEFLAVLSHELRSPLNPILGWSRLLQNGKLDEAKAKQAVNIIERNAKLQVELIEDLLDISRILQGKLSLTSSPINLASVIKGAIETVRLAAEANSIRIEVNLDGEIGLVSGDSTRLQQVMWNLLSNAVKFTPTGGLVEIRLEQVGNQAQISVSDTGKGISPDFIPYVFDYFRQADSATTRKFGGLGLGLAIVRHLVELHGGTIHAESQGEGMGATFTLKLPLLPTQLTVNPDSPLLELSLGLHGIQVLVVDDDTDTREFVAFLLEQAGARVITAVSALEALQVFTQSPPDILLSDIGMPDMDGYMLMRQIRALPPDQGGKIPAIALTAYAGEIDEKRALKVGFQRHISKPVDPDNLIRAIVNLIDIKI

SEQ ID NO: 17516 - protein, 502 aa, Xylella fastidiosa 9a5c
MHNGFDALQLHANRLRGVTIPDLLAAELKRPEQYARQVGPLYFNFARQKYDCVALEALFALARNHNVAGAFQRMFCGEQVNVTEGRAVLHTALRGDLSGTSVAVAAYTAAAKVRERMYALIAGLDASEVTDIISVGIGGSDLGPRLVVDALRPISQGRFRVHFVSNVDGAAMRRTLDMLDPSRTAGILISKTFGTQETLLNGRILYDWLGGSERLYAVSANPERAAHAFDIVPTQVLPIWDWVGGRYSLWSAVGFPIALAIGSQRFEELLAGAAEFDAYALRVPLEENVAVLHGLTAVWNRNFLGCATYAVMAYDQRLALLPAYLQQLVMESLGKRVKCDGTPVDRDTVPVWWGGVGTDVQHSFFQALHQGTNIVPADFIGTIRNDDPYTENHFALNANLLAQIEVLANGQLSDDPHRVYPGGNPSTLILLDALTPQALGGLIAMYEHSVYVQSVIWGINAFDQFGVELGKHLAVQLLPALKGESVEVVDPVTRAVLVRLRG

SEQ ID NO: 17517 - protein, 367 aa, Caulobacter crescentus CB15
MKSLFQRRASKVRETEAMNAPVPNNQKAELLQKVVEHVDITSYDARPIIDSMRKMSFSSRDTARAADIFNMALADKGCSTWLILAGSTSAGGCMHVYRDMVKNGMIDAVVATGASIVDMDFFEALGFKHYQAAGPVDDNVLRDNYIDRIYDTYIDEEELQACDHTILEICNKLEPRGYSSREFIWEMGKWLAEGNAKKEGSLIQTAYEEGVPIFCPAFVDSSAGFGLVKHQKEKIAEKKPYLMIDAVADFRELTDVKIAAGTTGLFMVGGGVPKNFAQDTVVCAEILGVEADMHKYAIQITVADVRDGACSSSTLKEAASWGKVSTTYEQMVFAEATTVVPLIASDAYWRKAWEGREKPRWNKLFGK

SEQ ID NO: 17518 - protein, 608 aa, Saccharomyces cerevisiae
MSDKNSRIAIVSADKCKPKKCRQECKRSCPVVKTGKLCIEVTPTSKIAFISEILCIGCGICVKKCPFDAIQIINLPTNLEAHVTHRYSANSFKLHRLPTPRPGQVLGLVGTNGIGKSTALKILAGKQKPNLGRFDDPPEWQEIIKYFRGSELQNYFTKMLEDDIKAIIKPQYVDNIPRAIKGPVQKVGELLKLRMEKSPEDVKRYIKILQLENVLKRDIEKLSGGELQRFAIGMSCVQEADVYMFDEPSSYLDVKQRLNAAQIIRSLLAPTKYVICVEHDLSVLDYLSDFVCIIYGVPSVYGVVTLPASVREGINIFLDGHIPAENLRFRTEALQFRIADATEDLQNDSASRAFSYPSLKKTQGDFVLNVEEGEFSDSEILVMMGENGTGKTTLIKLLAGALKPDEGQDIPKLNVSMKPQKIAPKFPGTVRQLFFKKIRGQFLNPQFQTDVVKPLRIDDIIDQEVQHLSGGELQRVAIVLALGIPADIYLIDEPSAYLDSEQRIICSKVIRRFILHNKKTAFIVEHDFIMATYLADKVIVFEGIPSKNAHARAPESLLTGCNRFLKNLNVTFRRDPNSFRPRINKLDSQMDKEQKSSGNYFFLDNTGI

SEQ ID NO: 17519 - protein, 499 aa, Coccidioides immitis RS
MADRLLKKIPYTFKDPSLLDTRSLIGGKWVEARSGKTFPVFDPEDNKEVCQVTDLDVDDVCAAIDAASEAFKTFKNAPHRERRWLMRRWADLIKENKDDLAAICTLELGKPFTESLVTVKYGTDFLDWFEGEIERVYGETIPAARGNNRIFTIKQPQGVVAAITPWNSPIAMVTRKVGAAIAAGNTVICKPAPETPLCAIAVAKLFERAGGPPGVLNIITSSPETTPAVGAELCSNKLIRHLSFTGSTAVGRYLHTECSKTFKKTSMELGGNAPFIIFEDANIDKAVDGLISSKFRSSGQTCVCANRIFVHSSIISQFASRLHTRLGETFTYGSVWDRNVNFGPLYSPKAFDKLTRQTKDALERGGELIGEDPAKLQAQYGPNFYPPTIVTNANKDMLFMKEETFGPLAFLVPFETEEEAVAMANNVDAGLASYFYTEDISRMYRVSEALESGMVGCRVGLISACEQPFGGIKDSGMGREGGKGALDEYLNIKSVTVGI

SEQ ID NO: 17520 - protein, 615 aa, Helianthus tuberosus
MQTPEPFTDLEHEPHTPLLDHHHNPPPQTTTKPLFTRVVSGVTFVLFFFGFAIVFIVLNQQNSSVRIVTNSEKSFIRYSQTDRLSWERTAFHFQPAKNFIYDPDGQLFHMGWYHMFYQYNPYAPVWGNMSWGHSVSKDMINWYELPVAMVPTEWYDIEGVLSGSTTVLPNGQIFALYTGNANDFSQLQCKAVPVNLSDPLLIEWVKYEDNPILYTPPGIGLKDYRDPSTVWTGPDGKHRMIMGTKRGNTGMVLVYYTTDYTNYELLDEPLHSVPNTDMWECVDFYPVSLTNDSALDMAAYGSGIKHVIKESWEGHGMDWYSIGTYDAINDKWTPDNPELDVGIGLRCDYGRFFASKSLYDPLKKRRITWGYVGESDSADQDLSRGWATVYNVGRTIVLDRKTGTHLLHWPVEEVESLRYNGQEFKEIKLEPGSIIPLDIGTATQLDIVATFEVDQAALNATSETDDIYGCTTSLGAAQRGSLGPFGLAVLADGTLSELTPVYFYIAKKADGGVSTHFCTDKLRSSLDYDGERVVYGGTVPVLDDEELTMRLLVDHSIVEGFAQGGRTVITSRAYPTKAIYEQAKLFLFNNATGTSVKASLKIWQMASAPIHQYPF

SEQ ID NO: 17521 - protein, 952 aa, Mycobacterium leprae
MSVPNSSNKQTCFTARHIGPNSEDVATMLAVIGVESLDDLAAKAVPSDILDNVTDTGVAPGLDRLPPPATESETLAELGALARANTVAVSMIGQGYYDTLTPAVLSRNILENPAWYTPYTPYQPEISQGRLEALLNFQTLVSDLTGLEIANASMLDEGTAAAEAMTLMYRAARSTASRVVVDVDVFAQTVAVFATRAKPLGIDIVVADLREGLPDGEFFGVITQLPGASGRITDWTALIAQAHSRGALVAVGADLLALTLITPPGEIGADVAFGTTQRFGVPMGFGGPHAGYLALHTKHARQLPGRLVGVSVDSDGTPAYRLALQTREQHIRRDKATSNICTAQVLLAVMAAMYASYHGAEGLTGIARRVHAQARALAAGLSAAGVEVVHQAFFDTVLARVPGRTVQIQGAAKERGINVWLVDGDHVSVACDEATTDEHITAVLAAFAATPARASFAGPDIATRTSAFLTHPTFTKYRTETSMMRYLRALADKDIALDRSMIPLGSCTMKLNAAAEMESITWQEFTRQHPFAPVSDTPGLRRLISDLESWLVQITGYDAVSLQPNAGSQGEYAGLLAIHDYHVSRGEPHRNVCLIPSSAHGTNAASAALVGMRVVVVGCHDNGDVDLDDLRIKLSEHANRLSVLMITYPSTHGVYEHDIAEICAAVHDAGGQVYVDGANLNALVGLARPGKFGGDVSHLNLHKTFCIPHGGGGPGVGPVAVRSHLVSFLPGHPFAPELPQGQPVSSAPYGSASLLPITWAYIRMMGADGLRTASLTAIASANYIARRLDKYFPVLYTGENGMVAHECILDLRPITKSVGVTVDDVAKRLADYGFHAPTMSFPVPGTLMVEPTESESLAEIDAFCEAMIAIRGEIARVGAGEWSVEDNPLRGAPHTAECLLASDWDHPYTREEAAYPLGKAFRPKVWPPVRRIDGVYGDRNLVCSCLPVEAFV

SEQ ID NO: 17522 - protein, 315 aa, Klebsormidium flaccidum
EFGINGFGRIGRNFLRCWNGRENSPLEVVVINDTGGVKQASHLLKYDSILGTFDADVKVVGDDAISVDGKVIKVVSNRDPTKLPWGEMNIDLVIEGTGVFVDEAGAGKHLEAGAKKVLITAPGKGNIPTYVIGVNEEKYKHSEKIISNASCTTNCLAPFVKVLDQKFGVVKGCMTTTHSYTGDQRLLDASHRDLRRARAAALSIVPTSTGAAKAVALVLPQLKGKLNGIALRVPTPNVSVVDLVIQTEKKTFAEEVNNAFREAANNELKGILDVNDEPLVSIDFRCSDVSSTVDSSLTMVLGDDMVKVVAWYDNE

SEQ ID NO: 17523 - protein, 588 aa, Picrophilus torridus DSM 9790
MHIAILDRDRCHPKKCNHECRYYCPPVRSGSKTIEFPDVDAQPVITENLCIGCGICVRRCPFNAIKIVTIPDELNKKILHQYGLDTFRLYSIPMLSKGKVSAILGQNALGKTTTLNILSGIIIPNFGNYNKKPDKDGVIEYFSKSVMGQYFKDLYNGNKKAVLKSQYVDMIPRVVSGTVRDILNETNHGNMDEIVSELAMENYLDHDVRDLSGGELQKLAIARSLMKDGDIYLFDEMTSYLDIGERLRVSNIVKRLSESKIVMIVEHDLAILDKIADEIHLVYGEPGAYGVITQQKSPSKAINSFLEGYLKEENVRIRPYSIEFSVKSSKRTNVSVQASSWESLYKRYKTFELRINPGFINREEIIGILGENALGKTTFVKMLAGVVTPDNGSVNKQVKVAYKPQYISSDYDGTVYEMLSNTLKERLSDPFIINEIMFPLNIEELHEKNVSDLSGGELQRLSIALTLSLDADLYLIDEPSAHLDASYRINVAKIIRRAIENSKKSAIVVDHDIYLIDLISDALIVFKGSPGRSGESFGPMDMRSGMNLFLKDIGVTFRRDEITKRPRINKTDSALDREQKEKGEYYYI

SEQ ID NO: 17524 - protein, 191 aa, Lycopersicon esculentum
MTSFAMQSIILGSPLKLSQNKNGLNQFVPSCYLPRLHRTSRVSVKCMAEEGEKESSTPSTDYSATVPKPTPAKPKPSTNFIDIFSFSGPAPERINGRLAMIGFVAAIGMELANGADLSAQLSNGGLLWFLGSSALLTLASLIPLFQGVTVESKSDGIMTADAEIWNGRFAMLGLVALAFTEYVKGAGLFQV

SEQ ID NO: 17525 - protein, 112 aa, Escherichia coli O157:H7 EDL933
  misc_feature (46)..(46): Xaa can be any naturally occurring amino acid
MKKIDAIIKPFKLDDVREALAEVGITGMTVTEVKGFGRQKGHTELXRGAEYMVDFLPKVKIEIVVPDDIVDTCVDTIIRTAQTGKIGDGKIFVFDVARVIRIRTGEEDDAAI

SEQ ID NO: 17526 - protein, 510 aa, Arabidopsis thaliana
MDPHKKVALETEFFTEYGEASRYQIQEVIGKGSYGVVASAIDTHSGEKVAIKKINDVFEHVSDATRILREIKLLRLLRHPDIVEIKHVMLPPSRREFRDIYVVFELMESDLHQVIKANDDLTPEHYQFFLYQLLRGLKFIHTANVFHRDLKPKNILANSDCKLKICDFGLARVSFNDAPSAIFWTDYVATRWYRAPELCGSFFSKYTPAIDIWSIGCIFAEMLTGKPLFPGKNVVHQLDIMTDLLGTPPPEAIARIRNEKARRYLGNMRRKPPVPFTHKFPHVDPLALRLLHRLLAFDPKDRPSAEEALADPYFYGLANVDREPSTQPIPKLEFEFERRKITKEDVRELIYREILEYHPQMLQEYLRGGEQTSFMYPSGVDRFKRQFAHLEENYGKGEKGSPLQRQHASLPRERVPAPKKENGSHNHDIENRSIASLVTTLESPPTSQHEGSDYRNGTSQTGYSARSLLKSASISASKCIGMKPRNKSEYGESNNDTVDALSQKVAALHT

SEQ ID NO: 17527 - protein, 358 aa, Neurospora crassa
MAEFIRAQIFGTTFEITSRYSDLQPVGMGAFGLVCSAKDQLTNQNVAIKKIMKPFSTPVLAKRTYRELKLLKHLRHENVISLSDIFISPLEDIYFVTELLGTDLHRLLTSRPLEKQFIQYFLYQIMRGLKYVHSAGVVHRDLKPSNILVNENCDLKICDFGLARIQDPQMTGYVSTRYYRAPEIMLTWQKYDVEVDIWSAGCIFAEMLEGKPLFPGKDHVNQFSIITELLGTPPDDVINTIASENTLRFVKSLPKRERQPLKNKFKNADSSAVDLLERMLVFDPKKRITATEALSHEYLAPYHDPTDEPVAEEKFDWSFNDADLPVDTWKIMMYSEILDYHNVEASGQMMFQEDVPPQ

SEQ ID NO: 17528 - protein, 369 aa, Pseudomonas syringae pv. tomato str. DC3000
MAFDRIEDIIEDYRQGKMVLLVDDEDRENEGDLLLAADCCTAQAISFMAREARGLICLTLTDEHCKSLGLEQMVPSNGSVFATAFTVSIEATTGVTTGISAADRARTVQAAVNPGAVPDDLVQPGHIFPLRARDGGVLTRAGHTEAGCDLARMAGFTPASVIVEVMNDDGTMARRPDLELFAEKHGIRIGTIADLIHYRLSTEHTIVRIGERELPTVHGTFRLFSYEDRIEGGVHMAMVMGDIRREDPTLVRVHVVDPLRDLVGAEYTGPANWTLWAALQRVAEEGCGVVVVLANHESSQALLERIPQLTQPPRQYTRSQSRIYSEVGTGAQILQDLGIGKLRHLGPPLKYAGLTGYDLEVIESIPFPG

SEQ ID NO: 17529 - protein, 118 aa, Digitalis lanata
MSSEKVRASHILIKHQGSRRKSSWKDPDGSLISATTRDDAVSQLQSLRQELLSDPASFSDLASRHSHCSSAKRGGDLGPFGRGQMQKPFEEATFALKVGEISDIVDTDSGVHIIKRTG

SEQ ID NO: 17530 - protein, 411 aa, Dioscorea tenuipes
MYNGEKINCTENRSVLHIALRAARDKVIKSDGKNVVPDVWHALDKIKEFSERIRSGSWVGATGKALTDVVAVGIGGSFLGPLFVHTALQTDPEAAECAKGRQLRFLANVDPIDVARSIAGLNPETTLVVVVSKTFTTAETMLNARTLREWISAALGPQAVAKHMVAVSTNLTLVEKFGIDPANAFAFWDWVGGRYSVCSAVGVLPLSLQYGFSVVHKFLNGAASIDDHFHSTPFEKNIPVLLGLLSVWNVSFLRYPARAILPYSQALEKFAPHIQQVSMESNGKGVTIDGVPLPFETGEIDFGESGTNGQHSFYQLIHQGRVIPCDFIGIMRSQQPIYLKGEVVSNHDELMSNFFAQPDALAYGKVAEQLLNEKVPDHLIPHKTFPGNRPSLESSITFIKCLQRWTVTSNI

SEQ ID NO: 17531 - protein, 567 aa, Dioscorea tokoro
  misc_feature (238)..(238): Xaa can be any naturally occurring amino acid
MATSTLICETPQWKDLNDHVEEIKKTHLRDLMQDSDRCKSMITEFDGIILDYSRQRVLPATVEKLFQLAEVACLKQKIDRMYNGEKINCTENRSVLHIALRAARDKAIKSDGKNVVPDVWHVLDKIKEFSERIRSGSWVGATGKALTDVVAVGIGGSFLGPLFVHTALQTDPEAAECAKGRQLRFLANVDPIDVARSITGLNPETTLVVVVSKTFTTAETMLNARTLREWISAALGPXAVSKHMVAVSTNLTLVEKFGIDPANAFAFWDWVGGRYSVCSAVGVLPLSLQYGFSVVHKFLNGAASIDDHFHSTPFEKNIPVLLGLLSVWNVSFLRYPARAILPYSQALEKFAPHIQQVSMESNGKGVSIDGVPLPFETGEIDFGEPGTNGQHSFYQLIHQGRVIPCDFIGVMRSQQPIYLKGEVVSNHDELMSNFFAQPDALAYGKVAEQLLNEKVPDHLIPHKTFPGNRPSLSLLLPSLNAYNVGQLLAIYEHRIAVEGFVWGINSFDQWGVELGKSLASQVRKQLHLSRTKAEPVEGFNFSTTTLLTRYLEAETGVPSDQSQLPKL

SEQ ID NO: 17532 - protein, 493 aa, Pseudomonas syringae pv. tomato str. DC3000
MSLTRFQMCIDGQWVDALSGKTFDSLNPALAEPWAQLPDAGEADVERAVQAAQKAFESQEWRGLTATARGKLLRRLGDLIAENKEHLAQLESRDNGKLIRETRGQVSYLPEFFHYTAGLADKLEGGTLPLDKPDLFAYTVHEPMGVVAGIIPWNSPLYLTAIKLAPALAAGNTIVLKPSEHASATVLELARLALEAGIAPGVVNVITGYGPTTGAALTRHPLVRKIAFTGGAATARHVVRSSAENFAKLSLELGGKSPNIIFADADLDSAINGAVAGIYAASGQSCVSGSRLLVQDEIYDEFVERLAERASRIRIGNPLDESTEMGPMATAQQLAVVEGLVADALAEGARLRLGGKRPELDSKGWFYEPTLFECDHNSMKIMQEEVFGPVASVIRFKDEAEALAIANDSQFGLAAGIWTRDLGRAHRLARDIRSGIIWVNTYRAVSAMAPIGGFKNSGYGRESGIDSVLAYTELKTVWINLSQAPMPDPFVMR

SEQ ID NO: 17533 - protein, 303 aa, Triticum aestivum
  misc_feature (45)..(45): Xaa can be any naturally occurring amino acid
  misc_feature (53)..(53): Xaa can be any naturally occurring amino acid
  misc_feature (99)..(99): Xaa can be any naturally occurring amino acid
  misc_feature (109)..(109): Xaa can be any naturally occurring amino acid
SSGTFRGVLTKLGEEHLGFRTFQALHSVTLGHGWVHPFTKPEWRXLFDEMAVXATEEYRSFVSQEPRFVEYFRLATPETEYGRMNIGSSPSKRKPSGGXIESLRAIPWXIFAWTQTRFHLPVWLGFGGAFKHILKKDIRNFHMLQEMYNEWPFFRVTIDLVEMVFAKGNPGIAALYDRLLVSEGLQPLGEKLRANYEETQKLLLQVAGHKDLLEGDPYLKQRLRLRDAYITTMNVCQAYTLKRIRDPDYHVALRPHLSKEVMDTSKPAAELVTLNPASEYAPGLEDTLILTMKGIAAGLQNTG

SEQ ID NO: 17534 - protein, 494 aa, Aspergillus niger
MQSNDYRPSYHFTPDQYWMNEPNGLIKIGSTWHLFFQHNPTANVWGNICWGHATSTDLMHWAHKPTAIADENGVEAFTGTAYYDPNNASGLGDSANPPYLAWFTGYTVSSQTQDQRLAFSVDNGATWTKFQGNPIISTSQEAPHDITGGLESRDPKVFFHRQSGNWIMVLAHGGQDKLSFWTSADTINWTWQSDLKSTSINGLSSDITGWEVPDMFELPVEGTEETTWVVMMTPAEGSPAGGNGVLAITGSFDGKSFTADPVDASTMWLSWVNVPASDGRRIIAAVMNSYGSNPPTTTWKGMLSFPRTLSLKKVGTQQHFVQQPITELDTISTSLQTLENQTITPGQTLLSSIRGTVLDVRVAFYPDAGSVLSLAVRKGRSEQTVIKDTQSDATLSVDTQSDATLSVDRTESGDTSYDPAAGGVHTAKLEEDDTGLVSIRVLVDTCSVDLFGGQGEAVISDLIFPSDSSDGLALEVTGGNAVLQSVDVRSLSLE

SEQ ID NO: 17535 - protein, 964 aa, Oryza sativa (indica cultivar-group)
MAGKVEKMASIDAQLRMLAPAHRSEDDKLVEYDALLLDRFLDILQDLHGDDLREMVQECYEIAAEYEGKHDSQKLDELGNMLTSLDPGDSIVMAKAFSHMLNLANLAEEVQIAYRRRIKLKKGDFADENSALTESDIEETFKRLVVDLKKSPAEVFDALKSQTVDLVLTAHPTQSVRRSLLQKHSRIRNCLVQLYSKDITPDDKQELDEALQREIQAAFRTDEIRRTQPTPQDEMRAGMSYFHETIWKGVPKFLRRLDTALKNIGIDERVPYNAPLIQFSSWMGGDRDGNPRVTPEATRGVCLLARMMASNLYCSQIEDLMFELSMWRCNDELRARADELHLSSKKDAKHYIEFWKKVPPSEPYRVVLGDVRDKLYNTRERARQLLSSGYSDIPEETTLTSVEQFLEPLELCYRSLCDCGDRVIADGTLLDFLRQVSTFGLCLVRLDIRQESDRHTDVLDAITTYLGIGSYREWSEERRQDWLLSELNGKRPLFGPDLPKTDEIADVLDTFRVIAELPADNFGAYIISMATAPSDVLAVELLQRECHVKTPLRVVPLFEKLADLESAPAAVARLFSIDWYRERINGKQEVMIGYSDSGKDAGRLSAAWQLYKSQEELINVAKEFGVKLTMFHGRGGTVGRGGGPTHLAILSQPPDTIHGSPRVTVQGEVIEQSFGEEHLCFRTLQRFTAATLEHGMHPPIAPKPEWRALLDEMAVVAAKGYRSIVFQEPRFVEYFRLATPEMEYGRMNIGSRPSKRKPSGGIESLRAIPWIFAWTQTRFHLPVWLGFGSAFKHILEKDIRNLHMLQEMYNEWPFFRVTIDLVEMVFAKGDPGIAALYDKLLVSEELWPLGEKLRANCEETKQLLLQVAGHKDLLEGDLYLKQRLRLRNAYITTLNVCQAYTMKRIRDPDYHVTLRPHMSKEIMDWSKPAAELVKLNPTSEYAPGLEDTLILTMKGIAAGMQNTG

SEQ ID NO: 17536 - protein, 412 aa, Neurospora crassa
MAGTKKVVKKSGDKKKAVAQPSAQLLAAVEKFLTENNFGDAATEFTKQITKNGWEKKSSDASLVSIFQTWEAKPKQAALATPAPGEDEAKKTKAAAPATNPLKRKAESSSESSSSSSDSSSSDSSSSEDEAPKAKKQKVAESSSSSSESSSDSSSDSSSSSESEDDKKKPAAKAASPKKAAAAKKEESSDSSSSDSSSSDSSSESSSDSSSSDSSSDSDSSSSDSDSSSDSSSDSDSSSDSDSDSDSSESEAEKKEVKKEAKKATKSDSSSSDSSSSDSSSDSSSDSEDEKKTDKKKAASTNGSDSSATLKASTESTPVPTTEEKTNNRGKANGPPPKKEIQPFSRVRKDVVVDPRLASNAFAGHEWGQKAHEDLIVTRGKGFTKEKNKKKRGSYRGGRIDTFAVGGIKFDD

SEQ ID NO: 17537 - protein, 451 aa, Parvularcula bermudensis HTCC2503
MRYLPLSDQDRAEMRARIGVDRIDELFVDVPADALNPHLDLPDHQGELAVERFVSGLAAKNHAAGDGPFFAGAGAYRHHVPATVDHIIQRSEFLTAYTPYQPEIAQGTLQYLFEFQTQVATLTGMEVANASMYDGSTATAEAALMARRITKRRKVVCSGGLHPHYAAVVRTNLELIDDEVVVAPITPNGLGKIRQFIDEETSCVIVQSPDVFGNVRDIAAVAEAAHNVGALLIVVVTEAISLGLLKAPGLLGADIVVGEGQSIGNALNFGGPYVGLFAARKKHVRHMPGRLAGETVDADGRRGFVLTLSTREQHIRRDKATSNICTNSGLCALAFTVHLSLLGGEGLRRLAHLNHQAAARTADRLTAIDGVELVTPTFFNEFTVRLPSKAGPIVEALASMGIIAGVPGDRLWPEQEEFHDLLVVAVTETVSDEDIDQFGTALAQEIGRSSW

SEQ ID NO: 17538 - protein, 370 aa, Corynebacterium glutamicum
MNERTSDAFDALLVLSFGGPEGHEEVRPFLENVTRGRGIPPERLDDVAVHYHHFGGISPINALNREIIANVEKELASRNRELPVYFGNRNWKPFGNEAAEQMADDGVKNALVLATSAWGGYSGCQQYQEDIRGMIKHLESQGQSVTFTKLRQFYDHPRFVSTMAQLVQDSYAKLPDELRDEARLVFTAHSIPLAADNAAGTPQDGSLYSSQVKEASALIAKAVGVSDFDVVWQSRSGSPHTPWLEPDIVDHAVELNEKGQKALVVCPVGFISDHMEVIWDLDSELMEEAEKRNMVVERVATVGPTDEFAALVVDLIEEAELKRVIERLGKLPARGSSINGAPCSEGCCGTAKHQTARVNPNARSAAPAAN

SEQ ID NO: 17539 - protein, 351 aa, Pyrococcus horikoshii OT3
MDIMNEKVKKIIEFMDKNSIDAVLIAKNPNVYYISGASPLAGGYILITGESATLYVPELEYEMAKEESNIPVEKFKKMDEFYKALEGIKSLGIESSLPYGFIEELKKKANIKEFKKVDDVIRDMRIIKSEKEIKIIEKACEIADKAVMAAIEEITEGKKEREVAAKVEYLMKMNGAEKPAFDTIIASGYRSALPHGVASDKRIERGDLVVIDLGALYQHYNSDITRTIVVGSPNEKQKEIYEIVLEAQKKAVESAKPGITAKELDSIARNIIAEYGYGEYFNHSLGHGVGLEVHEWPRVSQYDETVLREGMVITIEPGIYIPKIGGVRIEDTILITKNGSKRLTKTERELI

SEQ ID NO: 17540 - protein, 372 aa, Solibacter usitatus Ellin6076
MPIVSVPDAIQEIRAGRIIVVVDDEDRENEGDLTIAAEKVTPEIINFMAVQGRGLICLALTAERCDYLRLPLMSPTNTSMFGTAFTESIDALHGVTTGISAADRTRTILQAIDPDCRPSDLARPGHMFPLRAREGGVLVRAGQTEASVDLARLAGLTPAGVICEIMNDDGTMARVPQLIEFCKRHDMKMLSVAELIRYRMKNEKFIRRVAEGIIPTEFGDFRTIAYASDLNPEYHLALVRGDVSGKESVLVRMHSRCVFGDVFRSSQCECGQLVQNSLRAIAKEGQGVLVYLHETGPGFRVDSGQLVSHGRDFMHLKGEDGQRQLQHEHGLGAQILSDLGLHTIRLLTNHPRKIVALEGFGIEVEAQIPVGH

SEQ ID NO: 17541 - protein, 314 aa, Wigglesworthia glossinidia endosymbiont of Glossina brevipalpis
MKIKSKLLILGSGPAGFTSAIYSSRAGINPILITGSQLGGQLTTTDKIENWPGDSKSLTGSELIKRMRDHAIKFGTKIFYDHINEVNFNKKPFICKGEKEYISDAIIIATGSSARYLGLSSEQLYKGKGVSTCAVCDGFFYKNKIVAVIGGGNTALEEALYLSNIASKVYLIHRRDIFTAEKILVDRIFKKRNNGNISIYNNFVVKKIIGNDKQVSSILLESTTSKKEKIISVSGIFIAIGHIPNTKIFENQITLKNYYICISNKYNKKYRTSTSIPGIFSAGDVSDYLYRQAITASGFGCMAALDAEKYLSSL

SEQ ID NO: 17542 - protein, 406 aa, Symbiobacterium thermophilum IAM 14863
MRIIVQKFGGTSVATPEGREAVVRRVRQALDDGYATVVVVSAMGRQGDPYATDTLIQLAQSAGPDLAPREMDLLLSCGEIISSVLMAATLTAAGIPAVALTGGQAGIQTDENYGNAQIVKVDPAPVLSRLKEGLVVVVAGFQGVNAAGEVTTLGRGGSDTTAAALGGALRAEVVEIYTDVDGVKTADPRLVAEARTLSVTTYDEIAQMAHYGAKVVHPRAVEIAMQHRVPIRVRSTFSDNPGTLITYSAEAGVIWSEPFSDRVVTAVTHVVGLAQVVVKTGRDWATPRLFRRLANAGISVDLISVSMESSAFSIPESRAAQAEMILTELGLVDLQVRHGCAKVTVVGSGMRGRPGVMATVAEALYAAEVPIWQTADSHVTISCLIPAADVQRAVQALHDAFELGRI

SEQ ID NO: 17543 - protein, 245 aa, Triticum aestivum
  misc_feature (228)..(228): Xaa can be any naturally occurring amino acid
FRRILYQRGSANGKRVQANLGAKNHALLSLDANKEHALDSIAGAAFGAAGQRCMALSVLITLGDAKQWVDDLVKKAKNHVAGSGFDSKSDFGPLITPQARDRCEALITSAEKEGAKILLDGRGWKPEGFPDGNWVGPTVIAGVTPEMECYREEIFGPVLLCMEADTLQSGINIINSNAWGNGTVIFTNNGAKASLFQQEIDAGQVGINVPIPVPLPMFSFTGNKRSVXGTGLTNFYGQDGLRFYP

SEQ ID NO: 17544 - protein, 507 aa, Staphylococcus aureus subsp. aureus Mu50
MLNADLKQQLKQLLELMEGNVEFVASLGSDEKSKELKELLTEISDMSPRLSLSEKSLKRTPSFSVNRPGEETGVTFAGIPLGHEFNSLVLAILQVSGRAPKEKQSIIDQIKNLEGSFHFETFISLTCQKCPDVVQALNLMSVINPNITHSMIDGAVFREESENIMAVPAVFLNGEEFGNGRMTIQDILSKLGSTADASEFENKEPYDVLIVGGGPASGSAAIYTARKGLRTGIVADRIGGQVNDTAGIENFITVKETTGSEFSSNLAAHIDQYDIDAMTGIRATDIEKTDEAIKVTLENGAVLESKTVIIATGAGWRKLNIPGEEQLINKGVAFCPHCDGPLFENKDVAVIGGGNSGVEAAIDLAGIVNHVTLFEFASELKADNVLQDRLRSLSNVDIKTNAKTTEVVGEDHVTGIRYEDMSTGEEHLLNLDGIFVQIGLLPNTSWLKDAVELNERGEIVIDRNNNTNVPGIFAAGDVTDQKNKQIIISMGAGANAALNAFDYIIRN

SEQ ID NO: 17545 - protein, 715 aa, Arabidopsis thaliana
MVVATTIALYASPASTVCSTAHQINAHISCDLDLNSRSSSASSSTSSPTIGGLSLLFSGASVKSSSSSSSSHPSVGEELASIRHDRSEDRTLSGSFCYSPSKFIGSSYLKRDHQSPVSVLHGPISSGNSPPMRISRDRNLDGGSALRVGSSRLFNGFVRKAIGSCVDYDTDSVLVDEQLPFTMDDGFEGERRQPYARDLLRRAQLKHKIFEDESVIKAFYEAEKAHRGQMRATGDPYLQHCVETAMLLADIGANSTVVVAGILHDTLDDSFMSYDYILRTFGSGVADLVEGVSKLSQLSKLARENNTACKTVEADRLHTMFLAMADARAVLIKLADRLHNMMTLYALPPVKRQRFAKETLEIFAPLANRLGISSWKVKLENLCFKHLHPDQHHEMSDMLEDSFDEAMITSAIEKLEQALKKEGISYHVVSGRHKSLYSIYCKMLKKKLTMDEIHDIHGLRLIVDNEKDCYKALGVVHKLWSEVPGKLKDYISHPKFNGYQSLHTVVMGDGTIPLEVQIRTKEMHLQAEFGFAAHWRYKEGDCKHSSFVLQMVEWARWVVTWHFETMSKDGSSICSSEPLCSFPSHAEDCPFSYKPSGNQEGPVYVIVIENEKMTVQEFPENSTVSDLLRRAGPGSSRWSMYSIPAKEELRPRLNQTPVSDLKCKLKMGDVVELTPAIPDKSLTEYREEIQRMYDRGLAFSRPHRAATGTMVGWGS

SEQ ID NO: 17546 - protein, 282 aa, Thermus thermophilus HB8
MAAQVLSGHEAAEAVYEEIRARLRSLSFTPSLRVIRLGEDPASVAYVRLKDKRARALGYRSQVEVYPEDLPEEALLERIAALNADEEVDGILVQLPLPPHIRTQRVLEAIHPLKDVDGFHPLNVGRLWSGGKGLFPCTPLGVVRLLKHYGVDLRGKEVVVVGRSNIVGKPLAGLLLREDATVTLAHSKTQDLPEVTRRAQVLVVAVGRPHLVRKEWVREGAIVVDVGVNRVEGRLLGDVHPEVAEVAFALTPVPGGVGPMTVAMLMGNTLEAALLRRHGASG

SEQ ID NO: 17547 - protein, 392 aa, Methanosarcina mazei Go1
MQSIVQEAMKFSEKEKEYRKTTSDEEFEEFGQPRIMIVGCGGAGNNTVNRLYNIGIEGAETVCINTDKQHLDNVRADKKILVGKTLTRGLGAGGYPETGKKAAELARGTLEEVLKDVDLVFVTAGLGGGTGTGVAPVVAEVAKEQGAIVVGMVSSPFRVERARIFKAEEGLEDLRRAADTVIVLDNNRLLNYVPNLPIDQAFSVMDQLIAETVKGITETITVPSLINLDYADIRTIMSCGGVAVMLVGESKNQDKSTEVVRTALNHPLLDVDYKGATGSLVHVTGGPDLSLKEAEEIASMLTYELSSNANVIWGARIRDDYEGKVRVMAIMTGVQSAQILGPQAGAGILESRAEADPIQEKRFGRLSLEARKAGTAGPLRKKHEESIIDFIN

SEQ ID NO: 17548 - protein, 481 aa, Leifsonia xyli subsp. xyli str. CTCB07
MIRNQYIDRQNILFVLNLFTPCFGSLWRRVEAMNSAVDLSFGSADLTFASSGDALVRRTILPSGVRILSEQVPGARSATLGYWVAVGSRDEQEHVPGSLGSTHFLEHLLFKGTRSRSALDIAVAFDSVGGEHNAMTAKEYTCYYAKVQDRDLDMAVEVIGDMLTSSALDPAEFENERAVILEELSMTEDDPSEVANERLFSAVLGDHPLGRPIGGRPESIRAASRDAVWNHYRANYRPQDLVVTAAGAVDHDQLVAGVQRALDAAGWDLAAAARPVARRATVPAAIQRAAAVVTVERPTEQVNLLVGVPGIVASDERRTAMSVLSSVLGGGTSSRLFQEIREKRGLAYAVYSFSASYSDAGVFGLYAGCAPAKARQVAELVLDELRRLADGGVTSEELSRTVGQLSGGTALALEDSDTRMSRLGRAEISLGEFADLDESLRRLRLVTAGDVRDLACDLVGREFSVSAVGNVTDDTFAGLVS

SEQ ID NO: 17549 - protein, 107 aa, Dehalococcoides sp. CBDB1
MVMEITDQSFAAEVLKSDKPVLVDFWAPWCGPCRMVAPIIDKLSTKYAGKFKFCKLNVDENKTTATQYRVMSIPTLLFFKGGQVADMVVGAVPESALSQKIDQLIQK

SEQ ID NO: 17550 - protein, 78 aa, Nostoc sp. PCC 7120
MTDTQSKDIQDQIQEEVEQARAVCDISGSNSAECAAAWDAVEELQAEASHQRQDKKKNSLEQYCDDNPEAAECRVYDE

SEQ ID NO: 17551 - protein, 436 aa, Nocardia farcinica IFM 10152
MTAIALFTRDLRVHDNPVLAAARDAGDAVVPLFVIDAHLVPDRCPPNRARFLAAAVRELDAELRTRGGRLIVRRGVVADEVARVVDETGARTVHLADDVSGYSAARADALRERLDRRGVRLEPHPASITTVDGDVLRPATGRDHFAVFTPYFRRWSEVPRRAPLPPPEDLEVPDLPSAALPTPESLNRGEPSPQLSVGGETTGRALLDSWLAGPVDDYVETGDDLAADATSHLSPYLHFGCLSPTELLHRVDVGSAGGQAFARQLAWRDFHHQLLAARPAVARHDYRPRPIRWRDDPQALAAWRSARTGYPIVDAALRQLHTEGWLPNRARLIAAAFLTKTLGLHWRAGAGHFLHWLVDADLANNQLNWQWVAGTGSDTRPNRGFNPLRQADRYDPDGVYVRRWIPELADLDGGRIHRPWRAEVDYPSPIAECPGM

SEQ ID NO: 17552 - protein, 379 aa, Picrophilus torridus DSM 9790
MRDVIIVGAGPAGSYAAYLLSKKGFDVLQLEEHREIGKPVECTGLVSKRVFSMVRSRSMINKVHGANVYFPNNKYIHVSKNEETIVMYRDQFDKDVAAMAIENGTDLRINARAIDASVNDDFASVKFRENGKIQEEKTKIIIGADGVNSTVRRLLSNERPSRIISTYQVDSSYKMDDQDDVNVYLGSSSSRGFFGWAVPSGDITRIGVGADHDTAIKYFKNINKNFNDKILGINGSPIPIRYLKKTYGKRYMLVGDAAGIVKPLSGGGIYTGMISGKNAAIAAESIIDREDFSEKSMSLYQKLWRSEIGRELYIDSKIQDVFSRLTVNDRALNRLYDILSSGPIIKQINRLGDIDYPSKIAISILLRRPQIFRYIVGSL

SEQ ID NO: 17553 - protein, 296 aa, Dehalococcoides sp. CBDB1
MSAHIINGTEIAAAIREEIRSEVTALKTKAGIVPGLATVLVGDDPASHSYVDSKIKMCQNLGIYSEHHPLPQNATNEDLLTLIAKLNADPKISGILVQVPLPAQISESLVLNAINPDKDVDGFHPVNVGRMCLGEPCFLPCTPHGVQELLIRSGIKIEGTHVVIVGRSNLVGKPLANILLQKAPGANATVTICHSGTKNLPEITRQADILVAAMGKPKFITADMVREGAVVIDVGTTCIGYTPEGKRILSGDVDFEEVKEKAFAITPVPKGVGPMTIIMLMLNTLTAAKRAVGLIK

SEQ ID NO: 17554 - protein, 463 aa, Legionella pneumophila subsp. pneumophila str. Philadelphia 1
MDLFRKKDIKGSLDNESHLAKCLSVFDLTFLGVGAIIGAGIFVLTGIVAATISGPAVIFSYVVAGFACAFAALSYAELAASIGGCGSAYGYAYAGFGELIAWIVGWDLLLEYSIAVSAVSIGWSGYANDFLMALKIFIPTHLLHGPADGGDLNILAILIIAVLTTLLIVGVKSSSRFNNIMVLVKLLVIFIFIAIAFGEVKVENWSSFMPYGWAGVMKGASIIFFAYVGFDAVSTAAEEAINPQRDLPIGIIASLAICTVIYILVSGLLTGIAHYTTLNVSSPISHVLLVLGYKTAAGLVGVGAIAGLTTVMLVLFYGLTRVFLAMSRDGLLPRFLSKTNEHTKTPIRIILLCGILMASLASVTPIGTLAELVNIGTLFAFIVVCGGVLYLRRTHPDMERPFKTPFMPYVPILGIISCFYLILNLPWVTILRFIIWMAVGMAVYFAFSRGNSALSVEGDCAAE

SEQ ID NO: 17555 - protein, 320 aa, Escherichia coli
MIKKIGVLTSGGDAPGMNAAIRGVVRSALTEGLEVMGIYDGYLGLYEDRMVQLDRYSVSDMINRGGTFLGSARCPEFRDENIRAVAIENLKKRGIDALVVIGDGGSYMGAMRLTEMGFPCIGLPGTIDNDIKGTDYTIGFFTALSTVVEAIDRLRDTSSSHQPISVVEVMGRYCGDLTLAAAIAGGCEFVVVPEVEFSREDLVNEIKAGIAKGKKHAIVAITEHMCDVDELAHFIEKETGRETRATVLGHIQRGGSPVPYDRILASRMGAYAIDLLLAGYGGRCVGIQNEQLVHHDIIDAIENMKRPFKGDWLDCAEKMY

SEQ ID NO: 17556 - protein, 1060 aa, Thermosynechococcus elongatus BP-1
MLSKLSFRHKLLLGTLFPIVVIYTGLFFYIRSQVIRRSTADYEAWQQDVASLYAQQFSNALQEITGLATTSANALEAFPTIREEELYSFLRRNLKISRLAYGAAITFTPYSFSPRKRLFAPYVYRDIHRNRLVPKDIGHIYDYTQVRWDWYSEAVRTGQPQWSDPYFEEGAGNVWMVTYAVPFYRQGQIRGVATVDVALPTLQQEIDIQGLQQAQFFVLDRKGRIIFHGDPQLIGQSIFYIAKEYNRSDLAALAEAMISGHSGHLWMTDWVSNERQWFFYTPIPEVGWSLAIRVREEALLDFIHQETWAGLLILVVSFGLISLVTLGVTSYMVRPIQRLAIAAHKIALGNLDIAGEVDTHSQDELGNLGRTFVDMAAQLQESFAELHHFNQRLEEKVKQRTAALEAANQQLSEKERVLHDHNVALVQLSQSPHVQQGHFRMALQEIIQVTAITLRVQRASAWELQGDRLKCVVQYDPAANNHTQPTYLTHSPYPEYLKLLRSGEPLVINDLLTDPRTHELREYARVQRVYSRIDTPIIFNGQLLGVICVESIGKQRVWLLEERRFVANVADIVTIALAAHQRHQAERELLKAKEAAEAANKAKSIFLANMSHELRTPLNAILGFSQILLSDRTLAPQHRQTLEKINRSGEHLLGLINDVLDMAKIEAGRMILQQTTFDLRRMLRDLEEMLKVRAEAKGLRLVFDLAANLPVAVTTDEMKLRQVLVNLLGNGIKFTKEGSVCLKVSYRAQEPPRLAFEVSDTGIGMTPQELKMLFQPFVQTDSSKKVSEGTGLGLAISRQFVQLMGGDIQVRSTKGKGSHFYFEVPIDLGDPRSLEEEKAQTIVGLRSPTSEVRILVVDDLPENRQLLTQLLEPVGFRCREASNGQEAVEIWRAWQPHAILMDIRMPVMDGKTATRQIKKEVGDRLQRGETICPPKILAVTASSFEQDKQELLGLGCDDYIAKPFRPQILFERLAAQLHLEYAYDSTPPAAPPPPTLDPTALTVMPPSWIAELQAAAKKLNAKRIRELIAEIPPEEAALIAGLQQLVKTFRFDKIVELTLV

SEQ ID NO: 17557 - protein, 567 aa, Dioscorea tokoro
MATSTLICETPQWKDLNDHVEEIKKTHLRDLMQDSDRCKSMITEFDGIILDYSRQRVLPATVEKLFQLAEVACLKQKIDRMYNGEKINCTENRSVLHIALRAARDKAIKSDDKNVVPDVWHVLDKIKEFSERIRSGSWVGATGKALTDVVAVGIGGSFLGPLFVHTALQTDPEAAECAKGRQLRFLANVDPIDVARSITGLNPETTLVVVVSKTFTTAETMLNARTLREWISAALGPQAVSKHMVAVSTNLTLVEKFGIDPANAFAFWDWVGGRYSVCSAVGVLPLSLQYGFSVVHKFLNGAASIDDHFHSTPFEKNIPVLLGLLSVWNVSFLRYPARAILPYSQALEKFAPHIQQVSMESNGKGVSIDGVPLPFETGEIDFGEPGTNGQHSFYQLIHQGRVIPCDFIGVMRSQQPIYLKGEVVSNHDELMSNFFAQPDALAYGKVAEQLLNEKVPDHLIPHKTFPGNRPSLSLLLPSLNAYNVGQLLAIYEHRIAVEGFVWGINSFDQWGVELGKSLASQVRKQLHLSRTKAEPVEGFNFSTTTLLTRYLEAETGVPSDQSQLPKL

SEQ ID NO: 17558 - protein, 529 aa, Thermosynechococcus elongatus BP-1
MDALALWQHYQDWLYYHPELEFYVDVSRMGLTPEVVHRLEPAFERAFEQMKELEAGAIANPDEGRMVGHYWLRDPDLAPSPELRSQIRDAIAQVKQFSQQVHSGAIAPPQGGHFTEILSIGIGGSALGPQFVAAALAPVHPPLNIHFLDNTDPAGFERVFAELGDRLRTTLVLVISKSGGTPETRNGMLEAQARFQRAGLAFADHAVAVTLPGSGLAQVAESNGWLAIFPMFDWVGGRTSELSTVGLLPAALQGIDIDDLLMGAKLMDQATRVPNIRQNPAALLALAWHHAGKGRGEKDMVILPYKDSLLLFSRYLQQLVMESLGKETDLNGNIVHQGIAVYGNKGTTDQHAYVQQLRDGLPNFFVTFIEVLRDGQEPSIEVEPGITAGDYLSGLLLGTRQALYEKNRPSLTVTIPEVTPKTVGALIALYERAVGLYGFLVNINAYHQPGVEAGKKAAAANLALQRQIVKVLEQSDEPLDLGAIAGAINAPDQLERIYLILRHLAANDRGIEQLGDPAQPSQLQFRWQR

SEQ ID NO: 17559 - protein, 391 aa, Xylella fastidiosa Ann-1
MSTEVKVPVLPESVSDATIASWHKKAGEIVKRDENIVDLETDKVVLEVPSPVDGVLKEIKFDTGSTVTSNQVLAIIEEESIVAAPSPAPSQVIDQKPVAVSAPAAKSNVDSLPPGARFTATTEGIDPAHIEGSGRRGAVTKEDIINFAKQNGAARSSGTRLEERVPMTRIRQRIAERLMQSKNSTAMLTTFNEINLAKVSNIRKELQEEFQKAHGIKLGFMSFFVKAAANALQRFPLVNASIDGTDIIYHGYSDISIAVSTDKGLVTPVLRNVERMSFADIEHRIADYAKKARDGKLSLEELQGGTFTVTNGGTFGSLLSTPIVNPPQSAILGMHTIKERPIAENGHIVIAPMMYVALSYDHRIIDGKDSVQFLVDIKNQLEAPGRMLFGL

SEQ ID NO: 17560 - protein, 188 aa, Medicago truncatula
MAFKGYILFLVMVLVANMCTQNEAQSGCTSTITSLSPCLNYIMGSSSNPSSSCCSQLSSVVQSSPQCLCSLLNGGGSSFGITINQTLALSLPSACKVQTPPVSQCKGGNGQTSPTSSTSPAGSPVDSPTESPEGAITPSANSDFPSGGAGSKSIPSTDGGSSNGSTIEVSFNLFLSLLAIVFCVITKF

SEQ ID NO: 17561 - protein, 328 aa, Chlamydophila pneumoniae CWL029
MPKHKTLEIREALREAIDEEMSRDPNVCILGEEVGDYNGAYKVTKGLLDKWGPKRVIDAPISEAAFSGIGIGAALSGLRPIIEFMSWNFSFVALDQIISHAAKMHFMTGGKFSVPIVFRGPNGAAAQVSCQHSHCVESLYANIPGLIIIAPSNPYDAKGLLKSAIRNNNPVLFLENELEYNLKGEVPTEEYLVPIGKAHRVQEGNDLTIITYSRMVSITKEACSLAKKRWGLSIEIIDLRTIKPLDISTILSSVRKTSRCIVIEEGHYFAGISSEIIALITEHVFDSLDAPPLRVCQKETPMPYSKILEQATLPNVNRILDTIEKVMR

SEQ ID NO: 17562 - protein, 315 aa, Oryza sativa
  misc_feature (288)..(288): Xaa can be any naturally occurring amino acid
MAAVYKSLNKGAGNPAARDADAEKPRNRQRLLMLSSRGVTMRHRHLLNDLHSLLPHSRKDAKLDTKTQLSQLNELADLYNCNNVMFFEARKGKDLYVWLSKPPNGPTVKMHCQNVHTTEELNFTGNRLKGSRPILSFDASFDKQAHTRVIKELLTQSFGVPPGSRKVKPFTDHVMSFTLAGNGKVWIRCYQISEQEAAKHVKPTGDDTPADPKALPTVAGLKGETNISLVEIGPRLVLTPIVIQEGSFGGPIIYENKEFVSPNQIRSDLRRAKAGRYNERTESQIERXGQTSRLGLRTGEGAKRVDPLDNRVVFA

SEQ ID NO: 17563 - protein, 420 aa, Triticum aestivum
MAVEYRCCGGPFFEHIAIIVVLVLFAGLMSGLTLGLMSLSLVDLEVLAKSGTDKDRKYAAKILPVVKNQHLLLCTLLICNAAAMEALPIFLDSLVTAWGAVLISVTLILLFGEIIPQSICSRYGLAIGASVAPLVRVLVWICFPVAYPIAKLLDHVLGHGKAALFRRAELKTLVTLHGNEAGKGGELTHDETTIIAGALELSEKKAKDAMTPLCDTFVIDINAKLDRKLMQEVIEKGHSRVPVYYEKDTNIIGLILVKNLLSINPDDEIPIKSVTIRKIPRVSEDMPLYDILNEFQKGHSHMAVVIRQNIPNYPAKQPSIDGGSLEVAIAIDDKQGEKVAKSLTPLWRWKSYPNTQNSNTGSRRGKWSKDQSDVLQVHEEPLPTLSEDEEAVGIITMEDVIEELLQEEIYDETDVHVEEQ

SEQ ID NO: 17564 - protein, 476 aa, Pseudomonas syringae pv. tomato str. DC3000
MYPDVQLYIDGQWRASRDGRSIPVIDPATGQSLGSVAHAGIADLDEALSAAERGFATWRATSAYDRYKLMQKAADLVRERADSIARIMTQEQGKPLAEARMETLSAADVIDWLAEEGRRSYGRIVPSRGVSIEQKVIKEPVGPVAAFTPWNFPINQVVRKLSSALAAGCSIIVKAPEETPGSPAELIRAFADAGVPAGVIGLVYGDPAEISGYLIPHPVIRKVTFTGSTPVGKQLAALAGKHMKRATMELGGHAPALVFDDADIDLAARVLATAKFRNAGQVCVSPTRILVQRKVLQAFTEKFVGLTREIKVGNGLESGTTMGPVANDRRIPALVDLIEDAVSAGATVSAGGKAVEGQGYFFEPTVLSGLTPAMRIMNEEPFGPVALLVPFDTVEEAIVESNRVPFGLASYAFTTSMKTAQALSTYIEAGMLSINHQGIGLPEVPFGGIKDSGYGSEGGTEAIEAYLNTKLVTQYS

SEQ ID NO: 17565 - protein, 567 aa, Dioscorea tokoro
  misc_feature (112)..(112): Xaa can be any naturally occurring amino acid
  misc_feature (129)..(129): Xaa can be any naturally occurring amino acid
  misc_feature (238)..(238): Xaa can be any naturally occurring amino acid
MATSTLICETPQWKDLNDHVEEIKKTHLRDLMQDSDRCKSMITEFDGIILDYSRQRVLPATVEKLFQLAEVACLKQKIDRMYNGEKINCTENRSVLHIALRAARDKAIKSDXKNVVPDVWHVLDKIKEXSERIRSGSWVGATGKALTDVVAVGIGGSFLGPLFVHTALQTDPEAAECAKGRQLRFLANVDPIDVARSITGLNPETTLVVVVSKTFTTAETMLNARTLREWISAALGPXAVSKHMVAVSTNLTLVEKFGIDPANAFAFWDWVGGRYSVCSAVGVLPLSLQYGFSVVHKFLNGAASIDDHFHSTPFEKNIPVLLGLLSVWNVSFLRYPARAILPYSQALEKFAPHIQQVSMESNGKGVSIDGVPLPFETGEIDFGEPGTNGQHSFYQLIHQGRVIPCDFIGVMRSQQPIYLKGEVVSNHDELMSNFFAQPDALAYGKVAEQLLNEKVPDHLIPHKTFPGNRPSLSLLLPSLNAYNVGQLLAIYEHRIAVEGFVWGINSFDQWGVELGKSLASQVRKQLHLSRTKAEPVEGFNFSTTTLLTRYLEAETGVPSDQSQLPKL

SEQ ID NO: 17566 - protein, 176 aa, Glycine max
MAALIKLGSLLRQSAVASSASTGSAPALFNAARFMCAGQPADGSKLFVGGLAWATDDHSLKEAFQCFGEVVEARVITDRETGRSRGFGFVSFASGEDAKSAAENMDGKELAGRNVRVNFANERPSGGGGGGGFSRGGGGYGGGGGGYGGGGFGGGGGYGGGRGGGGGGYGGDRESY

SEQ ID NO: 17567 - protein, 558 aa, Acidiphilium rubrum
MSPLPAPRKPTRDAGLAACLFAIDPVGLGGMVIRSRIGPARDGFLSRLRGLLPSATPVRRLPTHITDDRLLGGLDLAGTLSFGSRIVATGLLAEVDGGVVVIPMAERLDRALVGKLAAALDRGVVSVARDGVMSERDARFGVVALDEGIGDDEAAPGALCDRLAFVLDETMLNDDFVWPGARAIARARGRLAGIVAGDDTAIALCRTAAALGIDSLRAPILALRAARAAAALAGRRTIDEADAILAARLILAPRATTLPAPEPPPEPPSEPPTESQNEPDEPPPEAREAQADDQPQDEPPPGDASEELAERVLDAARSALPLDLLAALAMLGGPRRAASAASGKTPIAQGGVRGRPAGVRPGRPGNGARLALIDTLRAAAPMQPLRRRERAAQNPGPMPRVLVRAEDFRIKRFIAPVRTVAIFAVDASGSSALNRLAEAKGAIQILLADCYVRRDQVALIAFRNRTAELLLPPTGALARARRSLAALPGGGATPLALGIDAACAMGIAERRRGASPLIVLLTDGGANIGRDGKPGREAAAAMPAPPPRPAPPQGWRAW

SEQ ID NO: 17568 - protein, 123 aa, Zea mays
  misc_feature (96)..(96): Xaa can be any naturally occurring amino acid
MARTQQLAVVATAVVALVLLAAAATSEAAISCGQVASAIAPCISYARGQGSGPSAGCCSGVRSLNNAARTTADRRAACNCLKNAAAGVSGLNAGRXNAASIPSKCGVSIPYTISTSTDCSRVN

SEQ ID NO: 17569 - protein, 567 aa, Dioscorea tokoro
  misc_feature (503)..(503): Xaa can be any naturally occurring amino acid
MATSTLICETPQWKDLNDHVEEIKKTHLRDLMQDSDRCKSMITEFDGIILDYSRQRVLPATVEKLFQLAEVACLKQKIDRMYNGEKINCTENRSVLHIALRAARDKAIKSDGKNVVPDVWHVLDKIKEFSERIRSGSWVGATGKALTDVVAVGIGGSFLGPLFVHTALQTDPEAAECAKGRQLRFLANVDPIDVARSITGLNPETTLVVVVSKTFTTAETMLNARTLREWISAALGPQAVSKHMVAVSTNLTLVEKFGIDPANAFAFWDWVGGRYSVCSAVGVLPLSLQYGFSVVHKFLNGAASIDDHFHSTPFEKNIPVLLGLLSVWNVSFLRYPARAILPYSQALEKFAPHIQQVSMESNGKGVSIDGVPLPFETGEIDFGEPGTNGQHSFYQLIHQGRVIPCDFIGVMRSQQPIYLKGEVVSNHDELMSNFFAQPDALAYGKVAEQLLNEKVPDHLIPHKTFPGNRPSLSLLLPSLNAYNVGQLLAIYEHRIAVEGFVWXINSFDQWGVELGKSLASQVRKQLHLSRTKAEPVEGFNFSTTTLLTRYLEAETGVPSDQSQLPKL

SEQ ID NO: 17570 - protein, 371 aa, Prochlorococcus marinus str. MIT 9312
MSFGNNPNFDQSREILPSQNAKIEVIGVGGGGSNAVNRMISSDLEGVSFRVLNTDAQALIQSSAERRVQLGQNLTRGLGAGGNPSIGQKAAEESKDELQQTLEGSDLVFIAAGMGGGTGTGAAPVVAEVAKQSGALTVGIVTKPFSFEGKRRMRQAEEGIARLAENVDTLIVIPNDRLKDVIAGAPLQEAFRNADDVLRMGVKGISDIITCPGLVNVDFADVRSVMTEAGTALLGIGIGSGRSRALEAAQAAMNSPLLEAARIDGAKGCIINITGGKDMTLEDMTSASEIIYDVVDQEANIIVGAVVDEAMEGEIQVTVIATGFETNQPLKQQRIKNRLSNQPLYNMSDNKDSGASIPEFLRLRQNKKDID

SEQ ID NO: 17571 - protein, 478 aa, Burkholderia vietnamiensis G4
MDITYDALHLFIDGEWIGASERETAPVINPATQIQIGRVPLATAADLDRALQAAVPAFDVWRNTVPAERARILKRAAELMRERAEHIATVMTLEEGKPLAESRDEVLRAADYFEWFAEEARRIDGRVVPSNRPGVQQLVKKQAIGPVAAFTPWNFPAITPARKLSAALAAGCSVIIKPGEESPATALALARALDDAGLPKGVLQVVFGVPDQVSTQLIASPVIRKVTFTGSVPIGRLLSARAAEGVKPITLELGGHGPVLVFNDADVEKAAVEGAANRFRGTGQVCISSTRFLIQREVYDEFVGHFVRATSALKVGNGMDAGTQVGPLANPRQLAKMEELIADAVERGATILAGGKRIEGEGYFFEPTVLADVPKDARVMHEEPFGPIAVLMRFDALADGLAEANRLPYGLSAYAFTSSARTAIDVADGLEAGMIGINQYRIVSTELPFGGMKESGHGSEGGTEGIEYYLTHKFISQA

SEQ ID NO: 17572 - protein, 428 aa, Thermoplasma volcanium GSS1
MSEFDVAVIGAGPAGSSAAIRLAQNGMNVLLVERGDPPGTKNVSGAVLWGNELAKVVPDWERSAPVERYVTRKEVAFLTEKSKIAISFSSEELQNSKSGKIIVRGKFDQWLAKKAKDAGAMLVTGVTVDRLAIDNGKVIGIQQDNDVITADAVVVAEGANPRVLINSGLRPKLSDRDVALGIKETIKLPENVINERFNVDSKSGFASEFVLGFLDDGLLSGGFLYTNKDTVSLGIVASLDRLRANGVTHSYDIMGKFEEHPFIKNLIKDGIPDEYAAHLVPEGGISSMPKLYGNGYLVAGDAAAFTFSNGMVLQGINYAITSGILAADTIIENRNNINENTLAKYVDKLRESYVLSDLYNFNGIQNVTWSDFVQKSLPTLAESVMMSLFDEKGMPKKHLRQIVTDAMKSGHMKYSDLITNGYRVIKRM

SEQ ID NO: 17573 - protein, 168 aa, Triticum aestivum
MAPTVMASSATSVAPFQGLKSTAGLPVSRRSNGASLGSVSNGGRIRCMQVWPIEGIKKFETLSYLPPLSTEALLKQVDYLIRSKWVPCLEFSKVGFIFREHNASPGYYDGRYWTMWKLPMFGCTDATQVIKEVEEVKKEYPDAYVRIIGFDNMRQVHCVRFIAFKPPC

SEQ ID NO: 17574 - protein, 158 aa, Streptococcus pneumoniae TIGR4
MTSLYDFSVLNQNNQATPLDSYRGKVLLIVNTATGCGLTPQYQGLQELYERYQDQGFEILDFPCNQFMGQAPGSAEEINAFCSLHFQTTFPRFAKIKVNGKEADPLYVWLQDQKSGPLGKRVEWNFAKFLIGRDGQVFERFSSKTDPKQIEEAIQTLL

SEQ ID NO: 17575 - protein, 332 aa, Saccharomyces cerevisiae
MVRVAINGFGRIGRLVMRIALSRPNVEVVALNDPFITNDYAAYMFKYDSTHGRYAGEVSHDDKHIIVDGKKIATYQERDPANLPWGSSNVDIAIDSTGVFKELDTAQKHIDAGAKKVVITAPSSTAPMFVMGVNEVKYTSDLKIVSNASCTTNCLAPLAKVINDAFGIEEGLMTTVHSLTATQKTVDGPSHKDWRGGRTASGNIIPSSTGAAKAVGKVLPELQGKLTGMAFRVPTVDVSVVDLTVKLDKETTYDEIKKVVKAAAEGKLKGVLGYTEDAVVSSDFLGDSHSSIFDASAGIQLSPKFVKLVSWYDNEYGYSTRVVDLVEHIAKA

SEQ ID NO: 17576 - protein, 727 aa, Schizosaccharomyces pombe
MTPVQVPNLDVSVTSSLITTAPVTGNAATISTFTPGSPEPSMNGEEKESSYFPISENDDGTLDLFGDSELEKEQKGDNQETDYSSQYLHPTPPYTNFDDESPSSPTHPSVSNITVDGDSKKHSLQLQEEEKSSESLDSHTHPPKRVRNEDDSLTFSKTSPVSPSSLKDGASNTVTNDASNKIKSEASESASPSALQALDSTAAGSSKEHSSPHDETVKKEENDKDQYPPMTKEQHKYIHAMLRQLRRGRDSIPFRAPVDPVKQNIPDYPTIIKNPIDLGTMQKKFSSGVYSSAQHFIDDMNLMFSNCFLYNGTESPVGVMGKNLQATFERQLKQLPSAYVTSYSRPGRRPRSMTAPKGGARTRRQAAMYSNSSSGIRETMYDLKPHRRKDAAEMKFCQSVLKELLKKQHEAYAYPFYKPVNPTACGCPDYFKVIKHPMDLGTMQNKLNHNEYASMKAFEADMVLMFKNCYKFNSAGTPVHLMGKKLESIFQKLWANKPDFDSETYMGMSSVNTDYYYGDNEVFDSGDEFLEDDGEEFEAVNRQIHKLQSTLQAMKSRARSSSVSRRSRSRSLSVDIYPPITYEMQNELAEQCNYLSADQLSHVAEILRAALPHLRNTDEIEIDVSAMPPDVFYKVYYYVCKGDEIGAEALATASHTHQEKKKGRALSETEQAEKIRQLRAQLDRFSGIAQNKNTVTGNIAAYNTKSLGSDDSSSEDDGESSESSDSA

SEQ ID NO: 17577 - protein, 281 aa, Triticum aestivum
  misc_feature (107)..(107): Xaa can be any naturally occurring amino acid
  misc_feature (128)..(128): Xaa can be any naturally occurring amino acid
  misc_feature (139)..(139): Xaa can be any naturally occurring amino acid
  misc_feature (152)..(152): Xaa can be any naturally occurring amino acid
  misc_feature (196)..(196): Xaa can be any naturally occurring amino acid
  misc_feature (203)..(203): Xaa can be any naturally occurring amino acid
HYRTSLYKKAGWYRSGIPGISSTHASGGNFIKFTAIGVYLQADAAVSALAAKWAGKPAADLASDAAFFRDVVTGEFEKFTRVTMILPLTGAQYSDKVTENCVAYWKXTGVYTDAEAAAVDKFKEAFGXHSFAPGASILXTHSPAGLLTVAFXKDSSVPESGGVAIDNARLCEAVLDPSSASRGVAGGQLSLATRAXELLKGPXFAGGEPARKAVPVSGGTNRGDGPGLRPWGGGLGEWGGPGGEPPGPSIFPRGGGVFSPGIVTGGEKLYGVGGFLGRYIK

SEQ ID NO: 17578 - protein, 644 aa, Streptomyces coelicolor A3(2)
MCGIAGTYHWPDGKAVTDRLTDVLAHRGPDGAGRYSHPAGEGEVHLGHRRLAVVDLSTTGAQPMVSEGLALSYNGELYNAPELRTELESAGVRFRGTSDTEVVLEAWRRWGTDCLPQLRGMFAFAVFDERTGELVLARDQLGIKPLFLLRRGAGLVFASELKALATATGGKLEVDHAALVASLLYYWVPDSRCALREAEKLPPGSWLRCRPDGRVERGRFWNLRDVAAEGRERARSGERPDLAAVVEESTRRHLLSDVPVATFLSGGLDSSYLTALAARDRPGISAYTIGFRAEDARFEAMPDDLRYARQVAERFGVDLHEIEIAPNVLDLLPRMTYHLDEPIGDPAAINTFLICSAAREAGVKVMLSGMGADELFAGYRKHLANVLALRYQRVPRPLRRGVSAAVGRLPVASSRRGYRSVRFAKRFLSFADLPQETAFRRSYTMYDRQELLDLIDPDLAGTVEDVLTEHADVYEDNDLDDFVNRMCLADARMFLPGLNLAYTDRSSMAASTEVRVPYVDVEVVKAAFAVPGDRKIVGRQGKAVLKEAATSVLPREIVYRPKGLFSAPLRAWMSRDLAPLVREVVNDGELVRSGFLRRDALRRLVAEDAAGQRDFSKHLWHVLTLEYWYRGATSGSGDHSSSTA

SEQ ID NO: 17579 - protein, 635 aa, Gibberella zeae PH-1
MLGRSNSDINLILSLRVLQSSLRSQLQTPRNTAFLSLAKFTTMPSKRLKRESSSPSAGGTAKKAKTSKMNGSGSSDALRRPHHKAQEAEENGIAIRKFYPAEMSNARARAYNNNEIPRPIEDLVDALEVTAKERKSIDVKDAVVHWFKMDLRISDNRALALASDKAKEAGVPLIALYIISPQDYEAHLRAPVRIDFMLRTLSVIKEDLAKLDIPLYVETVEKRKHLPDRILELMDEWGASHLYANMEYEVDELRREAAMIKDFAENGKAFEVVHDTCIVPPGELHTGAGKQYAVYTPWFKTWIAHIHENLDLLELYEPPEKNPDSARKKFKKLFNAEIPEAPKSKRLGDEEKERLRSLWPCGEHEAKKRLDKFCEERIGNYHEKRNIPADAATSSLSVHLASGTISARTCVRTARDRNKTKKLNGGNDGIQTWISEVAWRDFYKHVLVNWPYVCMNKPFKPEYSNISWSYDNDHFAAWCEGRTGFPIVDAAMRQMNTIGYMHNRCRMIVASFLAKDLLLDWRKGEKYFMEHLVDGDFASNNGGWGFSASVGVDPQPYFRIFNPLLQSEKFDPDGDYIRKWVPELKDLDNKAIHDPYNRKAGPQAKKKGYPEPIVTHKDCRERALAAYKEGLAIDE

SEQ ID NO: 17580 - protein, 371 aa, Kalanchoe gracilipes
SDSGKDAGRLSAAWQLYKAQEELIEVAKQHGVKLTMFHGRGGTVGRGGGPTHLAILSQPADTIRGSLRVTIQGEVIERSFGEAQLCFKTLQRYTAATLEHGMIPPLTPKQEWRALMDEMAVVATERYRSIVFKEPRFVEYFRLATPELEYGRMNIGSRPSKRKPSGGIESLRAIPWIFAWTQTRFHLPVWLGFGEAFKHVINKDNKNLLMLQQMYNEWPFFRVTIDLVEMVFAKGNPGIAALYDKLLVSEELLPLGEQLRTAYNDTKSYLLKITGHNEILEGDPFLKQRLKLRNAYITTLNVCQAYTLKRIRDPSYQVPLRPPIAKEVMEGSISSANQLVKLNPTSEYAPGLEDTLILTMKGNAAGMQNTG

SEQ ID NO: 17581 - protein, 332 aa, Saccharomyces cerevisiae
  misc_feature (12)..(12): Xaa can be any naturally occurring amino acid
  misc_feature (48)..(48): Xaa can be any naturally occurring amino acid
  misc_feature (95)..(95): Xaa can be any naturally occurring amino acid
  misc_feature (233)..(233): Xaa can be any naturally occurring amino acid
  misc_feature (242)..(242): Xaa can be any naturally occurring amino acid
  misc_feature (287)..(287): Xaa can be any naturally occurring amino acid
MVRVAINGFGRXGRLVMRIALQRKNVEVVALNDPFISNDYSAYMFKYXSTHGRYAGEVSHDDKHIIVDGHKIATFQERDPANLPWASLNIDIAIXSTGVFKELDTAQKHIDAGAKKVVITAPSSTAPMFVMGVNEEKYTSDLKIVSNASCTTNCLAPLAKVINDAFGIEEGLMTTVHSMTATQKTVDGPSHKDWRGGRTASGNIIPSSTGAAKAVGKVLPELQGKLTGMAFRXPTVDVSVVXLTVKLNKETTYDEIKKVVKAAAEGKLKGVLGYTEDAVVSSDFLGXSNSSIFDAAAGIQLSPKFVKLVSWYDNEYGYSTRVVDLVEHVAKA

SEQ ID NO: 17582 - protein, 129 aa, Arabidopsis thaliana
MILAILALVIATFLYGGATTVQAGCRDTLTSLSPCLYYLNGGSSSPSWSCCRQFSTVVQSSPECLCSVVNSNESSFYGFKFNRTLALNLPTACNVQTPSPSLCNSKKLNYSNNIHFKNICLLIQIFCGL

SEQ ID NO: 17583 - protein, 422 aa, Streptomyces coelicolor A3(2)
MSSENSSADDARQVWDVVVVGAGPAGASAAYAAAVAGRRVLLLEKAELPRYKTCGGGIIGPSRDTLPPGFELPFQDRVHAVTFSNNGRFTRTRRSRQMLFGLINRPDFDLQLVEHAQKAGAELRTGATVTRVEQHGSAVPDRRTVAVVLQGGETVLARAVVGADGSASRIGAHVGVKLDQVDLGLEAEIPVPETVAEDWKGRVLIDWGPIPGSYGWVFPKGDTLTVGVISARGEGAATKRYLEDFVARLGLAGFEPSVSSGHLTRCRADDSPLSRGRVLVCGDAAGLLEPWTREGISFALRSGRLAGEWAVRISEAHDAVDARKQALNYAFAIKAGLGVEMSVGKRMLTVFERRPGLFHAALTGFRPAWKAFKDITQGSTSLGELVRSHPLAQRALGAMDRRSEAAEASARSASPAGEETGA

SEQ ID NO: 17584 - protein, 282 aa, Archaeoglobus fulgidus
FQGHMKLVVCSESDTAGQNIKDNLLTFADFEEKDVGEFKLYLSDEFYIAETKERLIYADHIDEKLAKYIDFEEILFASRHSSKDGRKIFTVHVSGNVGTADFGGKPYSLAKPSPQTMKNYVLALRERLDRKPEFEFTMEVTHHGPSEISKPSAFYEIGSTEEEWKDREAAEVVAEAMLDAIRAEKMDWNVAVGVGGTHYAPRQTEIMLTTTFTFGHNFAKYTFEHLTAEFLVKAVKLSEAEYIIIDEKSVNSAVKKIVNEAAEVAGVEVLKSKKVKKDFRLV

SEQ ID NO: 17585 - protein, 332 aa, Saccharomyces cerevisiae
  misc_feature (32)..(32): Xaa can be any naturally occurring amino acid
  misc_feature (324)..(324): Xaa can be any naturally occurring amino acid
MIRIAINGFGRIGRLVLRLALQRKDIEVVAVXDPFISNDYAAYMVKYDSTHGRYKGTVSHDDKHIIIDGVKIATYQERDPANLPWGSLKIDVAVDSTGVFKELDTAQKHIDAGAKKVVITAPSSSAPMFVVGVNHTKYTPDKKIVSNASCTTNCLAPLAKVINDAFGIEEGLMTTVHSMTATQKTVDGPSHKDWRGGRTASGNIIPSSTGAAKAVGKVLPELQGKLTGMAFRVPTVDVSVVDLTVKLAKEATYDQIKKAVKAAAEGPMKGVLGYTEDAVVSSDFLGDTHASIFDASAGIQLSPKFVKLISWYDNEYGYSARVVXLIEYVAKA

SEQ ID NO: 17586 - protein, 312 aa, Frankia sp. EAN1pec
MAEAPERRRWSAADVPDLNGRTAVVTGANSGIGFEAAKLLAGRGATVVMACRNPVKAQDALDTIRIAVPEADVSVLQMDLSSLTSVRKAADALVTERPVIDLLINNAGVMLLPQGKTEDGFEQHFGINHLGHFAFTGLVLEAVTASDAGRIVTVSSNGHRMGKIDFDDLDLAQKYRPFRAYARSKLANLLFTYELQRRLTAAGGSARSVAAHPGGANTEVGGNPSPVQRKLKKVVDHIPNPIVHSAFKGSLPLLRAAVDPSTRGGEYYGPSGLLKMTGHPVLVTSNAASRDTGTAERLWELSERLTMVTYPL

SEQ ID NO: 17587 - protein, 605 aa, Yarrowia lipolytica CLIB122
MLHELVKILTFRTVQLEAIESGRLLRPRDRQKFSRIVFSMLSNRPTKKAKASRDEAGFKMRAQKVKNLEINGDEQADGAQYELSDGLRRVSPYYYTYLTYCKQRWRDRQLLDIFANEFRDRDESYYRWAIENGQVLLNGKVAQVDSVVRNGDAIQHRSHKHEPPVTDQEIDIVHEDDDLVVIDKPSGMPVHPAGRYRFNTAVNILKHVNGLHVHPCNRLDRLTSGLMFMAKNPKSADKFGAQLRDRQVQKQYVARVVGKFPDGEISVDENLCTLDPKIGFNIVTTKVDRDHHRALMDRATEREAKTVFKRISYDGETSIVLCKPYTGRTHQIRVHLQFLGHPIANDPLYSSPTMWGESLGKGGLENYDVMMKMIDDVGKTKTAESWFFPADPNKPLGEVLSGSCETCKTPLYTDPGPNDLSLWLHAFTYSSKPDEDNPNAPKWSYSTKLPEWASQPHKKFMDLAVAEADKSEGTPSAFCVGAVLVKDGQVLETGFSRELPGNTHAEQCALEKYFAKNNVSDVPENTVIYTTMEPCSERLSGNLPCVDRILNSSIKTVFVGVLEPDDFIKDNTSLAKLEKAGISYIQIPGYEDESIRIAKKGHPKN

SEQ ID NO: 17588 - protein, 613 aa, Glycine max
MASISGICSSSPTLNHSTPKRRRTPLLPSSSFPSKPSPPRSLARETPAPQQQQQQLSAVTKPLHAGLEKKPRALWRRYVEWLYQHKELGLYLDVSRVGFSDDFVREMEPRFHAALRAMEDLEKGAIANPDEGRMVGHYWLRDSARAPTSFLKSQIDNTLVAICTFADDVVTGKIKPPSSPEGRFTQILSVGIGGSALGPQFVAEALAPDNPPLKIRFIDNTDPAGIDHQIAQLGPELASTLVIVISKSGGTPETRNGLLEVQKAFREAGLSFPKQGVAITQENSLLDNTARIEGWLARFPMFDWVGGRTSEMSAVGLLPAALQSIDIREMLAGAALMDEANRSTVIRNNPAALLALCWYWATDGVGSKDMVILPYKDSLLLFSRYLQQLVMESLGKEFDLNGNRVNQGISVYGNKGSTDQHAYIQQLREGVHNFFVTFIEVLRDRPPGHDWELEPGVTCGDYLFGMLQGTRSALYANNRESITVTVQEVTPRSVGALVALYERAVGIYASLVNINAYHQPGVEAGKKAAGEVLALQKRVLAVLNEASCKEPVEPLTLEEVADRCHAPEDIEMIYKIIAHMAANDRALIAEGNCGSPRSIKVFLGECNLDELYA

SEQ ID NO: 17589 - protein, 164 aa, Cucurbita pepo
DRGEMMSMVYNWPADQVDVIVVTDGSRILGLGDLGVHGIGIAIGKLDLYVAAAGINPQRVLPVMIDVGTNNEKLLKDPLYLGLQQNRLDGDEYLAIIDEFMEAVFTRWPHVIVQFEDFQSKWAFKLLQRYRNTYRMFNDDVQGTAGVAIAGLLGAVRAQGRPMI

SEQ ID NO: 17590 - protein, 967 aa, Yarrowia lipolytica CLIB122
MSRQKKSREIRFGDYILGSTLGEGEFGKVKIGWRKDGKQPEQVAIKLIKRETVPPNSNREAKVHREINALKILTHPNIVRLEEVIQNDRYIGIVLEYASGGELFDHILTHKYLKEASACRLFAQLVSGVHYLHSKGIVHRDLKLENLLLDKHKNIIITDFGFANTFSRGSDGHVFDLMATSCGSPCYAAPELVVSDQKYTGRKVDVWSCGVILYAMLSGYLPYDDDPANPDSDNITQLYKYITTTALTFPEYVPPLPRDLLRRILVPDPRKRISLNDVRYHSWLAPHSRFLAITPKEWEDAVGKVAVPVKTHMPRSHSVQLSSGAPVFDSRLTKPSGVNIPNFSYNNRHSVGGTYSKPIQRQGESTIGATVSSNTPAGPRPISAGPCAATAAAASASKSHAAANPPTHASTPSVASLNIPEDTNNNSTSNSRQAPRSATYTGISQLTSPPGASPTSPKFDFDLPKPSIGTITEQPTPPSSPKVKEKGKEADDLGPRDLPAVPDTAPEATPPASAADTIPSAPATAPSAPVLEHQSFGASFGTSFSSSFAASDPSSPLVSSTRLPPGRKPRPTSYQPTPTQSSMQPPDSFPYMHMVNKNASVPGSANSVTPTSSQQSAQPVPLSLVTPSTAGSTFFRRPSSDDSQISFDERRKSGSFLVPQSSLPKVKYSDSMVQGELSSPQFRNSPSQVALSNWSNRNSVASMESGDEGVIGEVESVAEKKETDKEVVDTVAQSDTTLMPPPALPTSAQVPGKSTTPRAVSAESKTTSTSRTSMEKPLPVVPAASAAPAAVIPTAPSGAINPGAPNFSRPRPVSMQAPKAQTRSHRRGVASISYGADKLFGKIIGDNLDNDKDPRESKESVKDAKGGSSSAASGAGAPTAESTSKKRFSFFSNYSKESVESHEAHSTPSTSSRKILEPPALDRSHSMNQRQNRQVSASQVSTAESTHSSTARKVMDFFRRRSRVSAS

SEQ ID NO: 17591 - protein, 378 aa, Gluconacetobacter diazotrophicus
MSENARLLISDTTLRDGEQAPGVAFTAWEKLAIAGALDAAGVDEIEAGVPAMGDAEIAMIAAIGDEVERARVIPWCRMRDEDVHAARRTGLGSVHLSVSTSSGRSRRNTACRASHAGHGARVVSRARDYGLAVSVGGEDASRADPAYLVDLLGVIAEAGAFRFRFADTLGVMDPFGVHEVMRYLCQSSPLQLEFHGHDDLGLATANTLAAVRAGAACASVTVLGLGERAGNAPLEEVVAGVYRLLGRPAGVKLDSLPGLATLVSRAAVRDIPPDKAIVGDAVFRHESGIHVSGLLRDAATYEALDPVQFGRQREIVLGKHSGRAAVRHALAALGLDADETVIAATLAAVRARASAAKRTVALAELAEMHAGLMAGVSK

SEQ ID NO: 17592 - protein, 170 aa, Cucurbita pepo
NASCTTNCLAPFVKVLDQKFGIIKGTMTTTHSYTGDQRLLDASHRDLRRARAAALNIVPTSTGAAKAVALVLPSLKGKLNGIALRVPTPNVSVVDLVVQVSKKTFAEEVNAAFRESAEKELNGILSVCDEPLVSVDFRCSDVSSTVDSSLTMVMGDDLVKVIAWYDNEWG

SEQ ID NO: 17593 - protein, 247 aa, Mycobacterium leprae
MIGITQAEGVMTIELQRPERRNALNSQLIEKLREAVQKASSADSEVSTRVIVLTGQGTVFCAGADLSGDAFAADYPDRLIELHRVMDAVPMPVIGAINGPAIGAGLQLAMQCDLRVVAPDAYFQFPTSKYGLALDNWSIRRLSSLVGHGRARAMLLTAEKLTADIALQTGMANRIGALADAQAWAAEVTGLAPLAIQHAKRVLNDDGSIEEAWPEHKKLFDKAWTSQDVIEAQVARVEKRPPKFQGA

SEQ ID NO: 17594 - protein, 1647 aa, Ustilago maydis 521
MSQPGARRAYHHGSQRGGSTINQKAALASAYQELGKELSSSKLKIVGNYTLQRPIGEGTFGKVRLGLHRLTNTRVAIKQIPKAHSASLTREIHHHRRLHHPNVMQLYEVIATEQYIWMVSELCAGGELYDYLVENQVLAEPEARRIFGQLCLAVAYVHSKGIVHRDLKLENILLDERCNVKLGDFGFTREFERNRLMDTFCGTTGYASPEMLAGKKYTGEQVDIWSLGVILYALLCGALPFDDDDEAVMKQKILQGDFEIPDCLSEEAHDLVVSILQHDPAKRPSIQSILAHPWFTKMMVNSPMSTLEEDQIATDYFASKPSASTSQSKQHDRFPPTLHKALAELDTATELDTADATSAAPPTNPADAFDFEDHDSSNSCHRHHLSASSEQSYHSARSDSESSGRRSTNTDLTDPTTADSLSGTDEVEGLDQAIVQLNASSRPSALANATAAASHPDKNAIGLHRNERLGSNGSDASLSGVPRPSTKTNTASLPTHHELPPVPDGTGQDDHLSIYQSVPLTKRGSQSSSRGHHRTPSRTKRRSLSSGGLSDHHPPMLGRKPVDYVSQLADLQPATFSTSIEQNLLHQLSALGLDVGQMVHSVVTDACDASGATWWMLLRKSKDRHSEQPDITSPIVQVIPAPGDHPAPINASAFSKAGQTVTPSSPAQFSPPPVPVKDPARRSEDKFRTQERPTTLEASSSENAGLAEQSIRRLQTVVSHEELDVSAAPALHTSTSELMMATKPATDRQSSVPASGPMPLAGLPASTVSLPNDRSLTSTPDSVSSRPKSQHRHTTAVASPAKLQHVALTTLEGSPTSEGSKARGNSQNDRPRSNSLSVRQFAQSVLGTKDRGSATSSPVRPPPEQVVVAGEALPLERAKSPTLFGRRNTVSNVKDSMVGRLSGPSTPKKTPVDMLDKPRKSTGKKSCETDLDRVKALERSADSASSSPSRSTTGQAVGVVSNAKVDSSVPSASQDSFSTMSVTPQGSEKSGHRGKAGSFFMSTVRTWLGGNEKPTRKSKTGKQASASHRGLGIDDGPMAAKSPTNSLSTSGSVSTLTYGTPSRSASVRRRSAHYQQTSATRRGGPRSPHLGTSSRRSSNGSSYQAHLELPPNSFQQSMNRPANMRRMSAGSITPTATLHGDYLNDVGGVSGASRHSRPSSSHSLAHSGAASRPGLHGKAGSTGSTSSAYRPGQASSVYSTGSGRRHPRPSQDGGTTVRRHRTYASSSGSPSRRNSFRHDSRPSSIKSRASSPGRAMSGLGELWAADAEADGDGGGTGARRSTRSTPRHSLEMRKTGEAFDSAAPHHQHHQHVVAQSIFVAHKSRSPYRPPSANPNLHGSLVRGSSQLSGRSNVSANSEDAGYVAPNSTLGLPATGTGAWRHSWGRPPPCWAGPVDPPPTSSYSKRSGAAGVEDDGRPKLRDVFANRDDDDWTDEEEEQTYSGGLGQMGTLSSAMSSSVGRVGSGIGASSSPYATRNLAALGSSGYSTQRAVNLDTANAPEIGLREAPFSSRYAGVRNMFQTATAGTPAFGSRSHHSVSLSLGNEFAPRLLSTTIHSPTVSAASLGGGLGCIGESADAHSVTVSSKPKPESSGTQTQAQQQQSSASASASASASQQQQSGGGSSGSGSRITASFHKPVQIIEEEEEDE

SEQ ID NO: 17595 - protein, 297 aa, Erythrobacter sp. NAP1
MTATRIDGKAFAARLRERVGERALEFAEAAGRKPGLAVVLVGDDPASQVYVGSKGKATVAANMLSFEYRLPADASEEQLMKLVDDLNNDDRVDGILVQLPLPDHLDEQSIIAEISPDKDVDGFHVINAGRLSVGQSGFVPCTPLGCMMLLTDRLGDLSGLEAVVIGRSNIVGKPMAQLLLDANATVTIAHSRTKDLASVVKRADIVVAAVGRPQMITKDWLKDGATVIDVGINRLPPEPGKEKGKLVGDVAYDEASEVASAITPVPGGVGPMTIAVLLRNTAVAAYRNAGLEVPEGL

SEQ ID NO: 17596 - protein, 146 aa, Bradyrhizobium sp. BTAi1
MSQHVTHIVCPHCDAVNRIPADKPAKEAKCGRCHRALFDGHPAEVIGERLEKHIKSNEIPVVVDFWAPWCGPCRMMAPAYERTAGQLEPNARLLKLNTENDPSAAERYDIRSIPTLIMFRNGQIVDRVSGAMDERRLQQWIVSHAH

SEQ ID NO: 17597 - protein, 578 aa, Arabidopsis thaliana
MCGILAVLGCIDNSQAKRSRIIELSRRLRHRGPDWSGLHCYEDCYLAHERLAIIDPTSGDQPLYNEDKTVAVTVNGEIYNHKILREKLKSHQFRTGSDCEVIAHLYEEHGEEFIDMLDGMFAFVLLDTRDKSFIAARDAIGITPLYIGWGLDGSVWFASEMKALSDDCEQFMSFPPGHIYSSKQGGLRRWYNPPWYNEQVPSTPYDPLVLRNAFEKAVIKRLMTDVPFGVLLSGGLDSSLVAAVALRHLEKSEAARQWGSQLHTFCIGLQGSPDLKAGREVADYLGTRHHEFQFTVQDGIDAIEEVIYHIETYDVTTIRASTPMFLMSRKIKSLGVKMVLSGEGSDEILGGYLYFHKAPNKKEFHEETCRKIKALHQFDCLRANKSTSAWGVEARVPFLDKEFLNVAMSIDPEWKLIKPDLGRIEKWVLRNAFDDEERPYLPKHILYRQKEQFSDGVGYSWIDGLKDHANKHVSDTMLSNASFVFPDNTPLTKEAYYYRTIFEKFFPKSAARATVPGGPSIACSTAKAVEWDATWSKNLDPSGRAALGVHVAAYEEDKAAAAAKAGSDLVDPLPKNGT

SEQ ID NO: 17598 - protein, 328 aa, Rhodococcus erythropolis
MTIPSAVHDVIIVGSGPAGYTAGVYTARAELQPLLFEGTQFGGALMTTTEVENFPGFREGIMGPDLMEQMREQALRFDTDIRTEDVEEIDLSGPIKTVVANGETYAAHAIILAMGAAARYLGIPGEERLLGRGVSACATCDGFFFRDQDIVVVGGGDSAMEEATFLTRFARSVTLVHRREEFRASRIMLERAKANEKIRFLTNAEPVEVLGENSVTGLVVRDTVTGETSTLEITGMFVAIGHDPRSELVKGQVDLDDAGYVRVAPGSTATSVDGVFAAGDLVDHTYRQAITAAGTGCSAAIDAERWLADRGDITANTLDAAGHTVDAV

SEQ ID NO: 17599 - protein, 401 aa, Blastopirellula marina DSM 3645
MSHRFSSVQSAVDAISRGEIVIVVDAEDRENEGDFVAAAEKITPESVNFMITHGRGMLCAPVLPDVCQRLDLHPIVETNNAPLQTSFITPVDHHTSKTGITAKERSDTIQALADPQTTVDDFVRPGHVYPLLAKEGGVLRRAGHTEASVDLARMAGLRPAGVLCEILDEAGDRADRDQLIELAEKFKLEIISIEQLIAHRRVNEKLVSRAAEADLPTKYGQFKIIVYSVEYETQEPVVLIFGEPEKQERPLVRLHSSCFTGDLISSLRCDCGDQLQMALETISKEGHGALVYLPQEGRGIGLTQKIRAYGLQDHGLDTVEANHALGFKADMRDYGIGIQILKDIGLRQIRLLTNNPKKTDAFIYGGFDLEVVDQVPMASPVNEFNEKYLATKRDKMGHTLP

SEQ ID NO: 17600 - protein, 549 aa, Escherichia coli
MKNINPTQTAAWQALQKHFDEMKDVTIADLFAKDGDRFSKFSATFDDQMLVDYSKNRITEETLAKLQDLAKECDLAGAIKSMFSGEKINRTENRAVLHVALRNRSNTPILVDGKDVMPEVNAVLEKMKTFSEAIISGEWKGYTGKAITDVVNIGIGGSDLGPYMVTEALRPYKNHLNMHFVSNVDGTHIAEVLKKVNPETTLFLVASKTFTTQETMTNAHSARDWFLKAAGDEKHVAKHFAALSTNAKAVGEFGIDTANMFEFWDWVGGRYSLWSAIGLSIVLSIGFDNFVELLSGAHAMDKHFSTTPAEKNLPVLVALIGIWYNNFFGAETEAILPYDQYMHRFAAYFQQGNMESNGKYVDRNGNVVDYQTGPIIWGEPGTNGQHAFYQLIHQGTKMVPCDFIAPAITHNPLSDHHQKLLSNFFAQTEALAFGKSREVVEQEYRDQGKDPATLDYVVPFKVFEGNRPTNSILLREITPFSLGALIALYEHKIFTQGVILNIFTFDQWGVELGKQLANRILPELKDDKEISSHDSSTNGLINRYKAWRG

SEQ ID NO: 17601 - protein, 567 aa, Dioscorea tokoro
MATSTLICETPQWKDLNDHVEEIKKTHLRDLMQDSDRCKSMITEFDGIILDYSRQRVLPATVEKLFQLAEVACLKQKIDRMYNGEKINCTENRSVLHIALRAARDKAIKSDGKNVVPDVWHVLDKIKEFSERIRSGSWVGATGKALTDVVAVGIGGSFLGPLFVHTALQTDPEAAECAKGRQLRFLANVDPIDVARSITGLNPETTLVVVVSKTFTTAETMLNARTLREWISAALGPQAVSKHMVAVSTNLTLVEKFGIDPANAFAFWDWVGGRYSVCSAVGVLPLSLQYGFSVVHKFLNGAASIDDHFHSTPFEKNIPVLLGLLSVWNVSFLRYPARAILPYSQALEKFAPHIQQVSMESNGKGVSIDGVPLPFETGEIDFGEPGTNGQHSFYQLIHQGRVIPCDFIGVMRSQQPIYLKGEVVSNHDELMSNFFAQPDALAYGKVAEQLLNEKVPDHLIPHKTFPGNRPSLSLLLPSLNAYNVGQLLAIYEHRIAVEGFVWGINSFDQWGVELGKSLASQVRKQLHLSRTKAEPVEGFNFSTTTLLTRYLEAETGVPSDQSQLPKL

SEQ ID NO: 17602 - protein, 567 aa, Dioscorea tokoro
MATSTLICETPQWKDLNDHVEEIKKTHLRDLMQDSDRCKSMITEFDGIILDYSRQRVLPATVEKLFQLAEVACLKQKIDRMYNGEKINCTENRSVLHIALRAARDKAIKSDGKNVVPDVWHVLDKIKEFSERIRSGSWVGATGKALTDVVAVGIGGSFLGPLFVHTALQTDPEAAECAKGRQLRFLANVDPIDVARSITGLNPETTLVVVVSKTFTTAETMLNARTLREWISAALGPRAVSKHMVAVSTNLTLVEKFGIDPANAFAFWDWVGGRYSVCSAVGVLPLSLQYGFSVVHKFLNGAASIDDHFHSTPFEKNIPVLLGLLSVWNVSFLRYPARAILPYSQALEKFAPHIQQVSMESNGKGVSIDGVPLPFETGEIDFGEPGTNGQHSFYQLIHQGRVIPCDFIGVMRSQQPIYLKGEVVSNHDELMSNFFAQPDALAYGKVAEQLLNEKVPDHLIPHKTFPGNRPSLSLLLPSLNAYNVGQLLAIYEHRIAVEGFVWGINSFDQWGVELGKSLASQVRKQLHLSRTKAEPVEGFNFSTTTLLTRYLEAETGVPSDQSQLPKL

SEQ ID NO: 17603 - protein, 412 aa, Arabidopsis thaliana
MPLEEILSRLPLKSTRAVRSTCKKWDSLFKNRSFISKAAAAREGESQMVVLMDHNLHLVSFFFGSDTSVEIKGKRICLNDDSDSEQVKISQVFHCEGLLLCILKDDNFSLVVWNPYWGQTRWIKPRCSFEIPQGCDMYRYAIGYDNKRRNHKILRFIDYEFHYPRDNVVLWYEIYDFESDLWTTLDVTTPHWLINCGNRGVTLKGNTYWCAKKRNSDLFLNADHIICFDFTSERFGPLLLLPFSDLDGVVTLACVREEKLAALVCHEDVVEVWITIKIEANEVLWSKFLTVNVDLGDEIPSSLTYGSFFIDEEKKVAMIFDKTLDRGDTVHIMGEAGYGGQVDLGEPVNKRRCPLVCSYVPSLVQIKKPAGFQRKQQSKLEKRQYVRNISKLRALKTQSSWTLSMSLECHQQ

SEQ ID NO: 17604 - protein, 421 aa, Prochlorococcus marinus str. MIT 9312
MNVGEVNYYTHSSKTRCVFVDNKELPLVSIDIWCKAGSSFEEVDKNGTAHFLEHMIFKGSNNIMPGEFDHKIESLGGLSNASTGYDDVHYHVLIPPNNFRESLALLTNIVVSPNFNPDEFIKEKGVVIDEIKQQNDQPEEKLFNYFLKRVWISSDYANSILGTENSIRKLEINDLEKFHRKHYTSEKICMAIAGNLSGEIYKIFENSDLSGIKKNPKNKDPNLLNLENKPFLKIRNGRELINFDNLEFSRIFMAWFIPNLNDQKTIIGLEILASVLSVGRNSRLVKFLKEDNNLVESVYVDVNAGELGGLFILEATCEPKDIYLVENEILKIIDEISDSKALTLDEIKKAINIVKSNYVFNLETSSQLSAFFGNELLWGRKSSINNLKGHLKYWKDLGNFKEIINYIHGDKFTLIVSPSKC

SEQ ID NO: 17605 - protein, 236 aa, Pisum sativum
MASMAFSTTFFTPLRDFNQPRTNSTPSTSLPFTKSSIASSKSPFFQLGFSQQASSNFPIVPSKTRSFSVNAKAIKDKTIYDFTVKDIDKKDVSLSKFKGKVLLIVNVASRCGLTSSNYTELSHLYENFKNKGLEVLAFPCNQFGMQEPGSNEEIKQFACTKFKAEFPIFDKVDVNGPFTAPVYQFLKSSSGGFFGDIVKWNFEKFLVDKNGKVVERYPPTTSPFQIEKDIQKLLAA

SEQ ID NO: 17606 - protein, 990 aa, Crocosphaera watsonii WH 8501
MVVQLDSTTYEQRTQEIAKELIAQTREKRSLWSKLGDQMRLDDKLLDFAMANPGLRVQLFHFIDTLPALQSNAEIAHHLQQYLGDESVELPSSLKGILNFTDYNSLPAKVAAETISKAVQTLAFKYISGETVPQVIKTVERLRKEKMGFTIDLLGEAVITESEAKAYLDSYLDLMEKLATESKKWSNVAQIDTAGDENLSKVQVSVKLTAFYSQFDPIDPQGSKEKVCTLIRILLRRAQELGVAIHFDMEQYVYKDLTLSILRELLLEEEFRNRSDIGVTLQAYLRDSKQDLHDLISWAKQRGTPITIRLVKGAYWDQETIKSEQNHWPQPVYNQKSATDVNYEEMTQLLLENHQYLYAAIGSHNVRSQARAIAIAETLKVPSRAFEMQVLYGMGDQLAKALVKTGHRVRVYAPYGNLLPGMAYLIRRLLENTANSSFLRQNLEERPIEDLIASPTLSGNTERIAQKESFVNVPDTDYSREVLRDKAEKALAKVKDSLGKTYLPLINGEYVQTDVIVESVNPSKSSEVVGQIGLISVSQAEQALNAAREAFKDWKKTPATERARIIRKAGDLMEERRHELSAWICVEVGKVLQQADAEVSEAIDFCRYYADEMERLDKGYNYDVAGETNRYHYQPRGIALVISPWNFPFAISTGMTVAALVTGNCTLLKPAETSTVIAAKIAEILVDAGIPKGVFQLVPGKGSKVGAYMVNHPDVHLIAFTGSREVGCRIYADAAILQPGQKHLKRVIAEMGGKNAIIVDESSDLDQAVAGAVFSAFGYSGQKCSAASRIIVLDPVYDAFLERFVEATKSLNVGATDQPSTQVGPVIDATAQKRILEYIEIAKQESTLALQMEAPDNGFYVGPTIFGDVLPNHTIAQEEIFGPVVAVMRVKSFAEALGVANGTDYALTGGLYSRSPEHIEQAQKEFEVGNLYINRTITGAIVSRQPFGGFKLSGVGSKAGGPDYLLQFLEPRHISENIQRQGFAPIEGNE

SEQ ID NO: 17607 - protein, 351 aa, Pneumocystis carinii
MTASSRNVRFNVSDDYEILDVIGEGAYGIVCSAIHKPSGQKVAIKKISPFDHSMFCLRTLREMKLLRYFNHENIISILDIQQPQDFESFSEVYLIQELMETDMHRVIRTQDLSDDHCQYFIYQILRALKAMHSADILHRDLKPSNLLLNANCDLKVCDFGLARSAVSTEDSSSFMTEYVATRWYRAPEIMLTFKEYTKAIDIWSVGCILAEMLSGRPLFPGKDYHHQLMLILDVLGTPTMEDYYGIKSRRAREYIRSLPFKKRVSFASIFPRANPLALDLLEKLLAFNPAKRVTAEEALQHNYLEPYHDPDDEPTAPPISPSFFDFDRIKDSLTKNDLKILIYKEIMSMNN

SEQ ID NO: 17608 - protein, 494 aa, Triticum aestivum
  misc_feature (284)..(284): Xaa can be any naturally occurring amino acid
MLAAAASVKFSPASAGASTTTMLAFKPVHLPALPNAVPRPLSLSARPLYRQEPFLAAARNDRAASTAPPAATADGARPVETAAAPEAAKSAKIGVYFATWWALNVIFNIYNKKVLNAFPYPWLTSTLSLAAGSAIMLVSWATRIAEAPQTDLDFWKALSPVAIAHTIGHVAATVSMAKVAVSFTHIIKSAEPAFSVLVSRFFLGEHFPLPVYFSLLPIIGGCALAAVTELNFNMIGFLGAPIKDRSLGPTSIPRGPGIRTSDFWGAFFTGGDGAPHPATWRGPXAWQRGPCPSPTSSRARTRRSACSSRGSSSAEHFPLPVYFSLLPIIGGCALPAVPELNFNMIGFLGAMISNLAFVFRNIFSKKGMKGKSVSGMNYYACLSMLSLVILLPFAFAMEGPKVWAAGWQNAVAEIGPNFVWWVAAQSVFYHLYNQVSYMSLDEISPLTFSVGNTMKRISVIVASIIIFRTPVQPVNALGAAIAILGTFIYSQAKQ

SEQ ID NO: 17609 - protein, 581 aa, Tropheryma whipplei TW08/27
MVRISGAQAVIKSLEELGIDLVFGIPGGAILEVYNSLFSSSIRHILVRHEQGAGHAAEGYACSSGRLGVCLATSGPGATNLVTAIADAYMDSVPILAITGQVYSHLLGSDAFQESDIIGITMPITKHAFSVKRATEIPAAIFAGAKIATTGRPGPVLIDITKDAQQDEFDFMWPPKSIDLSGYSVAQNIPDTLAQFADGFFDMLSGSIRPVIYAGGGTVRSGASEELIRFAEGFGIPVVTTLTARGVLPDSNRLNLGMPGMHGTVAAILALQKSDLLIALGTRFDDRVTGRLDSFAQNARVVHVDIDPAEIGKNRRPDLFVIGDVKEVLGYINSHSENRTTGDLTAWWRSLEKMRQIYPLVFPQKSSDGNLSPGYVIKRLGELSGPDAIYATGVGQHQMWASQAISFSRPNSFLTSGGAGTMGYAVPAAMGAKAANPEKIVWAIDGDGCFQMTNQELATCSVNGLPIKVAVINNRSLGMVRQWQGLFYNKRYSQTDLNTGDAYIPDFCKLAESYSCASCRVSSVDEVDNAIEFALAINDRPVVIDFVVCKDSMVWPMVPQGLGNSHLKYLQDVSPVWHDNE

SEQ ID NO: 17610 - protein, 676 aa, Oryza sativa (japonica cultivar-group)
MPAAESCHSRSLSWLVKSCIPADPARHIAVPVLCPTPQPPPPSSPPAPPISALPDDLLLECLARVPRASIPPLPAVSRRFATLLASDAFLHLRRAHAHLRPSLLGLSVSDNGCIAQALLRFESSVPVLEVAALPLPPTLLHCGGSVFAHARAVVLGRDVFLIGRGATLRVDALTGAARACAPTLFPRKKFAAAAVGDRIYVAGGSARTAVVEEYDPEADAWRVVGEAPRRRYGCAGASAGGVFYVAGGVAVSGEGARALEAHVCAGSVDALHVASGAWARPRALPGGGCVVGACGVGDHLYMVASHAVELSFWRWCGATGRAGDGRGWGGWVALEAPPMPRGSVGLGMAVRVAMAGLGTNRVAAVVSAAAVRGHNAGGGALEGMVLVYDIAGGKWSRAPDLPPGFRRAALQFAMWSSSCFINHDEREPRDCTNRFGSASTNSALNFVTPFRLIRRSHRSSFVPLSSRKPHFPAAAVSISSILFAHTEMHARLLLRMHAPISFAPASSPDAASFAPAAADVGGAVCLGYGIAIAVGVLVFISTVMLASYICVRAKAGAAAVLLADDDDDGGAPAASAVVVLGLDGPAIDALYPKFLHVGVGDDDNACAGAQCAICLGEFVAGDALRRGPGCGHRFHAECVERWLRVSATCPVCRDSPLPSPMATPLAEAVPLAAHAR

SEQ ID NO: 17611 - protein, 482 aa, Photobacterium profundum SS9
MNLNDPSLFKQKCYIAGQWVTAENGKVEPVTNPSTGEIIGYVPVMGQEETLHAIEVAQQAFLSWKKVSAKERSNTLRKWYELILENVDDLATIMTTEQGKPFAEAKGEVVYAANFIEWFAEEAKRTYGEVIPSHKTDARIVVSKEPIGVVGAITPWNFPAAMITRKCGPAFAAGCAVVLKPAPDTPFSAFALAELAERAGLPSGLFNVITGDAVAIGGELTKNKVVKKISFTGSTAVGKLLMAQSAPTVKKLSLELGGNAPFIVFEDADLDAAIDGVMVAKFRNAGQTCVCANRLYVHETVYDVFVEKLVQRVSTLIMADGFTDGATIGPLINRASAEKVQSHVTDALDKGATLAFGEKADPATNFFPPHVITHVTDEMRVATEETFGPLAAVFSFATEDEVIARANDTDSGLASYVYTRSLQRAWRMGESLEFGMVGINEGLISTEVAPFGGVKESGLGREGARQGICDYMETKYMLMGGL

SEQ ID NO: 17612 - protein, 351 aa, Aspergillus oryzae
MTENICLVTGASGFIASHVVQQLLESGHQVRATVRSIKNEKKIKHLLDMQAKWPGKLTLFEADLLKPGSFDEPAKGCSVVYHIASPFFIESRIRDGQKEVVEPALKGTQHVLDAVQKCETIKLVVVTSSVAAIFGDNADVQSMKDNTLSSEYFNTTSTVTHNSYSYSKVIAEKEAWKYYEAQPSPQRWRLVTINPGLVLGPSLSPTSESGSLSLLDQLLRGELFLGVPDLWFATVDVREVATAHLRVAQNPDSHGRYILADKETHSFVEFARILRSLAHSSRIPEHKLPNSLVRLCGPLLGLSQKWLKLNLGIGFNINNHASVEELKIVYRPLEETLADHFRSWSAQRKSH

SEQ ID NO: 17613 - protein, 304 aa, Thermoplasma volcanium GSS1
MKTAVLLLSYGSPEKMSDIDEYLSKIFGGKPVPKGVAEENYRKYEMFGGLSPSNRIIQSIRDRLQKRFDQSGDVDVFTAFKHWYPSIGEVVPDLKGYDNIVSIPLFSFFSENVKASYYKPLAEALEKNDIRTKMEFVNGISNYDLFIPMWIHLIEEKEKGDSFYLFDAHSLPHPENEEDYLFWLRYSTYKITQIMGLRSSDFGFQGGHEGWLGPSIYNVYRKAKEKKIIAVPISFLYDHLEILYDLDYEFRKKIEEDGYSYERVPMPNDSAIFITLLERIVSSSITHLSGELIGNGKEKSENFI

SEQ ID NO: 17614 - protein, 171 aa, Cucurbita pepo
NASCTTNCLAPFVKIIDEEFGIVKGTMTTTHSYTGDQRLLDASHRDLRRARAAALNIVPTSTGAAKAVSLVLPQLKGKLNGIALRVPTPNVSVVDLVVNIEKKGISADDVNAAFRKAADGPLKGVLAVCDIPLVSVDFKCTDVSSTIDSSLTMVMGDDMLKVVAWYDNDWG

SEQ ID NO: 17615 - protein, 137 aa, Arabidopsis thaliana
MAFVTTAEVCDANQELIRSGQLRALQPIFQIYGRRQIFSGPVVTVKVFEDNGLIRQFIEEKGNGRVLVVDGGGSQRCAILGFVMVNGFMQILMGFLSPKLSYPFNKKGFDQLPKKKNRTWFVFIFLLLKRLLNYNGK

SEQ ID NO: 17616 - protein, 90 aa, Arabidopsis thaliana
AFNGLMCSSSISDTRKANNDMGSITSNGGRVNCMQVWPTIGKKKFETLSYLPDLTDSELAKEVDYLIRNKWIPCVEFELQHGFVYREHRN

SEQ ID NO: 17617 - protein, 878 aa, Pseudomonas syringae pv. syringae B728a
MADIDARLREDVHLLGELLGNTIREQRGAEFLDKIERIRKGAKAGRRGSAEGAEQLSSSVDGLGDDELLPVARAFNQFLNLANIAEQYQLMHRRDDKQPLPFESRVLPELLDRLKAEGHSPDALARQLSKLEIDLVLTAHPTEVARRTLIQKYDAIAAQLAALDHRDLNSIERTQITSRLQRLIAEAWHTEEIRRIRPTPVDEAKWGFAVIEHSLWHAIPNYLRKADHALHAATGLHLPLEAAPIRFASWMGGDRDGNPNVTAAVTREVLLLARWMAADLYLRDVDNLAAELSMQQASDALRASVGDSAEPYRAELKRLRERLRATRNWANASLSETLPAPEAVLRDNRELLDPLLLCFQSLHECGMGVIADGPLLDCLRRAVTFGLFLVRLDVRQDSSRHCAAMTEITDYLGLGRYEEWDEQTRIDFLLRELNNRRPLLPSYFKPAADTAEVLATCREVAAAPAASLGSYVISMAGSASDVLAVQLLLKESGLQRPMRVVPLFETLADLDNAGPVIETLLGLPGYRSRLHGPQEVMIGYSDSAKDAGTTAAAWAQYRAQERLVEICREQQVELLLFHGRGGTVGRGGGPAHAAILSQPPGSVAGRFRTTEQGEMIRFKFGLPDIAEQNLNLYLAAVLEATLLPPPPPQPAWRTMMDQMADDGVSAYRAVVRENPEFVEYFRQATPEQELGRLPLGSRPAKRREGGVESLRAIPWIFAWTQTRLMLPAWLGWEAALSKALERGEGEVLAQMREQWPFFRTRIDMLEMVLAKADADIARLYDERLVSAELQHLGAHLRDLLSQACNVVLGLTGQTQLLAHSPETLEFISLRNTYLDPLHLLQAELLSRSRNREASLDSPLELALLVSVAGIAAGLRNTG

SEQ ID NO: 17618 - protein, 176 aa, Cucurbita pepo
RVGLSGKGIPVGKLSLYTALGGVRPSACLPITIDVGTNNEKLLNDEFYIGLKQRRATGEEYYELLHEFMTAVKQNYGEKVLIQFEDFANHNAFELLAKYRTTHLVFNDDIQGTASVVLAGAVSALKLIGGTLADHTFLFLGAGEAGTGIAELIALEISKQTNAQLRRPARRFGWWT

SEQ ID NO: 17619 - protein, 216 aa, Yarrowia lipolytica CLIB122
MNILNNVDGSAKWEQGTSVICSVTGPIETRRRTDEPTLAQVELVIRPAIGQATTRETLIKDRIYSVLAATVVRNLYPRMLLQIVIQILEQGEGTGYNVLKLAACLNAVCLALIDSRTPMTGLFTAVAIAIVDDKLILHPTRKQVSQSTSTHAVSYFVENNKATGLLMCESEGEFTENQLFEVLEQAARACEDVALDMRERIEKGVKEGLRIDAGQE

SEQ ID NO: 17620 - protein, 368 aa, Lunularia cruciata
SDSGKDAGRLAAAWSMFKCQEDLVKVAKQFGIKLTIFHGRGGTVGRGGGPTHLAILSQPPDTIHGSLRVTVQGEVIEQSFGEEHLCFRTLQRFTAATLEHGMHPPISPKPEWRELMDEISRVSTEEYRSIVFKHPQFVHYFRNATPETEYGRMNIGSRPAKRKPSGGIESLRAIPWIFAWTQTRFHLPVWLGFGGAFKAAFQKSNQNVVLLRQMYNEWPFFRVTIDLIEMVFAKGDPRIAALYDELLVSDELKPLGEKLRVMYAETRELLLKVAGHEDVLQGNPTLKQRLRLREPYITPLNVQQAFTLKKIRDQSFHVRDPETPKGENSGKQSSELVGLNTTTEYPPGLEDTLILTMKGIAAGMQNTG

SEQ ID NO: 17621 - protein, 142 aa, Campylobacter lari RM2100
MTQEQIQIIKDCVPILQKNGEVLTKEFYKIMFEEYPEVKPMFNMEKQASGEQPKALAMAILMAAKNVENLENMRSFVDKVAITHTNLNVKEEHYPIVGACLLKAIKVVLNADETTLKAWEEAYKAIAKFYIDIEKEIYAKNK

SEQ ID NO: 17622 - protein, 363 aa, Dehalococcoides sp. CBDB1
MSQSNGQRLALLRKLMAENELDGLLVSKPENQCYLSGFSGGEGHLFITPTQSFIAVDFRYYEQAENESPDYTLCKVINGRSLWLPELLSSESIRRLGFESSFITFEQYSKLKNTLSESGLNVLLVETADLAGKLRKIKSENEIDCIKQASAIGDAAFSALPSLLTPGMTERELAWELEKFMKSHGSQSMPFEVIAATGANSALPHAQTRPEAVADGQPLLMDYGAKFSWYASDMTRTVLPGKPNSQFKKIYDIVLAAQQTAIDQIHSGMTGQEADAIAREVIEKAGYGANFGHSLGHGVGLEVHEEPHLSPRSTDILENGMVFSIEPGIYLPGWGGIRIEDTCMLKNGKIELLSKSDKQNPYI

SEQ ID NO: 17623 - protein, 59 aa, Methanopyrus kandleri AV19
MLDNVLIEIVVDDEDVEEVIDIICEHAKTGRPGDGMIFVIPLEDAVRARTGDRGKDALS

SEQ ID NO: 17624 - protein, 371 aa, Kalanchoe petitiana
SDSGKDAGRLSAAWQLYKAQEELIEVAKQHGVKLTMFHGRGGTVGRGGGPTHLAILSQPADTIQGSLRVTIQGEVIERSFGEAQLCFKTLQRYTAATLEHSMIPPLTPKQEWRALMDEMAVVATERYRSIVFREPRFVEYFRLATPELEYGRMNIGSRPSKRRPSGGIESLRAIPWIFAWTQTRFHLPVWLGFGEAFRHVIDKDNKNLLMLQQMYNEWPFFRVTIDLVEMVFAKGNPGIAALYDKLLVSEELLPLGEQLRTAYNDTKSYLLKITGHNEILEGDPFLKQRLKLRTAYITTLNVCQAYTLKRIRDPSYQVPVRPPIAKETMEGSISSANQLVKLNPTSEYAPGLEDTLILTMKGIAAGMQNTG

SEQ ID NO: 17625 - protein, 139 aa, Gibberella zeae PH-1
MLTLFHRDPPSSCSAGPVGEDLFHWQATIMGPSDSPYSGGVFFLAIHFPTDYPFKPPKVNFTTRIYHPNINSNGSICLDILRDQWSPALTISKVLLSICSMLTDPNPDDPLVPEIAHVYKTDRPRYEATAREWTRKYAI

SEQ ID NO: 17626 - protein, 262 aa, Polaromonas sp. JS666
MSQTSSLVVSREGAVGIIELARPEKFNCLSMSVHAGIEAAIDGFEKPDSGVRAILIRAQGKHFCTGADLDEVKSLRGDPASLKHFIGYGHSVLKRLEHSDLPVVAACQGLTLAGGSELMLACDIIFAAKDARFGDQHAQFGLIPGWGGSQRMPRIVGLRRGLDLFFSARWIDADTAEQWGLVNYVVEPGKLHEEALAYCTKLATRSRIGMATMKHLARQGMEGSSEVGLQLEEDLASAALLDDDVSEGLAAFEARRAPVFKP

SEQ ID NO: 17627 - protein, 300 aa, Pseudomonas syringae pv. phaseolicola 1448A
MSARIIDGKAAAARVLEQVSTEVKILKADGIEPALAVILVGNDPASEVYVRNKILRAEEAGIRSLEHRLPAKSSQAQVLALIAELNADDSVNGILLQLPLPSHMEEARALQAIDPGKDVDGFHSENVGGLSQGRSVLTPCTPSGCMHLLEETCGDLSGKHAVVIGRSNIVGKPMAALLLQAHCSVTVVHSRSTDAKALCQLADIVVAAVGRPRMIDASWLKPGAVVIDVGINRIEDQGRSRLVGDIDFDNALSVASAITPVPGGVGPMTIAFLMKNTVTAARQQALAQRSQSEAVCLSTC

SEQ ID NO: 17628 - protein, 1817 aa, Nostoc sp. PCC 7120
MNRQHKHHRCNSVNLLSKQNLLPFLLGIVILLVVVMLWLRLQAEEEIKIQQLIKQQAIATQTELVTQLNTRILALKRIGKHWEMHGNIPQAQWELEAKAYLEDYGGYQAIKLVDPSWQVLRAVSVANNKAAENLEMIPKFPQWTGATSHETTVTRTVNLNQGDRVFFACVPLWMGDKFGGAVLGVFQVKQLFESVLHIAPGYKIRVFDGQELIYDQDRQSSTLPLWQQAVNIDFYGMTWQLQIYPTPELLKDLFSPLPTVVLVAGIFNAGAVTLLIYFAQATKLSNHKIGRINQELADRIEKQTQVEIALRASETRLRELVETVRVIPWEFDLKTQHFTYVGPQVETLLAYPVAQWYEENFWDNHLHTLDRDWAVRFCQEAANKGQNHELEYRMLAADGRVVWLRDVVNVVQVDGTPVMLRGFMFDITDLKRVEETLRLRERALAASSNGIVISDAKLPHYPVIYVNSAFEQITGYKATEVVGRNCRFLLGNDTQQSAIEELRSALKAGKNCKVILRNYRKDGSLFWNQLSVSPIYNDNGQLSHFIGIQTDISDRQQAEASLRRQALTFENIYDGVIITNLQGQILDWNPAAERMFGYSKNHICGQSISTLHKVDEDAALNSAIIAEITKQGRWSGEINFVRQDGSQGICETTIVALQDDQGQSMATISVNRDITERKHAELLLRRSEERFQAFMNHSPTPAWITDIDGTIVYVSETYRRTFQLPTQELIGKNIVDIYPPELTQTFRETIQIVARTRQVMETVESAPCSDGTGRDFLVYKFPISSKPDECLIGCIAIDITERKQAEAALRKSEERWQLVIEGNQDAIWDWNIITNETFRSARWAELIKEQNYQPIADHADCVSRIHPDDYERVMAVKQDCLSRKIPNYVVEYRLRCNDDSYRWVLVHATGQWDEQGNPVRMVGSIKDITERIEAQEALQRQLHRTLLLEKITQKIRQSLDSKEIFETAATQIGQALAVDRCLIHSYISHHDPHIPLVAEYNNVLDYCSMQKWEFTTTGNQHILKMMSQDKAIASANVYTDPLLQTAVPSCCEIGVKSMLAVRTSYQGEPSGAICLHQCGYFRQWTNEEIELLEAVAAQLGIALAQAQLLEQETRQREELTIKNFALEQAKRAAEAANRAKSEFLAMMSHEIRTPMNAVIGMTGLLLDTELTSQQRDFVETVLTSGDALLSIINDILDFSKIESGKLELEEQPFEVRTCVEQVIDLLAAKAAQKDIELAYLIHPQVPMQIAGDLTRLRQILTNLLNNAIKFTPEGEVVVSVRSQPSPNQKNKNCCEIIFTIKDTGIGIAPETMDLLFQPFVQADASMTRKYGGTGLGLVISKRLGEMMGGYLWVESRGCVGGNPPPGWQTKNSISSASVATGSTFYFSMTVPVVAHADLETPITSPVQLSGKRLLIVDDNPTNRQILRLQAEPWQMETYTAPSGAEALALIDQGMAFDIAILDVQMPEMDGLTLARQIRQRPSYQHLPLVILTSWGQPDTDLSDIEFAACLNKPIKQSQLYDVLASTLGNQPIRASVVPDRSTEINSCLAQQIPLRILLAEDIVVNQKVALLILKKMGYRADVVANGLEVLEALQRQFYDVVLMDVNMPEMDGLKASQIICQTWSPSSRPYIIAMTANAMRGDREACLAAGMDHYISKPLQLEELAKALGKCHPSGSAIEKALEKTSSQNQTFTDISDLKFATIDTKILQALRDMLGGDKVAFAELINCYLTESPKLIQNIDVAINTKDTQGIWKTAHKFKSSSGSVGAVFLAQLCKLLETKGRNNNLEGCVELGSQLRQEYELVQTALHREVNKETS

SEQ ID NO: 17629 - protein, 328 aa, Pseudomonas syringae pv. phaseolicola 1448A
MSCYYPSHSLSTDCSMSSREIRIATRKSALALWQAEYVKARLEQAHPGLLVTLVPMVSRGDKLLDSPLSKIGGKGLFVKELETALLEDNADIAVHSMKDVPMDFPQGLGLFCICEREDPRDAFVSNTFASLDELPAGSIVGTSSLRRQAQLLARRPDLQIRFLRGNVNTRLAKLDAGEYDAIILAAAGLIRLGFENRITSAISVDDSLPAGGQGAVGIECRSVDAEIHALLAPLHHEDTAVRVIAERSLNKHLNGGCQVPIACYAVLEGDDVWLRGLVGDPAGSVLLHAEARAPQTSAQALGVQVAEALLAQGAADILKAVYGEANNE

SEQ ID NO: 17630 - protein, 94 aa, Brassica napus
RLVDLPPQEEISGMGMSKVIRADQKRFFFDLGSNNRGHYLRISEVAGVDRSSIILPLSGLKQFHEMVGHFVDIMKDRLEGMTGANVRTVESSQR

SEQ ID NO: 17631 - protein, 378 aa, Nocardia farcinica IFM 10152
MRHPLAERFDGATQILAELDARIPDTRDHLAETRATVDAYHPKRLQLVVAEIVDETTTTKTFRMQGLDQAVLPPFLAGQYVNVFVAGTSRPYAISSSPTQRGHYDLTVRRVPGGRISNLLIDTVVVGQVLTTTGPMGTFHHNPLFHGNDVVFLAGGSGVAPAMSMLREIADLGLDRSLHLIYGSRHASDVIFHAELDALAAAQPGIRVDHVIAEPDADWAGATGFLTADTIATLAGELDGRMVYVCGPQALYPYALDQLTALGHPRKRIRFEANGAPSDPTAQPHWPTGVDPTEEVAVTVRGTSFRTPRNRPLLDALEDNGIRPEAACRSGECSLCRVRIVKGEVHTAEEAKMRLSDARFGYTHSCVAYPISDVELEL

SEQ ID NO: 17632 - protein, 402 aa, Xanthomonas axonopodis pv. citri str. 306
MRRVVITGMGITSCLGNDLDTVSSALRESRSGITALPDHAEAGLRSQVGGAVALDLDSLIDRKLKRFMGDASAYAYLAMRDAIADAGLDAELVSGLRTGVIAGSGGGSSQWQVETADLLRNRGVRKVGPYMVPRTMCSSVSASLATAFKIRGLSYSLSAACATSAHCIGAAADLIRHGAQDVMFAGGGEELHWTMSVMFDAMGALSTGSNDRPAVASRPYDAQRDGFVIGSGGGMLVLEDYDHAIARGARIHAELLGYGVTSDGADMVAPSGEGAVRCMRMAMQGLQRPIDYLNTHGTSTPLGDVTELGAVREVFGDNVPPLSSTKGLSGHSLGAASVHEAIYSLLMLRDGFMAGSAHIDDLDPRAEGFPILRQTQDATLNTVMSNSFGFGGTNAALVFGRT

SEQ ID NO: 17633 - protein, 228 aa, Glossina brevipalpis S-endosymbiont
GGGGGNAVEHMVRERIEGVDFFAVNTDAQALRKTAVGQTIQIGSGITKGLGAGANPEVGRHSAEEDREALRAALEGADMVFIAAGMGGGTGTGAAPVVAEVAKDLGILTVAVVTKPFNFEGKKRMAFAEQGIAELSKHVDSLITIPNDKLLKVLGRGISLLDAFGAANDVLKGAVQGIAELITRPGLMNVDFADVRTVMSEMGYAMMGSGVACGEDRAEEAAEMAISS

SEQ ID NO: 17634 - protein, 131 aa, Brassica napus
MAAAARVRCHCNALFTSHRNSSTLPISPSRVGFTALKCPRKFLLSIGDGSSSCTRNVSGSCLKGTVRAVMEEEKTDVIKEREGDEKRFTCVMKFGGSSVATAERMREVADLILAFPEESPVIVLSGYGEDN

SEQ ID NO: 17635 - protein, 303 aa, Bacillus cereus ATCC 14579
MIYTVTLNPSIDYVVQVSSFDLGTINRAEKDMKFPGGKGINVSRVLQRLGVKNIALGFTGGFTGQFIKEVLQTEGVTTNFVQVDEDTRINVKIKGEEETELNGQGPIVTKEQFEQLMKKIESMQPGDCVVLAGSVPVSIPSTFYESIAAFGAEKGIRVVVDASGSALQHVIKNKPFLIKPNHHELGELFGVELSTVEDVLPYGRKLIEQGVKHVIVSMAGEGALLFTAEGIYEATVPKGVVINSVGAGDSLVAGFVGKYEQTKDIEKAFQYGVATGSATAFSADLCKKEKVEELLSQVIVAKR

SEQ ID NO: 17636 - protein, 494 aa, Triticum aestivum
MEGCDCIEPCWPTDELLIKYQYISDFFIALAYFSIPLELIYFVKKSSFFPYRWVLIQFGAFIVLCGATHLINLWTFTMHTKTVAIVMTVAKVSTAVVSCATALMLVHIIPDLLSVKTRELFLKKKADELDREMGLIRTQEETGRHVRMLTHEIRSTLDRHTILMTTLVELGRTLGLEECALWMPSRSGSSLQLTHTLRHPIPGGSSVQINLPVVNQVFSSNRAIIVPHTSPLARIRPVQGRYVPPEVAAVRVPLLHLSNFQINDWPELSAKSYAIMVLMLPSDSARKWHVHELELVEVVADQVAVALSHAAILEESMRARDLLMDQNVALDLARREAEMAIRARNDFLAVMNHEMRTPMNAIIALSSLLLETELTPEQRLMVETVLKSSNLLATLINDVLDLSKLEDGSFELDISTFNLHAVFKEVMSFVKPIAAIKKLSVSAMLSPDLPLSVIGDEKRLMQTILNVCGNAVKFTKEGHISLLASVVKPDALRE

SEQ ID NO: 17637 - protein, 921 aa, Symbiobacterium thermophilum IAM 14863
MSYRIAPTQVAELPNGLKVYVREVRHAPVVTSMVWYGVGSRDEGPGQTGLSHFLEHMMFKGTPRFPYGVLEEAVKRRGGMWNAFTSYDYTAYYEVLPAQHLEFSFEVEADRMASMTFDPDLTVRERGIIVSEREGGENHPSFWLNEAFMATAFRVLPYRHPIIGSKADIRATTADALAAHYRRYYRPNNAALVVVGDVEAERVLRLAERHFGPLPAGGPVPPFTAAEPEQEAERRVTVRRPGPHPMLLAGYRIPEAAHPDQPALMLLAALLSGSASPGAAMGRSSRLHRRLIDTGLAVSAGAHVRAFQYAGLFMLTATPAPTVSLSSLEEALFDEVERLRAGEVSDEEFARARKQVRASLLYTMESTLNQAVFLGSTALTQGVERFDRALEELEAVTPADVLRAARQYLDVRRRTVGHFVPGDEATPGDEPLPGGEARAAAAASAPRAASSADAPSSVAVAPGANGASPVGTPDYQQPTDRRIPRPEAGPARPLLAAERIVRRELPGGAVLLLLPTPTVPSVFVRVQMEAGAVHEPPEKAGLAQLVAGVLTRGTAAYSAQELAIITDAQGMSLRVDAGRETAVAALKCLPEDLARGVQLLAEVVRRPSFPDDEVERLRTQMLVNWRRSEDDTRSVAARRLMERIYPEGHPYRQPIGGTEATLTGLQADDLRRFHQAHYGPRGAVITVVGDVDPESAAAALEEAFAGWEGGTGRAAIPPVPVPPGGRTHVPLAGKTQTDIALGWPLVDRGHPDYLALEVLATLFGGNGTPASSRLFRDVRERHGLSYYQYAVFGGTSGPGPWTAHLGVNPSRLEFAVETVRAELRRLVAEPVPVPELQALQDFLTGYPAVQHESPERIAARLAEIERFGLGLDWLQRHPRELAALTPEVLQEVAARHLVPERLTIVTAGPAESPANVSASKE

SEQ ID NO: 17638 - protein, 89 aa, Zea mays
MSSRRPSSRGNISEDEINELISKLQALLPSSRRRGSGQASTTKLLKETCSYIKSLHREVDDLSDRLSDLMATMDHNSPGAEIIRSILRS

SEQ ID NO: 17639 - protein, 951 aa, Oryza sativa
  misc_feature (190)..(190): Xaa can be any naturally occurring amino acid
KLGTGPPLEDLHARNVRQVVEDCLRLSGEYQSEGDPARLGELGGLLTSLDVGDAIMVASSFSHMLNLANLAEEIQMVYRKKAEASRRGDFVDEASAPTESDIDETFQRLVRGLGKSPREVFDALRSQTIDLVLTAHPTQSVRRSLLQKHASIRSCLTQLCGEGISDNEEQEIDEALQREMEMCSSGRIRXILAAFKTDEIRRTPPTPQDEMRAGMSYFHDTIWNGVPKFLRRVDTALKNIGIDERLPYNAPLIQFSSWMGGDRDGNPRVTPEVTRDVCLLARMMAAHMYFSKMADLMFELSMWRCNDELRARANELHRKSSRKYAKYYIASLCTPAATFWKKISPGEPYRIILGDVRDKLYNTCERARQILSKGISSIPEDQTYTNVEQFLEPLELCYRSLCDCGDKLIADGRLLDLMRQVSTFGLSLVKLDIRQESERHTDAMDAITTHLGIGSYREWPEERRQEWLVSELRGRRPLFGPDLPQSEEVADVLGAFRVIAELPADSFGAYIISMATAPSDVLAVELLQRECGVKKPLRVVPLFEKLADLQQARATMELLFSVDWYKERIDGKQEIMIGYSDSGKDAGRLSAAWQLYKAQEEIVGVAERHGVKLTIFHGRGGTVGRGGGPSHLAILSQPPNTVNGSLRVTVQGEVIEKSFGEENLCFRTLQRFTAATLEHGMNPPVSPKPEWRRLLDDMATVATDEYRSIVFQEPRFVEYFRAATPETEYGRMNIGSRPSKRKPGGGIESLRAIPWIFAWTQTRFHLPVWLGFGAAFRHAMQQSDAGGGLATLREMYDEWPFFRVTIDLLEMVFAKGDPGIAALYDELLVPDDLRPFGEQLRANYVETQRLLLQVAGHKDLLESDPYLRQRLMLRDSYITALNVCQAYTLKRIRDGGFRPETRPPLSKELLGSSAVAEKLVKLNPNSEYDPGLEDTLILTMKGIAAGMQNTG

SEQ ID NO: 17640 - protein, 468 aa, Bacteroides thetaiotaomicron VPI-5482
MKSTINFGYLIFLSVVAALGGFLFGYDTAVISGTIAQVTQLFQLDTLQQGWYVGCALIGSIVGVLFAGILSDKLGRKMTMIISATLFSTSALGCAISADFTQLVVYRIIGGVGIGVVSIVSPLYISEVAVAQYRGRLVSLYQLAVTVGFLGAYLINYQLLAYAESGNQLSMDWLNKIFVTEVWRGMLGMETLPAVLFFIIIFFIPESPRWLIVRGKEEKAVNILERIYNSVSEAASQLKETKSVLTSETKSEWAMLMKPGIFKAVIIGVCIAILGQFMGVNAVLYYGPSIFENAGLSGGDSLFYQVLVGLVNTLTTVLALVIIDRVGRKQLVYYGVSGMVVSLLLIGVYFLFGDSWGVSSLFLLVFFLFYVFCCAVSICAVVFVLLSEMYPTKVRGLAMSIAGFALWIGTYLIGQLTPWMLQNLTPAGTFFLFAVMCVPYMLIVWKLVPETTGKSLEEIERYWTRSEQ

SEQ ID NO: 17641 - protein, 662 aa, Gibberella zeae PH-1
MFKLTKVRSSRVYRFCSSPLLPMRSLNNNYATQAEKSQSTTTKNKSNSKYENLPLSTSGPINCALSGTSLLNTPYLNKGSAFPPDERRAFNLTGLLPQGVQTLEQQCKRAYEQYSSRPDDLAKNTFLTSLKDQNEVLYYKASYLPACHEGITDCQIQLIQTHLDEMMSIVYTPTEGDAIQNYSRLFRRPEGCYLNIQDPDHVEHNLAQWGNPEDIDYIVVSDGEEILGIGDQGVGGILISVAKLVLTTLCAGVHPNRTLPVVLDCGTDNKELLEDELYLGLKEKRVRGEEYAKFVDTFVQSARKLYPNAYIHFEDFGLGNARKILERYRPDFACFNDDVQGTGCVTLAAILSGLHASDQKLKDLRMVVFGSGSAGLGIADQVRDAIATEGNMSHEDAANQIWLIDKSGLLTSETEDVTESQKMYIKDVSEWKDKDADLLSVVKEIRPNVLVGTSTKAGAFTEDVIRAMTEHHERPIVLPLSNPTRLHEAKPEDILNWTDGKALVATGSPFPAVKGPWGKNGEEITINVGECNNSVVFPGIGLGCILSRAKHLTDRMLVAAVEGVSSLSPVLKDSTAPLLPDVGSVRDVSVRIARNVIQAAVKDGEATQEGIPEDEEDLEEWIKEQMWDPEYRPLKQVDLESATREARGELKKAGTVHRTGHT

SEQ ID NO: 17642 - protein, 371 aa, Kalanchoe streptantha
SDSGKDAGRLSAAWQLYKAQEELIEVAKQHGVKLTMFHGRGGTVGRGGGPTHLAILSQPTDTIQGSLRVTIQGEVIERSFGEGQLCFKTLQRYTAATLEHGMIPPLTPKQEWRALMDDMAVVATERYRSIVFREPRFVEYFRLATPELEYGRMNIGSRPSKRKPSGGIESLRAIPWIFAWTQTRFHLPVWLGFGEAFRHVIDKDSKNLLMLQQMYNEWPFFRVTIDLVEMVFAKGNPGIAALYDKLLVSEELLPLGEELRTGYNDTKSYLLKITGHNEILEGDPFLKQRLKLRNAYITTLNVCQAYTLKRIRDPSYQVPVRPPIAKEIMEGSVSSANQLVKLNPTSEYAPGLEDTLILTMKGIAAGMQNTG

SEQ ID NO: 17643 - protein, 365 aa, Kalanchoe kewensis
SDSGKDAGRLSAAWQLYKAQEELIEVAKQHGVKLTMFHGRGGTVGRGGGPTHLAILSQPADTIQGSLRVTIQGEVIERSFGEAQLCFKTLQRYTAATLEHSMIPPLTPKQEWRALMDEMAVVATERYRSIVFKEPRFVEYFRLATPELEYGRMNIGSRPSKRKPSGGIESLRAIPWIFAWTQTRFHLPVWLGFGEAFRHVIDKDNKNLLMLQQMYNEWAFFRVTIDLVEMVFAKGNPGIAALYDKLLVSEELLPLGEQLRTAYNDTKSYLLKITGHNEILEGDPFLKQRLKLRTAYITTLNVCQAYTLKRIRDPSYQVPVRPPIAKETMEGSISSANQLVKLNPTSEYAPGLEDTLILTMKGIAA

SEQ ID NO: 17644 - protein, 523 aa, Zea mays
GSSKTSPLKPPHVARPVPLLLTASLPRSHPRRAASSGTHLADRHMDPTAAPGSGGTPADSDATSPTNTTVTLPPLTLRDVPRLASSSPAAAAAAAVPNPISRHPYFHPPANFYISPGDVSLRHAFFDLVSAAPTPLVAYRRGGPRRDLAVDPAAARAALVTCGGLCPGLNTVLRELVVGLQELYGVRHVFGVAAGYRGFYGADEDHVRLHPAAVDDWHKKGGTVLKTTRGGFDLGKIVDGIVARGYTQIYAIGGDGTMRGALAIFEEFKRRGLNISITGIPKTVDNDIGIIDRSFGFQTAVEVAQQAIDAAHVEAVSAVNGAGIVKLMGRSTGHIALHATLSSRDVDCCLIPEVDFYLEGKGGLFEFLYERIKKKGHAVVVVAEGAGQELIPRTDDQKREQDESGNTVFLDVGPWLKSELGRWWKREHPDELFTVKYIDPTYMIRAVPANASDNLYCTLLAHSAIHGVMAGFTGFVPGPINGTYSYIPLEDVAVAKNPVDVNDHKWAWVRSVTNQPDFLKSQA

SEQ ID NO: 17645 - protein, 497 aa, Zea mays
MVLSHASSGRDDDDAVASTFASRYVRERLPRYRMPERSIPREAAQQIISDELMLDGNPRLNLASFVTTWMEPECDKLIMDSINKNYVDMDEYPVTTELQNRCVNMIAHLFNAPIKEDETAIGVGTVGSSEAIMLAGLAFKRKWQNKRKEQGKPCDRPNIVTGANVQVCWEKFARYFEVELKEVKLSEGYYVMDPVKAVEMVDENTICVAAILGSTLTGEFEDVKQLNDLLTEKNKETGWDVPIHVDAASGGFIAPFLYPELEWDFRLPLVKSINVSGHKYGLVYPGVGWVIWRSKDDLPEELIFHINYLGTDQPTFTLNFSKGSCQIIAQYYQLIRLGFEGYRNIMENCQENAAILREGIAATGRFDVLSKDAGVPLVAFSLRDSSRFSVFDVSENLRRFGWIVPAYTMPADAEHVAVLRVVVREDFSRSLAERLVSDVRKILRELDARATHAVRVATATAEQSGDSVVAKKSVLEIEREVAARWRNAVNKKKTGVC

SEQ ID NO: 17646 - protein, 528 aa, Xanthomonas axonopodis pv. citri str. 306
MTTHAATTQGKFHKRLSLTDLTFIGLGSIFGSGWLFSASHVSSIAGPAGIVSWILGGIAVLLLGLVYCELGAALPRAGGVVRYPEYSHGALLGSLTGFITLIAFSSLIAIEVEAARQYAAAWFPWLSQPNSTHPSVVGWLVQLALLVLFFVLNYFSVKTFALANNIVSIFKFLVPILVIVLLMQHFDAGNLSVHGFAPSGMAGVEAAISAGGIIFAYLGLTPIVSVASEVRDLQRNIPIALILSVALSTAIYVLLQLAFLGSIPAAQLAQGWAGIDKAFSLPYHDIALALGMAWLAALVICDAMVSPSGTGNIYMNATPRVVYGWARSGGFLPVLTRVDPASGIPRPALWLSLGLSIFWTLPFPSWETLIGVVSAALVLSYAVAPITVAALRRSAPDLPRPFFVRGLPVFGPLSFMVAALIVYWSTWPTLSWLLGLQVLAFVLYVLLRLPSRQGRARLVRQVRASLWLIVFFVLVMLVSWAGTFGGHGWIAHPFDTLGVAVIALCIYHWGARSGLRSDELALEEDDGE

SEQ ID NO: 17647 - protein, 424 aa, Aspergillus oryzae
MDEAMALRRTFALPRQLLRPVARSSLGYNTEQRNGFATAVPPVTQDATGSKGPTAMVFLNMGGPSTTNEVEDFLSRLFADGDLIPLGRLQTYLGPLIAKRRTPKIQKQYADIGGGSPIRKWSEYQCQEMCKLLDKLNPESAPHKPYVAFRYAAPLTEEMYTQLLDDGFGRGKGGRAVAFTQYPQYSCSTTGSSLNELWKWRNRLEGRRANESVDPSGSIQWSVIDRWPTHPGLVEAFAKNIEDQLKTYPEDKRNSVVLLFSAHSLPMSVVNRGDPYPAEVAATVHAVMQRLGFSNPYRLCWQSQVGPSAWLGAQTSDTVMEYVKRGQTDIVLVPIAFTSDHIETLYELDLEVMEEANSPGVKRAESLNGSPIFIEALANIAQEHLRKGEKCSRQMTLRCQGCKSDRCLEQKKFFAGEEAASLVV

SEQ ID NO: 17648 - protein, 365 aa, Kalanchoe kewensis
SDSGKDAGRLSAAWQLYKAQEELIEVAKQHGVKLTMFHGRGGTVGRGGGPTHLAILSQPADTIQGSLRVTIQGEVIERSFGEAQLCFKTLQRYTAATLEHSMIPPLTPKQEWRALMDEMAVVATERYRSIVFREPRFVEYFRLATPELEYGRMNIGSRPSKRKPSGGIESLRAIPWIFAWTQTRFHLPVWLGFGEAFRHVIDKDNKNLLMLQQMYNEWPFFRVTIDLVEMVFAKGNPGIAALYDKLLVSEELLPLGEQLRTAYNDTKSYLLKITGHNEILEGDPFLKQRLKLRTAYITTLNVCQAYTLKRIRDPSYQVPVRPPIAKETMEGSISSANQLVKLNPTSEYAPGLEDTLILTMKGIAA

SEQ ID NO: 17649 - protein, 452 aa, Eremothecium gossypii
MYSKEDWGGKIEPYIEVNMQKLEGKALVAVFGFQDFRKLGYQDHGELRMVCTQEAVNAQRCTAEELGQLLVRKKVYNPETGQNETLRSEVKSMRVEKEGVLEPRYPVKETGFYCVFVYAPDVKYAGEVTFQNAFGHLPASDVNNLMLYGLLAVAYAIAMALYMFAVWKHKHELLLLQKYILAFFLFLTLETILVWSAYDLVNRKGVTAGTITYNVFISIINAGKVSMSCFLILIVALGYGVVYPKLNRKLMRRVQVFTAFNFVTMAAAIIHSSLTRAENVGVSLLLSVFPVLTLIVFYVLIIRSLGSTLGYLREHKQVVKLNAYRKMFMLIIGSIVLNILGVFFSIFSMARRNDDEIISNLWKTKFIMEVWPSFVYFLVFVVFAFMWRPTDTSYMLACSQQLPTDPENVTDFDLDDLQSLNDDASNRRVNDDEINFSDEEGPGSYHPSHQGK

SEQ ID NO: 17650 - protein, 365 aa, Kalanchoe tomentosa
SDSGKDAGRLSAAWQLYKAQEELIEVAKRHGVKLTMFHGRGGTVGRGGGPTHLAILSQPADTIQGSLRVTIQGEVIERSFGEAQLCFKTLQRYTAATLEHGMIPPLTPKQEWRALMDEMAVVATERYRSIVFREPRFVEYFRLATPELEYGRMNIGSRPSKRKPSGGIESLRAIPWIFAWTQTRFHLPVWLGFGEAFKHVIDKDNKNLLMLQQMYNEWPFFRVTIDLVEMVFAKGNPGIAALYDKLLVTEDLLPLGEQLRAAYNDTKTYLLKITGHNEILEGDPFLKQRLRLRNAYITTLNVCQAYTLKRIRDPSYQVPVRPPIAKEILDGAVFSTNQVVKLNPTSEYAPGLEDTLILTMKGIAA

SEQ ID NO: 17651 - protein, 333 aa, Triticum aestivum
MASACDRLRYLKAFDDTKAGVKGLIDAGITTVPAIFRHPPDTLARAHDEDRFAIPVIDLAGVTTAPSRRAELVAEVKAAAETVGFFQVLFHGAPPPVMSEMLAALRSFNEEPAEARRPYYSRDGQSRVRYHSNFDLFRSPAANWRDTLYLDMAPTGPSPGEIPAACRGIAVEFTREVQRLGGTLFELLSEAMGLHRGFLEQHEAGCLEGLSVVGHYYPASPQPHLTMGTSRHTDPSFLTVLLQDSVGGLQVLHRLRRDDQPVWVDVPAEPGAFTVNVGDFLQLLSNDRFRSVEHRVLSKSVGPRVSVACFFRPHGAAAAARVCAPILVGDGAA

SEQ ID NO: 17652 - protein, 365 aa, Kalanchoe tomentosa
SDSGKDAGRLSAAWQLYKAQEELIEVAKRHGVKLTMFHGRGGTVGRGGGPTHLAILSQPADTIQGSLRVTIQGEVIERSFGEAQLCFKTLQRYTAATLEHGMIPPLTPKQEWRALMNEMAVVATERYRSIVFREPRFVEYFRLATPELEYGRMNIGSRPSKRKPSGGIESLRAIPWIFAWTQTRFHLPVWLGFGEAFKHVIDKDNKNLLMLQQMYNEWPFFRVTIDLVEMVFAKGNPGIAALYDKLLVTEDLLPLGEQLRAAYNDTKTYLLKITGHNEILEGDPFLKQRLRLRNAYITTLNVCQAYTLKRIRDPSYQVPVRPPIAKEILDGAVFSTNQVVKLNPTSEYAPGLEDTLILTMKGIAA

SEQ ID NO: 17653 - protein, 470 aa, Leifsonia xyli subsp. xyli str. CTCB07
MMSWHPSGSLAVLTADEIPSLQRRRLLRRITVLSTFGGLLFGYDTGVISGALPFMRFEGVALSPFEEGVVVSSLLFGAAAGSLVGGRIADRSGRRRLLIGLAIVFFAAALGCTFAPSIAVMVAARVLLGIAVGAASVAVPLFLTEVSPAQRRGQIVTHNELMIVSGQLAAFTVNAAIAAAVPEHAEVWRWMLVVASLPAVVLFFGMLVVPESPRWLILQGRFAEGRAEHQAEREAAEIRDAIEHAPSASFADLVRALGTPWIRRVFLVGVGIAMVQQLTGVNSIMYYGVQILQRAGFDAQAALVGQIANGVISVLATFGGIWLLGRVGRRPLLITGLIGTTSALLLVGTSSAVLAGTPALPFATLTLTVLFLTFQQGAVSPVTWLMLAEIFPARIRGVAFGAAALVLWLTNFLVGFLFPQLVSGMGISPTFFVFAAVGCGALLFVVRALPETRGRSLETLERELEAHYTR

SEQ ID NO: 17654 - protein, 402 aa, Legionella pneumophila str. Paris
MKHSLATIEEAVATLKAGKMIILMDDEDRENEGDLVIAAEHATPEAINFMSRLGCGLICLPMAEELIDKIQLPMMARHNKSPYGTAFTVSIEAANGVSTGISARDRARTIQVAIDPKSGPSDIISPGHVFPLRARKRGVLERPGQTEGSVDLVRLAGLTPAAVICEIINEDGTMSRRDELALFSKKHQIPLVTIKDLINYRIRHENLINPVATTQIPLEENGVFTMTVFENQIDSGEHFVLVKPPLYGNQVPLVRIHSECITGDVFGSRKCDCGKQLELSLSQIGAEGGILIYLRQEGRGIGLANKLKAYALQEQGFDTVDANLELGLPADDRDYAVAYQILKYLGVDALRLLTNNPLKIASLERYGMKITQRIPLEIKPSRENHCYLKTKKIKLGHLLAID

SEQ ID NO: 17655 - protein, 412 aa, Rhodococcus erythropolis
MTSDIVVIGGGVAGVSAVQSLRSEGYDGRLFLIGKERELPYDRTSLSKAVLAGDLADPPPLAPADWYDELQVETVLDRTVLQVDVTRKEVLLDGGRSLEVDRVLLATGASARVPSFSGADLPGVTTLRTVDDAQRLRQDWEPGQRLVVVGGGLIGCEVATTARKLGLEVSILEASDELLQRVLGRRIGGWCRARLEELGISVMVNTGVAEFDGVDRITAVIGTDGRRFPADSAIVCVGAEPETAIAEQAGLACSRGIIVNDSGGTAAEGVFAAGDAASWPLRTGGRRSLETYINSQKEATAVASAMLGKAVHAPQLPLSWTEIAGHRIQMIGDIEGSGEYVMRGAPDDGPALLFRLTDGKLTAALSVDAPREFAMATRLVESGAQVGRDVLADTSVELRELNRAARERTTAA

SEQ ID NO: 17656 - protein, 255 aa, Streptomyces avermitilis MA-4680
MTVHLEVAEGVGTIRLDRPPMNALDVATQDRLKELAEEATRREDVRAVVLYGGEKVFAAGADIKEMQAMDHTAMVVRSRALQDSFTAVTRIPKPVVAAVTGYALGGGCELALCADYRIAAENAKLGQPEILLGLIPGAGGTQRLSRLIGPSRAKDLIFTGRMVKADEALALGLVDRVVPVGEVYEQAHAWAAKLAQGPALALRAAKESIDVGLETDIDTGLAVERNWFAGLFATEDRERGMRSFVEEGPGKAKFL

SEQ ID NO: 17657 - protein, 204 aa, Zea mays
  misc_feature (59)..(59): Xaa can be any naturally occurring amino acid
  misc_feature (99)..(99): Xaa can be any naturally occurring amino acid
MKFNIANPSTGCQKKLEIDDDQKLRAFYDRRISQEVSGDALGEEFKGYVFKIMGGCEPXDLSVINLVIVKKGENDLPGLTDTEKPRMRGPKRASAVMAXRNLAKDDDVRKYVNTYRRTFTTKNGKKVSKAPKIQRLVTPLTLQRKRARIADKKKRIAKKKSEAAEYQKLLAQRLKEQRDRRSESLAKRRSKLSAAAKASAATSA

SEQ ID NO: 17658 - protein, 146 aa, Legionella pneumophila str. Paris
MKYLHTMVRVSNLEQSLDFYCNKLGLIEVKRTENAKGRFTLVFLAAPADIEQVQTSYGPMLELTYNWDPEDYTEGRNFGHLAYHVDDIYKICQHLQECGVVINRPPRDGHMAFIRSPDNISIELLQKGGPLPKQEPWLSAPNIGHW

SEQ ID NO: 17659 - protein, 446 aa, Prochlorococcus marinus str. MIT 9312
MLRVAVIGGGPSGSCAAEILAKAGIKTWLFERKLDNAKPCGGAIPLCMVEEFDLPESIIDRKVRHMRMISPSNREVDISLDKVYGKSDNEFIGMCRREVMDAFMRNRASDLGATLINGLVTSIDTGNNNQGPYKLVYSDYSSGDKKGELKELTVDLLIGADGANSRVAKAMDAGDYKVAIAFQERIKLPKEEMSYYEDLAEMYVGTDVSPDFYGWVFPKYDHVAVGTGTMQKNQLLIKGLQEGVRNRAKKRLVNGEVIKVEAHPIPEHPRPRRVVGRMALVGDAAGYVTKSSGEGIYFAAKSGRMCAEEIVEASKNGEVIPSENDLKNYLKKWDKKYGATYKVLEILQNIFYRNDSAREAFVEMCDDMDVQRLTFDSYLYKKVVAMKPIQQIKLTLLTLGSILRGKALAPLKYKPVDSAVREEKEVETMLKKYSIKGGIKVKSSKV

SEQ ID NO: 17660 - protein, 475 aa, Erythrobacter sp. NAP1
MVTQYKNLINGKMVDTGEWMDVVNPANEEVIGQVPACGEAQLDEAVAAARAAFKTWKKSTFEERQAACMAISGAIKENADELFRLLTSEQGKPHAQAKGEIFGAAGISAAQSTLQLEEEIIQDDDTRLHRHRRVPVGVVGGIVPWNFPVMMAIQKIVPALMAGCTIVLKPSPFTPLATLRIAELIADKVPAGTVNIITGEDSLGPLITGHPDIDKITFTGSTATGKKIMEGAAGDLKRITLELGGNDASIVLPDADPKKVAEQLFWSSFQNAGQVCIAAKRVYIHEDIYDELSAAIAEYAKSVVVGDGSEQGTGVGPIQNKKQYERVLELIQDAKDNGYKFLTGGDKDPSGSGYYVPITILDNPPEDARIVAEEQFGPVMPLMKFSSEDEVIERANNSDYGLAGAVWTADHDKGVEIAEQLETGTVWINEFMHLSPFAPFGGHKQSGFGAEYGKEGLKEFTYPQVITVKKDNVVA

SEQ ID NO: 17661 - protein, 151 aa, Brassica napus
  misc_feature (6)..(6): Xaa can be any naturally occurring amino acid
  misc_feature (12)..(12): Xaa can be any naturally occurring amino acid
  misc_feature (16)..(16): Xaa can be any naturally occurring amino acid
  misc_feature (19)..(19): Xaa can be any naturally occurring amino acid
  misc_feature (21)..(21): Xaa can be any naturally occurring amino acid
  misc_feature (25)..(25): Xaa can be any naturally occurring amino acid
  misc_feature (28)..(28): Xaa can be any naturally occurring amino acid
  misc_feature (32)..(32): Xaa can be any naturally occurring amino acid
  misc_feature (38)..(38): Xaa can be any naturally occurring amino acid
  misc_feature (55)..(55): Xaa can be any naturally occurring amino acid
  misc_feature (58)..(58): Xaa can be any naturally occurring amino acid
  misc_feature (68)..(68): Xaa can be any naturally occurring amino acid
  misc_feature (77)..(77): Xaa can be any naturally occurring amino acid
  misc_feature (80)..(80): Xaa can be any naturally occurring amino acid
  misc_feature (85)..(85): Xaa can be any naturally occurring amino acid
  misc_feature (87)..(87): Xaa can be any naturally occurring amino acid
  misc_feature (92)..(93): Xaa can be any naturally occurring amino acid
  misc_feature (97)..(97): Xaa can be any naturally occurring amino acid
  misc_feature (102)..(102): Xaa can be any naturally occurring amino acid
  misc_feature (104)..(104): Xaa can be any naturally occurring amino acid
  misc_feature (106)..(106): Xaa can be any naturally occurring amino acid
  misc_feature (108)..(109): Xaa can be any naturally occurring amino acid
  misc_feature (115)..(115): Xaa can be any naturally occurring amino acid
  misc_feature (125)..(126): Xaa can be any naturally occurring amino acid
  misc_feature (130)..(130): Xaa can be any naturally occurring amino acid
  misc_feature (135)..(135): Xaa can be any naturally occurring amino acid
  misc_feature (142)..(143): Xaa can be any naturally occurring amino acid
  misc_feature (146)..(147): Xaa can be any naturally occurring amino acid
MASSMXSSAAVXTSPXQAXMXAPFXGLXSSAXFPVTRXANNDITSIASNGGRVSXMKXWPPVGKKKFXTLSYLPDLXEVXLGKEXYXLLRNXXIPCXEFELXHXFXYXXHGTTPXYYDGRYWTMXXLPLXFGCTXSAQVLKXXQEXXTEYP

SEQ ID NO: 17662 - protein, 323 aa, Caulobacter crescentus CB15
MSGRITSAFGAKSTAREVVAGHDLSGRVAIVTGAATGIGVETARALALAGAEVIIAARKPELGEEVANAINEEAGSKRVSFGMLDLSSLEAIRHFVNVWGDRRIDILINNAAVMASPLMRTADGFEMQFGTNHLGHFLLSVLLAPNLIAGAKASGKPSRLVSLSSIGHRRSGIHFDDPNYTTRPYEKWEAYGQAKTANSLFAVGFDKRFKDQGVHANAVMPGGILTPLQRHLPIEEQRALGWLDENDQPREGFKTTEQGAATSVWAAVGSELEGVGGLYLEDCNQALPWSKENPWTGVMPHALDPEAADRLWDLSVDIVGAGA

SEQ ID NO: 17663 - protein, 174 aa, Xanthomonas axonopodis pv. citri str. 306
MPLNDLQHVPGANDAPAETHGFVFNHTMLRVKDATQSLDFYTRVLGFRLLDARDFADAKFSLYFLALLPEGTAIPDDDAQRRLWMAGIPGVLELTHNHGTETQDGPVYHDGNSDPRGFGHLCISVPDIHAACARFDSLNVPYQKRLEDGRMKHLAFIKDPDGYWVEIISNTPLA

SEQ ID NO: 17664 - protein, 206 aa, Lotus japonicus
MPSRRRTLLKVIILGDSGVGKTSLMNQYVNRKFSNQYKATIGADFLTKEVQFEDRLFTLQIWDTAGQERFQSLGVAFYRGADCCVLVYDVNSMKSFDNLNNWREEFLIQASPSDPENFPFVVIGNKIDIDGGNSRVVSEKKARAWCASKGNIPYFETSAKGGINVEEAFQCIAKNALKSGEEEELYLPDTIDVGNSSQQRASGCEC

SEQ ID NO: 17665 - protein, 343 aa, Lycopersicon peruvianum
MEMDLPVSAIGFEGFEKRLEISFVEPGLFADPNGKGLRSLTKAQLDEILGPAECTIVDNLSNDYVDSYVLSESSLFVYSYKIIIKTCGTTKLLLAIPPILRLAETLSLKVQDVRYTRGSFIFPGAQSFPHRHFSEEVAVLDGYFGKLAAGSKAVIMGNPDKTQKWHVYSASAGTVQCNDPVYTLEMCMTGLDREKASVFYKTEESSAAHMTVRSGIRKILPKSEICDFEFEPCGYSMNSIEGAAVSTIHITPEDGFSYASFESVGYDPKTTELGPLVERVLACFEPAEFSIALHADVATKILERVCSVDVKGYSLAEWSPEEFGKGGSIVYQKFTRTPYCESP

SEQ ID NO: 17666 - protein, 420 aa, Solibacter usitatus Ellin6076
MILGILLGILITIPLLALTTFVQVLYLESLRLRTRDLPSLKFFKDTLEDKLALKTEDGAGAFSLVKHTLLALLGIFYFAWFSDGTPWHAVIFWQAILAVIVTMIMVCFALPQLLYRRTSGHWLLPLVPLLRLIGLITRPFVVMLAFFQSLVDLTDDTVDANEEPTPAENIEALISAGTEEGLIEEEDRKLIQSVVEFGDKVVREVMTPRPNIVAIAADATLEQLRQLVITEQYSRIPVYEGTIDNVIGFVHVRDMFELQEEEREKRTVRGLVRNIMLVPETKPVSVLMRRMQQENTHMVIVVDEYGNTAGLATMEDLLEVIIGEIRDEHEPDSDVAEDGRGGFIVSGSFDLDRITDLIDTFHRGDDIESTTVGGLVSEWLGRVPKTGEFVERDGVRLEVLASDELRVGQVRISKSQTVAQ

SEQ ID NO: 17667 - protein, 115 aa, Oryza sativa
MARAQLLLVALVAALLLAAQAMAAISCGQVNSAVSPCLSYARGGSGPSAACCSGVRNLNSAATTTADRRTACNCLKNVAGSISGLNAGNAASIPSKCGVSIPYTISPSVYCSSVN

SEQ ID NO: 17668 - protein, 286 aa, Chlamydophila pneumoniae CWL029
MLLRGIPAAEKILQRLKEEISQSPTSPGLAVVLIGNDPASEVYVGMKVKKATEIGIISKAHKLPSDSTLSSVLKLIERLNQDPSIHGILVQLPLPKHLDSEVILQAISPDKDVDGLHPVNMGKLLLGNFDGLLPCTPAGIIELLNYYEIPLRGRHAAIVGRSNIVGKPLAALMMQKHPQTNCTVTVLHSQSENLPEILKTADIIIAALGAPLFIKETMVAPHAVIVDVGTTRVPADNAKGYTLLGDVDFNNVVTKCAAITPVPGGVGPMTVAMLMSNTWRCYQNFS

SEQ ID NO: 17669 - protein, 231 aa, Glossina pallidipes S-endosymbiont
IGVDGGGGNAVEHMVRERIEGVDFFAVNTDAQALRKTAVGQTIQIGSGITKGLGAGANPEVGRHSAEEDREALRAALEGADMVFIAAGMGGGTGTGAAPVVAEVAKDLGILTVAVVTKPFNFEGKKRMAFAEQGIAELSKHVDSLITIPNDKLLKVLGRGISLLDAFGAANDVLKGAVQGIAELITRPGLMNVDFADVRTVMSEMGYAMMGSGVACGEDRAEEAAEMAISS

SEQ ID NO: 17670 - protein, 370 aa, Saccharum officinarum
MDGAPVAEFRPTVTHGGRFLQYNIFGNLFEITHKYQPPIMPIGRGAYGIVCSVMNFETREMVAIKKIANAFDNHMDAKRTLREIKLLRHLDHENIIGIRDVIPPPIPQAFNDVYIGTELMDTDLHHIIRSNQELSEEHCQYFLYQILRGLKYIHSANVIHRDLKPSNLLLNANCDLKICDFGLARPSSESDMMTEYVVTRWYRAPELLLNSTDYSAAIDVWSVGCIFMELINRQPLFPGRDHMHQMRLITEVIGTPTDDELGFIRNEDARKYMRHLPQFPRRPFASLFPKVQSVAALDLIERMLTFNPLQRITVEEALEHPYLERLHDIADEPICTEPFSFDFEQQALTEDQMKQLIFNEAIEMNPNFRY

SEQ ID NO: 17671 - protein, 252 aa, Prochlorococcus marinus str. MIT 9312
MTESNQTKLAGVNRPIQIIPSVLPADWANMGACVKELEEAGVDRIQFDVMDGNFVPNLTFGPEMIAACRKYCNVPFETQLMVSQYNCETMLESYVNATKGANGEPGVVIAHAEANIHLHRVLGRIRDLGGSPSVALNPHTPFEMIENIMDMVDHVLVMTVNPGFGGQAYIPTMLNKIRKIRNFVIEKNLDVDIEVDGGIKANWTISQCADAGANCFIAGSGMFAYPTLKEGCDDLRKVAKEAQNGKVVSEPQ

SEQ ID NO: 17672 - protein, 639 aa, Rhodopirellula baltica SH 1
MCGITGFWNPSRTNERELRFALDPMLDVLDHRGPDERGSRFFQERGLAMGHTRLSIIGLACGHQPIETDDGDYAVTVNGELYDYKRIRTALACENYECNGKSDSAITLPLYLKHDLAMVDHLRGEFAVVLYDDRKERLVLIRDRFGVKPLYYAVNDNGFIWGSEVKSILQHPDVEPRLCPKAAVHQMMQVMVPGSTAFEGVDALLPGHMLVVQRNGDSLEVQTKRWWDFEFPESHDENADPEPFIQGVQDRLIDAVAARLEADVPVGCYLSGGIDSCSILGLANTLQQSPVKAFTIAFDSDEYDESNIAKRMAERTGAEQELLRLTEKELYGPAFERATWHAERTFYNTLAVAKWHMSRRVRACNYKAVITGEGSDELFGGYPFFKRDWLGRDDEGGIFAGAILAEEDLKHSAWQDLCGFTPSWIQPWMLVLKRFEPILSSSLTDLLQEYDPVGEVAGAIDPAQVRGRHRLDVSQYTWSKTMLEGQILTWGGDRMDMANSMEARPAFLDHHVAEYATTIPPNIRIRNGVEKWVLREAMVNVLPRELYERKKFAFMAPPAHTDPVKRAAVQEMIDHWLTPSRVESVGFFQHDKLMQFIDDAWKESDGTIARRNDIVMNHVLQLHMLHGQYVEGLPLPAVD

SEQ ID NO: 17673 - protein, 190 aa, Glycine max
MAQTVLFLSSSTVPGSANYSIDLKKDSLIHLQNQGLRPKISHLFFIPLPSASYSFSSSSSRTFITALAFFKTKTPSKVVKSKPKPKVEDAIFGSSGGFGFTKVNELFVGRVAMLGFSAPSLGEAITGKGIIAQLNLEPAMPIYEALLLFTLLGAIGALVYRGRFLYDLPTELNKTVIPPGKGLSEGQGGN

SEQ ID NO: 17674 - protein, 231 aa, Glossina pallidipes S-endosymbiont
IGVGGGGGNAVEHMVRERIEGVDFFAVNTDAQALRKTAVGQTIQIGSGITKGLGAGANPEVGRHSAEEDREALRAALEGADMVFIAAGMGGGTGTGAAPVVAEVAKDLGILTVAVVTKPFNFEGKKRMAFAGQGIAELSKHVDSLITIPNDKLLKVLGRGISLLDAFGAANDVLKGAVQGIAELITRPGLMNVDFADVRTVMSEMGYAMMGSGVACGEDRAEEAAEMAISS

SEQ ID NO: 17675 - protein, 899 aa, Photobacterium profundum SS9
MKRNKVSRRNFLKGSGFIASTAAGAGLFVAHNPELEAAPLTGEPTKRTTALAQCPYCGVGCGTIIQVENGKIVSMRPDKDHPTNYGLQCIKGLTAAEPMYVDRMEGDPYVRKDVWDEWNKPDHGDIEYISKTKGSFDEEHFIRVPYHDASDMVARKIAHFAKKYSGNSISLYGSGQLTMEGQYLENLFMKGVLGSNTIEANARMCMTSAVTGYFATLGSDTPPLAYDDIELADMVMHFGHNARESHPIIFWRIADHKKKKDIPTVVVDPRATGTNKGYADINDKNHVHVPLLNGDISFLNAIAHVLLKEHDDVIDWKFLKAHVTGWQEYIDGVKDNYSPEQVQDRMGGVNHDVSPEKIRRVAAMFADATRKRLARSKGKQEGEGYGGVIIMWGIGYNQHIHGQHNVISIINLLTLTGNLAKPGCGPFSMTGQPNAMGERFTGGLTGRLPFNEGLGNLKHRAHMAKMWRVPEKNLDNAASSPNPGYAVGMMERALKDDLKAMFLVYATHIDLPDQYNLVRPALAKTFNVVQEIYRHAPNNLYADVIFPACTWGEVNGVYISSERRINITEKAAQGPKGCRPDMDMVIDKGKEIAELLGMDGDKIFPYKRGKDGEYDAEEVFRDVCRASVGTDADLTGILDREKLDGISPYEQLKTLRGIQWPAPNYEAAKNGGTQRRYMMQEGQWENRPYGYFRTKDGKVHMKLCQQDYSQRKEITKKLMEFGVKKDHYTIDNQDLIIKARDMALTPDLPDEEFRGQSWQNVPKDKFPYWMGLGVVYEHFHTAKSNRSPTTRRLVPEMYVEMHAEDAKDLGIKDGEWVRVVSRRGSLEARAQVGGTDSLVKPARNSVPRGYMFGPWNLSVADSADPKKNKWLANGISNRCWDPVSGQVDFKKLACRIEKI

SEQ ID NO: 17676 - protein, 269 aa, Bordetella parapertussis
MSAADQPPRYGTLTLQTDGALAILTLDRPAALNAIDIAMARDLQAAARWLQGRAALRVVLLRGAGKVFCAGGDIALFQGPPEDIRASLRALFTPLNDCVARIAAMDQLWLADVHGVAAGAGLSLALACDLAIAADDARLVTAYLKLGATPDAGMTHALAHLLGRRRALALLLRAEPIDAAQALQWGLVDRVAPAAERADQALAYARELAAHAPHGVAAAKRLLRQAPATSLEQQLEDEAAAFLAAAGRADFAEGAQAFLAKRPPRFTGA

SEQ ID NO: 17677 - protein, 335 aa, Hypocrea koningii
VPKVGINGFGRIGRVVLRNALETGAVEVVALNDPFIEPHYAEYMFKYDSTHGRFKGDIKVDGKDLVIDGKRIKFYQERDPANIPWKDSGAEYIVESTGVFTTTEKASAHFKGGAKKVIISAPSADAPMYVMGVNEDTYAGANVISNASCTTNCLAPLAKTLNDKFTIVEGLMTAIHAYTASQKTVDGPSSKDWRGGRAAAQNLIPSSTGAAKAVGKVIPELAGKVTGMSVRVPTVNVSLVDFTVRFAKDVTYDEVKAAIKEASEGPLKGILAYTEDDIVSTDILTDPHSSTFDAKAGIALNKNFVKVMSWYDNEYGYSRRVVDLIVYVSKKDAGQ

SEQ ID NO: 17678 - protein, 665 aa, Geobacter metallireducens GS-15
MCGITGFMDFSLQCGPDAMRANARRMADALMHRGPDDSGAWCDQGAGVGLAHRRLSILDLTPAGHQPMESRSGRFTIVFNGEIYNHQALRKELAAFEPWRGHSDTETLLAGFEAWGIEATLKRTVGMFALAVWDNAERTLTLARDRMGEKPLYYGWNQGVFLFASELKALRAYPGFDAEINRDAIALLMRHSCIPTPHSIYRGIYKLWPGTILTLRNTGRGIAPWDAADPPFKLFQGEGVSLRPYWSLLEAAEQGHARPFEGTESEAIGELERVLTEAVLAQQISDVPLGAFLSGGVDSTAIVALMQAHSSRPVKTFTIGFHEDDCNEAKYAGEIASRLGTDHTELYVSPGDSLAVIPRLPQLYDEPFSDPSHIPTFLVSLLAREHVTVSLSGDGGDELFGGYVRHTLLHRIWNNIGWCPLPMRKALSDKIRFLSPGQLQAVLRNLPFIDRVHAPVYKAYRLAELIRADSPASMYEICISHWQQDDPVVVGGQSPFHASSGRMPRQLDSFSLPEKIMLMDSVTYLPDDILVKIDRAAMGVSLETRVPFLDHRVVEFAWRLPLGLKIRGGQSKWILRQVLNRHIPKELVERPKHGFGIPLGTWLRGPLREWAEELLNESRLLREGFLDPRPVRQKWLEHVSGRRDWEFHLWDVLMFQSWLEQERRP

SEQ ID NO: 17679 - protein, 497 aa, Legionella pneumophila
MIRNSMKSHTELLSWNLLQKEADRVRLNSDSLTCVVPDSNNYESSKQINCIEYDYSRQRVNRTIIDLLIDLANEVKLQEKIDNLINGKKINISENRPALHTALRDLGNKSIMIDGLDIMSAVINTREKIKVISNQIREKKWLGHSGLPITDIVNIGIGGSDLGPRVCINALSNYISKEFNYHFISDVDPASFNDVIAKINPQTTLFIVSSKSFTTKETLLNARKAFALYEDTASIDQHFIAVTAHPERAYQMGIKTVLPIWDWVGGRFSFCSAVNLITAIAIGYEQFVELLAGAHDIDTHVQFTDFKNNIPVLMALIGIWNNNFLNIHYDLIGYNFKEYFVPYVQQLDMESNGKSIDVNGRMVDYATGPIVWGGLGNQAQHSYFQLLCQGTHRCVGDFITLKTNDEHEINSMCHYKMKVLSEGIQTIENPYGYIPGNMPMNHLILSDCSPYTLGALVALYEHKIFEQSVIWNINPFDQPGIESAKSAHREITLSSES

SEQ ID NO: 17680 - protein, 321 aa, Wigglesworthia glossinidia endosymbiont of Glossina brevipalpis
MKNNIGIIISNVGTPSHPNKKSVKKYLSEFLSDKRVIDISRFFWIPYLHLYFLPLKSYKSVNLYKKIWEKDGSPLMINSLNQRNYLINKFPNFKIELGMRYGDPSICVAIKKMIKIYNVNKLIILPMYPQYSCTTTASVLDSVCEVIKKYRNIPSIIFIRDYADNINYINAITNSIKKSFNKNGIPEMLIMSFHGIPKKYIKDGDDYLKRCNVTKKLVLSKLNFSRKKVIMSFQSKFGNIPWITPITSEVISFLPKKGIKNIQVICPGFSSDCLETLEEIKIQNKKIFKDNGGKKFHYIPALNYSKIHIECLANIIRTHLK

SEQ ID NO: 17681 - protein, 337 aa, Hypocrea koningii
APIKVGINGFGRIGRIVFRNAVEHPDIEVVAVNDPFIETTYAAYMLKYDSSHGLFKGEVEVDGKDLVVNGKKVRFYTERNPADIKWSETGAEYVVESTGVFTTTEKAKAHLVGGAKKVIISAPSADAPMYVMGVNESDYDGSADVISNASCTTNCLAPLAKVINDNYGIVEGLMTTVHSYTATQKTVDGPSAKDWRGGRGAAQNIIPSSTGAAKAVGKVIPALNGKLTGMSIRVPTANVSVVDLTVRIEKGASYEEITETIKKAADGPLKGVLAYTGDDVVSSDMLGNTNSSIFDIKAGISLNKNFVKLVSWYDNEWGYSRRVLDLLAHVAKVDASK

SEQ ID NO: 17682 - protein, 482 aa, Vibrio angustum S14
MTFSFGGLFKQQAFINGQWSDAFSGKTVNITNPATNEVIGHVPLMGVEETNIAIDAADKAYRLWSKTTAKHRSLILRQWYELIVSHSDELAHILTAEQGKPLAEAKGEIAYAASFVEWYAEEAKRLNGEIIPSHKEDARILVSRQPVGVVAAITPWNFPAAMITRKCGPAFAAGCSVVLKPAPDTPYTAFALAELAHRAGIPAGLFNVITGDAVKIGAELMSNKRVRKVSFTGSTAIGKLLMAQSAATVKKVSLELGGNAPFIVFDDADLSRAIDGVMVSKFRNAGQTCVCTNRIYVHSDVYQQFVEKLAEKVSALTVGNGVDNGVTIGPLINRAAVEKVEKHINDAMMKGANLVIGTREASTNCFVQPTVLSNVTDNMLVASEETFGPLAAVFKFTDEQDVITRANNTDSGLAAYVYTQSLSRAFRVSEALEYGMVGVNEGLISTELAPFGGVKESGIGREGAHQGLEEYTEMKYTLMGGL

SEQ ID NO: 17683 - protein, 403 aa, Vibrio cholerae
MKRVVITGMGIISSIGNNVEEVLASLKAGKSGITASEQFKEHGLRSQVWGDLKINPEEHIDRKQMRFMGDAAAYAYLSLEQAIADAGLTPEQVSNDRTGIVAGSGGASSENQVIAVDTQREKGVKRVGPYMVPRTMSSTVSACLATPFKIRGVNYSISSACATSAHCIGNAVELIQLGKQDIVFAGGGEELYWSQTMMFDAMGALSTKYNETPEKASRTYDADRDGFVISGGGGMVVVEELEHALARGAKIYGEIVGYGATSDGYDMVAPSGEGAIRCMKMAMQGVDKIDYINTHGTSTPVGDVKELGAIQEVFGGNSPAISATKAMTGHALGAAGVHEAIYSTLMLHHGFIAPSINIDTLDEAAQGLDIVTELREQELTTVMSNSFGFGGTNATLVIKKYQG

SEQ ID NO: 17684 - protein, 129 aa, Brassica napus
MAARSSSSQPQLVAAAAVLATALLLLAAGAGTASAAVSCGEVTSSVAPCLGYAMGSAASPSAACCSGVRSLNSRASSTADRQATCNCLKSMTGRLGGGVSMANAANIPSKCGVSVGVPISPTVDCTKIN

SEQ ID NO: 17685 - protein, 551 aa, Synechococcus sp. WH 8102
MGKPGRSSIPSVGVHHQGPMSFPDFSASDAQIQWQRFCDLLWYHEDLGIWLDISRMHVNPSHLEQLQPGFDKAFAAMAELEAGAIANPDEQRQVGHYWLRTPQLAPNEAVRDQIATEIDQIDQFGRDVISGVIKAPGGQPFTDVLWIGIGGSGLGPLLMIRALQGHGSGLPFHFFDNVDPNGMSAVLAELDDRLATTLVVTVSKSGGTPEPHLGMEQARHRVESRGGRWADQAVAITMVDSKLDREAQQDGWLKSFSMFDWVGGRTSITSAVGLLPGALIGADIRDFLAGAAQMDDATRLADLRRNPAALMAASWFVAGDGKGRRDMVVLPYRDRLEVFSRYLQQLVMESLGKRLDRDGNEVNQGIAVYGNKGSTDQHAYVQQLRDGVDNFFATFIEVLEDVSDIPVIKDECPGDFLDGFLQGTRSALTEGGRQSLSISMRRFDARRLGALIALFERAVGFYGDLVNINAYHQPGVEAGKKAAAAILDLQSRVEAVLKDGAPRTVSEIRQAVGDGSDEAIFWIMRHLAGNDRGYRAEGDWANPASIRFSCS

SEQ ID NO: 17686 - protein, 365 aa, Kalanchoe grandiflora
SDSGKDAGRLSAAWQLYKAQEELIEVAKQHGVKLTMFHGRGGTVGRGGGPTHLAILSQPADTIQGSLRVTIQGEVIERSFGEAQLCFKTLQRYTAATLEHGMIPPLTPKQEWRALMDEMAVVATERYRSIVFREPRFVEYFRLATPELEYGRMNIGSRPSKRKPSGGIESLRAIPWIFAWTQTRFHLPVWLGFGEAFRHIIDKDNKNLLMLQQMYNEWPFFRVTIDLVEMVFAKGNPGIAALYDKLLVSEELLPLGEQLRTGYNDTKSYLLKITGHNEILEGDPFLKQRLKLRNAYITALNVCQAYTLKRIRDPSYRVPVRPPIAKEIMEGSDSSANQLVKLNPTSEYAPGLEDTLILTMKGIAA

SEQ ID NO: 17687 - protein, 337 aa, Claviceps purpurea
MAVKVGINGFGRIGRIVFRNAVEHPEIEVVAVNDPFIDPEYAAYMLKYDSSHGVFKGEIKKDADGLIVNGKKVKFHTERDPSAIPWKASGAEYIVESTGVFTTTEKAKAHLTGGAKKVIISAPSADAPMYVMGVNEKTYDGKADVISNASCTTNCLAPLAKVIHDKYTIVEGLMTTVHSYTATQKTVDGPSGKDWRGGRGAAQNIIPSSTGAAKAVGKVIPDLNGKLTGMSMRVPTPNVSVVDLTVRIEKGATYDEIKATVKEAANGSLAGILGYTEDDIVSSDMNGNTNSSIFDAKAGISLNKNFVKLIAWYDNEWGYSRRVLDLLAYVAKADASK

SEQ ID NO: 17688 - protein, 365 aa, Kalanchoe pinnata
SDSGKDAGRLSAAWQLYKAQEELIEVAKQHGVKLTMFHGRGGTVGRGGGPTHLAILSQPADTIQGSLRVTIQGEVIERSFGEAQLCFKTLQRYTAAALEHSMIPPLTPKQEWRALMDEMAVVATERYRSIVFREPRFVEYFRLATPELEYGRMNIGSRPSKRKPSGGIESLRAIPWIFAWTQTRFHLPVWLGFGEAFRHVIDKDNKNLLMLQQMYNEWPFFRVTIDLVEMVFAKGNPGIAALYDKLLVSEELLPLGEQLRTAYNDTKSYLLKITGHNEILEGDPFLKQRLKLRTAYITTLNVCQAYTLKRIRDPSYQVPVRPPIAKEIMEGSVSSANQLVKLNPTSEYAPGLEDTLILTMKGIAA

SEQ ID NO: 17689 - protein, 214 aa, Prototheca wickerhamii
VDSKLQKLVKGIQNDGLRSILEDVYARNAEQDEFLQAVRGMVVSIAPVFEKHPEYLTAFKLLTEPERAIIFRVPWVDDAGQWQMNRGMRVQFSSAIGPYKGGLRFHPSVTLSIIKFLGFEQIFKNALTTLPMGGGKGGSDFDPKGRSEAEIMRFCQSFMTELYRHIGSDVDVPAGDIGVGGREIGYMYGQYKRITRDRGGVLTGKGMGWGGSEI

SEQ ID NO: 17690 - protein, 365 aa, Kalanchoe pinnata
  misc_feature (194)..(194): Xaa can be any naturally occurring amino acid
SDSGKDAGRLSAAWQLYKAQEELIEVAKQHGVKLTMFHGRGGTVGRGGGPTHLAILSQPADTIQGSLRVTIQGEVIERSFGEAQSCFKTLQRYTAATLEHSMIPPLTPKQEWRALMDKMAVVATERYRSIVFREPRFVEYFRLATPELEYGRMNIGSRPSKRKPSGGIESLCAIPWIFAWTQTRFHLPVWLGFXEAFRHVIDKDNKNLLMLQQMYNEWPFFRVTIDLVEMVFAKGNPGIAALYDKLLVSEELLPLGEQLRTAYNDTKSYLLRITGHNEILEGDPFLKQRLKLRTAYITTLNVCQAYTLKRIRDPSYQVPVRPPIAKEIMEGSVSSANQLVKLNPTSEYAPGLEDTLILTMKGIAA

SEQ ID NO: 17691 - protein, 567 aa, Synechococcus sp. WH 8102
MATSNQQLIVQRLIMMELQYGRLLNSSSQHQQDDPIRFDDIAEALAAIRNGACVVVVDDEQRENEGDLICAAQFATPEAINFMATEARGLICLAMEGKRLDELDLPLMVDRNTDANETAFTVSIDAGAEHGVSTGISAEDRARTIQVALNPKTRPAELRRPGHIFPLRAKPGGVLKRAGHTEAAVDLAQLAGLTPSGVICEIQNSDGSMARLPELRAYADTWGLKLISIAELIRYRLDNERFVRRQAHAELPSQFGSFQAIGYCNELDGSEHVALVKGDPASLREPVLVRMHSECLTGDAFGSLRCDCRPQLEAALRQIEREGEGVVVYLRQEGRGIGLINKLRAYSLQDGGLDTVEANERLGFPADLRNYGVGAQILSDLGIHRLRLLTNNPRKIAGLGGYGLQVEERVPLVMDAGDHNADYLAAKRDKLGHLMDSDGPCTVLAVAVNDRTESLPSIRSRVEDLAETHGQTLEALHEPRLLALWDRPQFVWKLTPEVDAPLALLQSIAQLESTQRIGLLRVSTERSALHPSQTLEREERSLVELIQTNGDERLTQRPSLLHWSARD

SEQ ID NO: 17692 - protein, 365 aa, Kalanchoe pinnata
SDSGKDAGRLSAAWQLYKAQEELIEVAKQHGVKLTMFHGRGGTVGRGGGPTHLAILSQPADTIQGSLRVTIQGEVIERSFGEAQLCFKTLQRYTAATLEHGMIPPLTPKQEWRALMDEMAVVATERYRSIVFREPRFVEYFRLATPELEYGRMNIGSRPSKRKPSGGIESLRAIPWIFAWTQTRFHLPVWLGFGEAFRHVIDKDNKNLLMLQQMYNEWPFFRVTIDLVEMVFAKGNPGIAALYDKLLVSEELLPLGEQLRTAYNDTKSYLLQITGHNEILEGDPFLKQRLKLRTAYITTLNVCQAYTLKRIRDPSYQVPVRPPIAKEIMEGSVSSANQLVKLNPTSEYAPGLEDTLILTMKGIAA

SEQ ID NO: 17693 - protein, 427 aa, Xylella fastidiosa 9a5c
MSSPYKSSSHMAKETLLYAQSGGVTAVINATAAAVITEARSHRVKVLAARNGILGALREDLIDTSKESITAIRALTHTPGGAFGSCRFKLKSLEADHDKYERLLEVFKAHNVRWFLYNGGNDSADTALKVSQLAKTFDYPLHCIGVPKTIDNDLAITDASPGFGSAAKYTAVSICEAALDVAAMAETSTKVFIYEAMGRHAGWLAAAAGLAGQGQEEAPHIILLPERTYDETAFLAKVQQVVDGVGWCVVVASEGIRSNDGRFVADAGGTTDAFGHTQLGGVAAYLASRVKQTLGLKVHWTLPDYLQRSARHIASKTDWEQAQAVGKAAVRYALEGMNAVMPVIVRTSDTPYRWKIEPAALTKIANHEKTLPASFLRRDGFGISERARTYFEPLIRGETPMPYERNGLPRHVHLKNQSVPKQLPAWE

SEQ ID NO: 17694 - protein, 433 aa, Clostridium thermocellum ATCC 27405
MFVEILVLILLIVLNGFFAASEIALISLNDNKLRLMGNEKSKKKIEILKKLLSEPGRFLATIQIGITLGGTLSSAFASESFSDRLAGLIKQTGVPVPDAVLKTLSMIFVSVILSYFSLVIGELVPKRLAMKKEEAISMFAARPLYILSVVTYPAVKLLNASTNLIVRLFGIDPNADEEEVTEEEIRMMVDVGEEKGTIQENEKEMINNIFDFDNKTVMDIMTHRTDIVALPVDASLDEVISLFNEEKYTRIPVYEESIDNIVGILHVKDLIKYIGVGSDTADFDLRKIIRKPYNVPWSKKADELFSELQKNKVHMAIIIDEYGGTAGIVTVEDLVEEIVGNIFDEYDEEEKDFEKLDESTYIFSGTAGLDVLNEWADAQLPEDEYDTLSGFIISQLGRIPEYDEKPEIEFNGLLFKVEEVSEKRIEKIKVCRA

SEQ ID NO: 17695 - protein, 290 aa, Zea mays
MATGSEASKAAEAVVDWHKQDSKRMLHAVYRVGDLDRTIKYYTECFGMKLLRKRDVPDEKYTNAFLGFGPENTNFAVELTYNYGVDKYDIGTGFGHFAIANDDVYKLAENIKSKGGKITREPGPVKGGSTVIAFAQDPDGYMFELIQRADTPEPLCQVMLRVGDLERSIKFYEKALGMKLLRKKDVPDYKYTIAMLGYADEDKTTVLELTYNYGVTEYSKGNAYAQVAIGTNDVYKSAEAVDLATKELGGKILRQPGPLPGINTKIASFVDPDGWKVVLVDNTDFLKELQ

SEQ ID NO: 17696 - protein, 365 aa, Kalanchoe pinnata
SDSGKDAGRLSAAWQLYKAQEDLVKVAKEFGVKLTMFHGRGGTVGRGGGPTHLAILSQPPDTIHGSLRVTVQGEVIEQSFGEEHLCFRTLQRYTAATLEHSMCPPASPEPEWRELLNEMAVAATKEYRSIVFHEPRFVEYFRLATPELEYGRMNIGSRPSKRKPSGGIESLRAIPWIFAWTQTRFHLPVWLGFGAAFKHVIDKDIKNLLMLQEMYTRWPFFRVTIDLVEMVFAKGDPGIAALYDKLLVSEDLWPFGEQLRNNYNETKNLLLQVAGHKDLLEGNPYLRQRLRLRDSYITTLNACQAYTLKRIRDPSYQVPVRPPIAKEIMEGSVSSANQLVKLNPTSEYAPGLEDTLILTMKGIAA

SEQ ID NO: 17697 - protein, 107 aa, Haemophilus somnus 2336
MLLIDGGGAVRRALIDANLAQLAADNGWEGIIVYGAIRQLQQLENINIGIQALAPIPVGSDEQSIGETDVPVNFGGVTFFPDDYIYADLTGIILSQEPLDLEEFDSL

SEQ ID NO: 17698 - protein, 347 aa, Candidatus Protochlamydia amoebophila UWE25
MNQRTGILLVNLGTPKTPRPKDVYRYLNEFLTDGRVIDLPWLKRQLLVRCIIVPFRYKQSSMLYQKLWTAEGSPLLVHGIAVQTKLQMILGESFQVELAMRYQNPSIEEGLERLKLANVKEIVIFPLFPQYASATTGSVHQEVMKHLQQWQNIPTLTFINSYPDHPGLVGAFCERAKQYDLSIYDYFLFSFHGLPERQIRKGDSTGKCLTENCCQVICSDNAFCYKAQCYRTAKAIASKLRIKLEQYTVCFQSRLGKETWIQPYTSDLLKDCLAKNRKKILVFCPAFVCDCLETTCEVSIEYAEEFKHLGGDTLHLVEGLNSHPVWIEAIKTIIQEHLPHPHSQFSR

SEQ ID NO: 17699 - protein, 356 aa, Zea mays
MVSLRCTTAHHSLLGSPTCLARPRRRPCPVVRAAVAVEAGAQAKVSLIRIGTRGSPLALAQAHETREKLKAAHSELAEEGAIEIVIIKTTGDMILDKPLADIGGKGLFTKEIDDALLQGRIDIAVHSMKDVPTYLPEGTILPCNLPREDVRDAFICLTANSLAELPAGSVVGSASLRRQSQILYRYPSLKVVNFRGNVQTRLRKLKEGDVSATLLALAGLRRLNMAENATAVLSVEEMLPAVAQGAIGIACRSNDDKMMEYLSSLNHEDTRLAVTCEREFLAVLDGNCRTPIAAYAYRDKDGNCSFRGLLSSPDGSKVFETARSGPYSFDDMVEMGKDAGHELKAKAGPGFFDSLQ

SEQ ID NO: 17700 - protein, 445 aa, Kluyveromyces lactis NRRL Y-1140
MGKSTDKKVSKKVSKKDLKLKKKQDEKKVKAVEPESSSDSSSDSSSDSSSDSSSDSSSDSDSSSSSDSSDSSDEEEEPKKETKKEESSSDSESSSDSDSESEKEEAKKEESSDSDSSSDSSSDSDSDSDEEEEKKEEKKKEESSASSSDSDSSSDSDSSSDDDEEEEKSSNKRKADDDEEKSESKKPKTELAGEPATIFVGRLSWSIDDEWLKTEFEPIGGVISARVMYERGTDRSRGYGYVDFEDKSYAEKAIKEMHGKEIDGRPINCDMSTSKPAGAPRDDRAKKFGDVPSEPSDTLFLGNLSFEADRDNLYEIFGKYGEIVSVRIPTHPETEQPKGFGYVQYGSIEDATKAFEGLQGEYINNRPVRLDYSIPKQNFGNNQRGGFNRGGSDRGGRGGRGGSRGGRGGFGGNRGGREFSSGSNASPLGATRQTASFQGTKKTFD

SEQ ID NO: 17701 - protein, 500 aa, Glycine max
  misc_feature (151)..(151): Xaa can be any naturally occurring amino acid
MSLPACPAEQLAQLLGPNTTDASAAASLICGQFAAVDSKFVDTAFAVDNTYLLFSAYLVFSMQLGFAMLCAGSVRAKNTMNIMLTNVLDAAAGGLFYYLFGFAFAFGSPSNGFIGKHFFGLKDIPSSSYDYSYFLYQWAFAIAAAGITSGXIAERTQFVAYLIYSSFLTGFVYPVVSHWFWSPDGWASAFKITDRLFSTGVIDFAGSGVVHMVGGIAGLWGALIEGPRMGRFDHAGRAVALRGHSASLVVLGTFLLWFGWYGFNPGSFNKILLTYGNSGNYYGQWSAVGRTAVTTTLAGSTAALTTLFGKRVISGHWNVTDVCNGLLGGFAAITAGCSVVEPWAAIVCGFVASIVLIACNKLAEKVKFDDPLEAAQLHGGCGTWGVIFTALFAKKEYVKEVYGLGRAHGLLMGGGGKLLAAHVIQILVIAGWVSATMGPLFWGLNKLKLLRISSEDELAGMDMTRHGGFAYAYEDDETHKHGMQLRRVGPNASSTPTTDE

SEQ ID NO: 17702 - protein, 308 aa, Clostridium acetobutylicum ATCC 824
MKKEKILDLVIIGAGPAGLTAGIYSSRAKLDFIILENELVGGQIRETPSIENFPGFDSISGADLADKMQEHAEKAGAVIDEFGNITSVKLTDTEKIIETSDTIYKPKSVIIATGSKSRPLPVPEEKKLRGKGIHYCELCDGAMYDGKDIVVVGGGNSAIDAAIFLTKYAKNLTVVHRSEKLRAEMRSQDELFKHNNVKLLLNTQIKHVEGENSIENIVLENSKTGEKSSLKADAIFVYIGTMPKTELFKDFIDLTELGHIKTNENLETNIKGVFAAGDVREKEIRQLTTAVNDGSIASLMAEKYIRNS

SEQ ID NO: 17703 - protein, 356 aa, Neisseria meningitidis Z2491
MTKHIAILRGDGIGPEIVAETVRVLDKLIAQGLDVGYEYAPLGGEAYDEYGHPYPEFTQNLCRKADAVLLGAVGSPQYDNLDRPLRPERGLLAIRKDLNLFANLRPAILYPELANASTLKSEIVAGLDILIVRELTGDIYFGEPRGIRVLENGEREGYNTMKYSESEIRRIAHVAFQSAQKRSKKVCSVGKANVLETTELWREIFEEIGKEYPDVELSHMYVDNAAMQLVRAPKQFDVIATGNIFGDILSDEASMLTGSIGMLPSASLDENGKGLYEPSHGSAPDIAGQNKANPLATVLSLAMLLRYSLNDEARAQQVENAVQKVLQQGLRTGDIYEEGTKLVSCSEMGDAVLATL

SEQ ID NO: 17704 - protein, 449 aa, Wolinella succinogenes
MPYIQQTLEQLQKTFPAQKEFHQAVHEVLDSLRPLLAKESKYERYNILQRIVIPERQIGFRVTWMDDAGRIQVNQGYRIQYNSTLGPYKGGIRLHPSVNEGIIKFLGFEQIFKNALTGLAMGGAKGGSDFDPKGKSEAEVMRFAQAFMSELYRHIGPLTDVPAGDIGTGAREIGYLFGQYKKLVNRYEGVLTGKSLLWGGSLARKEATGFGSVYFAEEMLRERGESLEGKTCLVSGSGNVAIYTVQKLLELGAKPITVSDSTGMIHDASGIDLDLLKEIKENRRESLTSYAKEHPGSRFISVGEYPKDHNPLWAIPCFAAFPSATQNELNEKDAKHLLQNGCICVSEGANMPSTPSAVEKFLAAKICYGPGKAANAGGVATSGLEMSQNASMTSWSFEEVDMKLHGIMRGIYRAAKETAKEFGEPHNLVLGANIAGFRKVADAMIEQGI

SEQ ID NO: 17705 - protein, 378 aa, Arabidopsis thaliana
MTKMSNLPNDLAEEVLSRVSLTSLRNVRLTCKDWNTLSKGESFAKNHLGYQAIVAAKEKEFMMVLMMDFRVYLIRVNVHNDIESCIKPEGELISLGDEVDVSQVFHCDGLLLCITEDNEDNAKVVLWNPYWGQTRWIESTNNFHKLDMYTYALGYKKSSKSSRSYKILRFIDFSPTCSEFKIYNINSDSWKVLDVSPDWKIDSYIRGVSLKGNTYWIARERHGYGHTFLVCFDFTRERFRSRLPLPSQPCVLDTVSLSSVREEQLAVLFQCSSTLEMQIWVTTKIEPNAVLWNSKVFLAVDMHSLKFQFQVRASSFFIDEEKRVVVVFDKEKRYLASSRNKAYIVGVDGTWEQVDLGMSVDKFVYPLVCSYVPSLVHF

SEQ ID NO: 17706 - protein, 106 aa, Zymomonas mobilis subsp. mobilis ZM4
MSVINVTDASFEADVLKSPVPVVVDFWAEWCGPCRQIAPALGEIASELEGKMTLAKVEVDNNIETASRFGIRNIPTLLLFKNGEVVATRTGGAPKSQLKSWIESSL

SEQ ID NO: 17707 - protein, 64 aa, Glycine max
GVVELVSDFVVCDEGKPLSPEAARILRLMGIKMATFRLNLICRWSPDEFELYIDGPDESDIECS

SEQ ID NO: 17708 - protein, 300 aa, Corynebacterium glutamicum
MLADRRVQLYDDEDIDRILLRGGTILGTGRLHPDKFKAGIDQIKANLEDAGIDALIPIGGEGTLKGAKWLSDNGIPVVGVPKTIDNDVNGTDFTFGFDTAVAVATDAVDRLHTTAESHNRVMIVEVMGRHVGWIALHAGMAGGAHYTVIPEVPFDIAEICKAMERRFQMGEKYGIIVVAEGALPREGTMELREGHIDQFGHKTFTGIGQQIADEIHARLGHDVRTTVLGHIQRGGTPTAFDRVLATRYGVRAARACHEGSFDKVVALKGERIEMITFEDAVGTLKEVPFERWVTAQAMFG

SEQ ID NO: 17709 - protein, 513 aa, Apium graveolens var. dulce
MITGEVSVDSYDTNKPKPKRNKYAFACALLASMNSILLGYDTGVLSGASIYIKEDLHFSDVQIEIIIGIINIYSLLGSAIAGRTSDWIGRRYTMVLAGIIFFLGAIFMGLATNFAFLMFGRFVAGIGVGYAMMIAPVYTAEVAPSSSRGFLTSFPEVFINSGVLLGYVSNFAFAKCPLWLGWRIMLGIGAFPSVALAIIVLYMPESPRWLVMQGRLGEARTVLEKTSTSKEEAHQRLSDIKEAAGIDKDCNDDVVQVPKRTKDEAVWKELILHPTKPVRHAAITGIGIHFFQQACGIDAVVLYSPRIFEKAGIKSNSKKLLATIAVGVCKTVFILISTFQLDKIGRRPLMLTSMGGMVIALFVLAGSLTVINKSHHTGHWAGGLAIFTVYAFVSIFSSGMGPIAWVYSSEVFPLRLRAQGCSIGVAVNRGMSGIIGMTFISMYKAMTIGGAFLLFAVVASIGWVFMYTMFPETQGRNLEEIELLFGSYFGWRKTLKDLKAKEAAEAKSRESEV

SEQ ID NO: 17710 - protein, 540 aa, Corynebacterium glutamicum
MADISTTQAWQDLTDHYSNFQATTLRELFKEENRAEKYTFSAAGLHVDLSKNLLDDATLTKLLALTEESGLRERIDAMFAGEHLNNTEDRAVLHTALRLPAEADLSVDGQDVAADVHEVLGRMRDFATALRSGNWLGYTGHTIKKIVNIGIGGSDLGPAMATKALRAYATAGISAEFVSNVDPADLVSVLEDLDAESTLFVVASKTFTTQETLSNARAARAWLVEKLGEEAVAKHFVAVSTNAEKVAEFGIDTDNMFGFWDWVGGRYSVDSAVGLSLMAVIGPRDFMRFLGGFHAMDEHFRTTKFEENVPILMALLGVWYSDFYGAETHAVLPYSEDLSRFAAYLQQLTMESNGKSVHRDGSPVSTGTGEIYWGEPGTNGQHAFFQLIHQGTRLVPADFIGFARPKQDLPAGERTMHDLLMSNFFAQTKVLAFGKNAEEIAAEGVAPELVNHKVMPGNRPTTTILAEELTPSILGALIALYEHIVMVQGVIWDINSFDQWGVELGKQQANDLAPAVSGEEDVDSGDSSTDSLIKWYRANR

SEQ ID NO: 17711 - protein, 227 aa, Triticum turgidum subsp. durum
MEFQGQHDNPANRVDEYGNPFPLAGGVGGAHAAPGTGGQFQAHRGEHKTGGILHRSGSSSSSSSSEDDGMGGRRKKGMKEKIKEKLPGGHGDQQHTGGTYRQQGTGMVGTGGTYGQKGHTGMTGTGGTYGQQGHTGMTGTGGTYGQQGHTGMTGTGGTYGQQGHTGMAGTGAHGTTATGGTYGQPGHTGMTGTGAHGTGGTYGQHGTDTGEKKGIMDKIKEKLPGQH

SEQ ID NO: 17712 - protein, 616 aa, Arabidopsis thaliana
MGCLRSLVRRKQFDSSNGKAETHHHHQQLAKALTFPHLIAIGVGSTIGAGVYILVGTVAREHSGPALALSFLIAGISAALSAFCYAELSSRFPSAGSAYHYSYICIGEGVAWLIGWALILEYTIGGSTVARGISPNLAMIFGGEDCLPTILARHQIPGLDIVVDPCAAVLVFIVTGLCCLGVKESTFAQGIVTTANVFVMIFVIVAGSYLCFKTGWVGYELPTGYFPYGVDGMLTGSATVFFAYIGFDTVASMAEEVKNPRRDLPLGIGISLLLCCLLYMMVSVVIVGLVPYYAMDPDTPISSAFSSHGIQWAAYLINLGAVMALCSALMGSILPQPRILMAMARDGLLPSYFSYVNQRTQVPINGTITTGVCAAILAFFMDVSQLAGMVSVGTLVAFTMVAISLLIVRYVVPPDEVLIRLELVPLPSSLQENSSSHVGTSIRSKQPLLGKVDDSVVDKENAPGSWVLNKKNRRKFAGWSIMFTCIGNFLLSYAASSFLLPGLLRYSLCGVGGLFLLVGLIVLICIDQDDARHSFGHSGGFICPFVPLLPIVCILINMYLLVNLGAATWVRVSVWLFLGVVVYIFYGRRNSSLVNAVYVSTAHLQEIRRTSGHSLA

SEQ ID NO: 17713 - protein, 123 aa, Triticum aestivum
MASTAAGEETVRASHILIKHEGSRRKASWKDPEGRVISATTRADAAARLGDLRAQILAGRASFADLAAQHSDCSSARRGGDLGTFGRRQMQKPFEDATYALKVGEISDIIDTESGVHIILRTA

SEQ ID NO: 17714 - protein, 108 aa, Triticum aestivum
IYRYSDAKDRLEFMERTLKWRHLAPTAPNSLGCYPYTDKDPFLVETCPHVYFVGNQDRYETRLLKGTEKQQVRLISIPRFCESGIAVMLNLRNLECSTLSFSTSFEDA

SEQ ID NO: 17715 - protein, 365 aa, Kalanchoe streptantha
SDSGKDAGRLSAAWQLYKAQEELIEVAKQHGVKLTMFHGRGGTVGRGGGPTHLAILSQPADTIQGSLRVTIQGEVIERSFGEAQLCFKTLQRYTAATLEHGMIPPLTPKQEWRALMDDMAVVATERYRSIVFREPRFVEYFRLATPELEYGRMNIGSRPSKRKPSGGIESLRAIPWIFAWTQTRFHLPVWLGFGEAFRHVMDKDSKNLLMLQQMYNEWPFFRVTIDLVEMVFAKGNPGIAALYDKLLVSEELLPLGEELRTAYNDTKSYLLKITGHNEILEGDPFLKQRLKLRNAYITTLNVCQAYTLKRIRDPSYQVPVRPPIAKEIMEGSVSSANQLVKLNPTSEYAPGLEDTLILTMKGIAA

SEQ ID NO: 17716 - protein, 98 aa, Arabidopsis thaliana
  misc_feature (83)..(84): Xaa can be any naturally occurring amino acid
TPPQRTMATTVTLKSVTGLRQSSSDQTYVASHVSSSLSRSQRRNSLRVIAARATPKLSNHKLRVTVIGGGLARGAAAETLSEXXINTILSDRTMDTCK

SEQ ID NO: 17717 - protein, 364 aa, Kalanchoe streptantha
SDSGKDAGRLSAAWQLYKAQEDLVKVAKEFGVKLTMFHGRGGTVGRGGGPTHLAILSQPPDTIHGSLRVTVQGEVIEQSFGEEHLCFRTLQRYTAATLEHSMCPPASPEPEWRELLDEMAVAATKEYRSIVFHEPRFVEYFRLATPELEYGRMNIGSRPSKRKPSGGIESLRAIPWIFAWTQTRFHLPVWLGFGAAFKHVIDKDIKNLLMLQEMYTRWPFFRVTIDLIEMVFAKGDPGIAALYDKLLVSEDLWPFGEQLRNNYNETKNLLLQVAGHKDLLEGNPYLRQRLRLRDSYITTLNACQAYTLKRIRDPNYHVTVRPHLSKEIMESHKAAAELVKLNPTSEYAPGLEDTLILTMKGIAA

SEQ ID NO: 17718 - protein, 471 aa, Methanopyrus kandleri AV19
MEYGCLIGGEWLEGDREIVVENPYDGSEVGRVLAPEVDVEALLKDAREGQRRWRERPTYEVREALAEAAHLLKKHEDELAELIALEGGKPIRDARYEVYRTREVLRLSAAEAERLYGETLPGDAQRGRTAELILTVREPVGVVLSITPYNFPLLLPTHKLGPALAARCSVVHKPATVTPLSSLRLAEILLDAGVEPLALQVVVGPGAELGEELARADFDALSFTGSRSVGEHLREISPIPRITLELGGNDPVIVDETADVEAAAEAAVRGACYHAGQVCIAVERAIVVEDVYEEFLEAAVEVAESLKVGDPLDEDTDVGPLIDDGAVEKVRRHVEDAVERGAEILTGGEPEGRLFPPTVLADVPEDALVAREETFGPVLPVIRAKDFEEAIRIANSTDYGLHAAVFTERLDRAVKATRKLEAGGVIVNESTIYRADYMPFGGVKASGVGREGVPQAVREFTEEKTVVIGRR

SEQ ID NO: 17719 - protein, 406 aa, Bartonella henselae
MTTEIRVPTLGESVTEATVGKWFKKLGEAVAVDEPLIELETDKVTVEVPSPVAGKLSEIIAKEGDTVEVKALLGLVEAGAAGISQSFSPSATPIPEVPSELKQSSSSGAMQKDTMPPSPSAAKLMAENNIAKSNISGSGKRGQILKEDVLGVLEQEVKAPSVSAASSSASLVQEKHEERVRMTKLRQTIARRLKDAQNTAAMLTTFNEVDMSAVMDLRKRYKDLFEKKHGVKLGFMGFFTKAVCHALKELPAVNAEIDGTDIVYKNYVNVGIAVGTDKGLVVPVVRHADQMSLAEIEKEIGRLGRLARDGKLAVSDMQGGTFTITNGGVYGSLMSTPILNAPQSGILGMHAIKERAMVVGGQIVIRPMMYLALSYDHRIVDGQEAVTFLVRVKESLEDPERLVLDL

SEQ ID NO: 17720 - protein, 264 aa, Debaryomyces hansenii CBS767
MSLKPANKIPAVFYVNAALFDCDGTLVNSTGAISEFWRGFAETRPHVDADEIIKTSHGCRTFDVIAKWSPDDAVEKQVTEWEASIPESFGQYAKPIPGAVELVKRFDEISRTQTDNKHQRWAIITSGTLPLASKWLKLLTIEKPDCFITAEKVAQGKPHPQGYQSARENLGYDAPHKKVVVFEDAPAGIKAGKGAGAMIVGICSTYDPEKVWESGADIVVKDLSSFEIDHYNPETDEFRVVVNEYYYANEQYTIRRKSLVGLEV

SEQ ID NO: 17721 - protein, 365 aa, Kalanchoe petitiana
SDSGKDAGRLSAAWQLYKAQEELIEVAKQHGVKLTMFHGRGGTVGRGGGPTHLAILSQPADTIRGSLRVTIQGEVIERSFGEAQLCFKTLQRYTAATLEHGMIPPLTPKQEWRALMDEMAVVATERYRSIVFKEPRFVEYFRLATPELEYGRMNIGSRPSKRKPSGGIESLRAIPWIFAWTQTRFHLPVWLGFGEAFKHLINKDNKNLLMLQQMYNEWPFFRVTIDLVEMVFAKGNPGIAALYDKLLVSEELLPLGEQLRTAYNDTKSYLLKITGHNEILEGDPFLKQRLKLRNAYITTLNVCQAYTLKRIRDPSHQVPLRPPIAKEVMGGSISSANQLVKLNPTSEYAPGLEDTLILTMKGIAA

SEQ ID NO: 17722 - protein, 269 aa, Triticum aestivum
AYLGDSIEQVCTKKQAGTGPEFPGYRRPTRPPDQALMLQSPIALPKAVKNPMELTGLRKAHIRDGAAVVQYLAWLDNQMQENYGASGYFSEANGSQKKEHLEIKLTEVSVSDKLEAFRAEKEHFKGLSFPTISSVGPNAAIIHYSPEANTCAELDADKIYLCDSGAQYLDGTTDITRTVHFGKPSEHQKLCYTAVLKGHIALDAAVFPNGTTGHALDILARTPLWKSGLDYRHGTGPGIGSLFDVPESPHLISFKPSARNVPLQASMTG

SEQ ID NO: 17723 - protein, 947 aa, Staphylococcus aureus
MNNKKTATNRKGMIPNRLNKFSIRKYSVGTASILVGTTLIFGLSGHEAKAAEHTNGELNQSKNETTAPSENKTTKKVDSRQLKDNTQTATADQPKVTMSDSATVKETSSNMQSPQNATANQSTTKTSNVTTNDKSSTTYSNETDKSNLTQAKDVSTTPKTTTIKPRTLNRMAVNTVAAPQQGTNVNDKVHFSNIDIAIDKGHVNQTTGKTEFWATSSDVLKLKANYTIDDSVKEGDTFTFKYGQYFRPGSVRLPSQTQNLYNAQGNIIAKGIYDSTTNTTTYTFTNYVDQYTNVRGSFEQVAFAKRKNATTDKTAYKMEVTLGNDTYSEEIIVDYGNKKAQPLISSTNYINNEDLSRNMTAYVNQPKNTYTKQTFVTNLTGYKFNPNAKNFKIYEVTDQNQFVDSFTPDTSKLKDVTDQFDVIYSNDNKTATVDLMKGQTSSNKQYIIQQVAYPDNSSTDNGKIDYTLDTDKTKYSWSNSYSNVNGSSTANGDQKKYNLGDYVWEDTNKDGKQDANEKGIKGVYVILKDSNGKELDRTTTDENGKYQFTGLSNGTYSVEFSTPAGYTPTTANVGTDDAVDSDGLTTTGVIKDADNMTLDSGFYKTPKYSLGDYVWYDSNKDGKQDSTEKGIKGVKVTLQNEKGEVIGTTETDENGKYRFDNLDSGKYKVIFEKPAGLTQTGTNTTEDDKDADGGEVDVTITDHDDFTLDNGYYEEETSDSDSDSDSDSDSDSDSDSDSDSDSDSDSDSDSDSDSDSDSDSDSDSDSNSDSDSDSDSDSDSDSDSDSDSDSDSDSDSDSDSDSDSDSDSDSDSDSDSDSDSDSDSDSDSDSDSDSDSDSDSDSDSDSDSDSDSDSDSDSDSDSDSDSDSDSDSDSDNDSDSDSDSDSDAGKHTPAKPMSTVKDQHKTAKALPETGSENNNSNNGTLFGGLFAALGSLLSFGRRKKQNK

SEQ ID NO: 17724 - protein, 365 aa, Kalanchoe grandiflora
  misc_feature (115)..(115): Xaa can be any naturally occurring amino acid
  misc_feature (117)..(117): Xaa can be any naturally occurring amino acid
  misc_feature (146)..(146): Xaa can be any naturally occurring amino acid
  misc_feature (148)..(148): Xaa can be any naturally occurring amino acid
SDSGKDAGRLSAAWQLYKAQEELIEVAKQHGVKLTMFHGRGGTVGRGGGPTHLAILSQPADTIQGSLRVTIQGEVIERSFGEAQLCFKTLQRYTAATLEHGMIPPLTPKQEWRAXMXEMAVVATERYRSIVFREPRYVEYFRLATXEXEYGRMNIGSRPSKRKPSGGIESLRAIPWIFAWTQTRFHLPVWLGFGEAFRHIIDKDNKNLLMLQQMYNEWPFFRVTIDLVEMVFAKGNPGIAALYDKLLVSEELLPLGEQLRTGYNDTKSYLLKITGHNEILEGDPFLKQRLKLRNAYITALNVCQAYTLKRIRDPSYRVPVRPPIAKEIMEGSDSSANQLVKLNPTSEYAPGLEDTLILTMKGIAA

SEQ ID NO: 17725 - protein, 449 aa, Pseudomonas putida KT2440
MSTMIESVDNFLARLKQRDPGQPEFHQAVEEVLRTLWPFLEANPHYLQSGILERMVEPERAVLFRVSWVDDQGKVQVNRGYRIQMSSAIGPYKGGLRFHPSVNLSVLKFLAFEQVFKNSLTSLPMGGGKGGSDFDPKGKSDAEVMRFCQAFMSELYRHIGADCDVPAGDIGVGAREIGFMFGQYKRLANQFTSVLTGKGMTYGGSLIRPEATGYGCVYFAEEMLKRQDKRIDGRRVAVSGSGNVAQYAARKVMDLGGKVISLSDSEGTLYAEAGLTDAQWDALMELKNVKRGRISELAGQFGLEFRKGQTPWSLPCDIALPCATQNELGAEDARTLLRNGCICVAEGANMPTTLEAVDIFLDAGILYAPGKASNAGGVAVSGLEMSQNAMRLLWTAGEVDSKLHNIMQSIHHACVHYGEEADGRINYVKGANIAGFVKVADAMLAQGVV

SEQ ID NO: 17726 - protein, 1315 aa, Staphylococcus aureus
MLNRENKTAITRKGMVSNRLNKFSIRKYTVGTASILVGTTLIFGLGNQEAKAAESTNKELNEATTSASDNQSSDKVDMQQLNQEDNTKNDNQKEMVSSQGNETTSNGNKLIEKESVQSTTGNKVEVSTAKSDEQASPKSTNEDLNTKQTISNQEALQPDLQENKSVVNVQPTNEENKKVDAKTESTTLNVKSDAIKSNDETLVDNNSNSNNENNADIILPKSTAPKRLNTRMRIAAVQPSSTEAKNVNDLITSNTTLTVVDADKNNKIVPAQDYLSLKSQITVDDKVKSGDYFTIKYSDTVQVYGLNPEDIKNIGDIKDPNNGETIATAKHDTANNLITYTFTDYVDRFNSVQMGINYSIYMDADTIPVSKNDVEFNVTIGNTTTKTTANIQYPDYVVNEKNSIGSAFTETVSHVGNKENPGYYKQTIYVNPSENSLTNAKLKVQAYHSSYPNNIGQINKDVTDIKIYQVPKGYTLNKGYDVNTKELTDVTNQYLQKITYGDNNSAVIDFGNADSAYVVMVNTKFQYTNSESPTLVQMATLSSTGNKSVSTGNALGFTNNQSGGAGQEVYKIGNYVWEDTNKNGVQELGEKGVGNVTVTVFDNNTNTKVGEAVTKEDGSYLIPNLPNGDYRVEFSNLPKGYEVTPSKQGNNEELDSNGLSSVITVNGKDNLSADLGIYKPKYNLGDYVWEDTNKNGIQDQDEKGISGVTVTLKDENGNVLKTVTTDADGKYKFTDLDNGNYKVEFTTPEGYTPTTVTSGSDIEKDSNGLTTTGVINGADNMTLDSGFYKTPKYNLGNYVWEDTNKDGKQDSTEKGISGVTVTLKNENGEVLQTTKTDKDGKYQFTGLENGTYKVEFETPSGYTPTQVGSGTDEGIDSNGTSTTGVIKDKDNDTIDSGFYKPTYNLGDYVWEDTNKNGVQDKDEKGISGVTVTLKDENDKVLKTVTTDENGKYQFTDLNNGTYKVEFETPSGYTPTSVTSGNDTEKDSNGLTTTGVIKDADNMTLDSGFYKTPKYSLGDYVWYDSNKDGKQDSTEKGIKDVKVTLLNEKGEVIGTTKTDENGKYCFDNLDSGKYKVIFEKPAGLTQTGTNTTEDDKDADGGEVDVTITDHDDFTLDNGYYEEETSDSDSDSDSDSDSDRDSDSDSDSDSDSDSDSDSDSDSDSDSDSDRDSDSDSDSDSDSDSDSDSDSDSDSDSDSDSDSDSDSDSDSDSDSDSDSDSDSDSDSDSDSDSDSDSDSDSDSDSDSDSDSDSDSDSDAGKHTPVKPMSTTKDHHNKAKALPETGNENSGSNNATLFGGLFAALGSLLLFGRRKKQNK

SEQ ID NO: 17727 - protein, 869 aa, Leptospira interrogans serovar Lai str. 56601
MNIFKIESQSSGFFAIIHLTIKKELLSKMIKSLRISCIFFILISFLTFLLNCSQFKQNNPIASNGVIDLSTWNPNIESINLKGNWEFCWDQWIPPNAEESQWKENCNGFYPAPAYWKFYNIPGKNLSPFGKATYRLKVILPTSFHDSYGIRWTEILSAFQIFINNKSVAQIGVLGTDFNTMTPKLKPDRTEIGPQNNQMTIVIWVSNFNHQNHGFWQPIYLGKWEIIRNTQVSHLMMDIASFASVALIGFYHLVLFLFRTRSKEYLFFGLFCISMGIRQLSVEDHAFIIFFPDIDFDFYIRFIYFTVLSIGIFMCMFIKSLFPEEVSSFFINSAIGVFGCSSFTLALPVRVFTEFFSIIFVLISFLPLGLTTYLFKAHKMKRKGATLILIAYLIFSTVVLNDILFTLGYISTGYISYIGITVFIFFQAGVLAQQLTQAFNHSEDLALELKSTLQENIETHNELLALKELQNTNLEFQVQSRTRELLKARDDAEFANKVKSQFLASMSHEIRTPLNGIIGLIEQFKSTPLDESQQHIRNLIQKSGENLLKIINDILDFSKLEEDKINLELHEFYWKETVEETIGIFLYQATQKGLVLSVDYSPDFIDKSVGDKRRITQVLSNLISNAVKFTDSGKIQIRAFSEKIETKIEYKIQVIDSGIGIPREKIDLLFQKFFQLDSSISRKYGGTGLGLAISKKLVELMNGKIHVSQNKSKGSTFEFTVLLSEFVSKDHSTYLPEITDLSSLSPDTFILIAEDDSTNIFLLSGILKKLKIKFELAKDGLEAITKVRVSRFDLIFMDINMPHLDGISASNFILTDPMISPKPVIIAVTADVLQEDKIKCRQAGMSDFLGKPYYKKDIEQMIYKWLVIH

SEQ ID NO: 17728 - protein, 472 aa, Blastopirellula marina DSM 3645
MATEVKLPELGDGIDSGDILSVYVSEGDVVTKNQNILELETDKATVEIPTNVAGKVTKVHVKTGDAVPIGGALISVEASEGAAKEESKPAPAPKKEAEAPKAEAKKAEPAPKAEAPKAEPPKPAPAAAKPAPTPEPAVTYAAPVARAATSSADLIYQEEDDVPAGPAIRRFAREVGVDLRRVRGTGNNGRVTRDDVLATVRELSQGGAPTLTAVAPAKADKPTTTPAVTPPGEQGEDAYGPVRIEKMAKIRKTIANQMVMSWTTAPRVTNFDDADVTALEALRQQSKDDYASAGVKLTSMSFLVKAVALALRNNPAINALIDMENNQVVYKEYVNVGIAVDSERGLVVPNIRNADRLAIPEIARDVQKLAADVRGGTFSMDQIRGGTFTISNLGAIGGTYSTPIINVPEVAILLVGRSRKLPVVVNDQIVPRMMMPLSLSYDHRLVDGATAARFLNEIKSYLEAPSRLLLAP

SEQ ID NO: 17729 - protein, 1166 aa, Staphylococcus aureus
MINRDNKKAITKKGMISNRLNKFSIRKYTVGTASILVGTTLIFGLGNQEAKAAENTSTENAKQDDATTSDNKEVVSETENNSTTENNSTNPIKKETNTDSQPEAKKESTSSSTQKQQNNVTATTETKPQNIEKENVKPSTDKTATEDTSVILEEKKAPNNTNNDVTTKPSTSEPSTSEIQTKPTTPQESTNIENSQPQPTPSKVDNQVTDATNPKEPVNVSKEELKNNPEKLKELVRNDSNTDHSTKPVATAPTSVAPKRVNAKMRFAVAQPAAVASNNVNDLIKVTKQTIKVGDGKDNVAAAHDGKDIEYDTEFTIDNKVKKGDTMTINYDKNVIPSDLTDKNDPIDITDPSGEVIAKGTFDKATKQITYTFTDYVDKYEDIKSRLTLYSYIDKKTVPNETSLNLTFATAGKETSQNVTVDYQDPMVHGDSNIQSIFTKLDEDKQTIEQQIYVNPLKKSATNTKVDIAGSQVDDYGNIKLGNGSTIIDQNTEIKVYKVNSDQQLPQSNRIYDFSQYEDVTSQFDNKKSFSNNVATLDFGDINSAYIIKVVSKYTPTSDGELDIAQGTSMRTTDKYGYYNYAGYSNFIVTSNDTGGGDGTVKPEEKLYKIGDYVWEDVDKDGVQGTDSKEKPMANVLVTLTYPDGTTKSVRTDANGHYEFGGLKDGETYTVKFETPTGYLPTKVNGTTDGEKDSNGSSVTVKINGKDDMSLDTGFYKEPKYNLGDYVWEDTNKDGIQDANEPGIKDVKVTLKDSTGKVIGTTTTDASGKYKFTDLDNGNYTVEFETPAGYTPTVKNTTADDKDSNGLTTTGVIKDADNMTLDRGFYKTPKYSLGDYVWYDSNKDGKQDSTEKGIKDVTVTLQNEKGEVIGTTKTDENGKYRFDNLDSGKYKVIFEKPAGLTQTVTNTTEDDKDADGGEVDVTITDHDDFTLDNGYFEEDTSDSDSDSDSDSDSDSDSDSDSDSDSDSDSDSDSDSDSDSDSDSDSDSDSDSDSDSDSDSDSDSDSDSDSDSDSDSDSDSDSDSDSDSDSDSDSDSDSDSDSDSDSDSDSDSDSDSDSDSDSDSDSDSDSDSDSDSDSDSDSDSDSDSDSDSDSDSDSDSDSDSDSDAGKHTPVKPMSTTKDHHNKAKALPETGSENNGSNNATLFGGLFAALGSLLLFGRRKKQNK

SEQ ID NO: 17730 - protein, 318 aa, Haemophilus influenzae Rd KW20
MSDIKHAKLLILGSGPAGYTAAIYAARANLKPVLVTGLQQGGQLTTTDEIENWPGDFEMTTGSGLMQRMLQHAEKFETEIVFDHINRVDLSSRPFKLFGDVQNFTCDALIIATGASARYIGLPSEENYKGRGVSACATCDGFFYRNKPVGVIGGGNTAVEEALYLANIASTVHLIHRRDSFRAEKILIDRLYKKVEEGKIVLHTDRTLDEVLGDNMGVTGLRLANTKTGEKEELKLDGLFVAIGHSPNTEIFQGQLELNNGYIVVKSGLDGNATATSVEGVFAAGDVMDHNYRQAITSAGTGCMAALDAERYLDAQEA

SEQ ID NO: 17731 - protein, 857 aa, Thermus sp.
MSDPFEALKAEVDLLGRLLGEAIRKVSGERFFALVEEVRLLSKARRQGDGAAAEVLSQRVERMPVEEMEALVRAFTHYFHLVNLAEERHRVRVNRLRTEGETLENPRPEGFLALAKALKERGLSLEEAEAHLNRLALLLTFTAHPTETRRRTLRHHLERLQEELEGGDRERLLARVVLLYATEEVRKARPSVEDEIKGGLYYLPTTLWRAIPKVVEGLEAALERVYGKRPHLRSPVRFRSWMGGDRDGNPYVTPEVTAFAGRYAREVAKGRYLEELEALVRDLSLSEARIPVPKEVREGGEGVERFPGEPYRRYFAALYRALEGEALSTEGLARALKVAEKGLEGVGLAQVAQAFLRPLEARLSAFGLELAPLDLREESGKLLEAAAELLRLGGVHPDFLALSPEEKEALLTEELKTARPLLPVGEVPQGEALRVAIGAIRAWGDKGAHVVSMTHHPADLLAVFLLAREVGLYRPGKPLPFDVVPLFETLEDLERAPEVLRRLLANPVFRAHAQGRGGVEVMIGYSDSMKDAGFLMANLALYQAQEALHAVGEAQGIPVFFFHGRGTSTARGGGPAGRAIAGLPPKSVGHRLRLTEQGEALADRYAHPDLAVRHLEQLLYHFAQAALGDGVEPKAHWREALGEAGERSMARYRALLSQEGFFPFFEAFTPIREIGELPIASRPVYRHGRVRDIRDLRAIPWVMAWTQVRLLLPGWYGLSALEGLPMPLLREMYREWPFFATTLESAAMALAKADLGIAERYLKLVPEGLQGFYHHLAEEYRRTVALLEAIFEAPLLHNQKTLERQIALRNPYVDPINFVQVELLARYRAPGGREDEGVRRALLLSLLGVAAGLRNAG

SEQ ID NO: 17732 - protein, 542 aa, Crocosphaera watsonii WH 8501
MRTRCCPVLRNSWIPLSSPLLGYRSSSSAFRMTWLTTLMIISTTISYHTVVYLENETKPTGISDFVCSVFWRHLTMFNRKKIDIPRLQPSWRAIIGEFPPNQSSQSLWHCQGFSLVEGVPKLSKNKRFAVVGDVSLSNTDLLLKRLAINPSRWQEDHQTLIAWGWEELGKDCLHYLRGIFSFVVWDTHEKQGWAIRDRVGGRTLYYYQQDSTFYISPRLKNLSPYFKKNLDLIALRDYLCTGFIPGKRTLWQGVKELRPGTILSLPQEKIETYWTPQENISQSPLSFDKSSEILRELLETIIQEYLPPQEPVGVYLSGGLDSSCVTALAKQFHQETVHTYSIHFGEDYPNELEFSSLVAAHCQTKHHILAISPQEMWENLPITMANLDSPIGDPLTVPNYLLAQLAKQDVKVILNGEGSDPCFGGPKNQPMLLHSLYHNSEQKIDLLSSYLTSFKKCFLDLPNLLNPDIFKQVKDAPSVFEADLLSSADYLNRLMLLNIKFKGSDHILNKVNNLTLSGLLEGRSPLFDSRVVDKIFIHSSSL

SEQ ID NO: 17733 - protein, 159 aa, Arabidopsis thaliana
  misc_feature (41)..(41): Xaa can be any naturally occurring amino acid
MSDDEHHFESSDAGASKTYPQQAGNIRKGGHIVIKGRPCKXVVEVSTSKTGKHGHAKCHFVAIDIFTSKKLEDIVPSSHNCDVPHVNRVDYQLIDISEDGFVSLLTDNGSTKDDLKLPTDEALLTQLKNGFEEGKDIVVSVMSAIGEEQMCALKEVGPK

SEQ ID NO: 17734 - protein, 459 aa, Cryphonectria parasitica
MADVSQRTQQAVDTAMAGAAEMSRYGRRLLNMLWDPEPTNDRSLNRPVWCLGCSYTNEPTTVDRPDQDASSTVRATLPTTPSTTTLPYPLKAVPTTPPESSSSSFSSSLAYDELLEDAGWPIAFLDDFESRVWMTYRSEFEPISKSNDPRASAALSFAMRLRTLADQGGFSSDTGWGCMIRSGQSLLANTLVICQLGRDWRRGKAARQEREILARFADDPRAPYSLHNFVRHGAVACGKFPGEWFGPSATARCIQALANSNESSLRVYSTGDLPDVYEDSFMAVAKPDGETFHPTLILVGTRLGIDKINQVYWEALTATLQMPQSVGIAGGRPSASHYFIGAQRSGDAYEPGSYLFYLDPHCTRPALPFHEDVDQYTSDDINTCHTRRLRRLHVRDMDPSMLIGFLIKDEDDWDMWKDSVKYVQGKTIINVADHDPARGMPAEREAAIDEVETLKGEFV

SEQ ID NO: 17735 - protein, 934 aa, Rubrivivax gelatinosus PM1
MATAKTPRSADRGADKNRPLIEDIRLLGRILGDVIREQEGALAFELIERIRQLAVAYRLKRDTQAGRALDRLLKNLSVEQAVSVVRAFSYFSHLANLAEDRHHVRRREHHEQLGHVQEGSLAMSFERLAKRGVRATEIAELLGHAYLSPVLTAHPTEVQRKSVLDAERAVAELIGARDTLPTQRERAANEAMLRARVTQLWQTRLLRTSKLSVANEIDNALSYYQSTFLRQIPRLYAELEALLPGFEVAPFFRMGNWIGGDRDGNPNVTAETLRLALARHSETVLRFYLTEVHELGAELSISALLVQVTPELQALADRSGDHNAHRLDEPYRRALIGVYARLAGTLTALTGTEALRHAVAPSTPYATAEELLADLRTVEASLASHHGAALAAARLKPLIRAVQVFGFHLATVDLRQSSDQHEAVLAELMAGARIEADYAAMPEEAKVALLLGLLNDARSLQVRGAVYSERTRGELAIFEAAREGRALYGHAAIRHCIISHTETVSDLLEVLVLQKEAGLLQGTLDTDARCDLIVVPLFETITDLRQAAPIMREFYALPGVLPLVLRSGADQYCEQDVMLGYSDSNKDGGFFTSNWELYRAETALVELFEPLKREHGLTLRLFHGRGGTVGRGGGPSYQAILAQPPGTVNGQIRLTEQGEVIASKYANPEIGRRNLETLVAATLEATLLPPKRHAPKLFLDTADTLSQLSMAAYRKLVYETPGFADYFFAATPIREIAELNIGSRPASRKATRAIEDLRAIPWGFSWGQCRVALPGWYGFGSAVEGFLGDAPKQRKERLALLQRMHAQWPFFGTLLSNIDMVLAKSDLAIATRYVELVPDKRAAKKIFAAVQAEWQRTDAVLAAITGEPRRLAGNAALARSIEHRLPYIDPLNHLQVELMRRYRAQQGRGELHERVQRGIHMSINGVAAGLRNSG

SEQ ID NO: 17736 - protein, 498 aa, Rhizobium leguminosarum
MREIGHFIGGKQVAGTSGRVSNVYNPATGEVQATVALASVEELRAAVENAKAAQPKWAATNPQRRARVFFKFVELLNKHMDELAEILSKEHGKTIEDAKGDVIRGLEVCEFVCGIPHLAKGEFTEGAGPAIDMYSIRQPVGIGAGITPFNFPGMIPMWMFAPAIACGNAFILKPSERDPSLPIRLAELMIEAGLPAGILNVVNGDKGAVDAILTDPDIGAVSFVGSTPIARYVYGTAAMNGKRAQCFGGAKNHMIIMPDADLDQAVNALMGAGYGSAGERCMAISVAVPVGEETANRLVEKLTPKIESLRIGPYTDDKADMGPLVTKEAYTRVRGLIDRGIEEGAKLVVDGRDFKLQGYEDGYFVGGCLFDHVTPDMDIYKTEIFGPVLSVVRAQNYEEALSLPMKHEYGNGVAIFTRDGDAARDFASRINIGMIGINVPIPVPLAYHSFGGWKASSFGDLNQHGTDSIKFWTKTKTVTARWPSGIKSGAEFVMPTMK

SEQ ID NO: 17737 - protein, 398 aa, Pseudomonas putida KT2440
MFELVDNVPQSPVIKVIGVGGGGGNAVNHMVKSSIEGVEFICANTDAQALKNIGARTILQLGTGVTKGLGAGANPEVGRQAALEDRERIAEVLQGTNMVFITTGMGGGTGTGAAPIIAEVAKEMGILTVAVVTRPFPFEGRKRMQIADEGIRMLAESVDSLITIPNEKLLTILGKDASLLSAFAKADDVLAGAVRGISDIIKRPGMINVDFADVRTVMGEMGMAMMGTGCASGPNRAREATEAAIRNPLLEDVNLQGARGILVNITAGPDLSLGEYSDVGSIIEAFASDHAMVKVGTVIDPDMRDELHVTVVATGLGARIEKPVKVVDNTLQTAQQAYEASNPAPVRQEQPAVNYRDLERPTVMRNQAHAGAAAAAKLNPQDDLDYLDIPAFLRRQAD

SEQ ID NO: 17738 - protein, 317 aa, Rubrivivax gelatinosus PM1
MEASTQAWVIATRESRLALWQAEHVRALLGSRLVEPVELLGMTTRGDQILDRTLSKVGGKGLFVKELETALEAGDAHLAVHSLKDVPMDLPAGFVLAAVLEREDPRDAWVSPRYADLAALPAGAVVGTSSLRRLSQLRARRPDLRIEPLRGNLDTRLRKLDEGQYDAIVLAAAGLKRLGLAERIRSVFEADAMIPAAGQGALGIELRADAPERHPALWAALRALTHEPSWLAVHAERAVSRALGGSCSMPLAAHAQWQADGRLVLRAALGSVAEAAPALVHAEAGAAVADTAAAEALGLAVAQQLRQRGGDALLAAL

SEQ ID NO: 17739 - protein, 130 aa, uncultured archaeon
MQVVISDPKTGKAYKVEGKDTEAHALFIGKRIDDVVDADIIGLGGYVLEITGGSDKEGMPMRKDVSGTARRQILITSPPGYRPTENGKRRRKSVRGNEISTEISQINVKIKEYGSKPLEGLFGASEEGGS

SEQ ID NO: 17740 - protein, 759 aa, Dechloromonas aromatica RCB
MTAFRLGSLRVRLLAMLAAPLMVIFAAMFLVTLYERERRIESALEQLQRTAGQLVAEQARNVVEIKELLARLMTVDAIQGYATQPGHCSELLANELKAQRRLVNIGVVDLDGQLLCSAVSGSESLNVADRGYFINALKERDYVIGGPHVGRRVGRPVIPIAVALRDSSGKAIGVIFASLDVGWLNNELAKISRPETSRLGLIDNQGYVLARHPDPEGWVGRSAAETSFFKMLIQHGGSGLAEEVGFDGVPRIYALARFTDTLDGPIHFWLGADKESVTAAIDRQLVRTIAVSAALMLGFLCLAWFIADRWLVKPILAVATAARRLRSGDLDARTGLRRSNDELGELLEAFDHMAEDLAESDRNLRRQAVALERAKGDAEAASAAKSTFLANMSHEIRTPLNGILGMAHLIRRGGLTDEQAKRMDTLQVSSEHLLNIINTILELSKIEAGKFVLEETSVRIETLIANIASILQDRIQAKHLVLRTEVGALPANLLGDATRIQQALLNYAGNAVKFTETGSIALRVLPLEEDADSVLIRFEVQDTGIGIAPEVMPKLFTAFEQADATSTRKYGGTGLGLAITQKIAKLMGGDAGVESTLGVGSTFWFSVRLKKGKQASAMYGNQPMAEEILKRDYRGARILLAEDEPINREVAQIMLNDVGMAVDVAEDGIAALRLAGEVDYALILMDMQMPNMNGLDATRQIRQLPRHKETPILAMTANAFVEDKERCFEAGMNDFIAKPVEPESLYDKLLHWLSRGPSH

SEQ ID NO: 17741 - protein, 357 aa, Prochlorococcus marinus str. MIT 9312
MKNYKIVLLSGDGIGPEISEVSKKVLKKLSRKHNFNIEIIEKLFGGIAYEKYGTPAPDETLDQCKKCDAVLLACVGDIKYDSLARELRPESGLLKLRSALGLFANIRPVKIRKSLVNTSTLKKEIVENVDLIVVRELIGGIYFGKPRGHITNTKIPKAFNTMVYDSAEIERITEIAIKIANQRNKKICSVDKSNVLEVSQLWRDTVLNITLKDKNISLSNMYVDNAAMQLVRDPSQFDVILTSNLFGDILSDLAAMLTGSIGMLPSASLNNNGPGVFEPVHGSAPDIAGKNIANPIAMLLSASMMLKIGLNEEEAAKNLETAVDKVLAEGFRTADLADGSSEVLSCSEIGDKIIDEI

SEQ ID NO: 17742 - protein, 109 aa, Lactobacillus reuteri
MCGIVAFVDNEKPQIKDQLIKKMKDRIIHRGPDAEGQYVDDDVALGFRRLSFIDVKSGNQPIFNEDSSKAIEFNGEIYNFEELREELISKGHTFKTHADTEVIDHCQQV

SEQ ID NO: 17743 - protein, 343 aa, Lycopersicon chilense
MEMDLPVSAIGFEGFEKRLEISFVEPGLFADPNGKGLRSLTKAQLDEILGPAECTIVDNLSNDYVDSYVLSESSLFVYSYKIIIKTCGTTKLLLAIPPILRLAETLSLKVQDVRYTRGSFIFPGAQSFPHRHFSEEVAVLDGYFGKLAAGSKAVIMGNPDKTQKWHVYSASAGTVQCNDPVYTLEMCMTGLNREKASVFYKTEESSAAHMTVRSGIRKILPKSEICDFEFEPCGYSMNSIEGAAVSTIHITPEDGFSYASFESVGYDPKTTELGPLVERVLACFEPAEFSIALHADVATKLLERVCSVDVKGYSLAEWSPEEFGKGGSIVYQKFTRTPYCESP

SEQ ID NO: 17744 - protein, 388 aa, Arabidopsis thaliana
MLSSIKPSSSSFSTAISGSVRRSIPTKLKFSPLLIIKNCHNQSFNANVVSHQKPLHISSASNFKREVKVEAYEADRSRPLDINIELPDEQSAQKLKIGIYFATWWALNVVFNIYNKKVLNAFPYPWLTSTLSLACGSLMMLVSWATRIADAPKTDLEFWKTLFPVAVAHTIGHVAATVSMSKVAVSFTHIIKSGEPAFSVLVSRFFMGETFPLPVYLSLLPIIGGCALAAITELNFNITGFMGAMISNLAFVFRNIFSKKGMKGKSVSGMNYYACLSMMSLVILTPFSIAVEVPQMWAAGWQNAVSQVGPNFVWWVVAQSVFYHLYNQVSYMSLDQISPLTFSIGNTMKRISVIVASIIIFHTPIQPVNALGAAIAIFGTFLYSQAKQ

SEQ ID NO: 17745 - protein, 143 aa, Arabidopsis thaliana
  misc_feature (97)..(97): Xaa can be any naturally occurring amino acid
  misc_feature (104)..(104): Xaa can be any naturally occurring amino acid
MASSMLSSTAVVTSPAQATMVAPFTGLKSSASFPVTRKANNDITSITSNGGRVSCMKVWPPIGKKKFETLSYLPDLSDVELAKEVDYLLRNKWIPCXEFELEHXICVPVSTENTSIRLQILEFHCGTFKFLREGKGGPLPLIR

SEQ ID NO: 17746 - protein, 257 aa, Geobacter metallireducens GS-15
MTEKFETIIFEKRGAIAVITMNRPDKLNACNTVMYRELDCVLDKIESDREVQAVVITGSGDKAFSAGADLEELNFDNLRDSSEYIKVDARAFRRLENIPQPVIAAVNGAAIGYGCKVAIVSDIAIASETAKFSLPGATFGAVHVIMLGRAREVMGRKRLSQLLLTGEKIDAHEAERYGIVNKVVPQDQVMAEAMKIANRIAECPPLSVQVTRRMLHRGMDDDYRWEDLLSPGLLLMEDVKEGRRAFKEKRKPKFVGK

SEQ ID NO: 17747 - protein, 249 aa, Triticum aestivum
  misc_feature (239)..(239): Xaa can be any naturally occurring amino acid
MDSEHWISRLAAAKRFYAAQLGHIDDMSGMGMEEVDMDMEDDGEMDMEMEMQLEEARWPEVACPYCYEDYDLGSLCVHLEEDHPYEPHPAPCPICSEKITRDMLNHITMHHGYLFKNGSRLRRFVIPERRALSLLSRDLRDAHLQALLGGGHSHRSRNTTTATTNIYADPLLSSFGLGFATSDAEEPLKSSVPVLDDTSILKEAPPQPWESSIDSSLTSEEREQKRKQATSRATFVQGXLVLSTLFGDD

SEQ ID NO: 17748 - protein, 605 aa, Bacillus cereus ATCC 10987
MIFHRGPDDEGYFRDEHVQFGFRRLSIIDLEAGHQPLTYENDRYVIIFNGEIYNYVELREMLLEKGATFATQSDTEVIIALYAHMKEKCVDYLRGMFAFMIWDREEKKLFGARDHFGIKPLYIAQQGDTTFFASEKKSIMHVMEDKGVNPTSLQHYFTYQYGPEPETLTIDVNKIEPGHYFVKEIGKEMEIHRYWKPYFNASSATKEEHIQAIRDVLYDSVKVHMRSDVPVGSFLSGGIDSSIIASIAREMNPNLLTFSVGFEQRGFSEVDVAKETAEKLGVKNHNVFISAKEFMDEFPKIIWHMDDPLADPAAVPLYFVAKEARKHVTVVLSGEGADELFGGYNIYREPNSLKMFSYIPSPGKSVLKALSGALKEGFKGKSFLERGCTPIEERYYGNAKIFREEEKAELMKYYNESVNYMDITKPLYNEIKDYDDVSKMQYIDMFTWLRGDILLKADKMTMANSLELRVPFLDKEVFDVASKIPTEFKIANGTTKAILREAARGIVPDHVLDRKKLGFPVPIRHWLKDEMHDWAINIINESKTEHLIDKQYVLNLLEAHCADKGDYSRKIWTVLAFMVWHQIYVEHKYDTNKFHEETKRAYSLV

SEQ ID NO: 17749 - protein, 497 aa, Pseudomonas syringae pv. syringae B728a
MSSIQHLIHGEFVSAEGRSANVFNPSTGQVIHTVALADRETVQKAIDSAKAAFPAWRNTPPAKRAQVMFRFKQLLEQNEARIAQLISEEHGKTLEDAAGELKRGIENVEYACAAPEVLKGEYSRNVGPNIDAWSDFQPLGIVAGITPFNFPAMVPLWMYPLAIACGNCFILKPSERDPSSTLLIAELLHEAGLPKGVLNVVHGDKVAVDALIEAPEVKALSFVGSTPIAEYIYKEGAARGKRVQALGGAKNHAVLMPDADLDNAVSALMGAAYGSCGERCMAISVAVCVGDQIADALVAKLVPQIQSLKIGAGTTCGLDMGPLVTGQHRDKVGGYIEDGVQAGATLVVDGRNLQVAGHERGFFMGGCLFDRVTPEMRIYKEEIFGPVLCIVRVDSLEQAMQLINDHEYGNGTCIFTRDGEAARLFCDEIEVGMVGVNVPLPVPVAYHSFGGWKRSLFGDLHAYGPDGVRFYTRRKAITQRWPQRASHEASQFAFPSL

SEQ ID NO: 17750 - protein, 134 aa, Escherichia coli
DSLITIPNDKLLKVLGRGISLLDAFGAANDVLKGAVQGIAELITRPGLMNVDFADVRTVMSEMGYAMMGSGVASGEDRAEEAAEMAISSPLLEDIDLSGARGVLVNITAGFDLRLDEFETVGNTIRAFASDNAT

SEQ ID NO: 17751 - protein, 279 aa, Glycine max
MSTSAASLALPTLTLRTRQPLCSPQCFSSSLSLTPNSKPISISAVFLKTTLSSSSPLSLSSRFVPHVSVLEQEEDTFGDGDGPSFSRDLKLFVGNLPFSVDSARLAELFESAGNVEVVEVIYDKTTGRSRGFGFVTMSSVEEAEAAAKQFNGYELDGRSLRVNSGPPPARNESAPRFRGGSSFGSRGGGPSDSENRVHVGNLAWGVDDVALESLFREQGKKVLEARVIYDRESGRSRGFGFVTFGSPDEVKSAIQSLDGVDLNGRAIRVSLADSKPKRF

SEQ ID NO: 17752 - protein, 273 aa, Salmonella typhimurium
SLLLSQLFHGEPKNRDELLALIRDSGQNELIDEDTRDMLEGVMDIADQRVRDIMIPRSQMITLKRNQTLDECLDVIIESAHSRFPVISEDKDHIEGILMAKDLLPFMRSDAEAFSMDKVLRTAVVVPESKRVDRMLKEFRSQRYHMAIVIDEFGGVSGLVTIEDILELIVGEIEDEYDEEDDIDFRQLSRHTWTIRALASIEDFNDAFGTHFSDEEVDTIGGLVMQAFGHLPARGETIDIDGYQFKVAMADSRRIIQVHVRIPDDSPQPKLDE

SEQ ID NO: 17753 - protein, 992 aa, Pseudomonas aeruginosa PAO1
MAASLPMYPQAPGRGCAAFCPAGELCHRRLDMLTRSLLSAVFCLLLIALQPLPVEAESILPDGRTTTTMRPWLDKRARQWLDAREPLTVGVVSPDYPPLSIFYAGSYKGFTADYLALVFERPLRVRDFPSRQAAIDALSQGEIDLLGVGSEVEARQHGLLASAAYLSDRPVLVSSSGAPFDSQAESWLATVKGYLPAERIKAAYPHSRIIWFDSPQLALEALSMGDVDGVLGDAVSTHYLIQTHYLLNLRIENFAPIDSQGFRFLLRPGDEPLLALIDRALPHISGRYGDELLRSWSAGRRLRFDEPRVTLSPAEQRWLSAHPVVPVVINHSLGALGQLDNEGRLSGIGRDYLDLIGKRSGLRFSFTGARNFVETKSRLDAEEALVTPTMPSSERFDSGLEVLTPYLRSATVLMGARQGGRDERVGRVHGLADLAGKRLATTIGYFLNDFIRREHPEIKLQVYPTFLAAMRSVDAGQSEAAISSDYTGRYLSAQHFDNRIQVVGILDDLSIPISIGVARNQPELQGILEKAQLAIAPEEVAEILHRWEPRFAKGGADFWRDHRSKILQIGGLFGVLISISLIWGFYLMRQVRKTRQAEEQADTANRAKSVFLSTMSHEIRTPLNAVIGLQELVLKKGEKGVLDLDSLSIAQEAAQGLLLLLGNILDLSRIESGRFDSAPEPVLPGELIRGILPLVGGLTRQKNLSLALELDGDLEQWVLVDPLHFKQVLFNLLGNAIKFTERGGVTVRAVGRREAERLHLLLEVSDTGLGISEEDQARLFRPFSQVGSPALGQASGSGLGLYISRRLVHLMGGQISLRSELGNGSCFSVEFDLPLTEPPPSESSEARSGVAEVEERKEARALSILLAEDHPFNRLTLTMQLESLGHRVTSTEDGEEAFERWQGEDFDVVITDGMMPRMDGYELARRIRSQEALGGRRRCLVIALTASAEKDALERCLAAGMDRVLFKPTTLDELARALNGGEPLMPTSVDSQ

SEQ ID NO: 17754 - protein, 80 aa, Oryza sativa
  misc_feature (34)..(34): Xaa can be any naturally occurring amino acid
MSEEAGRPLPKFGEWDVNDPASADGFTVIFNKAXDEKKGGNGQDTDSPCKETRTERVESYAPKTNSKKWFCCVTSSPTQS

SEQ ID NO: 17755 - protein, 679 aa, Candidatus Kuenenia stuttgartiensis
MENIQININHLWVIMAACMVFLMQLGFTSYETGFSQSKNAISIALRNLVDTLISSLVFFSVGFGFMFGKSYMGLIGIDLFFANDLALHPNTLSYSFFFFQMVFASTAATILTGAIAERSGFIPNIAGTAFIVAIIYPIFGHWAWGNLFSPDQTGWLKELGFIDFAGATVVHSIGGWFAMAAAIMVGPRIDKYNPDGSSNRIGLHNVPLATLGTFFLWFGWFGFNGGSLLRVSVNIGLVILNTNMAAASAGVSALIFIYATRKRIEAGSLFTAILAGLVAITASSNMVTPVSAVAIGLITGILAIIAEGFIEKTLKIDDPVSAIAVHGVGGVIGTLCVAIFAQKSYLLAENGSRMHQLGIQALGVIVAFSWSFGLGMLFFLCLKKVKRLRVTPEEEKRGLNVAEYEDVASWLDFIRITRLQDINTILEKRVQEKTADLQMANVALEKANRLKSEFLTTMSHELRTPLNAIIGFAEVLRDEIAGSLSKDQKEYVTDIHSSGHHLLDMINNILDLSKIETGKMHLQYEEFCIEDAINDTLTIINASANNKGISVHTNIQDNTPLLSADKTKFRQILYNLLSNAVKFTPENGKITINVFQKDNSLQFEIVDTGIGIKPEDKEKLFEAFHQADASLTREYEGTGLGLHLTKRLVELHGGKIWAESTFGKGSTFFFILPINPVNK

SEQ ID NO: 17756 - protein, 318 aa, Ehrlichia chaffeensis str. Arkansas
MTQTYNTKVLIIGSGAAGCTAAIYAARANLKPILITGMCPGGQLTITTDVENFPGFAHAVQGPDLMEQMKQQAHNSGAQIISDEIKEIHSDVYPFKCIGIFGDQYIADSIIIATGAQAKWLNIKSEETFKGRGVSACATCDGTFFAGSDIAVIGGGNTAVEEALYLTRYATKVFLIHRRDTLRAEPIMQERLFSNDKIQVIWNSVVEEILGNKESGNVEAIALKSVKTGDITTISVKGVFIAIGHTPNTQILTTKDNGNIVDLDNEGYIITKPGSTVTSHPGIFAAGDVQDKIYRQAVVAAGSGCMAALEAAKFLSEQ

SEQ ID NO: 17757 - protein, 474 aa, Thermus thermophilus HB8
MSFPLIFERSRKGRRGLKLVKAVPKAEDLIPKEHLREVPPRLPEVDELTLVRHYTGLSRRQVGVDTTFYPLGSCTMKYNPKLHEEAARLFADLHPYQDPRTAQGALRLMWELGEYLKALTGMDAITLEPAAGAHGELTGILIIRAYHEDRGEGRTRRVVLVPDSAHGSNPATASMAGYQVREIPSGPEGEVDLEALKRELGPHVAALMLTNPNTLGLFERRILEISRLCKEAGVQLYYDGANLNAIMGWARPGDMGFDVVHLNLHKTFTVPHGGGGPGSGPVGVKAHLAPYLPVPLVERGEEGFYLDFDRPKSIGRVRSFYGNFLALVRAWAYIRTLGLEGLKKAAALAVLNARYLKELLKEKGYRVPYDGPSMHEFVAQPPEGFRALDLAKGLLELGFHPPTVYFPLIVKEALMVEPTETEAKETLEAFAEAMGALLKKPKEWLENAPYSTPVRRLDELRANKHPKLTYFDEG

SEQ ID NO: 17758 - protein, 252 aa, Bacillus pseudofirmus
ILAAGVEADLYENFTDVDSVFAANPNVVSEPVKIKKMTYREMRELSYAGFSVFHDEALIPAFRKGIPVCVKNTNNPSSSGTMIIAEREYFLNPVIGIAADEGFSTIYVRKYLMNREVGFGRRLLQIIEDEGLSYEHIPSGIDDTSVILRQCQLTPEIEERIVERIRVELGADDVYIEKDFAMIMIVGEGMHNTVGVSARMTAALARANVNIEMINQGSSEVSLVIGIHEKDTDRAVRELYAEFFGAAVEVVQ

SEQ ID NO: 17759 - protein, 547 aa, Arabidopsis thaliana
MAGVIHVSSTQIPVAFMSATKQSFRRASVIRCAANTPKKRYTIAVLPGDGVGNEVIPVAVDVLCLAGSLEGIDFSFEELPIGGVALDLVGVPLPKETLIRAKQSDALLLGAVGWPKWDNNPKHLKPITALLQLRAALQVFDEPSFFCETNIRTVKVPATFRAVSKQSLAPFRVRCAVASPGKKRYTITLLPGDGIGPEVVSIAKNVLQQAGSLEGVEFNFREMPIGGAALDLVGVPLPEETISAAKESDAVLLGAIGGYKWDNNEKHLRPEKGLLQIRAALKVFANLRPATVLPQLVDASTLKREVAEGVDLMVVRELTGGIYFGEPRGIKTNENGEEVGFNTEVYAAHEIDRIARVAFETARKRRGKLCSVDKANVLEASILWRKRVTALASEYPDVELSHMYVDNAAMQLVRDPKQFDTIVTNNIFGDILSDEASMITGSIGMLPSASLSDSGPGLFEPIHGSAPDIAGQDKANPLATILSAAMLLKYGLGEEKAAKRIEDAVLVALNNGFRTGDIYSAGTKLVGCKEMGEEVLKSVDSQVPASV

SEQ ID NO: 17760 - protein, 104 aa, Streptomyces avermitilis MA-4680
MTEVTDADFEAEVIGADLPVLVEFTADWCPPCRQMGPVLSSLAFEEGDRLKVVQLDVDTNPETTNAYKVLSMPTFMVFRGGEPVKSMVGARPKRRLLEELADVL

SEQ ID NO: 17761 - protein, 558 aa, Ashbya gossypii ATCC 10895
MQATTSASTDVDAYKKDITVRRRSQPCSSSSGSLKVMNTETKAMDTRSVLELKEKEEYGVYEAAGSTDRSISLSGASPVPEGSLVRPVLYCLSVAFCGIIFGWDLGTIGGISTMPSFQNTLGPRFNGDTGLHEFPGRLLGLLIGIFNIGCAIGGLTIARLGDIKGRKIAILTSLLVYAVGMFVQLGSGHFWYRYFIGRLIAGLAVGATMVLVPMFLSELAPVRIRGAMIVLYQVVICLGIALGSIVNYACKELVHDTLSNMTWKVPIFFQIGFTVLLSLALLITPESAEFLAMKGHLEKAKRSFAVMNGLSKDHPFVEERVASFVQVSMKSDDIEHSGDRWEFIRGNPRLGLRLFIGVTVMALQMLSGVNYFFYYGTTLFRFVGIEDAYVTSIIIGCVDLLGTFIGVYIVERLGRKICLLSGATGMFICMTVYACLGSFALKDDSNNKTVGAVMIFFTCVFVMFFAATSGPVSMVVMSEIFPIRTKVMSMAICTSVNWLVNFLIAFVTPDVTDAINYRFGFVFSGCLLFSIVFFIYLVPETKGLTHEQVDAIYEKTHD

SEQ ID NO: 17762 - protein, 401 aa, Cryptococcus neoformans var. neoformans JEC21
MSTSTRRHVLEDKLANHKADPNAAANAGQVQERTTKGSSSSAPRKVRFNVGNNYHVVDVIGEGAYGVVASAVHRPSGTKVAIKKIAPFDHSMFALRTLRELKLLKYFAEEGVSENIISVLDIIKPPSYDTFKEVYLVQELLETDLHRVIRTQDLSDDHCQYFLYQTCRALKALHSAEIIHRDLKPSNLLLNANCDLKVCDFGLARSTQTAFPAEGNNQGFMTEYVATRWYRAPEVMLSFRMYTKSIDVWSVGCILAEMLSGKPLFPGKDYHNQLALILDVLGTPTIDEFHAITSKRSKDYIRSLPFRKKRTFESIYPSANPLAIDFLRKTLTFDPRKRYTVEQCLAHPYLDAYHDPEDEPSAKPLPPSFFEFDMMKDDISREELKRLLYEEIMGFRPVLEG

SEQ ID NO: 17763 - protein, 372 aa, Leucobryum juniperoideum
SDSGKDAGRLSAAWQMFKAQEDLVKVAKQYGVRLTMFHGRGGTVGRGGGPTHLAILSQPPDTINGRLRVTIQGEVIEQSFGEQHLCFRTLQRFTAATLEHGMHPPIAPKPEWRGLMDSMAEVSTKEYRSVVFQNPNFVEYFRTATPELEYGRMNIGSRPSKRKPSGGIESLRAIPWIFAWTQTRFHLPVWLGLGYALRQALESEPRNIGHLRRMYNQWPFFRVTIELVEMVFAKGDPRIAALYDDLLVSDELVSRYGEELSARSIYETRDLLSQVAGHEDILQGNPTLKQRLRLREPYITALNVQQALVLKKMRDQSSQFCVIDNGTPKAPKSPKRAAELVELNPTTEFPPGLEDTLILTMKGIAAGMQNTG

SEQ ID NO: 17764 - protein, 341 aa, Polaromonas sp. JS666
MPRCMLSSDLPWMAPARVRATKHLTSRPPAENILLTPIFCRIMIDVTLANFEAEVVAASMTTPVLIDFWAPWCGPCKSLGPILEKVEVAYAGRFKLVKIDSDQEQQLGAAFGIRSIPTCILMMNGQPVDGFAGALTEGKVKEFLDKHLPPAEEQPEEQELQLEEESTDPAAILEKLQHAVATDPADHNARFDYVKLLLTLGHEDDAKVAFAPVISQTSVVRRFDSLKRWMDAIDFVAINALGESASAGFDAKIAANKRDFEARFDKARWLMTQQHWTEALDELLEILMRDKSWNEELARKTYIAVLDIMETPKPKVADGQIPPEDPTVATYRRRLSSVILS

SEQ ID NO: 17765 - protein, 366 aa, Leptobryum pyriforme
SDSGKDAGRLSAAWQMFKAQEDLVKVAKQYGVRLTMFHGRGGTVGRGRGPTHLAIFSQPPDTINGSLRVTIQGEVFEQSFGEEQLCFRTLQRFTAATLEHGMHPPIAPKPEWRDLMDSMAVAATEEYRSIVFKNPRFVEYFRTATPELEYGRMNIGSRPSKRKPSGGIESLRAIPWIFAWTQNRFHLPVWLGLGAAFKTALEAKPENMNTLARMYDQWPFFRVTIDLVEMVFAKGDPRIAQLYDTLLVKEELRPFGEELRRKYNETKLHLLKIARHTDILQGNPTLKQRLLLREPYITALNVQQAYTLKKMREQNSSQPPQPESPKPTKPASELVTLNPTTEFAPGLEDTVILTMKGIAAGMQNTG

SEQ ID NO: 17766 - protein, 650 aa, Arabidopsis thaliana
MASTEALLPVTSLQDPLSESRSDQIPETRRRRPIKVHLAVYSGLLLIALYVTLIVTHDGSKAEIATESRPRMAGVSEKSNDGVWISSDDGKVEAFPWNNTILSWQRTAFHFQPEKNWMNGTNIKCPLFYKGWYHFFYQYNPNAAVWGDIVWGHAVSKDLIHWLYLPIAMVPDQWYDANGVWTGSATFLDDGSIVMLYTGSTDEFVQVQNLAYPEDPSDPLLLKWVKFSGNPVLVPPPGIGAKDFRDPTTAWKTSSGKWRITIGSKINRTGISLIYDTTDFKTYEKHETLLHQVPNTGMWECVDFYPVSKTQLNGLDTSVNGPDVKHVIKASMDDTRIDHYAIGTYDDSNATWVPDNPSIDVGISTGLRYDYGKYYASKTFYDQNKGRRILWGWIGESDSEAADVQKGWSSVQGIPRTVVLDTRTHKNLVQWPVEEIKSLRLSSKKFDMTIGPGTVVPVDVGSATQLDIEAEFEIKTDDLKLFFDDDSVEADNKFSCETNGGSTARGALGPFGFSVLADEGLSEQTPVYFYVTKGKHSKLNTVFCTDTSRSTLANDVVKPIYGSFVPVLKGEKLTMRILVDHSIVEGFAQGGRSCITSRVYPTKAIYGATKLFLFNNAIDATVTASFTVWQMNNAFIHPYSSDDLGVPSST

SEQ ID NO: 17767 - protein, 368 aa, Marchantia calcarata
SDSGKDAGRLAAAWSMFKCQEDLVKVAKQYGIKLTIFHGRGGTVGRGGGPTHLAILSQPPDTIHGSLRVTVQGEVIEQSFGEEHLCFRTLQRFTAATLEHGMHPPISPKPEWRELMDEISRVSTEEYRSIVFKHPQFVHYFRAATPGTEYGRMNIGSRPAKRKPSGGIESLRAIPWIFAWTQTRFHLPVWLGFGGAFKAAFQKSNQNVVLLRQMYNEWPFFRVTIDLIEMVFAKGDPRIAALYDELLVSEELKPLGEKLRLMYAETRELLLKVAGHDDVLQGNPTLKQRLRLREPYITPLNVQQAFTLKKIRDQSFHVRDPETPKGENSGKQSSELVGLNTTTEYPPGLEDTLILTMKGIAAGMQNTG

SEQ ID NO: 17768 - protein, 420 aa, Triticum aestivum
MAMASPFSPASAAATSPALFSVSTSRPLSLTTAATAAISARAPSRTSRGFRRGRFAVCNVAAPSAAVQETKPAAGAKESQRPVYPFPAIVGQDEMKLCLLLNVIDPKIGGVMIMGDRGTGKSTTVRSLVDLLPDISVVVGDPFNSDPFDPEVMGPEVRDRLLKGEDLPVTTTKITMVDLPLGATEDRVCGTIDIEKALTEGVKAFEPGLLAKANRGILYVDEVNLLDDHLVDVLLDSAASGWNTVEREGISISHPARFILIGSGNPEEGELRPQLLDRFGMHAQVGTVRDAELRVKIVEERARFDKDPKTFRQSYLEEQGKLQDQITSARSNLGSVQLDHDLRVKISQVCSELNVDGLRGDIVTNRAAKALAALKGRDIVTVEDIATVIPNCLRHRLRKDPLESIDSGLLVVEKFYEVFG

SEQ ID NO: 17769 - protein, 313 aa, Glycine max
MWPFSRKGSSGFSSSSTAEQVTEGIDGTGLTAIVTGASSGIGTETSRVLALRGVHVIMGVRNMLAAKDVKEKILKEIPSAKVDAMELDLGSMESVKKFASAFKSSGLPLNILINNAGIMACPFSLSKDKIELQFATNHIGHFLLTNLLLDTIEKTSRESKKEGRIVNVSSEAHRFAYSEGIRFNKINDESSYNNWRAYGQSKLANILHANELTRRLKEDGVDISANSLHPGTITTNLFRHNSAVNGLINVIGKLVLKNVQQGAATTCYVALHPQVKGISGKYFSDSNVANTTAQGTDADLAKKLWDFSMNLTK

SEQ ID NO: 17770 - protein, 107 aa, Bartonella quintana str. Toulouse
MTCIKTDKCNFENEVLASSVPVVVDFWAEWCGPCKMIAPILDEISTEMQGQIKIAKVNIDENPELATQYGVRSIPTLLMFKNGKASSNMVGAASKGRVSEWIKDGLR

SEQ ID NO: 17771 - protein, 108 aa, Saccharothrix mutabilis subsp. capreolus
MSGTVIDVTDSTFLGTVEQAKITTLAVFRAEWSSVCLMLDPVLDEVAKEYEGRLVIARLDIDESPRTPERYKIHAIPTLHVFKGGKIVNTWIGPANKARVVDTVKPHL

SEQ ID NO: 17772 - protein, 492 aa, Rubrivivax gelatinosus PM1
MDMKNSPLATLADPTLLKTAALIDGAWVDRGEHFAVTDPATGQVLAQVANLGAADAEAALAAAARAWPAWRAKTAKERASVLMKWYQLLLQHADDLARIMTAEQGKPLAEAKGEVGYGASFIEWFAEEAKRVYGETVPTTDNNKRYLVLKQAMGVCAAITPWNFPIAMITRKVAPALAAGCPVVIKPAEQTPLSALAVAELAQRAGMPAGVLNVLTADAERSIQIGNVLCASDTVRHLSFTGSTEVGRILMKQCAPTIKKLSLELGGNAPFIVFDDADLDSAVEGAMISKYRNAGQTCVCANRLYVQAGVYDAFVEKLAAKVKAIKVGNGFEAGVTQGPLIDEAALAKVESHVADALAKGAKLLTGGQRIGERFYSPTVLAQATGEMLCAREETFGPVAPVFRFETEAEVVALANDTEFGLASYFYSRDVGRIFRVGEALEYGMVGINTGLISTAEVPFGGVKQSGLGREGSHHGIDDYVEIKYLCLGDIQK

SEQ ID NO: 17773 - protein, 134 aa, Aspergillus niger
MTGGKSGGKASGSKNAQSRSSKAGLAFPVGRVHRLLRKGNYAQRVGAGAPVYLAAVLEYLAAEILELAGNAARDNKKTRIIPRHLQLAIRNDEELNKLLGHVTIAQGGVLPNIHQNLLPKKTPKSGKGPGSQEL

SEQ ID NO: 17774 - protein, 108 aa, Rhodopirellula baltica SH 1
MASEAVKEFNDDNFDSEVLKSDSPVLVDFWAPWCGPCRQIAPMIDELASENPGVKIGKVNIDDNPGAAQKFGINSIPTLLLFKNGEIADTFVGVRPKAALQDALTSVS

SEQ ID NO: 17775 - protein, 592 aa, Xanthomonas axonopodis pv. citri str. 306
MAEIKEALVPDIGDYSDVPVIEVLVSVGDTVSKDQSLVTLESDKATMEVPSSVAGVVKEIKVKVGDSLSQGALVALIEVADAGADAAKPAAAAAPAAPAKAAPAATPAPAARAESAAPAASSDGGGLIEARVPDIGDYTDIPVIEVLVAVGDTVAKDQSLVTLESDKATMEVPSSAAGVVKELKVKVGDTLSQGNVVAIIAAADGGAGAAQSPAKPTTDTAETAGKVEPVAVPAEPDKLAQREIAQVQGARSGTGTPAAQGGQPSAGNPSSPPVTFDADSVLPSKVPYASPVVRVFARELGVDLNQLKGSEKGGRITREDVQRFVKAALSGGAPAAAGAAPAGGGNGLNLLAWPKVDFSKFGETETQPLSRIKKVSGANLARNWAMIPHVTQFESADITDLEALRVALNKENEKAGIKLTMLAFLVKASAAALKKFPEFNASLDAAGDNLTLKKYFHIGFAADTPNGLVVPVIRDVDKKGVLQIAQESGELAKKARDGKLGPADMSGGCFSISSLGGIGGTAFTPIINAPEVAILGVSKSAMQPVWNGKDFAPKLMLPLSLSYDHRVIDGALAARFTTYLSQVLADMRRVLL

SEQ ID NO: 17776 - protein, 343 aa, Lycopersicon hirsutum
MEMDLPVSAIGFEGFEKRLEISFVEPGLFADPNGKGLRSLTKAQLDEILGPAECTIVDNLSNDYVDSYVLSESSLFVYSYKIIIKTCGTTKLLLAIPPILRLAETLSLKVQDVRYTRGSFIFPGAQSFPHRHFSEEVAVLDGYFGKLAAGSKAVIMGNPDKTQKWHVYSASAGTVQCNDPVYTLEMCMTGLDREKASVFYKTEESSAAHMTVRSGIRKILPKSEICDFEFEPCGYSMNSIEGAAVSTIHITPEDGFSYASFESVGYDPKTTELGPLVERVLACFEPAEFSFALHADVATKLLERVCSVDVKGYSLAEWSPEEFGKGGSIVYQKFTRTPYCESP

SEQ ID NO: 17777 - protein, 578 aa, Oryza sativa
MADEAKAKGNAAFSAGRYEEAARHFTDAIALAPGNHVLYSNRSAALASVHRYSEALADAEKTVELKPDWAKGYSRLGAAHLGLGDAASAVAAYEKGLALDPTNEGLKAGLADAKKAAAAPPRRPPPSGVDGIGQMFQGPELWTKIASDPTTRAYLEQPDFMQMLRDVQRNPSSLNMYLSDPRMMQVLGLMLNIKIQRPEASESSQPSSSPPSQPQEQPEAKAREVEPEPEPEPMEVTDEEKERKERKSSAQKEKEAGNAAYKKKDFETAIQHYTKAMELDDEDISYLTNRAAVYIEMGKYDECIKDCDKAVERGRELRADFKMISRALTRKGTALAKLAKTSKDYDIAIETFQKALTEHRNPDTLKKLNEAERAKKELEQQEYYDPKLADEEREKGNQLFKEQKYPDAVKHYTEAIRRNPKDPKVYSNRAACYTKLGAMPEGLKDAEKCIELDPTFSKGYTRKGAIQFFMKEYDKAMETYQAGLKHDPNNPELLDGVKRCIEQINKANRGDLTQEEIQERQNKAMQDPEIQNILTDPIMRQVLVDLQENPRASQEHLKNPGVMQKIQKLVSAGIVQMR

SEQ ID NO: 17778 - protein, 123 aa, Brassica napus
MSDTDEHHFESKADSGASKTYPQQAGAIRKGGHIVIKARPCKVVEVSTSKTGKHGHAKCHFVAIDIFNGKKLEDIVPSSHNCDVPHVDRQDYQLIDITDDGYVSLLTESGNTKDDLKLPTDDV

SEQ ID NO: 17779 - protein, 181 aa, Zea mays
MASSIVSSAAAATRSNVAQASMVAPFTGLKSAASFPVTKKNNNVDITSLASNGGRVRCMQVWPPINMKKYETLSYLPDLSDEQLLSEIEYLLKNGWVPCLEFETERGFVYRENNSSPGYYDGRYWTMWKLPMFGCTDATQVLAEVQEAKKAYPQAWVRIIGFDNVRQVQCISFIAYKPEGF

SEQ ID NO: 17780 - protein, 138 aa, Parietaria judaica
MRTVSARSSVALVVIVAAVLVWTSSASVAPAPAPGSEETCGTVVGALMPCLPFVQGKEKEPSKGCCSGAKRLDGETKTGPQRVHACECIQTAMKTYSDIDGKLVSEVPKHCGIVDSKLPPIDVNMDCKTLGVLHYKGN

SEQ ID NO: 17781 - protein, 582 aa, Arabidopsis thaliana
MVFKVSTVSTSPIDGQKPGTSGLRKKVKVFKQPNYLENFVQATFNALTAEKVKGATLVVSGDGRYYSKDAVQIIIKMAAANGVRRVWVGKNTLLSTPAVSAVIRERSGADGSKATGAFILTASHNPGGPTEDFGIKYNMENGGPAPESITDKIYENTKTIKEYPIAQDLPNVDISAVGVTSFEGPEGKFDVEVFDPADDYVKLMKSIFDFEAIRKLLSSPKFTFCYDALHGVAGAYAHRIFVEELGAQESALLNCTPKEDFGGGHPDPNLTYAKELVARMGLGKSDTGGEPPEFGAAADGDADRNMILGKRFFVTPSDSVAIIAANAIGAIPYFSSGLKGVASMPTSAALDVVAKSLNLKFFEVPTGWKFFGNLMDAGMCSVCGEESFGTGSDHIREKDGIWAVLAWMSILAHKNKGNIDGNAKLVSVEDIVRQHWATYGRHYYTRYDYENVDAGKAKELMEHLVKLQSSIPEVNKIVKGIRSDVASVASADEFEYKDPVDGSISKHQGIRYLFEDGSRLVFRLSGTGSEGATIRLYIEQYEKDASKTGRESQEALSPLVDLALKLSKMEEFTGRSAPTVIT

SEQ ID NO: 17782 - protein, 132 aa, Triticum aestivum
  misc_feature (62)..(62): Xaa can be any naturally occurring amino acid
  misc_feature (101)..(101): Xaa can be any naturally occurring amino acid
MARGAATQLVLVAMVAAMLLVASDAAISCGQVTSALSPCISYARGNGANPPAACCSGVRSLXAGAARSTADKQAACKCIKSAAGWVNAGKAAGIPSKCGVXSVPYAISSSVDCSKSLIDTLLIVADIARAIT

SEQ ID NO: 17783 - protein, 285 aa, Oryza sativa
  misc_feature (135)..(135): Xaa can be any naturally occurring amino acid
MSEELKRDFEIGEEIGRGRFGVVHRCASRSTGEAYAVKSVDRSRLSDDLDRSLAALEPKLARLAAAGNPGVVQVHAVYEDDDWTHTVMDLCTGPDLLDWVRLRCGQPVPEPDAAAVVAQIAEALALCHRRGVAHXDVKPDNVLLDATGDGPPRVRLADFGSAAWVGDGISAEGLVGTPHYVAPEVVAGGEYGEKADVWSAGVVMYVLLTGGALPFGGETASDVFAAVLRGNLRFPPRLFSGVSPAAKDLMRRMMCRDVYRRFSAEPVLRHPWIVSGGGARDVQPT

SEQ ID NO: 17784 - protein, 1035 aa, Photobacterium profundum SS9
MNINIRSQLSFIMCASLLTMSGFFITSLMNTEKSVLEAEQSNVSVKVAKLLNDNLKGQVDTVTRSLSYYYENSKLENIKAELATDITTFRDAIDNIYNNSDSAADAETSIHAFINEYRWDNGRYIFAYDAASIVNKANGANASIIGTSAYDKKDTNGNYYARNIVSATKANAIGFTSYHFLNPVTQKVEEKLTASFYFEPLNMVVATGEYISTLRRDELEAAINTISSSKYGQNGYFWVQDKSGKILAHPKAEIIGTIVPSTTSRIADRIKGQSEAFVKIAYENPTTKQTENKIAYARNIFPEWGWTIATGTYESDITSIQDGLTRATAEIFNDKVYMNIATAAVLLIIALLVATWSINKIVRGLVILKERIDTLSTGEADLTSRIDITSHDELGDIGKSVNNFIIYLQSMTLEISQASAHITDGIKHASETAVNTPKANDQALLEKDDVLEAPGSMTAVIRKLAAGDLSVDIPRGESDEIGHLADAISVFKKNALALREHQNELQKLVDERTTQLTEANNALNSEVAKHAKAREQAEQANKAKSSFLAHMSHEIRTPMNGIMGTLHLLDDTTLDNAQKHYTKTIISSGEILMGVLNNVLDYSKIEAGCFDINETNFRTDLIVGNVVNMLKARAKEKNIKLTYAVASDVPDYLHGDANKIIQILTNLVGNAIKFTNLGSVTIRVQLKEQLPEDRFLLKFEVLDTGKGIPERKQAVIFEPFEQVTQSEGGTGLGLPISKRFAEMLGGELMVYSEPDIGSRFILTLPLNAGEEGELISTDVTVSLTVPPLNILLVEDNETNVLVAKGFLDKLGHKVVVAMTGEMAQRAIEDHHVDIILMDINLPDTDGVTLTGRLREKANRYIPTIAFSAHVFRQDIESYLEAGLDGFLGKPVQFKRMQTVIANVYNGQSSKFDAVRDIDRDVDKEPAVTLFDYSVLEGDRQILGDGLVHDMVEMFYVRSATLTHEIKIQSSAKALELPVHSLKSSAGAIGLIALSKACEELEIACKQGADELALTKLSAALLAIYAPSIDRLKEEF

SEQ ID NO: 17785 - protein, 445 aa, Pyrococcus horikoshii OT3
MGENMKKKVVIIGGGAAGMSAASRVKRLKPEWDVKVFEATEWVSHAPCGIPYVVEGLSTPDKLMYYPPEVFIKKRGIDLHLNAEVIEVDTGYVRVRENGGEKSYEWDYLVFANGASPQVPAIEGVNLKGVFTADLPPDALAIREYMEKYKVENVVIIGGGYIGIEMAEAFAAQGKNVTMIVRGERVLRRSFDKEVTDILEEKLKKHVNLRLQEITMKIEGEERVEKVVTDAGEYKAELVILATGIKPNIELAKQLGVRIGETGAIWTNEKMQTSVENVYAAGDVAETRHVITGRRVWVPLAPAGNKMGYVAGSNIAGKELHFPGVLGTAVTKFMDVEIGKTGLTEMEALKEGYDVRTAFIKASTRPHYYPGGREIWLKGVVDNETNRLLGVQVVGSDILPRIDTAAAMLMAGFTTKDAFFTDLAYAPPFAPVWDPLIVLARVLKF

SEQ ID NO: 17786 - protein, 521 aa, Enterobacter sakazakii
MLDTNMKTQLKAYLERLTKPVELVATLDDSAKSAEIKELLLEIAELSDKVSFREDNTLAARKPSFLITNPGSDQGPRFAGSPLGHEFTSLVLALLWTGGHPSKEAQALLEQIRDLDGDFEFETYYSLSCHNCPDVVQALNLMAVLNPRIKHTAIDGAVFQNEITERNVMGVPAVFMNGVEFGSGRMTLAEIVAKVDTGAEKRAAEELNQRDAYDVLIVGSGPAGAAAAIYSARKGIRTGLMGERFGGQVLDTVDIENYISVPKTEGQKLAGALKAHVDDYDVDVIDTQSATKLIPAASEGGLHQIETASGAVLKARSVIVATGAKWRNMGVPGEDQYRTKGVTYCPHCDGPLFKGKRVAVIGGGNSGVEAAIDLAGIVEHVTLLEFAPEMKADQVLQDKLRSLKNVDIILNAMTTEVKGDGTKLIGLDYQDRVTGSVKHLEVAGIFVQIGLLPNTTWLEGAVERNRMGEIIIDAKCETSVKGVFAAGDCTTVPYKQIIIATGEGAKASLSAFDYLIRTKTA

SEQ ID NO: 17787 - protein, 283 aa, Chromobacterium violaceum ATCC 12472
MEDPSKPRPSWLERLSTMLLREPEDREELIELLHNAFERNLLDAEALGMIEGVLEVSELTVRDVMIPRSQMHVLNIDDPIARFLPTVIDSGHSRFPVIGESKDDVQGILLAKELLRYFHAPSTFNLKNVLRPAVFVPESKPLNVLLRDFRATHNHMAVVVDEYGGVCGLVTIEDVIEQIVGDIEDEYDIDDDEDDIVPVRGNERYRVKALTEIEDFNHYFGTDYADDDVDTVGGLVISLTGHLPKRGEKIEAAGLRFTVLRADSRRLDTLLVERIQASIDIAE

SEQ ID NO: 17788 - protein, 265 aa, Geobacter metallireducens GS-15
MSFETIILDKKDGIATITFNRPKVFNAYSEQMSQELKAAVADVGSDTSLRVLVLKGSGENFLAGADINMLNSWSKISAEQGWEKVKEILDHHFSPTSLEKIPLPVIAAVDGMAWGMGSEIALGCDFRICTTRASFAQPEINLGIITGGGASQRLPRIVGKAKAMEMILTGKPINAADACKWGLVNEVVEPEGLDAAVARLAKAIMGKSPLMVKWAKDCVNLVLDHDLLSGIDKELTQFAKTFATQDSKEGTAAFLEKRKANFTGA

SEQ ID NO: 17789 - protein, 413 aa, Symbiobacterium thermophilum IAM 14863
MERRVVVTGMGLISPLGNSVRANWEAAVAGRSGIGPITRFDASRLPTRFAGEVRDFDPATVMDPKEVRRYDPFIHYALAAAAEAVEDAGLTFEGELAERTGVVFGSGMGGLEGIVENALILQERGPRRISPFFVPRCIINSAAGLISMKYGVHGPNYGTVSACASAGHAIADAMHIIRRGDADVMITGGSEATITELAFAGFSSAKALSTRNDDPQGASRPFDADRDGFVMSEGAGCLVLEELEHARRRGARIYAELAGAGMSGDAYHITAPHPEGRGAVLAMKGALRSARLNPEDVGYINAHATSTDLGDVQESLAIEQVFGDHARKLAVSGTKSMHGHLLGAAGAIEAILTVLSLYHQVLLPTINLHRPDPECRLDYVPHTAREVRGVEAALCNNFGFGGTNVSLAFRRFV

SEQ ID NO: 17790 - protein, 916 aa, Candidatus Kuenenia stuttgartiensis
MNSSLLFRNRKIKNPLLKNVHNRLDEAIEVIREKDPVFYKNCHKLFPVLKTPEHVWKIPLEFYTDGGVKLVLRITVVFHNLALGPPKGGILLIPPHILGDGFFELFDQLRKQKTSLDEIREFCFEWVSEGIEALSIVTTLKLALYSLPLGGGMCGIFLGKPEYDRGELFLKSIDLTNNEKRRLVREVGYLLTKEGIMGYDAYSPGPDIGTDGAMMDSIADGHFRALTEMEKIREKGLLEKLKSIRDAEIVWTVDLPYLKTAAAFAKEIKIPAEAKRSVPELGAVTFKTHGGLAGRGEATAFAAVEITNILVWHNEDPKDYLKVRIGRERKNYLAEKTVVIHGFDNIGLNASQFFSRKGAKVVAVSEYERREKKLVAVYNYEGIDVDALIRHKETCGGIYGFRGASVYAEPYQLLNEKVDIVFLAAIENQIHDHNAESIQARYVISAANAGISQEGYHILIKKGKIVARDSIVKSGGIIASYLEKIQNAQNDYWEKEYVFKDIISRIENVLKNNVFKNLVEKHSIDLSVAGDVAAIKRITSTMEAKNAPQKKMKDKKPLIIGIFDSGQGGIIVTEKLNRILPVGNIKLLLFTDKANFPFGQKSKEEINDITFRAVHEINERCKTMHQSNGFFYRFIYNTPYFLKTVFIWLGIIPRDVIVCFACNTVDTMVNHKKLRIRFPHIQFIGPVKKTLLKINALPKDARIGIIGTVGTIKSGIYEKRIREAGYHVLAKPTPLLAVLSEMLYKKSFDTEEKQKEFYKTARDLIYVNLKEFIKKNTISHLCLACTHYDYLKSTLKDLFGEVEFISTVETVIEEVQDIINQIPLQMGERELEFIKRARKGKDLDRLILEDIISSQNLSPEEKVKLGDREDQIKNILQNKLEGITADEIEEMKFFDSNSVKVKYNGKERLVSLFHLQ

SEQ ID NO: 17791 - protein, 971 aa, Vibrio angustum S14
MTSTLKGIGTKLLIAFSAMASLMIIAVMIGVAGFSLVAKTERTVINSAVPALAEARQLSDLSSRIIFNAQVLAKSKAESERMRQGRALTVHIEALNRSLHSLEQFSFDQPLMVKLEEDVKRIVDNLALLGLLVGRQIDLQSQLDKLTTEMTKATHQIDNLSQSQVSNASTIAVANVSRIYDLVADGNKPAVYKALDSLVEVDMDLSERLFELRFLSLQVINMLDDSSRIADIKSLVALKKRYNDAVGIMSQRVKSVEDPSRSEQLVELTAQLNRGRLLFGVIEQLIYAKQDVERLDQQNLVLFQQLNNTVDDIIDVANVNTQQAVKRVDHTLTLARNTLIVISAIGLLALVLIMWRFVYARVICRINEYSRALSALTRGDLGVKINVKGDDELAQMGRAILVARDTANERYRLAQAESKARQELQEHKASLERLVAKRTGELEKINRRLNEEVHNHYKARDEAEKANRAKSSFLATMSHEIRTPMNGVLGTASLLADTQLTSQQKRYLDVINRSGETLLDILNDILDYSKIEAGHLDIRPSNFSVVRMVTDVSSMLEGRALAKRIGLECHISPQVEGMWFGDESRIRQVLVNLVGNAIKFTDTGKVSIFVEPHPDMPDELLFSVKDTGIGIDQEEQNILFSAFQQAEAGRKSIEGTGLGLAISKHIVAAMDGEIGLESVVGEGSCFWFALPLEHGEGSLEPDDKRVIMRSAHILLVEDNPINSMVAEGFLTRLGHTVVTATDGAEAEEIYKKQRFDIALLDINLPDTDGVQLLSRLRRLEDNNHEAWEEPTPMVAFSAHVFREEVELYLNAGFAGFLPKPLVEKQLIDTMSSILKGEKRVIIEKGIGEESVEVKQTENTIPLLKESVLGSDLQVLGEAQVKQLIHLFGESSSLTLSKLHQAIDDENLSEVAKQAHTLKGAAGTMGLMQLHHICSEFEKNAKEGSINSLDLSSLQRVFDQSVGILKTTFISA

SEQ ID NO: 17792 - protein, 334 aa, Corynebacterium glutamicum
MTIRVGINGFGRIGRNFFRAVLERSDDLEVVAVNDLTDNKTLSTLLKFDSIMGRLGQEVEYDDDSITVGGKRIAVYAERDPKNLDWAAHNVDIVIESTGFFTDANAAKAHIEAGAKKVIISAPASNEDATFVYGVNHESYDPENHNVISGASCTTNCLAPMAKVLNDKFGIENGLMTTVHAYTGDQRLHDAPHGDLRRARAAAVNIVPTSTGAAKAVALVLPELKGKLDGYALRVPVITGSATDLTFNTKSEVTVESINAAIKEAAVGEFGETLAYSEEPLVSTDIVHDSHGSIFDAGLTKVSGNTVKVVSWYDNEWGYTCQLLRLTELVASKL

SEQ ID NO: 17793 - protein, 307 aa, Treponema pallidum subsp. pallidum str. Nichols
METDYDVIIVGAGAAGLSAAQYACRANLRTLVIESKAHGGQALLIDSLENYPGYATPISGFEYAENMKKQAVAFGAQIAYEEVTTIGKRDSVFHITTGTGAYTAMSVILATGAEHRKMGIPGESEFLGRGVSYCATCDGPFFRNKHVVVIGGGDAACDESLVLSRLTDRVTMIHRRDTLRAQKAIAERTLKNPHIAVQWNTTLEAVRGETKVSSVLLKDVKTGETRELACDAVFFFIGMVPITGLLPDAEKDSTGYIVTDDEMRTSVEGIFAAGDVRAKSFRQVITATSDGALAAHAAASYIDTLQN

SEQ ID NO: 17794 - protein, 508 aa, Pseudomonas syringae pv. syringae B728a
MNASLNHTTTSIARVKLLINGEWTDSQSSEWQDIVNPATQEILAQVPFATASEVDAAVAAAHAAYRTWRETPIGVRMRIMLKLQALIREHSKRIAAVLSAEQGKTLADAEGDIFRGLEVVEHACSIGTLQMGEFAENVASGVDTYTLRQPIGVCAGITPFNFPAMIPLWMFPMAIACGNTFVLKPSEQDPLSTLLLVELAIEAGVPPGVLNVVHGGKEVVDAICTHKDIKAVSFVGSTAVGTHVYDLAGRHGKRVQAMMGAKNHAVVLPDANREQTLNALVGAGFGAAGQRCMATSVVVLVGASKQWLSDLKARAQKLKVNAGQEPGTDIGPVISRRAKQRILDLIESGVREGATLELDGREVSVPGYEGGNFVGPTLFSGVTTDMQIYTQEIFGPVLVVLEVDTLDEAIALVNANPFGNGTGLFTQSGAAARKFQSEIDVGQVGINIPIPVPAPFFSFTGSRGSKLGDLGPYGKQVVQFYTQTKTVTSRWFDDDSVNDGVNTTINLR

SEQ ID NO: 17795 - protein, 409 aa, Schizosaccharomyces pombe
YPTGLILDACLGESQSIMFKKSGLRTLGTLHRDLIIDKLNHDDVTIITAVLDLREKHAESIMTPIEDVLTLPMDRILDEDLIGEIICAGYSRIPVHKPGFPHDFIGMLLTKTLIGYDPDDKWPVGKFALATLPQTWPNTSCLDLLNYCQEGKSHMILISNSPGEPHGAIGVITLEDIIEELIGEEIIDETDVYIDVHKGLPRVGENNDFWNRMLHRSHLSTMAALHKSQRSHDLAANEHAPILNPKNSALNPRLVTNDRVKVKSPSLIQSSTGYGSMSQSPSRSDLPSKISRVNAELQAHGSQRSSIDVSKENKSSVADGPSSQAHNGPSTQPPEALPNGTDPSSSKTTENNGNQQSERTESADGKKDNSGSISSNSSKTFTGKRVRLGNVIESNVVSPDGTNRLLLTI

SEQ ID NO: 17796 - protein, 228 aa, Arabidopsis thaliana
MVSPKIAPSMLSSDFANLAAEANRMIDLGANWLHMDIMDGSRRHFVPNLTIGAPVIESLRKHTNAYLDCHLMVTNPMDYVAQMAKAGASGFTFHVEVAQDNWQQLVEKIKSTGMRPGVALKPGTPVEQVYPLVEGTTPVEMVLVMTVEPGFGGQKFMPDMMDKVRALRQKYPTLDIQVDGGLGPSTIDTAAAAGANCIVAGSSVFGAPEPGDVISLLRTSVEKAQPTT

SEQ ID NO: 17797 - protein, 614 aa, Aspergillus oryzae
METVNTSERLSRLRELMQEHKVDVYIVPSEDSHQSEYIAPCDGRREFISGFSGSAGTAIVSLSKAALSTDGRYFNQASKQLDNNWQLLKRGVEGFPTWQEWTTEQAEGGKVVGVDPALITASGARSLSETLKKNGSTLVGVQQNLVDLVWGKDRPAPPREKVRVHPEKYAGKSFQEKISELRKELESRKSAGFIVSMLDEIAWLFNLRGSDIPYNPVFFSFATITPTTTELYVDADKLTPEVTAHLGQDVVIKPYDAIYADAKALSETRKQEAGETASKFLLSNKASWALSLSLGGEGQVEEVRSPIGDAKAVKNDVELAGMRACHIRDGAALTEYFAWLENELVNKKSTLDEVDAADKLEQIRSKHDLFVGLSFDTISSTGPNGAVIHYKPEKGSCSIIDPNAIYLCDSGAQYLDGTTDVTRTFHFGQPTELEKKAFTLVLKGVIGLDTAVFPKGTSGFALDVLARQYLWKEGLDYLHGTGHGIGSYLNVHEGPIGVGTRVQYTEVPIAPGNVISDEPGFYEDGKFGIRIENVIMAREVQTTHKFGDKPWLGFEHVTMAPIGRNLIEPSLLSDAELKWVNDYHREIWEKTHHFFENDEYTRSWLQRETQPISK

SEQ ID NO: 17798 - protein, 423 aa, Thermus thermophilus HB8
MKKSKRKNAQAQEAQETEVLVQEEAEELPEFPEGEPDPDLEDPDLTLEDDLLDLPEEGEGLDLEEEEEDLPIPKISTSDPVRQYLHEIGQVPLLTLEEEVELARKVEEGMEAIKKLSEITGLDPDLIREVVRAKILGSARVRHIPGLKETLDPKTVEEIDQKLKSLPKEHKRYLHIAREGEAARQHLIEANLRLVVSIAKKYTGRGLSFLDLIQEGNQGLIRAVEKFEYKRRFKFSTYATWWIRQAINRAIADQARTIRIPVHMVETINKLSRTARQLQQELGREPTYEEIAEAMGPGWDAKRVEETLKIAQEPVSLETPIGDEKDSFYGDFIPDEHLPSPVDAATQSLLSEELEKALSKLSEREAMVLKLRKGLIDGREHTLEEVGAFFGVTRERIRQIENKALRKLKYHESRTRKLRDFLD

SEQ ID NO: 17799 - protein, 116 aa, Triticum aestivum
  misc_feature (60)..(60): Xaa can be any naturally occurring amino acid
  misc_feature (81)..(81): Xaa can be any naturally occurring amino acid
MARAAATQLVLVALVAAMLLVATDAAISCGQVSSALSPCISYARGNGANPTAACCSGVRXLAGAARSTADKQAACKCIKSXLAGGLNAGKAAGIPSKCGVSVPYAISASVDCSKIR

SEQ ID NO: 17800 - protein, 474 aa, Listeria ivanovii
MRTDMNNLNLSEEIKRAINELGYKEATPVQKEVIPVALTGKDIVAKSQTGSGKTAAFAIPIAEQVIWEENKPQALIIVPTRELAMQVKAECTNIGRFKRIKAAAIYGQSPFAKQKLELSQKNHIVVGTPGRLLDHIEKGTLNVDKVAYLVLDEVDEMLSMGFIDQVEDILQFLPKKRQNLFFSATMPEEMQDLIKRYQDDPIVIEMAAEKTNPITHIEMQTENKEKTLQDVLITENPDSAIIFCNTKNQVDELSDLLQVNTAKIHGGLRQEERFRAMDDFKSGKSRFLIATDVAGRGIDVENVTLVINYDLPIEKENYVHRIGRTGRAGNSGKAISFVKTNENPLLRDMEDMLKITIEKKRKPTIIEVKASEEAFRKKQQKRPTIKKARGEKLNKNIMKLYFNGGKKKKIRAVDFVGTISKLEGITSEDIGIITIEDHVSFVEILNGKGPAVLEMMRSRKVKGRQLKVNEARKR

SEQ ID NO: 17801 - protein, 371 aa, Mnium hornum
SDSGKDAGRLSAAWQMFKSQEELVQVAKQYGVQLTVFHGRGGTVGRGGGPTHLAILSQPPDTVNGSLRVTIQGEVIEQSFGEDELCFRTLQRFTAATLEHGMHPPLAPEPEWRALMDDMAAVSTAEYRKIVFNNPQFVRYFRKATPVLEYGRMNIGSRPSKRKPKGGIESLRAIPWIFAWTQTRFHLPVWLGMGAAFKQVLKADDIIITILRKMYNQWPFFRVTVDLVEMVFAKGDPRISALYDRLLVDDELEHIGVELRSRYDETKELLHQVVEHDELLAGSPFLKHKLRLREYFISPLNVQQVYTLKKMRDSRSQICDPLQEAILEELRSGKESSELVTRNTTTEHPPGLEDTLILTMKGIAAGMQNTG

SEQ ID NO: 17802 - protein, 405 aa, Thermus thermophilus HB8
MALVVQKYGGTSVGDLERIHKVAQRIAHYREKGHRLAVVVSAMGHTTDELIALAKRVNPRPPFRELDLLTTTGEQVSVALLSMQLWAMGIPAKGFVQHQIGITTDGRYGDARILEVNPARIREALEQGFVAVIAGFMGTTPEGEITTLGRGGSDTTAVAIAAALGAKECEIYTDTEGVYTTDPHLIPEARKLSVIGYDQMLEMAALGARVLHPRAVYYAKRYGVVLHVRSSFSYNPGTLVKEVAMEMDKAVTGVALDLDHAQIGLIGIPDQPGIAAKVFQALAERGIAVDMIIQGVPGHDPSRQQMAFTVKKDFAQEALEALEPVLAEIGGEAILRPDIAKVSIVGVGLASTPEVPAKMFQAVASTGANIEMIATSEVRISVIIPAEYAEAALRAVHQAFELDKA

SEQ ID NO: 17803 - protein, 288 aa, Thermus thermophilus HB8
MILVNRETRVLVQGITGREGQFHTKQMLSYGTKIVAGVTPGKGGMEVLGVPVYDTVKEAVAHHEVDASIIFVPAPAAADAALEAAHAGIPLIVLITEGIPTLDMVRAVEEIKALGSRLIGGNCPGIISAEETKIGIMPGHVFKRGRVGIISRSGTLTYEAAAALSQAGLGTTTTVGIGGDPVIGTTFKDLLPLFNEDPETEAVVLIGEIGGSDEEEAAAWVKDHMKKPVVGFIGGRSAPKGKRMGHAGAIIMGNVGTPESKLRAFAEAGIPVADTIDEIVELVKKALG

SEQ ID NO: 17804 - protein, 206 aa, Ustilago maydis 521
MVGTLVLTRHGQSEWNKLNLFTGWKDPALTELGREEALTGAKRVAATGIKFDVAFTSALQRAQTTLGIQLKEIGQEDIPIHKDQALNERDYGELSGLNKDDARKKWGEDQVHIWRRSYDIPPPGGESLKLTAERVWPYYHKEILPLVKQGKNVIVAAHGNSLRAMIKDIENISDDDIVGLELATGVPILYKLDSDGKVVSKEILQG

SEQ ID NO: 17805 - protein, 500 aa, Caulobacter crescentus CB15
MQSMADAETADTFGCHALVGGTPKVSFWTRRKAIDTITAGHADSHQLKKTLSWPHLVALGVGAIVGTGIYTLTGVGAGLAGPGVILSFLIAGAVCACAALCYAELSTMIPASGSAYTYSYAAMGEPVAWFVGWSLILEYTLVCAAVAVGWSAHAHGLFKMIGFPDALLAGPHQGGLINMPAVFISMAVAGLLALGTRESATVNMVLVFVKIIALIVFVVLCLPAFNLAHFTPFMPNGFQAHVPEGAAADAAKVGVMAAASLIFFAFYGFDAVSTAAEETKNPKRDLTIGIVGSMAVCTAIYMIVAAVSIGASRTEVFSKSEAPLVFILESLNHGKIAQLVALAAVIALPTVILAFMYGQSRIFFVMARDGLLPRALSKVNAKTGTPVMMTLLTGVLAAVISGLLSLKDIAELANAGTLWAFIAVGASVILLRLREPNRPRVFSTPLWPIVAPAGILGCLYLFLSLPGKTQLYFLYAHLIGAVVYLAYGMRKSVLAQQERA

SEQ ID NO: 17806 - protein, 341 aa, Streptomyces avermitilis MA-4680
MRIGVLTAGGDCPGLNAVIRSVVHRAVTMYGDEVIGFEDGYAGLLDGRYRALDLNAVSGILARGGTILGSSRLQRDRLREACENAQDMAREFGIDALIPIGGEGTLTAARMLSDAGLPVVGVPKTIDNDISATDRTFGFDTAVGVATEAMDRLKTTAESHQRVMVVEVMGRHAGWIALESGMAAGAHGICLPERPFDPAHLVKMVEERFARGKKFAVLCVAEGAHPVVGSMDYSHGAIDQFGHERFQGIGTALAAELEHRLGKEAKPVILGHIQRGGTPTAYDRVLATRFGWHAVEAAHRGDFGRMTALRGTDVQMVPLAEAVTELKTVPKDRMDEAESVF

SEQ ID NO: 17807 - protein, 152 aa, Arabidopsis thaliana
  misc_feature (64)..(64): Xaa can be any naturally occurring amino acid
  misc_feature (72)..(72): Xaa can be any naturally occurring amino acid
  misc_feature (75)..(75): Xaa can be any naturally occurring amino acid
  misc_feature (88)..(88): Xaa can be any naturally occurring amino acid
  misc_feature (93)..(93): Xaa can be any naturally occurring amino acid
  misc_feature (105)..(105): Xaa can be any naturally occurring amino acid
  misc_feature (126)..(126): Xaa can be any naturally occurring amino acid
  misc_feature (143)..(143): Xaa can be any naturally occurring amino acid
MASSMLSSNAVVKSQAQATMVAPFTGLKSSASLKVTRKANNDITSITSNGGRVSRMKVWPPIGXKKYQTLTXLTXLGESERLRKLAKXLRNKXVPSVELELQHGXMLRDHGYTPGYSDGWYWTMWXLHMFGILESAQVFKAVXSCNYEYPGA

SEQ ID NO: 17808 - protein, 1148 aa, Burkholderia sp. 383
MDIQEKKGYCTLCRSRCGTINVVRGDMMIKVWPDETHPTGHAMCMKGKAAPELVHSPNRVLYPMRRTRPKGAADPGWKRIGWEEALSEIAERLAYFKRENGAESVAFGVTTPSGTPMSDSIDWVERFVWLFGSPNICYATEICNWHKDSAHVFTFGCGMPTADYQQADLIVLWGNNPANTWLAQADAIAKGRRRGAKLIVVDPRPTPLAREADLWLRVNPGTDGALAMAIARQMIAIGNVDEPFVRRWTNGPLLVRADTGRFLRERDIDPHASGNRYALWNQTLDRLELVEEEAGTALSDLSMTGTRHVGITDSAGRCTQVECTPAFDLYARALAAYTPELASTITGIDAADIMKAAQMLHPGQGIAYHAWSGVGMHTNATQTERAIATLYALTGAFDTRGSNREWAKQPANAVSSYAMLNPGQRAKALGLAERPLGPPSQGWVTARDVYRAILDAEPYRVRALFAFGTNMVLSQADGGIAHNALCALDFHVHCDLFETPSSRYADILLPVNTPWEREGLRLGFEINERAVELVQLRQRMVPPRGESRADYDIVFDLAVRLGMKDRFFGGSIEAGWNHVLEPLGMDVALLRTHPEGIARPLTQYERRYASATPDGVRGFNTETLRVELYSEKLHRHGYPAVPQYVPPQHGLGEGVNDRRRFPYTLTSMKNGYYCHSQHRGLPSLRRRAPYPVAELNDALAAEHGIVDDDWFLVETTNGSARFKARIVPELAHDVIVAEYGWWQACDEIGMDALAVEGRNHSNFNRLVSAARLDPVSGSSPLRSVRCRIRPDPSTDPSRRAWKGRRDFVVSAIHEEASGVRTVTFRASDRGALPDYLPGQHVTVHVPALGDGGTTRAYSLTGAASEDDRRTYSISVRHQKGRTGEGVPFEGAMSSYIHGSLKVGDPVLLGAPAGTFIVPPASKQPVVMFAGGIGITPFISYLESIRDRGAQAPESRLFYANQNSGTHAFRERIERLKQRLPKLEVVNCYNQPHDEVLGRDYQIRGYLTADVVSDDLIQRRARFYLCGPEPMMQAITAGLIERGVPPFDIFKEAFRSPSRPALDPSKRFVVQFTRSRRVSTWTPRDGSLLSFAESLGVVMPSGCRVGQCESCAVKVVSGEVAHLSGHGPDEPDVCLACQAIPATDVAIDA

SEQ ID NO: 17809 - protein, 356 aa, Medicago truncatula
MSRPDYPTTWIPYINSKDCSQGFCSVYCPQWCYIVYTPPPPPPFQYPDDDSKPYFSPLVIAILGVLATAFLLLTYYTLISKYCGHRESSRRNTNDPVDEIQENRRENCQVSTFGLDDAQIKSIAVFSYKKGDAFFSTTVTDCSVCLSEFQDDESVRLLPMCNHVFHLPCIDTWLKSNSSCPLCRSSVFTSNASTHHVQVPVTIIELPSRNETFLEEQQIVVEEAMMQHSRVESKAPSLRAFSDLCNLQGRERIIEIRDEVCESIGRSVSMDHSFQNGFSIGDVLNMNEDEDDSCEEGCSMDVSSSKISQGESSKSRYKRRVLHCVMSPIAMKRSFSNGRFSLGKIDRGKRQGILPV

SEQ ID NO: 17810 - protein, 597 aa, Triticum aestivum
MAQAWAFLLPVLVFGSYVTSLFFPSYISGPLCGGDGGGRSLFLCAQAPKDQDPSPAVSTMYKTAFHFQPAKNWMNDPSGPMYFNGFYHEFYQYNLNGPIFGDIVWGHSVSTDLVNWIGLEPALVRDTPSDIDGCWTGSVTILPGGKPVIIYTGGDKDQHQAQNIAFPKNRSDPYLREWIKAANNPVLRPDEPGMNSIEFRDPTTGWIGPDGLWRMAVGGELNGYSAALLYKSEDFLNWTKVDHPLYSHNGSNMWECPDFFAVLPGNNAGLDLSAAIPQGAKHALKMSVDSVDKYMIGVYDLQRDAFVPDNVVDDRRLWLRIDYGTFYASKSFFDSNKNRRIIWGWSRETDSPSDDLEKGWAGLHTIPRTIWLADNGKQLLQWPVEEIESLRTNEISHQGIELNKGDLFEIKEVDAFQADVEIGFELASIDDADPFDPSWLLDPEKHCGEAGASVPGGIGPFGLVILASDNMDEHTEVYFRVYKSQEKYMVLMCSDLRRSSLRPDLEKPAYGGFFEFDLEKERKISLRTLIDRSAVESFGGGGRVCITSRVYPAVLADVGRAHIYAFNNGSATVRVPQLSAWTMRKAQVNVEKGWSAI

SEQ ID NO: 17811 - protein, 819 aa, Rubrivivax gelatinosus PM1
MKKMKLVMVGNGMAGVRTLEELLKIAPDLYDITVFGAEPHPNYNRILLSPVLAGEQTVDEIILNPLDWYAEHGIALHLGKKVTEIDRVKRIVRASDGTEAEYDRLLIATGSNPFILPVPGKDLEGVIAYRDIADTNTMIQTAEKYRHAVVIGGGLLGLEAANGLMLRGMQVTVVHIMPWLMERQLDDVAGRLLQKSLEDRGLKFLIGAQTEQLIGDKDGRVMAVRFKDGQEIPADLVVMAAGIRPNTELALKAGLHCFNDGRGGIVVTDTLQTVTDPRIYSVGECAAHRGIAYGLVAPLFEQGKVCATHLAQFGIGRYTGSLTSTKLKVTGIDLFSAGEFMGGTDTEEIVMSDPFGGVYKKLVIKDDKLVGACLYGDTVDGSWYFKLLREGRSVADIRDKLMFGESNIGDTGHEGHSKAAAMADSDEVCGCNGVTKGAICKAIKEKGLFTLEEVKKHTKASASCGSCTGLVEQLLMFTAGGDYSAAPTKKAMCGCTDYSHAEVREAIRTVPSDGSKLLTVDGVYKALNWRTPNGCSSCRPAVNYYLISTWPKEARDDPQSRFINERSHANIQKDGTYSVIPRMWGGETTASELRRLADAVDKYKIPTVKVTGGQRIDLLGVKKEDLPAVWKDIGMPSGHAYAKALRTVKTCVGSEWCRFGTQDSTQMGKDLERAMWRMYAPHKVKFAVSGCPRNCAEAGIKDVGIIGVDSGWEMYVAGNGGIKTEVAHFFVKLKTPEEVLEYTGAFCQLYREEGWYLERTVHYVNRVGLDYVKKKILDDAEGRKALWERLQFALDGEPDPWFEFDKAEVDKRQFDALNA

SEQ ID NO: 17812 - protein, 682 aa, Crocosphaera watsonii WH 8501
MALVVQNILEMPTLTATPLNFPLTAVVGQEAIKLALLLAAVDPGLGGVVIAGRRGTAKSVLARGIHALLPPIERIEENPFNCDRDKPSEWDDNTQEQYLNQRPEDITTEIVPAPFIQVPIGVTEDRLLGSVDVEESVKQGEAIFQPGLLAQAHRGVLYVDDINLLDDQISNQLLSVLTDGRNQIEREGISFQHPCKPILISTYNPEEGPLRRHLLDRIALALSADGILALDQRVQAVNQALDYANSPQSFLAQYDEEIDDIRTQIILAREWLKEVIITPDQIQYLVEEALRGGVEGHRAELFAVRVAKASAALDGRNTINSEDLRRAVELVIVPRSTMMQPPPEDAPQPPPPPPPQQPQDDSNQDQDEQEEEEENNEEPEQEPPGIPEEFVFDIEGVILDPSVLYFAQMAQNQGKSGSRNLIFSDDRGRYVKPMLPKGKVRRIAVDATLRAAAPYQKYRRLRHPGRSVIVEQGDIRSKRLARKAGALIVFVVDASGSMALNRMQSAKGAVMRLLTEAYENRDQVSLIPFRGEQADVLLPPTRSISLARKRLETLPCGGGSPLAHGLTQAVHVGMNAKMSGDIGQVVIVAITDGRGNIPLAKSLGEPIPEGEKPDIKQELLDIAGKIRALGIKLLMIDTEKKFVSTGFGKEMAQTAGGTYYQLPRATDQAIAQMARGAIADLK

SEQ ID NO: 17813 - protein, 639 aa, Salinibacter ruber DSM 13855
MGVIPYIGSPSTRRLPGSPPRILTARHTTEIMAQVDVEMPKMGESITEGTVIAWHKQPGDEVEQDEILLEIGTDKVDTEVPSPKGGVLTETLVEEGDTVEVGTIIATLDTDTAAAEVDADDEPPAEAPSDDEAAADEAKEAAPDADAEDEAEATPPETDSEEAASPAPSGDEVEVVMPKMGESITEGTVVAWYKDIGEAVAIDETILEIGTDKVDTEVPSPAEGVLTEKLVEEGETVEVGTVVALLASEAEAGSVEPPASDEPDTTQETAPEADEAELPSTPPSGDGAVPDADEPQRAPEETITRRGDDGRFYSPLVRSIAKEEGLRMSELESLEGSGRGGRVTKEDVLAYLDEREEAPAAPASAPERPPRPGRSDEAPPARGDYTVDEGPSDEELRQQYGDRIEVQPMDRMRKMTAEHMVRSKATSAHVTSFAEADVTGLVQLREANKEAFREREGVKLTYTPFFVKAAVEALREHPLLNASVEGDKIVIKHDFHVGIAVAIGNKGLLAPVIRNAGDYNVSGLARKAANVAERARNKELQPDELQGGTFTVTNIGSLGSLMGTPIINQPQVGILATGAIQKRPVVVENDGLGDAISVRHMMYLSLSYDHRIIDGAMGSSFLQRVVTELESFSADADLF

SEQ ID NO: 17814 - protein, 936 aa, Rhodothermus marinus
MLPPLQIEIEGTGISRPLSEHVNLLGGLLGQVIQEMAGPEMLELVETLRRLCKQAAQENRPEFREQAYTRIHSATYDELLWLLRAYTAFFHLVNQAEQQEIIRINRERAQQSTPERPRPESIDEAILALKQQGRTLDDVLTLLERLDIQPTVTAHPTEARRRSILYKQQHIAQMLSQQRRCQLTPEEQETLLLDLHNQITLLLGTAEVREERPTVRDEVEQGLYFIQSTIWEAVPRIYEDVRRALRRYYGADVDFRPFLRYRSWIGSDRDGNPYVTPEITRWTALTQRRLALQRYMEELRQLRRRLSLSDRYVAPPEELRRSLARDAREVSLPPHVLRQFRHESFRLKISYIMGRLHGLLQALDDPTQPAPDYDADAFVEDLRLLQRCLEACGLERIARHDQLTRLLVLAQTFGFHLVTLDVRQHSSVHEAAVAELLRLAGVENDYRALPESRRQELLAEELSNPRPLLPPGARVSEATRQVLETFAVIRELVQLDPRLVGSYIVSMTHTVSDLLEPMLLAKEVGLWHYERDPRTGKPGHVRCPIDFVPLFETIEDLEAAASRMEAILSHPVYRMQVAARGGFQEIMLGYSDSTKDGGYWMANWALHRAQEQLAEVCLRHGVDFRLFHGRGGTVGRGGGRANQAILAMPPVVHNGRIRFTEQGEVISFRYALPEIAHRHLEQIVNAMLRVVGLPAASGTDGTDPATRNRLMDELAARSMRAYRRLIDAPDFWSWYTRITPIDQISRLPIASRPVSRSSAREVDFESLRAIPWVFAWTQVRYLIPGWFGIGQALDELLQTSPEHLETLRTWYRSWPFFRTVLQNAQREMVRARLEIAAYYDRLLGDGPTAFHQMIEEDYHRARTAILRITDQESLLDHDPIIRKSVQLRNPYTDVLNLVQLELMRRIRSGAEADREPLRRALFLSINGIAAAMQSTG

SEQ ID NO: 17815 - protein, 199 aa, Triticum aestivum
  misc_feature (26)..(26): Xaa can be any naturally occurring amino acid
MSSTRPTSWRRRRRRPTCRLQFLMPXLSTGYHFRPIKNWINDPNAPMYYKGWYHFFYQYNPKGAVWGNIVWAHSVSRDLINWVALETAIQPSIKSDKYGCWSGSATILRDGTPAIMYTGIDRADINYEVQNIAFPKNKSDPLLREWVKPQSQPDHPARRAGITATQVPGPRPPPWSPERPWAVALRPLFGAPPGGRTLT

SEQ ID NO: 17816 - protein, 343 aa, Lycopersicon hirsutum
MEMDLPVSAIGFEGFEKRLEISFVEPGLFADPNGKGLRSLTKAQLDEILGPAECTIVDNLSNDYVDSYVLSESSLFVYSYKIIIKTCGTTKLLLAIPPILRLAETLSLKVQDVRYTRGSFIFPGAQSFPHRHFSEEVAVLDGYFGKLAAGSKAVIMGNPDKTQKWHVYSASAGTVQCNDPVYTLEMCMTGLDREKASVFYKTEESSAAHMTVRSGIRKILPKSEICDFEFEPCGYSMNSIEGAAVSTIHITPEDGFSYASFESVGYDPKTTELGPLVERVLACFEPAEFSIALHADVATKLLERVCSVDVKGYSLAEWSPEEFGKGGSIVYQKFTRTPYCESP

SEQ ID NO: 17817 - protein, 572 aa, Photorhabdus luminescens subsp. laumondii TTO1
MRTSQYLLSTLKETPADAEVVSHKLMLRAGMIRKLASGLYNWMPTGIRVLKKVEKIVREEMNNTGAIEISMPVVQPADLWQESGRWEQYGPELLRFVDRGDRPFVLGPTHEEVITDLIRNEVSSYKQLPLTLFQIQTKFRDEVRPRFGVMRSREFLMKDAYSFHATQTSLQETYDNMYEAYSKIFTRIGLDFRAVLADTGSIGGSASHEFQVLAASGEDDIVFSTESNYAANIELAEAVAPAHDRAVPTEDMHLVDTPNAKTIAELVEQFNLPIEKTVKTLMVHAAEGTSHKLIALLVRGDHELNEIKAEKLSLVASPLTFATEEEIRSIVGAGPGSLGPVNLPIPAIIDRSVAVMSDFGAGANINDKHYFGINWERDLPVPEVADIRNVVEGDASPDGKGTLLIKRGIEVGHIFQLGTKYSDAMKATVQGEDGHNQIVTMGCYGIGVTRIVAAAIEQNHDDRGIIWPDAIAPFQVAILPMNMHKSYRVKEVAEKLYADLRASGIDVIFDDRKERPGVMFADMELIGVPHTVVIGDRNLDNGEVEYKHRRNDEKQMLKLDNVVDYLKQQLGC

SEQ ID NO: 17818 - protein, 561 aa, Arabidopsis thaliana
MDFDEYEYLEKTVENPHLENEVGNGGGDEKVKSEGKERSRSSRHRGDKKKERDEDEDGRRSKRSRSHHRSRSRDRERDRHRSSREHRDRDREKDVDKEERNGKDRERDRDKDRDSKGRDHEKDRSRRSRSRSERHRSQEREKSLEIEPKERETKDRDRDRRRHKDKKEDKVEPEADPERDQRTVFAYQIALRATERDVYEFFSRAGKVRDVRIIMDRISRRSRGIGYVEFYDTMSVPMAIALSGQPLLGQPVMVKPSEAEKNLVQSTTAAAGAGGMLGPYSGGARRLYVGNLHINMSEDDLRKVFESFGSVELVQVPRDETGLCKGFGFVQFARLEDARNALNLNGQLEIAGRAIKVSAVTDQTEVPEAGQTQTTGDLDDDDGGGLSLNAQSRALLMQKLDRSGTASSTGLTTAASFNGGVSTISSLAAPALVQGSFPAVAGLAGSGIIPGVIPAGFDPIGVPSECLLLKNMFDPSTETEDDFDEDIKEDVKEECSKFGKLNHIFVDKNSVGFVYLRFENAQAAIGAQRALHGRWFAGKMITATYMTTEAYEAKFPESKVV

SEQ ID NO: 17819 - protein, 957 aa, Salinibacter ruber DSM 13855
MPRWDDLDLETEGTGISKPLSRQVNLVGSMLGHIAEEQSGEALFEHVEGLRALCKAAEQEDAPEKREEAAERIAALDQDTLERLLHVYTTFFHLVNQAEQQEIIRINRERARQSGPSEWPLGPGDGPGADGAEPRPQSIDAAVADLKAEGYTADEVVAFFRQLDIQPTLTAHPTEARRRSVLRKEQHIADLLSTLRRPDATPDERAETLDRLYSQVAFLLGTDEVRAERPTVREEVEQGHYFLHGSIWDTIPAIHRDVQQALRRHYDATAELPAFLQYRSWIGSDRDGNPNVTADVTRWTVARQRRTTLEHYLDEIDELRDDLSISTRQLTVSDALEASLEADAEEIALPDDVRRQYQREPYRLKLCYIEERLRGLLDRIDATDVAAMAGAYAADDLLADLDLIAESLQGHGFEDAAQSGQLHRLRSLVKTFGFHLAALDVRQHSRVHEDTVAALLDAGDVVDDYGALSEEEKLEVLSRELQNPRPLVSRHADLPADAAELMEVFGVLRAMHAVDPDIVGSYVVSMTHTVSDLLEPMLLAKEAGLGAVVDGSYRCPLDVVPLFETIEDLDAADDRMETLFTHPVYAAQLEGRDGFQEIMLGYSDSNKDGGYWMANWALHKAIHALGVVCDEHDVDLRLFHGRGGTVGRGGGHTSQAIRALPPVVHNGRIRMTEQGEIISFRYALPDIARRHVEQIVNATLTATARAQNTPAPENPLLADKVSMESDVVALMDRLAEEGMSAYREFIDDPEGWQWYTAATPIEHISRLPIASRPVSRASEGEQVEFENLRAIPWVFAWTQTRYIAPGWYGTGQGLATLLENEPDARDTLRDLYENWPFFRTVLDSAQREMARARLPIAERYDALAEVETSFHAPIVDDYERAESAILEITDQAALFDGNPVLKKSIELRNPYTDVLNLIQIELLKRYRASTDDAEQEALREAIFLSINGVAAAMQSTG

SEQ ID NO: 17820 - protein, 262 aa, Geobacter metallireducens GS-15
MSYEAIMLERNGAVGVLTFNRPEVLNAYNRTLAADIITGFNELVADKSVRAIVLTGAGKAFMAGADINMVNGWTKLGNAAKIKEDLRQLVNPNMIEDCPKPTIAAVNGLAFGMGCELAMACDFRIAAEKAQFGQPEVKLGIIPGAGGSQRLRELVGPTRALEMISTGDPIDAQEAYRIGLVNQVVPRDELMEAVNAFAGRLIDKGAVVLDICKKLVYEGGDLPLRGGIDYEQDQFCKILLTADAQEGTLAFLEKRKPVFNKG

SEQ ID NO: 17821 - protein, 336 aa, Symbiobacterium thermophilum IAM 14863
MSGTKELYDVTLIGAGPTGLFGVFYAGMRGMKTKVIEALPEVGGQLAALYPEKDIFDVAGFPRISAKRLVEQCKEQADSANPDATYVFNQRVDKLNRLEDGTFELVTHTGERHYSKAVIITAGIGAFEPNRIPNESARQYEGKGVFYSVTNLPQFEGKRVLVIGGGDSAVDYALMVEPIAAEVTLIHRRDGFRAHEESLKKLAASRVHVKVFYELRRVEGDGNWVKKATIFDNRTGEETTIDVDCVIIGTGFKASLGSMLEWGLEIENKRQIVVNSKGETNIPGVYAAGDICWYPGKIRLIATGFGEVATAVNNAKAFIDPGSAAFPGHSSEQRNK

SEQ ID NO: 17822 - protein, 180 aa, Solibacter usitatus Ellin6076
MMKMMLLGMAMGAMAFGASSVYDFTLNSIDGAPTPLSTFKGKVVLLVNVASKCGFTPQYAGLEKLYEKYKDQGLVLVGVPANNFGAQEPGSNEEIKTFCSRNYNVTFPMMSKVSVKGADKTPLYQYLTDASANPKTAGEIKWNFTKFLIDKKGNVINRFESAVTPESADMLKAIEAALAQ

SEQ ID NO: 17823 - protein, 860 aa, Dechloromonas aromatica RCB
MQLASRFSSLSATALTRRFVIGWLIVVLSVVALVAYFVRASFEQQKQRTLLEVENLSMLLERDIAANLEKVDLILRVAIDEYAGLKEKKAVDAVTVDRFLARQRDRLKPLVALRIANAAGEVILGTDGGTGSNAMIDDREYFRQLRDDPAAGLLISKPIRGRISGKWAIILARRLPDVGGHFSGIALASVGLDNFTHQFTALQMGPRGSVAMRAADLSLLARVPWDEAVAEYGSTKISQDFQRALAADPGAGVYFSGATSLDGVHRLHAYRFNSDYRFYINIGVPEDSYLAPWHHQLYGVLAMLALFLALSGGTVYLLHGYASRLGERERMLRTIFDTSDGAIFLVDPAGKIVLANERMATMWDVPLAELVGSEYVSLIHPAEREFGRERMLKLMASEIPFVRLEREYVKRDGTVFWGFLCGRRLLDEQGKFVGLVGLIADIDEPKRNARELETYRQHLEDLVRERTAQLEGAKDAAELANRAKSAFLANMSHEIRTPMNAIVGFAHLLRRDGVTPKQADRLDKIMGSAEHLLAIINDVLDISKIESGKLVLEAKPFRVVDVVERLVGLCAERAQSKGLAFRTMVGALPPVLVGDCTRLSQALLNYVGNAIKFTEAGTITLRAEVLEEDAHSLLVRFEVQDTGIGIAGDVLSRLFRPFEQADNSTTRKYGGTGLGLAITLRLAELMGGQAGVDSEAGVGSTFWLTARFGKANSAEPGGLAGQSGRAPAAGSTLRRAHILLVEDDPLNREVAAILVEEMTGVPVDLADSAEQAIAKVQATAYDLILMDLLMPGMDGLEATRRIRALPGYATTPIIALTANAFAEDRERCLAAGMNDHLGKPVVPERLQAVLEHWLAPGSLQ

SEQ ID NO: 17824 - protein, 599 aa, Bordetella pertussis Tohama I
MSVTDNRIGALRRAMRQHQLDAYIVPSADPHLSEYLPGRWQGRRWLSGFTGSVGTLVVTRDFAGLWVDSRYWVQAENQLAGTGVTLMKIAQASTPGHVDWLAARLPAGSRVGVDGQVLGLAAFRALSAALAPAGIHLDILSDLLQAIWPDRPGLPSAPVYELPAPHACEPRADKLARVRAAMRAQGADAHWLSTLDDIAWLFNLRGSDVEYNPVFLAHALVGPDHATLFVADGKIDAALRQALAADGVETADYGLAAEALGSLHTDQTLLIDPARVTCGVFHAMDPAVPRIEAINPSTLYKSRKSDAELASVRAAMEQDGAALCEFFAWFEGAVGREPVSELTIDERITAARSRRPGYVCPSFATIAGFNANGAMPHYRATPQAHAAIEGDGLLLIDSGGQYLGGTTDITRVVAVGAPSADQKVDFTLVLKGMIALSRASFPRGTPSPMLDAIARAPIWAGGAEYGHGTGHGVGYLLNVHEGPQVISYRAAPGPHTAMEPGMITSNEPGIYRPGRWGVRIENLVANRTWLEGELGEFLCFETLTLCPIDTRCIDATLLRADEIAWLDDYHRTVRERLAPWVEGAALQWLQARTRPLGAD

SEQ ID NO: 17825 - protein, 373 aa, Fusobacterium nucleatum subsp. vincentii ATCC 49256
MESFFRPKIRRIFMTDAIKDLVKIKVIGVGGGGGNAINDMLYSGVTGVEYIAANTDKQDLEKSLADVKLQIGEKLTKGQGAGASPEVGRQAAEEDIEKIQELLKGTDMLFITAGMGGGTGTGAAPVIAKAAKELDVLTVAVVTKPFNFEGERRKNNAESGIELLRQNVDSLVIIPNDKLFDLPDKSITLQNAFKEANNILRIGIKAVVDLVLGQGFINLDFADIKSVLKDSDIAVLGFGDGEGENRAMKAAEKALQSPLLEKSIQGADKILINLMTSQDVGLSESQTVTDVIRQAAGKKIEDVMFGVTIVPEFTDRIEITIIANNFKDGVDTNTDSPIRMDNSKPAEPLRETERKKDPEEEFDIPPWMRNNKR

SEQ ID NO: 17826 - protein, 869 aa, Mycobacterium leprae
MTRTSETTKSPAPELLTQQQAIDSLGKYGYGWADSDVAGASARRGLSEDVVRDISAKKDEPEWMLQARLKALRVFERKPMPRWGSNLDGIDFDNIKYFVRSTEKQAASWDELPEDIRNTYDRLGIPDAEKQRLVAGVAAQYESEVVYHQIRADLKDQGVVFLDTETGLREYPDIFKQYLGTVIPAGDNKFSALNTAVWSGGCLTADARINVKGKGLVSIADVQPGDEVFGVNIGCELERGKVLAKVASGTKPVYEMHVAGRALEATGNHQFLVARRVEEGKRTRWTAVWAPLEEIESGEPIAVARVLPDDSGTIFFSESELDIKNRTRQCLYFPCQNSVDLLWLLGLWLGDGHTAAPHKHMRQVAFSVPAGDPVHHTAIRVVSEQFGANVTVVNCGFIVSSKAFETWLAELGFSGDEKTKRLPAWIYSLPHEHQLALIGGLVDADGWTESSGATMSIAFASRELLEDVRQLAIGCGLYPDGALVERTRSATCRDGRIVTSTSWRLRIQGSLDRVGTRTPGKRGKPVSNKGRRQRYVAAAGLNFSSLSTDTVGFARLKSKTLVGEKPTYDIQVVGLENFVANGIVAHNSFIYVPPGVHVDIPLQAYFRINTENMGQFERTLIIADTGSYVHYVEGCTAPIYKSDSLHSAVVEIIVKPHARVRYTTIQNWSNNVYNLVTKRARVETGATMEWIDGNIGSKVTMKYPAVWMTGEHAKGEVLSVAFAGEGQHQDTGAKMLHLASNTSSNIVSKSVARGGGRTSYRGLVQVNKGAHGSRSSVKCDALLVDTISRSDTYPYVDIREDDVTMGHEATVSKVSENQLFYLMSRGLAEDEAMAMVVRGFVEPIAKELPMEYALELNRLIELQMEGAVG

SEQ ID NO: 17827 - protein, 504 aa, Zea mays
MAQDVLELVQTRGTDAASVWESLDKIPQAHDLWDDIVNVAVQLRLNRQWEPIITVCEWVLRRSSFRPDIICYNLLIDAYGQKRQLSEAEAAYMALLEARCVPTEDTYALLLRAYCGSGQLHRAEGVISEMQRNGIPPTATVYNAYLDGLLKARCSEKAVEVYQRMKKERCRTNTETYTLMINVYGKGSDDLRSDSKANQPMSSLRVFREMKSVGCKPNICTYTALVNAFAREGLCEKAEEVFEEMQQAGHEPDVYAYNALMEAYSRAGLPQGASEIFSLMEHMGCEPDRASYNILVDAFGRAGLHQEAEAAFQELKQQGMRPTMKSHMLLLSAHARSGNVARCEEVMAQLHKSGLRPDTFALNAMLNAYGRAGRLDDMERLFAAMERGDGAIAGAPDTSTYNVMVNAYGRAGYLDRMEAAFRSLAARGLAADVVTWTSRIGAYARKKEYGQCLRVFEEMVDAGCYPNAGTAKVLLAACSDERQVEQVTAIVRSMHKDAKTLFAL

SEQ ID NO: 17828 - protein, 530 aa, Zea mays
PCTQTNTKPSSSPMASHPPPAEPSSKSNKGQSEHEEIHVSSGGVLAYTDDDDCESRRPLLLRTPASAECYSVSAAVFPFLFPALGGLLYGYDIGATSGATISLKSSTFSGTTWYNLSSVQTGLVVSGSLYGALIGSVLAYTIADFLGRRKELILASISYFIGAFLTAVAPNFAIMVVGRFLYGIGIGLAMHAAPMYIAETAPSQIRGMLISLKEFFIVLGMLLGYIAGNLYVEVVSGWRYMYASSTPLCLIMGVGMCWLPSSPRWLLLCAIQGKGNLPETKENATRCLCRLRGQASPDLVSEQIDLILEELSYIDQEKQASFGEIFQGKCLTALIIGCGLVFFQQVTGQPSVLYYAATIFQSAGFSGASDATRVSILLGLLKLIMTGVAVLVVDRLGRRPLLIGGVSGITVALFLLSSYYTLLKDASYVAVIALLLYVGCYQLSFGPIGWLMISEVFPLRLRGRGLGVAVLVNFASNALVTFAFSPLEDLIGTGALFSGFGVIAVASLAFIFWIVPETKGLTLEEIEASL

SEQ ID NO: 17829 - protein, 547 aa, Glycine max
MASHLLNHSSKMRNASKLLHHERALLVRWFSGDAHSSLNRNRDVWKTQFHESSARSSVFEPASCFNKHSFGMQKRNIFMATIKRGSIIGSEFNGEISRSSQVLSRRCYASASDLPPHQEIGMPSLSPTMTEGNIARWLKKEGDKISPGEVLCEVETDKATVEMECMEEGYLAKIIRGDGAKEIKVGEVIAVTVEDEGDIAKFKDYQPSASEPSAVPAKEISAPPTPKKEEEVEEPGREPEPKVSKPSAPPSSGDRTFASPLARKLGEEKNVPLSSIKGTGPEGLIVKADIDDYLASGAKEVSASSKAKVATDAALDYTDIPVSQIRKVTASRLLLSKQTIPHYYLTVDTCVDKLTSLRTQLNSLQEASGGSRISVNDLVIKAAALALRKVPQCNSSWANDYIRQYNNVNINVAVQTDNGLFVPVIRDADKKGLSTIGEEVKQLAKKAKENSLKPQDYEGGTFTVSNLGGPFGVRQFCAIINPPQAGILAVGSSERRVVPGSGAEEFKFASFMSVTLSCDHRVIDGAIGAEWLKAFKGYIENPETMLL

SEQ ID NO: 17830 - protein, 224 aa, Oryza sativa
MASSSSLYLLAALLALASWQAIAFDPSPLQDFCVADMKSPVRVNGFPCKNPMEVNSDDFFNAAKFDMPRSTMNKVGSNVTNLNVLNFPGLNTLGISLARIDYAPLGVNPPHIHPRATELLTVLEGTLYVGFVTSNPNRLFSKVVHKGDTFVFPKAMIHFQMNLDHNKPAVAQSSLNSQNPGVITIASAVFGSKPPISDDVLTKAFQVEKKVIDWLKSQFWESNY

SEQ ID NO: 17831 - protein, 171 aa, Zea mays
MVKYSQEPGNPTKSAKAMGRDLRVHFKNTRETAFALRKLSLTKAKRYLEDVIAHKQAIPFRRYCGGVGRTAQAKSRHSNGQGRWPVKSAGFILDLLKNAESNADVKGLDVDNLYISHIQVNQAQKQRRRTYRAHGRINPYMSSPCHIELILSEKEEPVKKEADNIVAARKQ

SEQ ID NO: 17832 - protein, 134 aa, Brassica napus
MPKSKRNRSVTLSKTKKKPGLERKGKVVTEIKDAIERHSSAYVFTFNNMRNQKLKDLRDQLKSSSRIFLAGKKVMQIALGRSPADEAKTGLHKLSKFLQGASGLLFTNLPRDDVERLFREFEANDFARTGSIAT

SEQ ID NO: 17833 - protein, 155 aa, Triticum aestivum
MLPAAMAAGLAWSRPRSLSKSSLSPSPAEFNTITTANSIGMARGAAIPLVLVAMVATMLLVATDAAISCGQVTSALSPCISYARGNGANPTAACCSGVRSLAGAARSTADKQAACKCIKSAAGGLNAGKAAGIPSKCGVSVPYAISANVDCSKIR

SEQ ID NO: 17834 - protein, 544 aa, Listeria monocytogenes str. 1/2a F6854
MAYSFKLPDIGEGIHEGEIVKWFVQPGDKIEEDESLFEVQNDKSVEEITSPVSGTIKEIKVAEGTVATVGQVLVTFDGVEGHEDDAEEESAAPKAESTESTPAPAQASGKGIFEFKLPDIGEGIHEGEIVKWFIQPGDKVEEDQSIFEVQNDKSVEEITSPVDGTVKDILVSEGTVATVGQVLVTFEGDFEGEASHESTPESPAEDAALANNDATSAPATGGNGTPSSKKDPNGLVIAMPSVRKYAREKGVNIAEVAGSGKNNRVVKADIDAFLNGEQPAAATTTAQTEEKAAAPKAEKAAAKQPVASSDAYPETREKLTPTRRAIAKAMVNSKHTAPHVTLMDEIEVTALMAHRKRFKEVAAEKGIKLTFLPYMVKALVATLRDFPVLNTTLDDATEELVYKHYFNVGIAADTDHGLYVPVIKNADKKSVFQISDEINELAGKARDGKLTADEMRHGSATISNIGSAGGQWFTPVINYPEVAILGVGRIAQKPIVKDGEIVAAPVLALSLSFDHRVIDGATAQKAMNNIKRLLNDPELLLMEV

SEQ ID NO: 17835 - protein, 328 aa, Streptomyces avermitilis MA-4680
MQPRNMSMSGVVDLAAVKAAQEAKAKAEQARAEAARQGGGGTAVSAVPPSSLVIDVDEAGFERDVLQRSTEVPVVIDFWAEWCEPCKQLSPVLERLAVEYNGRFVLAKIDVDANQMLMQQFGVQGIPAVFAVVAGQALPLFQGAAGEQQIRGTLDQLVEVAEQRFGLTGLTVATDAEPGAAQEAPPIPAGPYDALLEAAVQALDAGDFGGAVQAYKNVLSDDPGNTEARLGLAQAELLQRVQDADPQRVRVEAAEKPGDAQAQIAAADLDLVGGHVDDAFGRLIQTVQRTAGDDRDAVRLRLLELFEVVGADDPRVTAARRALARALF

SEQ ID NO: 17836 - protein, 407 aa, Medicago truncatula
MSNSYLTCSFLSSIFVLSLIFIFIKRKKTRYNLPPGKMGWPFIGETIGYLKPYTATTMGEFMENHIARYGTIYKSNLFGGPAIVSADAELNRFILQNDGKLFECSYPKSIGGILGKWSMLVLVGDMHREMRNISLNFMSYARLKTHFLKDMEKHTLFVLSSWKENCTFSAQDEAKKFTFNLMAKQIMSLDPGNLETEQLKKEYVCFMKGVVSAPLNLPGTAYRKALKSRNNILKFIEGKMEERVKRNQEGKKGMEENDLLNWVLKHSNLSTEQILDLILSLLFAGHETSSVAIALAIYFLPSCPQAIQQLREEHREIARSKKKAGEVELTWDDYKRMEFTHCVVNETLRLGNVVRFLHRKAIKDVHYKGYDIPCGWKVLPVISAVHLDPSNFDQPQHFNPWRWQAGV

SEQ ID NO: 17837 - protein, 368 aa, Ashbya gossypii ATCC 10895
MLVFPPEVLARISPDLSLQRHLSLGVRPSLRGFTEFRDVGISDGDLSRHSVECKSRASNNIIGSNVLRAGNTFVVAAITASVVEEALVEKAGAEKGPARKKYGPVYPVVEVDRGKVERGRGGVPTDEKMILSQRLHDAISASGLIPSEALEVVCGMRTLAPSGELKTMYPEDYDGDEEAAKILSLNDRRKWSYCLHAKIEVFSRDGPLFELCWNSLMYALQTVQLPRVYMDERAADLKIPIRTRGRNAMIKEAYDLKFDPLRSIVLDLNKNNIAYASGFGVTDLDNESRLEPGEDDMAVEVPEKILLVDLEGEAEEASIKSTLSLVTSPGGQLTTISLIGGGSRITLDLIKSSFQHAKERSKDLASKV

SEQ ID NO: 17838 - protein, 368 aa, Acidobacteria bacterium Ellin345
MSDIKKIAINTGGGDAPGLNAVIHGAVYAARRLGWEVFGIRDGYDGILEPHRYPNGGLIQLNRGVVRDISHVGGTILGTTNRGNPFRRVITAADGTKHETDCSDQILNFFRDRGIDALISIGGDGSLTIANGLAKKGLRVVGVPKTIDNDLESTAMTFGFNTAVSFATECIDRLHSTALSHQRILVVEVMGRYAGWIALHCGVAGRADAILIPEIPYKIENVANALKLRHQDGKPYSIVVVAEGAKAHGKDVTIREREVGKAERLGGIGEQVTQQLQSLTGKESRTVVLGHLLRGGSPTALDRNLGVTFGAGAVEALAEGRSTVMVALHPPHLAFVPLEEAIAKLRLVPPDSDLVLTARAIGIAFGDE

SEQ ID NO: 17839 - protein, 934 aa, Nocardia farcinica IFM 10152
MTRSFADRHIGPDAAELSRILEVVGVDSLDALAAAALPASILDDAGAGPLAALPPAVSEHEALAELAALAQSNTVTTSMIGLGYYDTLTPPVLVRNLLENPAWYTAYTPYQPEISQGRLEALLNFQTMVSDLTGMEVANASMLDEATAAAEAMTLLRRAGRSRSNRLLIDADLFPQTRTVLHTRAEPLGIEIVEADLAAAGLPEGGFFGVIVQVPGASGRVVDWTALIAAAHERGALVAAGADLLAMTLIVPPGEQGADVCFGTTQRFGVPMGFGGPHAGYLAVRSAHARQLPGRLVGVSKDADGNPAYRLALQTREQHIRREKATSNICTAQVLLAIVAAMYACYHGADGLRAIARRVHGHAARIAGALGEALVHDTYFDTVLARVPGHAEAVVAKAAACGITLRLVDPDHVAVACDEATTDAHVEAVLDAFGVAPAEPVDAGIATRTSEFLTHPAFTRYRTETAMLRYLRSLSDKDIALDRSMIPLGSCTMKLNATAEMEPITWPGFAKLHPYAPVEHAPGLLKLIGDLESWLAEITGYDAVSLQPNAGSQGEYAGLLAIRRYHLDRGDTHRDTCLIPSSAHGTNAASAAMAGLRVEVVKCRENGDVDLDDLRAKITDHAERLACIMITYPSTHGVYEHEIAELCALVHDAGGQVYVDGANLNALVGLARPGRFGGDVSHLNLHKTFCIPHGGGGPGVGPVAVRAHLAQYLPGDPLESGSHAVSAARYGSASILPITWAYIRMMGAEGLRKATLTAIASANYLARRLDEYFPVLYTGENGMVAHECILDLRELTKRTGVTVDDVAKRLADYGFHAPTMSFPVAGTLMVEPTESENLAELDEFVAAMIAIRAEIDQVGAGVWPAEDNPLRGAPHTAECLVGEWTHPYSREIAVYPRGLGHARAKVWPAVRRIDGAYGDRNLVCSCPPLEAYAE

SEQ ID NO: 17840 - protein, 257 aa, Shewanella sp. ANA-3
MEYLVERIEGHTAILTMNNPPANTWTAQSLQALKAKVLELNANKDIYALVLTGEGNKFFSAGADLKLFSDGDKGNAASMAKHFGEAFETLSQFRGVSIAAINGYAMGGGLEVALACDIRIAETQAVMALPEATVGLLPCAGGTQNLTALVGEGWAKRMILCGERVNAAQALNLRLVEEVVETGEALNAAIALAAKVANQSPSSVTACKTLIQAGRQMPRSQALPIERELFVGLFDTEDQAEGVNAFLEKRKADWKNR

SEQ ID NO: 17841 - protein, 420 aa, Bacillus halodurans C-125
MGAIAEKGKESSILSSTQDVIQQALGKLGYEEGMFELLKEPVRMLTVRIPVRMDDGTVKVFTGYRAQHNDAVGPTKGGVRFHPEVTADEVKALSLWMTLKCGIVNIPYGGGKGGIVCDPRTMSFPEIERLSRGYVRAISQIVGPSKDIPAPDVFTNSQIMAWMVDEYSRIREFDSPGFITGKPIVLGGSHGRETATAMGVTICIEEAAKLKQLDLREATVIIQGFGNAGGYLAKILSDRGAKIIGISDAYGALYDETGLDIEYLLDRRDSFGTVTTLFKNTITNEELLEKKCDILVPAAIANQITEANAREIKASIIVEAANGPTTTEATNILTERGVLIVPDVLASSGGVTVSYFEWVQNNLGYYWSEEEVSEKLRSKIVEAFHQVVETATRYNVDPRLAAYMVGVRKTAEASRFRGWI

SEQ ID NO: 17842 - protein, 476 aa, Pseudomonas putida KT2440
MTTSHYIAGHWVEGQGSDCISVNDPALGQPFAELMAASVSQVDQAVAAARSALPAWKSTCASERAAFLRGFAEQLGQRREALVTVQMRNNGKPRHEAEIDLDDAIATFGYYAELAEQLPSKNRTVPLAAPGFTARTRLEPVGVVGLIVPWNFPLVTSAWKLAPALAAGCTVVLKPSEVTPLIEQAYGQIADALGLPAGVLNIVNGKAETGAALSNHNGLDKLSFTGSNSVGSQVMRSASAQCRPVTLELGGKSAIVVFDDCDVDQAVEWIVAGISWNAGQMCSATSRLLVQDGIADALLPRLQAALENLRVGNPLTEEVDMGPLTSQAQWLKVASYFATAREEGLQCLAGGHALDREGWFVSPTLYTDVPKDSRLWTEEIFGPVLCARRFATEEQAIAEANDSRFGLVATVCSADLERAERVADALEVGHVWINSVQAVFVETSWGGTKGSGIGRELGPWGLSAYQSIKHVTRCLG

SEQ ID NO: 17843 - protein, 468 aa, Archaeoglobus fulgidus DSM 4304
MVGRMCVAVLIVLLLVATAGADPNGAETLKENPELPVDFVWALICGFLVMFMQAGFAMLEAGFSRAKNVANVMMKNLMDFAVGSLAFFAVGFALMMGADWQGIAGTTGWFLAGESYDVSTIELWFFMLVFAATAATIVSGSIAERPKFSVYLVYSAVVSAVIYPIYGHWLWGGGWLSSSEFMVKLGGGYGALDFAGSGVVHALGGYIALAAVMLLGPRLGKYDSDGNPRAIPGHNLAFAVIGTFILWFGWFGFNAGSTLSAHELRVSIIASNTNLAAAAGAVTAMAITWLRNGKPDVGMTCNGAVAGLVAITAPCAWVQPWSSVVIGTIAGFIATYGYWWLEKRGLDDVVGAIPVHGFSGTWGLIALGIFADGSYGLYATESPLVTGLLYGNWGFFIVQLISAIVNFAWAFGTGFALFWILKKVIGIRVSPEEEMLGLDIAEHAAVAYPNFVCTETELPLAMKQGGGR

SEQ ID NO: 17844 - protein, 116 aa, Cicer arietinum
MASMKVVCVALIMCIVIAPMAESAITCGRVDTALAPCLGYLQGGPGPSAQCCGGVRNLNSAAVTTPDRQAACNCLKSAAGSISRLNANNAAALPGKCVVNIPYKISTSTNCATIRV

SEQ ID NO: 17845 - protein, 466 aa, Shigella flexneri 2a str. 301
MDKKQVTDLRSELLDSRFGAKSISTIAESKRFPLHEMRDDVAFQIINDELYLDGNARQNLATFCQTWDDENVHKLMDLSINKNWIDKEEYPQSAAIDLRCVNMVADLWHAPAPKNGQAVGTNTIGSSEACMLGGMAMKWRWRKRMEAAGKPTDKPNLVCGPVQICWHKFARYWDVELREIPMRPGQLFMDPKRMIEACDENTIGVVPTFGVTYTGNYEFPQPLHDALDKFQADTGIDIDMHIDAASGGFLAPFVAPDIVWDFRLPRVKSISASGHKFGLAPLGCGWVIWRDEEALPQELVFNVDYLGGQIGTFAINFSRPAGQVIAQYYEFLRLGREGYTKVQNASYQVAAYLADEIAKLGPYEFICTGRPDEGIPAVCFKLKDGEDPGYTLYDLSERLRLRGWQVPAFTLGGEATDIVVMRIMCRRGFEMDFAELLLEDYKASLKYLSDHPKLQGIAQQNSFKHT

SEQ ID NO: 17846 - protein, 112 aa, Archaeoglobus fulgidus DSM 4304
MKKIEAIVRAEKFPEVKAALEERGFYGMTVTDVKGRGQQGGMQIQFRGRTMEVTLLPKVKLEIVVKDDAVEEVIGLIVNSAFTGSPGDGKIFIIPVEDVVRIRTGERGDDSL

SEQ ID NO: 17847 - protein, 311 aa, Mycobacterium tuberculosis H37Rv
MTANDNKTRKWSAADVPDQSGRVVVVTGANTGIGYHTAAVFADRGAHVVLAVRNLEKGNAARARIMAARPGAHVTLQQLDLCSLDSVRAAADALRTAYPRIDVLINNAGVMWTPKQVTKDGFELQFGTNHLGHFALTGLVLDHMLPVPGSRVVTVSSQGHRIHAAIHFDDLQWERRYNRVAAYGQAKLANLLFTYELQRRLGEAGKSTIAVAAHPGGSNTELTRNLPRLIRPVATVLGPLLFQSPEMGALPTLRAATDPTTQGGQYYGPDGFGEQRGHPKVVQSSAQSHDKDLQRRLWTVSEELTGVSFGV

SEQ ID NO: 17848 - protein, 565 aa, Shigella flexneri 2a str. 301
MEPKTKKQRSLYIPYAGPVLLEFPLLNKGSAFSMEERRNFNLLGLLPEVVETIEEQAERAWIQYQGFKTEIDKHIYLRNIQDTNETLFYRLVNNHLDEMMPVIYTPTVGAACERFSEIYRRSRGVFISYQNRHNMDDILQNVPNHNIKVIVVTDGERILGLGDQGIGGMGIPIGKLSLYTACGGISPAYTLPVVLDVGTNNQQLLNDPLYMGWRNPRITDDEYYEFVDEFIQAVKQRWPDVLLQFEDFAQKNAMPLLNRYRNEICSFNDDIQGTAAVTVGTLIAASRAAGGQLSEKKIVFLGAGSAGCGIAEMIIAQTQREGLSEEAARQKVFMVDRFGLLTDKMPNLLPFQTKLVQKRENLSDWDTDSDVLSLLDVVRNVKPDILIGVSGQTGLFTEEIIREMHKHCPRPIVMPLSNPTSRVEATPQDIIAWTEGNALVATGSPFNPVVWKDKIYPIAQCNNAFIFPGIGLGVIASGASRITDEMLMSASETLAQYSPLVLNGEGLVLPELKDIQKVSRAIAFAVGKMAQQQGVAVKTSAEALQQAIDDNFWQAEYRDYRRTSI

SEQ ID NO: 17849 - protein, 120 aa, Archaeoglobus fulgidus DSM 4304
MRRLPTREVVDMKMVVAVIRPEKLECVKKALEERGFVGMTVTEVKGRGEQKGIRLQFRGREVEVDLLQKTKVEVVVSDDAVDEVVEAIVSSARTGKFGDGRIFVIPVEKSVKIRTGDEEV

SEQ ID NO: 17850 - protein, 125 aa, Triticum aestivum
  misc_feature (69)..(69): Xaa can be any naturally occurring amino acid
MARLNSKAVVSAVVLAAVVLMMAGREATALSCGQVDSKLAPCVSYVTGKAPSISKECCSGVQGLNGLAXRSSPDRKIACRCLKSLATSIKSINMDKVSGVPGKCGVSVPFPSACQQLQQCQLVNI

SEQ ID NO: 17851 - protein, 496 aa, Nicotiana tabacum
MVLSKTASESDVSIHSTFASRYVRTSLPRFKMPENSIPKEAAYQIINDELMLDGNPRLNLASFVTTWMEPECNKLMMDSINKNYVDMGEYPVTTELQNRCVNMIAHLFNAPLGDGETAVGVGTVGSSEAIMLAGLAFKRKWQNKMKAQGKPCDKPNIVTGANVQVCWEKFARYFEVELKEVKLSDGYYVMDPEKAVEMVDENTICVAAILGSTLNGEFEDVKRLNDLLIEKNKETGWDTPIHVDAASGGFIAPFLYPELEWDFRLPLVKSINVSGHKYGLVYAGIGWAIWRNKEDLPDELIFHINYLGADQPTFTLNFSKGSSQVIAQYYQLIRLGFEGYKNVMENCQENARVLREGLEKSGRFNIISKEIGVPLVAFSLKDNSQHNEFEISETLRRFGWIIPAYTMPPNAQHVTVLRVVIREDFSRTLAERLVIDIEKVLHELDTLPARVNAKLAVAEANGSGVHKKTDREVQLEITAAWKKFVADKKKKTNGVC

SEQ ID NO: 17852 - protein, 461 aa, Photorhabdus luminescens subsp. laumondii TTO1
MQNNETQLKRGLTGRHIRFMALGSAIGTGLFYGSAAAIQQAGPAVLLAYLIGGAAVFMVMRALGEMAVHHPVAGSFSHYASHYLGPLAGFLTGWNYIFEMLIVCLADVTAFGFYMKLWFPHVEQWIWVLSIVCFIGAINLCHVKIFGEMEFWLSIVKVTAIIAMIIGGMIIMIYGFGQETDHATGIASLWEYGGFMPNGISGVIASLAIVMFAFGGIEVIGITASETKNPEKTIPKAINAVPFRILLFYVLTLFILMCIYPWNQIGQEGSPFVQIFSSLGINSAANILNIVVITAAISAINSDIFGAGRMMYGMAQEGQAPKSFTKLSRNGVPWMTVIVMSAVLLIGVILNYMIPEEIFVIIASIATFATVWVWLMILLSQVAMRRKMSKEEVKTLKFPVPMWPIAPALTIIFMVFVIVLLGYFEKTRIALIVGITWVILLSITYFFSKKKNISQIHQINK

SEQ ID NO: 17853 - protein, 379 aa, Zymomonas mobilis subsp. mobilis ZM4
MSKNTPIVKGSTKRHPFLSSVEELIEEARNGRIFILVDDEDRENEGDLIIPAQMATPAAINFMATHGRGLVCLAMTKERVTSLGLAPMSRENNAPLQTAFTVSIEAKEGVTTGISAGDRARTIAVAIDSSRGAEDIVTPGHVFPLAAKSGGVLVRAGHTEAAVDIARLAGLNASGVICEVMKEDGTMARLDDLVTFAQRHNIKIGTIRDLIAWRREHDNNVELIEEKSFNSLYGGDWQAIRFRNKATGSESLALVKGQISADEPTLVRMHAIDPFTDMLGQTGSRQQLLSRSMEIIAKKGAGVVVLVQRSQENSADKSSVWAASRNQETIHRDYGIGAQILAELGVRDMILLTNSHHMPVALAGYGLNITGEQPITEGA

SEQ ID NO: 17854 - protein, 536 aa, Aspergillus niger
MPSFSQATELSAWKELQEHHNSVGRNIVLKDCFQKDPQRFEKFSRTFKNTVDNSEVLFDFSKNFLTEETLALLVKLAKEANVEELRDAMFKGEHINFTEDRAVYHAALRNVSNEPMQVNGKSVVEDVNAVLEHMKEFTEQVRSGEWKGYTGKKIDTVINIGIGGSDLGPVMVTEALKPYGAPDMKLHFVSNIDGTHIAEALKNSNPETTLFLIASWFLETAKEDSHIAKHFVALSTNEEEVTKFGIDKKNMFGFESWVGGRYSVWSAIGLSVALYIGYDNFHQFLAGAHAMDKHFREAPLEQNIPVLGGLLSVWYSDFFGAQTHLVAPFDQYLHRFPAYLQQLSMESNGKAITRTGEYVKYTTGPILFGEPATNAQHSFFQLLHQGTKLIPSDFIMAAESHNPVEGGKHQRMLASNFLAQSEALMVGKTPEQVKAEGAPENLVSHKTFLGNRPTTSILAQKITPSTLGALITYYEHLTFTEGAIWNINSFDQWGVELGKVLAKKIQKELETADAGSDHDASTSGLLLAFKKKANLA

SEQ ID NO: 17855 - protein, 500 aa, Arabidopsis thaliana
MVNFLLVLCYCRLILIHCKTIQLTQWLSKSFLTDVLVTKVPNCVLWQYFVDADDSVPQKIVVHKDGPRGIHFRRAGPRQKVYFESDEVHACIVTCGGLCPGLNTVIREIVSSLSYMYGVKRILGIDVSFCDCNLLLTKTNTGGYRGFYAKNTVSLDSKVVNDIHKRGGTILGTSRGGHDTTKIVDSIQDRGINQVYIIGGDGTQRGASVIFEEIRRRGLKVAVIGIPKTIDNDIPVIDKSFGFDTAVEEAQRAINAAHVEAESIENGIGVVKLMGRYSGFIAMYATLASRDVDCCLIPESPFYLEGEGGLFEYIEKRLKESGHMVLVIAEGAGQDLMSKSMESMTLKDASGNKLLKDVGLWLSQSIKDHFNQKKMVMNLKYIDPTYMIRAVPSNASDNVYCTLLAQSAVHGAMAGYTGYISGLVNGRQTYIPFYRITEKQNHVVITDRMWARLLSSTNQPSFLGPKDVFDNKEKPMSALLDDGNCNGVVDVPPVTKEITK

SEQ ID NO: 17856 - protein, 351 aa, Oryza sativa (japonica cultivar-group)
MAAPPCPPRRPISAPCFLLCFLLGFVAGLFPFAHRHLHLDLHLPLPPPATAILVREDPPSVVVDVDTPLPAAAEERKLLLVVTPTRARPLQAYYLRRLAHTLRLAPSPLLWLVVESGAATRDTAALLRGCGVMYRHLSSPVPDAPQDRPRRRGRRQDRPAVDSRARQRNTALDHIEHHRLHGIVYFADEDNVYSLDLFYHLRDIRSFGTWPVATLAPGKSKTILQGPVCEGSRVVGWHTTDRSKNQRRFHVDMSGFAFNSSKLWDAKNRGHQAWNYIRQLDTAKEGFQETAFIEQLVEDETHMEGVPPGCSKIMNFHLHLEDKNAIYLNGWQTTQNLDVIIPLKKEARPLL

SEQ ID NO: 17857 - protein, 112 aa, Corynebacterium diphtheriae
MKLVTAIVKPFTLTDIKDSLEQVGVHGMTVTESQGFGQQKGHTEVYRGAEYAVDFVPKIKIEIVINDDLLDDVVKAIVDSAHTGKIGDGKVWVTTVDDLIRVRTGERGDSAV

SEQ ID NO: 17858 - protein, 293 aa, Meiothermus ruber
MNMAYKDYYKILGVPKNASEDEIKKAFKKLARKYHPDVNKEPGAEEKFKEINEAYTVLSDPEKRRYYDTYGAAAGSAGWQGPPPGPGGFGGFTGNVGDFSDFFQQLFGGRGGFGGLGDLFEQTPGRGARRVAGDLEAELPLSLEEAYRGGEKTISVGAERLTVRIPPGVREGQKIRLAGKGRAGGDLYLHVKLQSRPEMRLEGDDIYTVVEVPAPIAVVGGKVRVQTLDGPVEITIPRRTQAGRKLRLAGKGWPRKDKSRGDQYAEVRVTIPTNPSPEEERLYAQLAELIKVQ

SEQ ID NO: 17859 - protein, 260 aa, Geobacter metallireducens GS-15
MGFQELLYEKTEGVGVITLNRPDRLNALNRTILLELIQVLQEATTDNEVRVVLITGAGKGFCAGGDLKGHPSFETSDPLVREGYVKESHQAILLLHHMPKPVVAAVNGVAAGAGMNIALSCDIRLASDTAVFTESFIKAGIMTDMGGSYFLPRIVGVGRAIEMILTAEKIDAAEACRIGLVNKVFPDAEFRTAALSYAKELAKGPRQAYKMAKWAIYTGLQLDLEDALKHEELGQALLIGTEDSSNAIKAFIEKRTPVFK

SEQ ID NO: 17860 - protein, 809 aa, Fusobacterium nucleatum subsp. vincentii ATCC 49256
MKKVLIVGGVAGGASTAARLRRLDENLEIIMFERGEYVSFANCGLPYHIGGVIQNRESLLIQTPESLKARFNLDVRVNSEVVGVNGKDKKVKVKTKNGEEYEENFDFLVLAPGAKSILPVVKGIENKKIFTLRNINDMDKIKAEIKNYNVKKATVVGGGYVGIETAENLKHLGIDTTLIEAVPHILASFDSEISNILEYELINNGINLLTSEKVIEFQEDKDEVIIKLESGKSVAADMVILSIGVNPDTKFLQNSGINLGERGHILVNEKLETNIDGIYALGDSIIVKNYITNQDVAIPLAGPANRQGRIVAGNIVGRNEKYKGSLGTAIIKIFELTGASTGLNERSLKQLNIPYEKVYLHPNNHATYYPGATAISIKALYNKENRQILGAQAVGISGVDKFIDVIAISIKFKATIDDLTELELAYAPPFLSAKSPANMLGFIGQNIEDNLLEQVFMKDLENYNEKETIILDVREKLELISGKLNNSINIPLSELRKRYAELPKDKEIWTYCAVGLRGYIASRFLTQKGYKVKNLAGGIKIEEKELIKTQEETFSNKENSDYNVDKEDEYLDLSGLSCPGPLVKIKEKIDKLQESKKLKVKVSDPGFYNDIQAWSKVTKNSLLSLDKKDGLTYATLQKEQASKVVVKEQENVIIEDNSNMTMVVFSGDLDKAIAAFIIANGALTMGKKVTMFFTFWGLSILKEQDLAKKSLLKNIAMMLPKNSQDLPVSKMNFFGIGAKMIRSVMKKKNIMSLEELMKKAKDLGVNITACTMSMDVMGISKEELIDGISYGGVGQYLGEAEKSNNNLFI

SEQ ID NO: 17861 - protein, 312 aa, Vibrio parahaemolyticus RIMD 2210633
MTQSTPIRIATRKSPLALWQAHFVKDALQAAHPGLEVELVTMVTKGDVILDTPLAKVGGKGLFVKELEVAMLEGRADLAVHSMKDVPVDFPEGLGLVTICEREDPRDAFVSNTYSNINELPQGAVVGTCSLRRQCQLKEYRPDIIIKELRGNVGTRLGKLDAGEYDAIILAAAGLKRLKLEDRIRSFIEPEQSLPAVGQGAVGIECRVDDERLLKLLEPLNHKDTADRVLCERAMNLTLEGGCQVPIGSYALLEGDEIWLRALVGEPDGSEIVRGEVRGHRKDGEALGIQLANELLDSGARDILTKLYADHD

SEQ ID NO: 17862 - protein, 515 aa, Burkholderia xenovorans LB400
MSDKLIIFDTTLRDGEQSPGASMTKEEKIRIAKQLERMKVDVIEAGFAASSNGDFDSIHTIAGLIKDSTICSLARANDKDIQRAADALKPADRFRIHTFIATSPLHMEKKLRMTPDQVFEQAKLAVRFARKFTDDVEFSPEDGSRSDMDFLCRVLEAVIAEGATTINIADTVGYGVPELYGQLVKTLRERIPNSHKAVFSVHCHNDLGMAVANSLAGVQIGGARQVECTINGLGERAGNTSLEEIVMAVKTRRDYFGLDVGLDTTQIVPASKLVSQITGFVVQPNKAVVGANAFAHASGIHQDGVLKARDTYEIMRAEDVGWSANKIVLGKLSGRNAFKQRLQELGIALDSEGELNTAFARFKELADRKSEIFDEDIIAIVTEESAEAQEKEHYKFLSLSQHSETGEQPHAKIVFSVEGKEVTGEARGNGPVDATLNAIETEVGSGSELLLYSVNAITTGTQAQGEVTVRLSKSGRIVNGVGTDPDIVAASAKAYISALNKLYSNVDKLNPQRSE

SEQ ID NO: 17863 - protein, 511 aa, Zea mays
MASNGCNGNGNGNGNGKAAPAGVVVPEIKFTKLFINGEFVDAASGKTFDTRDPRTGDVLAHVAEADKADVDLAVKSARDAFEHGKWPRMSGYERGRIMSKLADLVEQHTEELAALDGADAGKLLLLGKIIDIPAATQMLRYYAGAADKIHGDVLRVSGRYQGYTLKEPIGVVGVIIPWNFPTMMFFLKVSPALAAGCTVVVKPAEQTPLSALYYAHLAKMAGVPDGVINVVPGFGPTAGAALASHMDVDSVAFTGSTEVGRLIMESAARSNLKTVSLELGGKSPLIIFDDADVDMAVNLSRLAVFFNKGEVCVAGSRVYVQEGIYDEFVKKAVEAARSWKVGDPFDVTSNMGPQVDKDQFERVLKYIEHGKSEGATLLTGGKPAADKGYYIEPTIFVDVTEDMKIAQEEIFGPVMSLMKFKTVDEVIEKANCTRYGLAAGIVTKSLDVANRVSRSVRAGTVWVNCYFAFDPDAPFGGYKMSGFGRDQGLAAMDKYLQVKSVITALPDSPWY

SEQ ID NO: 17864 - protein, 524 aa, Thermus thermophilus HB8
MVEILDTTLRDGTQGEGVSLSVDDKVAIARRLAAFGIHLIEGGWPGSNPKDAEFFQRMRGVDLGAARLAAFGATRRKGLAPEEDPSVLALLEAETPVVVLFGKSWTLHVLEALETSLEENLRMIEETVAFFARRGRRVVYDAEHFFDGYKEDPAYALATLEAAFRGGADTLVLCDTNGGSLPEEVYAITKAVVERFPGVRVGIHPHNDADLAVANALAAVRAGATHVQGTINGYGERCGNLNLTSFLPTLVFKYGIPAISPEKLRELREVSHFVDERANLTPNRRAPYVGEAAFAHKAGVHVSAVLKNPRTYEHIPPEWVGNQRRFLVSDVSGRSNLLAKLQELGVDLSKEEARRLLDEVKALEYEGYAFEGAEASFYLLAHRLKGGSLPFSVEGFSVFVHGRGLSTAWAEATVRVRVGESLQHTAAESPFGPVSALDRAFRKAVLQFYPELSEVELTDYKVRILSGQEAGTNSGVRVMVEMKRGEERFATVGASENILEASLKALTDGYAYALLYPVATPRGA

SEQ ID NO: 17865 - protein, 520 aa, Thermus thermophilus HB8
MEKERHIRIFDTTLRDGEQSPGVALSLDQKLEIAQALAQLNVDIIEAGFPVSGPMEFEAVRRIATEVKGPIIAALARTHTLDIDQAAKALEKAEKPRIHVFTSASKVHLQYMLRKTEEEVLEMADRMVRYARRYVDDVEFSAQDVMRADWEFVKRLYEVAIEAGATTINIPDTTGYGTPQEYGALIRRIRDEVVRGRDVVISTHTHDDLGMATANALAGVENGAGQIECTINGIGERAGNCALEEVVMALYVRRDWYKAYTRINTREIYRVSRLVERYTGMPVPPNKAIVGDNAFAHESGIHQDGVIKHRATYEIMDAELIGRRPAVLVLGKHSGRAAFKKALEDLGYKDLSEEEVKKLFARFKEIAEKKGPLSAEELQALVESEREPTSHFFQLEHVQFFSGSGLLPTATVKVKTPDGERLATHTGDGPVDAVYKAIQEAIGLRPELELYRVEAITGSTEALGQVTVRLRLGELQAVGVGVSPDIIEASALAFLDAAGKLASGRATRHPPSIEEVHRGV

SEQ ID NO: 17866 - protein, 499 aa, Shewanella sp. ANA-3
MTTQVKHYIDGEFTTGTGTSQIVVTNPANNEPIALINSATADEVHAAIASAKAAFKTWKEVPVSERARVMLRYQHLLKEHHDELATILAKETGKTFEDAKGDVWRGIEVAEHACNIASLLMGETVENVARSIDTYSYTQPLGVCAGITPFNFPAMIPLWMFPLAIACGNTFILKPSEQDPMTPQRLVELFVEAGAPKGVLQLVHGDKTAVDILLADPAVKAISFVGSVAVGQYIYKTGTDNLKRVQAFAGAKNHCVIMPDANKQQVINNLVGASVGAAGQRCMAISVAVFVGAAKEWIPELKEALAKVRPGLWDDKEAGYGPLISPAAKARVLKLIAQGKEEGAECLLDGSDFSVAGYESGNWVGPTMFTKVTTDMSIYKEEIFGPVLCCMESDSLEEAIELVNASPYGNGTSIFTASGAAARKYQHEIEVGQVGINVPIPVPLPFFSFTGWKGSFYGDQHAYGKQAVRFYTETKTITSRWFESDIAVAAGPNMSINLR

SEQ ID NO: 17867 - protein, 562 aa, Thermus thermophilus HB8
MKGAEALLRALEREGVEVIFGHPGGAIMPTYDALYDSPIRHILVRHEQGGVHAATAYARASGRVGVVMATSGPGALNLVTGLADAMMDSTPVVAITGNVPRALIGTDAFQEADVTGVTMPITKHNYLVQDVNEIPRVVKEAFHIAATGRPGPVLIDIPKDVQLAEFTGSFDVKLDLPGYKPTLKGHPKQIERALDALEKAERPVLMVGGGAQHAHAELLAFAEKTGLPVITTLMGLGAFPGNHPLWLGMPGMHGTVAANRAIHHADVILAIGLRFDDRVTGKVSRFAPHAHTIIHVDIDPAEIGKVVRTHIPIVGDSRLVLKELLKGAKALRLAAWWRELEEWRTRYPLRYRPKPHLQSQEVIRAFYEATGGHAIVTTGVGQHQMFAAQFFPVTRPRSFLTSGGLGTMGVGLPFAIGAKIARPEELVIDFDGDGSFQMTLQELATVVKYKLDVKVVILNNGYLGMVRQWQDLFHAKRYSEVYLADSNPDFARLAEAYGIKGVRVERKEDLMKGVEAVLNADGPVVAEFKVYQEEGVFPMIPAGGAAEDMILEPPEEKEEVGA

SEQ ID NO: 17868 - protein, 421 aa, Streptomyces avermitilis MA-4680
MTRRVAVTGVGIVAPGGVGVPAFWDLLANGRTATRGITLFNPEGLRSRIAAECDFDPAAHGIDAAAAERADRYVQFAMVAAREAVGDAGLGPEKEDPWRIGVSLGTAVGGTTRLEHDYVAVSETGRRWDVDHRLADPHLHRAFSPSTLASEVAEQFGAHGPVQTVSTGCTSGLDAIGYAFHAVQEGRVDVCIAGASDSPISPITMACFDAIKATSPNNDDPEHASKPFDKHRNGFVMGEGGAVLILEELEHARARGARVYCEIGGYATFGNAYHMTGLTREGLEMARAIDGALAHARLDGSDIDYVNAHGSGTQQNDRHETAAVKRSLGDHAYRTPMSSIKSMVGHSLGAIGAIEVLACVLALVHQVVPPTANYTTPDPECDLDYVPRTARQVKLRNVLSVGSGFGGFQSAVVLTRPDGRT

SEQ ID NO: 17869 - protein, 396 aa, Ashbya gossypii ATCC 10895
MAKATSAKKVSKKEMKKKEEAAAAAAAASSSSSSSSSESESGSSDESSDESSDSSSDNSSSSNSSSDSSSSDSSDSESSSSSDSDSSDSEEETKNSTSSSSSSDSEAEEKEKSASSKSSSSSSSESSSDSESSASDNEGSKEESKKRSAESEDDAVAKKQKTDGQPATIFVGRLSWSVDDEWLKTEFDHIGGVVGARVIYERGTDKSRGYGYVDFEDVSYAEKAVKEMHGKEIDGRAINCDMSTSKPASAPREDRAKKYGDTPSQPSDTLFLGNLSFNADRDALFELFSKHGNVISVRIPTHPESNQPKGFGYVQYGSVEEAQAALDALQGEYIDNRPVRIDFSSPRPPQQGGATRGRGGFRGGRGGGRTGSGANNAPLGKPRQSAAFKGTKKTFD

SEQ ID NO: 17870 - protein, 237 aa, Ashbya gossypii ATCC 10895
MNGQDRRRILGPSNSKALKFGDLVPAQDSKAGTGEVSGDSEASMFIQDGMIVNANGSSYLEVKAETHNTLLVTTAYGPRPIRGSFTSRAAISVHFKEVTLERWDSGEVTEMCNFLNTVFSAAINVERYPKSGIDIFLNLIQHSNVRDDKTLNLAEVLPDCISGITLALMDAGIELKDVVAAGRHGCNVVAFVNNAETILGFWQEDDSDVMEIVDECKKGYFRQRDAIIEHVVSKNKS

SEQ ID NO: 17871 - protein, 112 aa, Rhodobacter sphaeroides
MKKIEAIIKPFKLDEVKEALQAAGVQGLSVTEVKGFGRQKGHTELYRGAAYVVDFLPKVKIEVVLADDMVEAAVEAIVSASRTDKIGDGKIFISPVEQAIRIRTGETGEDAV

SEQ ID NO: 17872 - protein, 374 aa, Wolbachia endosymbiont of Drosophila simulans
MIENKFGKFDIVVIRENEEDVYTGIEHRLTGDSYQCTKIITRSGSEKICRYAFEYAKKHNRKKVTCLTKDNIMKMTDGTFHAAFDRIAKEYQDIKAEHYIVDIGMARVATEPENFDVIVTENLYGDILSDIVAQTSGSVGLAGSSNIGNEYAMFEAVHGSAPDIAGKNIANPSGLLNAAVHMLIYIGQVGTAKLIYDAWLKTLEGGIHTADLYKEKRSKQKVGTKEFAEAVIDNLGKKPAELTIGSGSDSKINLDSKINKVQDNYEQDYKVKKLVGSDITLAWDKSSNVDQIVGLFESSNPQIIAIYSKGLAIWPGSSKSSSDQITCRFIANSEKKPITNSDVNDLLIKLEENTFDVVRMDKLYLYDGKEGFFS

SEQ ID NO: 17873 - protein, 208 aa, Polaromonas sp. JS666
MHNLWTPLSRPLPRIALLTGLALSTIAANSAAPAPSASVAGSVAADASACPGLLQHNFLRLQDEKPQSLCQYQGKVVVAVNTASFCGFTSQYQGLEELYAKYKDRGLVVLGFPSNDFSQETGSNKEIADFCENTFGVKFPMFAKTSVSGKDANPLFRQLAAKTGTTPRWNFYKYVIARDGTSVASFNSLTAPGSRQFVKEIEKQLARP

SEQ ID NO: 17874 - protein, 320 aa, Schizosaccharomyces pombe 972h-
MELMARFLERYLHFAPTNTEPPGTLIWFLGHSYKIEDSQWPEKFLYDSFSLITITYRSGIEGLENMTSDTGWGCMIRSTQTLLANCLRICYPEKQLKEILALFADEPSAPFSIHQFVTMGKTLCDINPGQWFGPTTSCSCVARLSDQNPDVPLHVYVARNGNAIYRDQLSKVSFPVLLLIPTRLGIDSINESYYDQLLQVFEIRSFVGITGGRPRSAHYFYARQNQYFFYLDPHCTHFAHTTTQPASEETFHSATLRRVAIQDLDPCMIFGFLIRDEEEWHSFEANQKYFADIVQIFDSEPQPVETHDDFVLDENVEDHL

SEQ ID NO: 17875 - protein, 509 aa, Prunus cerasus
MTDRRAQDNAVSGQPLLKKKPKRNLYAIGCAILASMTSILLGYDIGVMSGASIYIQKDLKISDVEVEILIGILNLYSLIGSAAAGRTSDWIGRRYTIVFAGAIFFTGALLMGLATNYAFLMVGRFVAGIGVGYALMIAPVYNAEVSPASSRGALTSFPEVFVNIGILLGYVANYAFSGLPIDLGWRLMLGVGVFPSVILAVGVLSMPESPRWLVMQGRLGEAKQVLDKTSDSLEEAQLRLADIKEAAGIPEHCVEDVVQVPKHSHGEEVWKELLLHPTPPVRHILIAAIGFHFFQQLSGIDALVLYSPRIFEKAGITDSSTLLLATVAVGFSKTIFTLVAIGFLDRVGRRPLLLTSVAGMIASLLCLGTSLTIVDHETEKMMWASVLCLTMVLAYVGFFSIGMGPIAWVYSSEIFPLKLRAQGCSMGTAVNRIMSGVLSMSFISLYKAITMGGTFFLYAGIATVGWVFFYTMLPETQGRTLEDMEVLFGKFWRWREGYALLRNKRAVVC

SEQ ID NO: 17876 - protein, 435 aa, Schizosaccharomyces pombe 972h-
MNILQGSEAPLSYEEIASRAGAFDFNKNIPLKNWLRTSTTISKQAHVYVSEHDYSNGVFLLFRYCELFMKCQKHPDAAAYKKELFDYYQGVRNALEEIELIKPIVKEQYEQYQCQKNDLDDLKKLSMKDSQPSLEKPVSYVDEPILEQWALSDLQILPPSSTDLLSPDSQKLSKSSSDLPQFDYPSLNSSPTFNSNLPISSSRFEKTSLSDSKLVSPEPLDDNKDIQFIKKPIYTRTSEPRPKPAGTFKIHAYTEGGKPLRTIYLPKLLKKVFLDVVKPNTKKNLETCGILCGKLRQNAFFITHLVIPLQEATSDTCGTTDEASLFEFQDKHNLLTLGWIHTHPTQTCFMSSVDLHTHCSYQLMLPEAIAIVMAPSKNTSGIFRLLDPEGLQTIVKCRKPGLFHPHEGKVYTMVAQPGHVREINSKLQVVDLRVK

SEQ ID NO: 17877 - protein, 571 aa, Legionella pneumophila str. Paris
MLDFSLNRDPQTGELYIETSLCGKPLLTTPQLNKGTAFTQEERKDFGLLGKLPHRVETLDEQVKRAYLQYSSYTTRLQQHIYLNNLHDKNQIVFYKLLSRHLGEMLPIIYTPIVGAAAKRFSHEYRQPRGLYIAHSDKNQLEEIINNRSNPDIDLVVVTDGEGVLGIGDQGIGGMDIPVAKLMVYSLCGGIDPTRTLPIFLDVGTNNQELLNDPMYLGCRHPRIKSSEYDDFIKTFVNEIHKQFPNAFLHWEDFGRGNARRILDQFQDELCTFNDDIQGTGAVTLAAILAACDVTGLPLHEHRIVVFGAGSAGTGISDQIVDAMVKSGLSLTDAYDRFWLIDKQGLLLATDQELTDAQKPYAWNPIDIQSWEINNKQHPSFTDTIRHVKPTILIGCSAQTGAFSQDIVETMSTACERPIIFPLSNPDEKCEAQPSDILAWSKGRALIATGTAFAPIEYQNRMVQIAQCNNALVFPGIGLGVLAVSASRLTKDMILAAAQTLSKFAPSKKDSFLPLLPSLDNAQIVAKEIAIAVAQCAIDSGYAQKNQDKDLPRLIDELFWEPRYLPFRKRG

SEQ ID NO: 17878 - protein, 313 aa, Pseudomonas fluorescens PfO-1
MSSREIRIATRKSALALWQAEYVKARLEAAHPGLLVTLVPMVSRGDKLLDSPLSKIGGKGLFVKELETALLENEADIAVHSMKDVPMDFPEGLGLFCICEREDPRDAFVSNTYSSLDALPAGSIVGTSSLRRQAQLLTRRPDLEIRFLRGNVNTRLAKLDAGEYDAIILAAAGLIRLGFEDRITSAISVDDSLPAGGQGAVGIECRSADTEIHALLAPLHHADTADRVTAERALNKHLNGGCQVPIACYAVLEGDQLWLRGLVGEPSGGKLLNAQARAPRAAAETLGVQVAEDLLSQGADDILKAVYGEAGHE

SEQ ID NO: 17879 - protein, 221 aa, Mycobacterium tuberculosis H37Rv
MHHSFAYRSYSWYVDVDNLPQLPWWLRPFARFHADDHFADPFSCPPHSSLRDRLDAFFAARGLAVPDGRITALLQARVLGYVFNPLSIFWCHDRDGQLRHVIAEVHNTYGGRHAYLLPPADLPVVTAKNFYVSPFHQLAGYYLIRAPRPDRELDVTVTLHRDRRQVCPEFTATLRGQRRPATTRQIAMMQIISPLAPMVVAARIRIQGIRLWLRRVPVVPR

SEQ ID NO: 17880 - protein, 337 aa, Mucor racemosus
MVVQVGINGFGRIGRIVLRATESNKDVQVVAINDPFIPLDYMVYMLKYDTVHGRFDGSVEAKDGKLVVNGHAIAVSAERDPTSIPWGSAGADYVVESTGVFTTTEAASAHLKGGAKKVIISAPSADAPMFVCGVNLEAYKSEYKVISNASCTTNCLAPLAKVINDNFGIADGLMTTVHATTATQKTVDGPSHKDWRGGRAAAANIIPSSTGAAKAVGKVIPALNGKLTGMAFRVPTPDVSVVDLTVNLSKGASYDEIKQAIKKASETTMKGVLGYTSDAVVSSDFVGEVCSSVFDAAAGIQLTPTFVKLIAWYDNEYGYSNRVVDLLVHAAKVDGAL

SEQ ID NO: 17881 - protein, 360 aa, Glycine max
MLGVIRHKSIRPAFSAIRHLSSAAKEITVREALNSALDEEMSADPKVFLMGEEVGEYQGAYKISKGLLDKYGPERVLDTPITEAGFTGIGVGAAYYGLRPVVEFMTFNFSMQAIDHIINSAAKSNYMSAGQISVPIVFRGPNGAAAGVGAQHSQCYASWYGSCPGLKVLSPYSSEDARGLLKAAIRDPDPVVFLENELLYGESFPVSAEVLDSSFCLPIGKAKIEREGKDVTITAYSKMVGFALKAAETLAKEGISAEVINLRSIRPLDRSTINTSVRKTNRLVTVEEGFPQHGVGAEICTSVIEESFGYLDAPVERIAGADVPMPYAANLERMAVPQVEDIVRAAKRACYRSVPLAASA

SEQ ID NO: 17882 - protein, 419 aa, Dechloromonas aromatica RCB
MAAKNAFYAQSGGVTAVINATACGLIQEARRHPEKIGKVYAGRDGIIGALTEDLIDTSLESDEDIARLRHTPGGAFGSCRYKLKSLEQHRAQYERLIEVFKAHDIGYFFYNGGNDSMDTAWKVSQIAEKMGYPVVCVGVPKTVDNDLPHTDCCPGFGSVAKYVATSIREAGYDVASMARTSTKIFVLEVMGRHAGWITAACGLASENAGEPPHILLFPEVPFDPERFLVRVDECVKQYGYCTVAVSEGLSDAAGNLIAESGTKDAFGHSQLGGVGQMVAQLIKDKLGYKYHWALADYLQRSARHLASKTDLDQAHALGVAAVDLALQGKNAVMATIERLADAPYRWQIGDAPLAEIANVERKMPPEFISPDGFHITDACRTYLQPLIDGEEPPPYRNGLPDYIRLKNISVAKKLEIFTI

SEQ ID NO: 17883 - protein, 448 aa, Corynebacterium diphtheriae
MSPIDEKVQGYYELLLKRNPAEPEFHQAVNEVLDSLKIVLEKDPHYADYGLIQRLCEPERQLMFRVPWVDDNGVVQVNRGFRVQFNSAIGPYKGGLRFHPSVNLGIIKFLGFEQIFKNSLTGLPIGGGKGGSDFDPKGKSDVEIMRFCQSFMTELYRHIGEYRDVPAGDIGVGGREIGYLFGQYRRLANQHESGVLTGKGLTWGGSLVRTEATGYGLVYFTAEMLAHHGQSFEGKKVIVSGSGNVAIYAIEKAQELGATVIGFSDSSAWVETPNGVDVAKLKEIKEVRRERVSSYVDEVEGAILHTEGSIWDLTCDVALPCATQNELDGEHAKKLADNGCAFVAEGANMPSTADAIEVYRERGIHFGPGKAANAGGVATSALEMQQNASRDSWSFEYADQRLREIMKGIFKNCESTAREYGHEGDYVVGANIAGFKKVADAMLAQGVI

SEQ ID NO: 17884 - protein, 954 aa, Bordetella parapertussis
MSRAPDTHSDFIPRHIGPSDEDQATMLAAIGAASLDALIDEVVPPRIRSRAPLALPAARSETDVLQDLKRMAARNQIYRNYIGQGYYGTHTPNVVLRNVLENPAWYTAYTPYQPEISQGRLEALLNYQTMVADLTGLDISNASLLDEGTAAAEAMTLARRGSRSSSPVFFVSQHCHPQTLEVVRTRAEGLGIELVIGDESRGLPECFGVLLQYPHSLGGVADYRELAQAAHAQGAVVACVTDLLALALIEPPGQWGADIAVGSAQRFGVPFGFGGPHAGFMACRDAYKRNMPGRLVGVSKDAQGNPALRLALQTREQHIRREKATSNICTAQVLLAVMAGLYAVWHGPRGVRRIAERVQSLTGALRAALAGLGVKVANDTWFDTLLLETGVATPAILAAADCARTNLRQVDGARLAVSLDETVTLADLQALVNVFAAGLGKDEVALPAPQASLDGIPAAVRRQGPILSHPVFSSVQSETDMLRYLRKLADKDLALDRTMIPLGSCTMKLNATAEMIPITWPEFALIHPFAPASQTPGYRELIDGLSAQLCEITGYDGISLQPNSGAQGEYAGLLAIRAYHQANGQPQRNVCLIPASAHGTNPASAQLAGMDVVVVASDANGNVDLADLRARIAQVGERLAALMITYPSTHGVFEEAVTEICDAVHEAGGQVYLDGANMNAMVGVAQPGKFGSDVSHLNLHKTFCIPHGGGGPGVGPVAVRAHLAPYLPGVLDAQGRLDPEAKVGPVSAAPYGSAGILPIPYVYIALMGAEGLRRATEVAILNANYIAARLRDHYPVLYAGRNGRVAHECILDVRPLKETSGISAEDIAKRLMDYGFHAPTMSFPVAGTLMVEPTESEGLAELERFIEAMIAIRAEIAQIESGERDRDDNVLRNAPHTAQMLLAEEWHHDYPRQQAAYPVASLRENKYWPPVARVDNAYGDRNLVCACLPVEAYA

SEQ ID NO: 17885 - protein, 386 aa, Mycoplasma mycoides subsp. mycoides SC str. PG1
MTNEFKQIARIKVLGVGGAGNNAIRRMFEENVQGVEFYIINTDAQILESSPVPNKIILGEKTTKGLGAGGNPEVGKAAAIESEEELRKVVEGADLIFIAAGMGGGTGTGAAPVIAKIAQESGALVIGIVTKPFIFEGRHRNVNAKEGLEELRKYVDSVIVVSNDKLLEYIGSIPIVESFKEADTILKQGVQTITDLIAVPATINLDFADVKSVMSKKGNALFGIGVASGKDKAVEAAKEAINSKLLEASIEGAKDIIVNITGGRTVSLNDAYDAVGVISQAVNNKELNIVFGMAINDDLTDDDEIIVTVIATGFENKNLQNQESNIIKTPRVEPVVQQAQPSKPIQQEQEEEQHEEVDEFDDEMSLTTTDDTEEDFNDDDFPTFLK

SEQ ID NO: 17886 - protein, 108 aa, Bdellovibrio bacteriovorus HD100
MGTFTKAVTDTSFDAEVLNSSTPVLVDFWAEWCGPCRALAPKLEEVAQELGAKVKIVKVNVDENPSVPGKYGIRGIPAMLLFKGGSEVGQLVGNHPKDAILEFLNKNV

SEQ ID NO: 17887 - protein, 382 aa, Arabidopsis thaliana
MVSQKETVCVTGASGFIGSWLVMRLLERGYFVRATVRDPGNLKKVQHLLDLPNAKTQLTLWKADLSEEGSYDDAINGCDGVFHVATPMDFESKDPENEVIKPTVNGMLGIMKACVKAKTVRRFVFTSSAGTVNVEEHQKNVYDENDWSDLEFIMSKKMTGWMYFVSKTLAEKAAWDFAEEKGLDFISIIPTLVVGPFITTSMPPSLITALSPITRNEAHYSIIRQGQYVHLDDLCNAHIFLYEQAAAKGRYICSSHDATILTISKFLRPKYPEYNVPSTFEGVDENLKSIEFSSKKLTDMGFNFKYSLEEMFIESIETCRQKGFLPVSLSYQSISEIKTKNENIDVKTGDGLTDGMKPCNKTETGITGERTDAPMLAQQMCA

SEQ ID NO: 17888 - protein, 488 aa, Bordetella pertussis Tohama I
MIGGKLVQSKTTQWRDVINPATQEVVAQVPFATREELDLAVANAKEAFKTWRNTGQGARMRVMLKLQQLLRDNTGKLAEMITREHGKTLPDAEGEVGRGLEVVEHACSIANLQLGEYAENAAGGIDVYTLIQPLGVCAGITAFNFPVMLPCFMFPIAVACGNTFVLKPSEQDPSSSLFLAQLALEAGLPPGVLNVVHGGPDIANGLCEHPDIKAVSFIGSTRVGTEIYNRASAAGKRCQSMMGAKNHCVILPDADPEVALNQLVGAAFGAAGQRCMATSVAVMVGEARNWLPDFVERARKLKVNNGVDREADLGPLVSPAAKQRVEGLIQKGVDEGAKLLLDGRSLKVAGFEQGNFVGPTIFDGVTENMTIYTEEVFGPVLCVVGVDTLEDAVEFINRNPNGNGVALFTQDGGAARYFQNNIDVGQVGINIPIPVPVAWFSFTGSRGSKLGDLGPNGKQAVQFWTQTKTVTARWSAHGRGVNTTISMK

SEQ ID NO: 17889 - protein, 196 aa, Oryza sativa
MNHHLSLLHLPRLSPVLHHHPRHLRLHGRTTVFQARLPSPQRTNQHRLLAVTTAPPEPEKTEEQQLLHPLQEPAEGEVSGGGGADRTCGLPTWALIGAIAAAVALSSAAAAGPAAALGPEGPLVEEFWDNMRRYALYVVTVSTGFAYTLAQPIVELLKNPVTALLIVAVLAGGGFLVSQVLNAMVGNSDFIYTYDQ

SEQ ID NO: 17890 - protein, 226 aa, Bordetella parapertussis
MSSIGFRILPLPEPPAADEVLAGFAQIGTAQISDCMGRLYGVQGLRPLHAGAARIVGRAITVKTRPGDNLMIHKAISLAGPGDVIVVDGAGETANALVGELMMMDAQSRGVAAFVIDGAVRDLDVFQQGAFGCFARAVSHKGPYKDGPGEINVPVSIGGQVVAAGDVIVGDADGVVAVPLAQAGAVLAAARRKEDAELAAKEKLRAGTYAKPWVDRIIAEKTGDAQ

SEQ ID NO: 17891 - protein, 578 aa, Campanula rapunculoides
MKKSFIFISLLLALCYSLLVLHHGFVDAADADSSVHLSLPSDQPYRTGYHFQPPQNWMNDPNGPMYYKGVYHFFYQYNPNGPLFGDIMIWGHSVSYDLVNWIHIDPAIYPTDPADINSCFSGSATFLPGYKPVMLYTGLDTEKRQVQNLAVPKNLSDPFLREWVKHKANPIMTTPEGVKADDFRDPSTAWLGYDGKWRVLVGSKKNDLGVAYLYQSKDFVKWERFDYPLMSMMETSTWECPDFFPVSVSSTNGLDTSGVINPGVKHVVKVGFNGIDWYTIGTLSERDNYVPENGLKGNSLDMRYDYGKFYASKSFYDNAKQRRVLWGWISEADAQEDDVARGWSGLQAVPRSVWLDRNGKQLVQWPVEEIEKLRENEVKFSNKELEGGSLFEVEGITASQADVKISFKLSNLEEAEELDPSWTDPQLLCSEMGVSSKGKYGPFGLLALASDDLTEQTAIFFRVFSSHGKYVVLMCSDQRRSSISNNVEKTTYGTFVDIDPKHEEISLRSLIDHSIIESFGAEGKSCITARVYPRLAINKDAHLYTFNYGSESVMISELNAWSMKNAHMIVDETLSSAA

SEQ ID NO: 17892 - protein, 316 aa, Pseudomonas aeruginosa PAO1
MSEVKHSRLIILGSGPAGYTAAVYAARANLKPVVITGIQPGGQLTTTTEVDNWPGDVEGLTGPALMTRMQQHAERFDTEIVYDHIHTAELQQRPFTLKGDSGTYTCDALIIATGASAQYLGMSSEEAFMGKGVSACATCDGFFYRNQVVCVVGGGNTAVEEALYLANIAKEVHLIHRRDKLRSEKILQDKLFDKAENGNVHLHWNTTLDEVLGDASGVTGVRLKSTIDGSTSELSLAGVFIAIGHKPNTDLFQGQLEMRDGYLRIHGGSEGNATQTSIEGVFAAGDVADHVYRQAITSAGAGCMAALDAEKYLDDH

SEQ ID NO: 17893 - protein, 432 aa, Candidatus Kuenenia stuttgartiensis
MSEKHTIIQVALDFVDIHRAIKVASEAIEGGADWLEIGTPLIKSEGMNAIRRLREIFPDTMLVADMKTMDAGRVEMEMAAKAGANIAVVMGNAPGATIRECVLAGKNYGIKVCADFMDTDAIDERIGIVEKCGVDYISIHTAIDDQMSGKTPFNVLRHICENAHTPVAVAGGINSENVVDAINAGAQIVIVGGYISKSENARDAANNIRQAVKENRRIQTGFFKRVTREDVRNAFMKLSTANISDGRHRAKSIVGLYPVNPSIKLIGTAVTVRTYPGDWAKPVEAIDIAKEGDVIVIDAGGTGPAVWGELATHSAIQKKLSGLVVYGAVRDTAEMKQLNFPVYTKLVMPDAGEPKGLGEINVPLNISGIQIMPGDWIIGDEDGLMAVPQAESEISVNYGMDCLEKENRIRKEILSEKSSLGRVTDLLKWEKK

SEQ ID NO: 17894 - protein, 340 aa, Acinetobacter sp. ADP1
MPIFPKPKVTVILANLGTPDVPTASAVRAFLKQFLSDQRVIEIPKLLWKIILYSFVLPFRPKRVAHAYASVWGQDSPMREILFAQTDALKRQLISHYPQLDLNIVPAMTYGNPGVQHILKDLAASPQEHVILLPLFPQYSATSTAPLYDAFANWIPKQRHLPGLTIIKDYYRHPVFIQALVSSVQRFQQQHGKPQKLLMSFHGIPQPYADKGDPYADRCRETARLVAKQLGLTPDDWAISFQSRFGKQEWVKPYTDELLTTWAANGIKSVQILSPAFSADCLETLEELEIQNAELFLEAGGTSYQYIPALNTSVEHLELLRQLLQAHLDALNYSLAYSAH

SEQ ID NO: 17895 - protein, 564 aa, Zea mays
MASSHIILPKEEEEEAAAAAVAEVGLGAAVEADHDHRPYQEQGPGKAALPFSATCVRISRDSYPNLRALRNASTMTLHDDDAAFVKLEEGDYGYVLDDVPHLTDYLPDLPTFPNPLQDHPAYSTVKQYFVNADDTVPEKVVVQKNSPRGVHFRRAGPRQRVYFESEEAKACIVTCGGLCPGLNTVIRELVCGLSHMYNVSNVFGIQNGYKGFYSSNYLPMTPKSVNDIHKRGGTVLGTSRGGHDTKKIVDNIQDRGINQVFIIGGDGTQKGAYEIYKEIRRRGLQVAVAGIPKTIDNDIAVIDKSFGFDTAVEEAQRAINAAHVEASSAENGIGLVKLMGRYSGFIAMYATLASRDVDCCLIPESPFYLEGEGGLFEYIDRRLKENNHMVIVVAEGAGQDLIAQSIPAADQQDASGNKLLLDVGLWLTHKIKDYCKSKKMEMTIKYIDPTYMIRAIPSNASDNVYCTLLAHSAIHGAMAGYSFTVGMVNGRHAYIPFHRVTSTRNKVRITDRMWARLLSSTNQPSFLSQKDIDAAREADKAANRTKSREDAKKQSTPVLANGEK

SEQ ID NO: 17896 - protein, 474 aa, Bacillus cereus ATCC 10987
MKKHLYINGDWKSVNTYKPLYAPYSEETLAEIAQGTEEDVKEAVIAAKNAMKEMNRLSAYDRATILEKVAQKMDERREEFAEIIAKEAAKPIRAARGEVDRTVQTYKFAAEEAKRIYGETLPLDAAPGADGRIAYTIRKPIGVIGAITPFNFPLNLVAHKVGPAIAAGNTVVLKPADQTPLSSYALVELFEEAGLPKGALNIISGPGSTVGEAIVTNDDVASITFTGSPKVGLGIKAKAGLKRVTLELGSNAAVIIDEDVELTDELIERVKWGAFVNNGQVCISVQRVFVHEERMDEFLSKLQKAMETVVVGDPLLEETDVSALISKKDVERIDNWVQEAVKEGASVLYGGNKRDERIFKPTVLTNVPEHVSVQCQEVFGPLMTVNTFKEFDEAIEQVNHSRYGLQAGVFTNNLFKVMRAIDELEVGGVMINDIPTFRVDHMPYGGVKESGTGREGIKYAIEEMTEMKLVCIKK

SEQ ID NO: 17897 - protein, 108 aa, Vibrio parahaemolyticus RIMD 2210633
MSDKILQLTDDGFENDVINAAGPVLVDFWAEWCGPCKMIAPILDEIAEEYEGKLTIGKLNIDHNAGTPPKFGIRGIPTLLLFKDGNVAATKVGALSKTQLKEFLDANL

SEQ ID NO: 17898 - protein, 351 aa, Methylobacillus flagellatus KT
MKIAVLPGDGIGPEIVAQAVKVLKALDLDLELQEAPIGGAGYEAAGDPLPDATLKLAKEADAVLLGAVGDWKYDTLPRDKRPERGLLRIRKELNLFANLRPALLYPELASASTLKPEVVSGLDIMIVRELTGDIYFGQPRGISTLDNGEREGVNTMRYNESEIRRIAHVAFGIAQKRNKKVCSVDKANVLETTELWRQVMIEVAKEYPDVELSHMYVDNAAMQLIRAPKQFDVMVTGNIFGDILSDEASMLTGSIGMLPSASLDQGNKGMYEPSHGSAPDIAGQDVANPLATILSAAMMLRYTFNDEANASRVENAVKKALEQGYRTADIWTEGTSKVKCSEMGDAVVAAL

SEQ ID NO: 17899 - protein, 191 aa, Cryptococcus neoformans var. neoformans JEC21
MALLPYSAHAFRTYMRPATLPVTRASARVFSPRRYLQNILAPTDPDANSPTLIISKLTPRGFILSDNLIIPGGAILHSGKVLLWDVDPPRQPQAGEKGGLEKVWDGWEKERFGALEMLVPRPEILLLGTGQRALPAPKRLREYISGLGIQLDVMDSRNAASTYNLLVEEGRRVAAALCPLGPIDPRTGEPR

SEQ ID NO: 17900 - protein, 406 aa, Escherichia coli
MKRAVITGLGIVSSIGNNQQEVLASLREGRSGITFSQELKDSGMRSHVWGNVKLDTTGLIDRKVVRFMSDASIYAFLSMEQAIADAGLSPEAYQNNPRVGLIAGSGGGSPRFQVFGADAMRGPRGLKAVGPYVVTKAMASGVSACLATPFKIHGVNYSISSACATSAHCIGNAVEQIQLGKQDIVFAGGGEELCWEMACEFDAMGALSTKYNDTPEKASRTYDAHRDGFVIAGGGGMVVVEELEHALARGAHIYAEIVGYGATSDGADMVAPSGEGAVRCMKMAMHGVDTPIDYLNSHGTSTPVGDVKELAAIREVFGDKSPAISATRAMTGHSLGAAGVQEAIYSLLMLEHGFIAPSINIEELDEQAAGLNIVTETTDRELTTVMSNSFGFGGTNATLVMRKLKD

SEQ ID NO: 17901 - protein, 175 aa, Triticum aestivum
MAPTVMASSATSVAPFQGLKSTAGLPVSRRSSSAGLGSVSNGGRIRCMQVWPVEGIKKFETLSYLPPLSTEALLKQVDYLIRSKWVPCLEFSKVGFVFREHNSSPGYYDGRYWTMWKLPMFGCTDATQVLNEVEEVKKEYPDAYVRVIGFDNLRQVQCVSFIAFRPPGCEESGKA

SEQ ID NO: 17902 - protein, 402 aa, Thermosynechococcus elongatus BP-1
MSLRVAVVGGGPAGSSAAETLAKAGIQTYLFERKLDNAKPCGGAIPLCMVSEFDLPPEIIDRRVRKMKMISPSNIEVNIGHTLKEHEYIGMCRREVLDSFMRNRAADLGANLINGTVFKLEQPTTSDRPYTLHYVQEDGTAQTLEVDVVIGADGANSRIAKEIDAGDYNYAIAYQERIRLPEDKMAYYNELAEMYVGDDVSPDFYAWVFPKYDHVAVGTGTMKVNKDRIRELQAGIRSRAAAKLEGGQIIKVEAHPIPEHPRPRRVVGRVALVGDAAGTVTKSSGEGIYFAAKSARMCAETIVETSNGGRRIPTEADLKLYLKRWDKAYGMTYLVLDLLQRVFYRSDATREAFVEMCSDLDVQKLTFDSYLYKTVVPANPLVQLKITAKTIGSLMRGNALAP

SEQ ID NO: 17903 - protein, 798 aa, Aspergillus oryzae
MAAAFDDEDLSVPLPSYDHDRRRERASGATSPNSNFAGMTMPPPSRPIGRGGDPSMQSPATTRDMQRLDQYQTVKVLGEGSFGKVKLAIHQPSGRQVALKIISRRKLLSRDMVGRVEREIQYLQLLRHPHIIKLYTVIATKTDIVMVLEYAERELFDYLVKRGRCNDAEARKFFQQIICAVEYCHRHKIVHRDLKPENLLIDSEKNVKIADFGLSNIMTDGNFLKTSCGSPNYAAPEVISGKLYAGPEVDVWSCGVILYVLLVGRLPFDDDYIPALFKKIAAGNFHMPPYISSGAARLIRSMLQVHPVHRLTIPEIRQDPWFQKDLPKYLQPPPEEFIATGVDPNKAIDPRKIAPGKPISVQHKIHQVAIAKLERNMGYGREDIEDALKNPEPSAIKDAFFIIVENEMMQTNSPTDENLMPPTPLPPSDRTSLSSAAAGRTTAAHSQGTRAGPPTRTRSGSQRQPFQLHQPSESDDLETSRVSHVRILPTSLPYVHDQLMEQRERERRARAADRLAEEQARSGSDALEDPHQSGLDGRSLEEQEATAKALKPHSRSIVDLDKLRLEPPEARNAPHQPRKTRKWQFGIRSRNQPYEAMLYLYKAIAAQRGRWEILPAESGTQIGSQSPDEPTPLQSKYPDLPSDYYIPKDPWFIRARLLKEGVKAPGSSGSVHSSRSDISELRRRFNLTGGASSVDEKSHSPSEHWSTSGPSSASQHHSIPRVAYGVWVFVDIQLYQLEENNYMVDFKCDGYQNVIRAESDTEWHPISKRFRNKEKEITSPYPFLDVASDLVAQLAVAS

SEQ ID NO: 17904 - protein, 142 aa, Brassica napus
  misc_feature (25)..(25): Xaa can be any naturally occurring amino acid
MAASVMLSSGTLKPAGFAVEEMSAXRGLPSLTRASPSSFKIVARGVKKIKTDKPFGVNGSMDLRDGVDASGRKGKGYGVYKFVDKYGANVDGYSPIYNKDEWSASGDVYKGGVTGLAIWAVTLAGILAGGALLVYNTSALAQ

SEQ ID NO: 17905 - protein, 467 aa, Arabidopsis thaliana
MATTVTLKSFTGLRQSSTEQTNFVSHVPSSLSLPQRRTSLRVTAARATPKLSNRKLRVAVIGGGPAGGAAAETLAQGGIETILIERKMDNCKPCGGAIPLCMVGEFNLPLDIIDRRVTKMKMISPSNIAVDIGRTLKEHEYIGMVRREVLDAYLRERAEKSGATVINGLFLKMDHPENWDSPYTLHYTEYDGKAGATGTKKTMEVDAVIGADGANSRVAKSIDAGDYDYAIAFQERIRIPDEKMTYYEDLAEMYVGDDVSPDFYGWVFPKCDHVAVGTGTVTHKGDIKKFQLATRNRAKDKILGGKIIRVEAHPIPEHPRPRRLSKRVALVGDAAGYVTKCSGEGIYFAAKSGRMCAEAIVEGSQNGKKMIDEGDLRKYLEKWDKTYLPTYRVLDVLQKVFYRSNPAREAFVEMCNDEYVQKMTFDSYLYKRVAPGSPLEDIKLAVNTIGSLVRANALRREIEKLSV

SEQ ID NO: 17906 - protein, 319 aa, Wolbachia endosymbiont of Drosophila simulans
MGEEVAEYDGAYKVTKGLLKEFGENRVVDTPITEHGFAGLAVGAAFAGLKPIVEFMTFNFSMQAIDQIVNSAAKTNYMSGGQLGCPIVFRGPNGAAARVAAQHSQCFAAWYSHIPGLKVIAPYFASDCRGLLKAAIRDPNPVIFLENEIAYGHEHEVSDSELSNKDYLLEIGKAAVIREGKDVTITAFSLKLMDALNAADLLSSEGIEAEVIDLRTLRPLDTQTVINSIQKTNRLVSVEEGWPFAGIGAELSAVVMEQGFDYLDAPVVRVTGKDIPLPYAANLEKKALPQVEDIVEAVHQVCFRKNSSFLCLLFRIGPS

SEQ ID NO: 17907 - protein, 222 aa, Escherichia coli
MPEEARVRCKGFLFDLDGTLVDSLPAVERAWSNWARRHGLAPEEVLAFIHGKQAITSLRHFMAGKSEADIAAEFTRLEHIEATETEGITALPGAIALLSHLNKAGIPWAIVTSGSMPVARARHKIAGLPAPEVFVTAERVKRGKPEPDAYLLGAQLLGLAPQECVVVEDAPAGVLSGLAAGCHVIAVNAPADTPRLNEVDLVLHSLEQITVTKQPNGDVIIQ

SEQ ID NO: 17908 - protein, 827 aa, Brassica rapa
IYFNTLSSTETLTISSNRTLVSPGDVFELGFFRTNSSSGWYLGIWYKKVSYRTSVWVANRDSPLFNAIGTLKISSNNLVLRGQSNKSVWSTNLTRGNERFPVVAELLANGNFVIRYSNKNDASGFLWQSFDYPTDTLLPEMKLGYDLKTEQNRFLTSWRNSDDPSSGEISYFLDTESGMPEFYLLKSGLRAYRSGPWNGVRFSGIPGDQYLSYMVYNYTENSEEVAYTFRMTTHSIYSRLKISSKGFLERLTWTPTSIAWNLIWYLPVENQCDVYMVCGVYSYCDENTSPMCNCIQGFMPLNEQRWDLRDWSSGCTRRTRLSCSGDGFTRMRKMKLPETKMANVYRSIGVKECEKRCLSDCNCTAFANADIRNGGTGCVIWTGRLDDIRNYYADGQDLYVRLAAADLVKKRDANWKIISLIVGVSVVLLLMIMFCLWKKKQNRAKAMASSIVNHQRNQNVLMNTMTQSNKRQLSRENKIEEFELPLIELEAVVKATENFSNCNELGRSGFGIVYKGMLDGQEVAVKRLSKTSLQGIDEFMNEVRLIARLQHINLVRILGCCIEADEKILIYEYLENSSLDYFLFGKKRSSNLNWKDRFAITNGVARGLLYLHQDSRFRIIHRDLKPGNILLDKYMIPKISDFGMARIFARDETQARTDNAVGTYGYMSPEYAMDGVISEKTDVFSFGVIVLEIVSGKRNRGFYQVNPENNLPSYAWTHWAEGRALEIVDPVIVDSLSSLPSTFKPKEVLKCIQIGLLCIQERAEHRPTMSSVVWMLGSEATEIPQPKPPVYCLIASYYANNPSSSRQFDDDESWTVNKYTCSVIDAR

SEQ ID NO: 17909 - protein, 108 aa, Triticum aestivum
ESYNEEQEMLQQQISSARSNLGAVQIDHDLRVKISKVCSELNVDGLRGDIVTNRAAKALAALKGRDSVTVEDIATVIPNCLRHRLRKDPLESIDSGLLVIEKFYEVFS

SEQ ID NO: 17910 - protein, 599 aa, Zymomonas mobilis subsp. mobilis ZM4
MSSHRQRLGALRTELARENLNGFFVPLTDEHMSEYIGAYACRLEWLTGFGGSAGSAVVLEGQAAIFVDGRYTIQVTEQVDPELWSYKSLPADDPVAWAIAHLKAGDRIGYDPWLASLGWEKQARRRLDAQKIELVALPTNPIDAIWSDRPLSSQAPAFIQPENLAGKTSEQKRNEVAEWLNEKQADTLVLTALDSIAWLFNMRGSDVSCTPVALAFALTHKDGSADLFIDPAKTDDALKEAMGNAVHFHDQTDFPDALKALSGKSVIVDPERTVAAITSLLQDGGARLSYDRDPVVLMKAIKNRAEIEGHRQAQLWDAVALAKFFYWLSQTAPKGQLTELSAAEKLLSFRQESGHLVDLSFETISAAAAHSAIPHYRVTEASNLPLKKDEIYLVDSGGQYPNGTTDVTRTVIIGTPTEEMKQRFTLVLKGHIALATAVFPAGTSGGQLDSFARQYLWRAGVDYAHGTGHGVGAFLSVHEGPQRISPSGGAFSGGNEVLRAGMILSNEPGYYKSGAFGIRIENLLLVKPVEVAGAEKPCLAFETLNFTPIDRNLIDSSLLSESEISWLNQYHQEVCQKLLPFLSMQEAEWLKVATAPLRG

SEQ ID NO: 17911 - protein, 151 aa, Glycine max
MACFSLNLSALHMFRPCVYIPQIVANPLQHQNRKIKILACQANQNLDQSSTTEKSVAELGNSKGTSSPNGVPPKFPSKDFKKKIAIVSFLGALGLLLSSRLHFFGVPMKDHCAHALPSKEARPNGKFTVVEFNADWCEVRGELAPDVYEVE

SEQ ID NO: 17912 - protein, 404 aa, Oryza sativa (japonica cultivar-group)
MAIGGWQDERYAIQGEKYQGQQYSHIYFTRLHHMRNLLHALVPSWKPHLPVTTVLGLEEGKDCIIVGTLYKHMKLKPSILDEYSKERSAIPLVKPHNFMHPDDHLILEDESGRVTLAGAIPPAAYVTDEDKYVVFVSGLSIGSEKFNPLQFQLLIDHITGHLGDENEQSIASNIVRVVVAGNSVHISPRFFNGQAVASKDQSRIAEPIKELDIMLTQLVASLPVDMMPGSNDPANFSLPQQPLHRCLFAGAATYNTFSSCSNPHQFELDSVRFIGTSGQNIDDLYKYSDAKDKLEFVERTLRWRHLAPTAPNSLGCYPYTDKDPFLVESCPHVYFVGNQDKYETQLLQGLEKQKVRLICIPRFCDSGVAVMVNTSSCMLTIGKAALFYLCNLESYKEAKSSSGD

SEQ ID NO: 17913 - protein, 120 aa, Zymomonas mobilis subsp. mobilis ZM4
MRGIEEALVKKIEVVIKPFKLEDVKAALTDAGISGITVTETRGYGRQKGHTELYRGAEYVVDFLPKVKLETVVPDELVENVVEAVTVAARTGRIGDGKIFISDVLDAIRIRTGERGIEAI

SEQ ID NO: 17914 - protein, 188 aa, Mougeotia scalaris
VYEDDGQPFTTFSQFWTRWQDMPFQPDNPLSTPNRLVLPPAVELQSMRVDELGLEERQEKSSNALLARAWTPGWANADRSLLVFIQGPLQRYSSSKNKADKHTTSLLSPHLHFGEILRTLKCTIKVRRMKAQWKSQGAEGASQGVDAFVRSLGLREYSRYLSFNFPFTHERSLLSNLKSFPWRLDEAG

SEQ ID NO: 17915 - protein, 971 aa, Photobacterium profundum SS9
MRLIPNKIKPILLASMLAVGIIPAFLYSWISSEKLSTVALGQIAKGISSRTNIAAKNIDDIIANRLLSLKVLSSSPIFEQDAPIASYPASDSQGFISHYLTKLTEVDQAFNAIHLVEKKGDDFFISRSSRSLETVTLHNELRKFGLINIESAIKQMAATGDNVFISVPQDLISVPCLLLITKVNNDSDTAASEDRYLVVEYLLSEINESLTYFTDNIASAEYVFIINNDGNTILSGKNQGRSLQVFNDFKQNYSAGAFSENNMQYGVSHYTNRYGDDLLTTVSPLNTLSNNNETRWSLVTITPQHVATQAIDYLYRYFMLALLFTACIVMVLSIVLTKRITVPLAKLARFAAQFKLGNYTSQHTLKGPHEFQVLQEALNQGATKIAYDTQRLNQALEKAEAADRAKSTFLANLSHEIRTPMNGMLGLSQLLLKTDLTQEQRHHLLTLLDSGKHMMSILNDILDFSKIEQGQFKLNKANFCITDLVGTIESTYYSLAKEKGLDFSIQCHFDSNSWFFADKSRIRQILFNVINNAIKFTDKGEVRVSLNQGQCDNPKERKLIITAQDTGIGIAEDRMQQIFDPFSQAEISTSRRFGGTGLGLSIVRQLANLMNGDIQLESAYGKGSTFTITLVVEQGYYKQEKQQEVEFDRSTFINLKVLIVEDNHLNVLIIESFLKQYGFNTHAVENGAEALKILEHVYFDVILMDNHMPVMDGIEATKRIRALNSAICQIPIFACTADVFEETQRNMLRAGADCVITKPLDERKLQDALQRFKSKITAMASLRTEPEDITPTMPAKASSSLLMNNNIEEAEILTTERDIEPVSEQSDTDHSFDILDQNFSLDINNGEGCDITLDPTQFKHIELSTLLEMMDDDHNIVVQFLMMFTQEHANDVSKFEQALKQSDFDAAVLISHSLKGASGSIGAFKVSQAAQTVEKKVKIKALPTENEIALLAKELQCVIKEIHQQLTVTAI

SEQ ID NO: 17916 - protein, 279 aa, Oryza sativa
MSAVVCGKRSSSIFGDELIPSSPPSPSPPHHHHHPAKRSRCSPARAFDEATHRREALLHHLLSLFPHMDPQLLERALEASGDDIDSAIKSLNELCLESAAVGDSNSVLPAALKLSAEGVVNNGHLDVLTENPHATENFQTNHHGSEWVELFVREMMSASDIDDARARASRALEALEKSIMERAGTEAVHNLHKENVMLKEQLAIYLRENAVLKRGVAIQHERQKEFDERTQEVHSLKQLVLQYQEQIKTLEINNYALRVHLKQAQQNNSMPGRFPPDVF

SEQ ID NO: 17917 - protein, 853 aa, Dechloromonas aromatica RCB
MNREQILSILYDLSLTIGGELDLDSLLKKTLQRLLFHTSFPTGVVLAAPHRSEFGVIATLEKAVGDYMLADRCGTGINLSEGVLASEVELLADPIMLRPFSLDQVYTHALRLPIDGQRTILLLAPGEPSGGLPLTQIFQPVLANLAKAIILCCNNDRLTRALAADRDDARAELAVALAQSERERAFLDSLYDAIPDLVWVKDMNGAYLSCNPMFSRFFNASEYDIVGRTDYDFIDKELADFFREKDRAAAEAGGPTINEEWLTFGDSGYRGLFETIKTPMRDKEGYLIGILGISREITERRRVEDALRTSEAELDRHRQHLEALVAERTHALAQANVQLEQTIFAMDRVGIGIHWVDTQGYFIYVNRVAAAMLGYSVDEMMRLSVPDIHPDFTIEGFGAATEKIRQAGRVSLDAQHRHRDGHMVPVSINIYYRPETAQEPARYITFVSDISERKRAEQELREAKELAEQATKAKSAFLANMSHEIRTPMNAILGSTYLMRRGLTDAALNEPLERIEASGKHLLSIIDDILDLSKIEAGKLVLEEAPLMLPQLLGEVAEMLRGRAQEKNLAVRVESAGWPLNVLGDATRLRQALINYANNAIKFTDHGAITLRSRVIEENDESILVRLEVEDTGIGISPEALGRLFTPFEQADSSTTRKYGGTGLGLAITRHLAILMGGAAGAESSLGKGSLFWITARLKRHQVQASDKGMLVTGSSRDVEAALRQRYAGRLVLLVEDDPINREVAQMMVEEVGLAIDVAEDGCEALDKVSQTNYALVLMDMQMPRMDGLEATRRIRLLENRKNLPILAMTANAFAEDRERCMAAGMNDFVSKPVNPDLLYAALLRWLDFSAGL

SEQ ID NO: 17918 - protein, 579 aa, Cryptococcus neoformans var. neoformans B-3501A
MVKTRAPDREHIPPLSNFDIDLHPDTVGYVQDSQALADAIGSNGLKDVFASPIVFMAAFSACMGGLLFGFDQGILSIVLTIPQFLKVFPETDISVTSSAGLNKGVMTALLELGAFLGAMQAGFISDKISRKRTIMVGACWFVVGSALQAGSKSFAMLVIGRFIGGIGVGVLSSTAPTYISEIAPPNVRGAFLALEGSSIVIGIVIMFYITYATRHILDSWSFRLPFTIQVVPCIALGIGLWLLPYSPRWLATVGRDQDALDSLVRLRQLPSSDPRLQAEWITIRAEAIQQREVVISAHPHLQGESGFVQDFKLEMHAWIDMFKPNIIARTMIGVMLMVFQQLQGINALIYYSPTLFEQLGLDYEMQLTMSGVINVSQCVATIVAFFLLDRIGRKPPLLIGSVVNAICHFTVAGLIAKYSDNWAAHQSAAWAGVGLLITFMFFFGIGWSPVPWALPAEIHSSSRRAKGVAITTCSNWFFNFIVGLITPPMLQSIRYGTFIFFGAFAVMSGIWAWFLCPETKGLTLEAVDQLFHNHAAQEELRQKHDIISRMIGMELTTTPQPELVDDEKKIYTVQHLESV

SEQ ID NO: 17919 - protein, 158 aa, Arabidopsis thaliana
MSDDEHHFESSDAGASKTYPQQAGNIRKGGHIVIKGRPCKVVEVSTSKTGKHGHAKCHFVAIDIFTSKKLEDIVPSSHNCDVPHVNRVDYQLIDISEDGFVSLLTDNGSTKDDLKLPTDEALLTQLKNGFEEGKDIVVSVMSAMGEEQMCALKEVGPK

SEQ ID NO: 17920 - protein, 482 aa, Staphylococcus aureus subsp. aureus NCTC 8325
MGSFFNKIARKEDPAIYQNKDGHLKRTLRVRDFLALGVGTIVSTSIFTLPGIVAAEHAGPAVALSFLLAAIVAGLVAFTYAEMAAAMPFAGSAYSWVNVLFGEFFGWVAGWALLAEYFIAVAFVASGFSANLRGLVKPIGIELPAALSNPFGTNGGFIDIIAAIVILLTALLLSRGMSEAARMENILVILKVLAIILFVIVGLTAINVSNYVPFIPEHKVTATGDFGGWQGIYAGVSMIFLAYIGFDSIAANSAEALDPQKTMPRGILGSLSVAIVLFIAVALVLVGMFHYSQYANNAEPVGWALRQSGHGVVAAIVQAISVIGMFTALIGMMLAGSRLLYSFGRDGLLPSWVSHLNDKHLPNRALVILTIIGVLIGSMFPFAFLAQLISAGTLVAFMFVSLAMYRLRKREGKDLPIPAFKLPLYPVLPAITFVLVLLVFWGLGFEAKLYTLIWFIVGIILYLSYGLRHSKKNDVAEYHPPK

SEQ ID NO: 17921 - protein, 170 aa, Oryza sativa (japonica cultivar-group)
MESRKPPPSALVDNHVVPGDVVLDLTEMTNQTIKLGAGLRQDCDTIQATSAGRLRLSKPNKYWVESSQKRYIPSVEDTVLGVVVDTKPDNFLVDIKGPNLAFLPVLAFEGGTRRNIPKFEIGTLIYARVVKANSIMNPELSCMDATGKAAEFGQLKDGYMFDTSTGLSRM

SEQ ID NO: 17922 - protein, 435 aa, Thermoplasma volcanium GSS1
MSGKADPLEIAKEQVAPVKEEIEEDPFEIALKQLNKAAKVLNLDEQALEILSSPQKILQVSIPVKMDDGKVRVFTGFRVRHNIARGPAKGGIRYHPQETLSTVKALSMWMTWKCAIADIPYGGAKGGIICDPSTLSQGELERLSRGYIRAIADFIGPEVDVPAPDVNTNPQIMAWMMDEYENIVRHSAANVITGKPLEVGGSLGRFDSTGKGGMFVLREGAKKIGLDLSKARVAVQGFGNVGQFAVKFVQEMFGAKVVAVSDIKGGIYSENGFKFDDLLAWSKKIGSVVGFPGSKPITNEELLESDVDVLIPAAIEEQITEKNADKIKAKIILELANGPTTPEADEILYKKGKLVLPDVLSNSGGVIVSYFEWVQNNYGEYWTTEEVYDKLDQKITKAARQVLDTMDKYHVDPRTAAYVIAVKKVADAMKVRGWY

SEQ ID NO: 17923 - protein, 416 aa, Thermoplasma volcanium GSS1
MPESIDPFEMALQQLDKAARVLNLDEQALEILRQPEKILQVSIPVRMDNGKIKVFTGFRVRYNTARGPGKGGIRYHPDETLSTVKALASWMTWKCAIADIPYGGAKGGIICDPKSMSQGELERLSRGYIRAIADFIGPEVDVPAPDVYTNPQIMAWMMDEYENIVRHSAPNVITGKPLEIGGSEGRGDATAKGGMYVLREGAKRVGLDLSKATVAVQGFGNAGQFAVKFVQEMFGAKVVAVSDTKGGIFKSDGINYEALLDHKRKTGSVVGFPGSKPITNEELLESDVDVLIPAAIEEQITEKNADKIKAKIILELANGPTTPEADEILYKKGRLDLPDFLSNSGGVTVSYFEWVQNNYGEYWTAEEVYEKLDKKMTKAAHEVFDAMDKYKINPRTAAYVISVKKVADAMKARGMY

SEQ ID NO: 17924 - protein, 364 aa, Acidobacteria bacterium Ellin345
MKLKIAVLGGDGVGPEVTAEAVRVLRAIANVNGYEFQFTEAEVGGVAIRKHGSPLPEKTLHTCLESDAVLLGAVGHPEFDSMPRDKKPETGLLALRQALGGFANLRPVQAYAALSDSSPIKQELVFGADVMIVRELLGGLYFGEPRGIKDDTATNTMSYSRYEIERVAHIAFQQARNRRKKVTSVDKANVLECSQLWRLVVTEVAKQYSDVKLEHAYVDSFAMRLIQAPTAFDVVLTENLFGDILSDEAAVIGGSLGLLASATIGGEVDLYEPVHGSAPDIAGKGIANPVGAINSVAMLLRHTAKLEQDARLIESAVNAVLLDGYRTKDLVPSARKFNTTAEVGSAIERQCADMAISHYAYHAV

SEQ ID NO: 17925 - protein, 407 aa, Acidobacteria bacterium Ellin345
MDRSRITIFDTTLRDGEQSPGCSMNPMEKLRMARQLDRLGVDVIEAGFPISSEGDFESVRMIAQEIRRPKIAGLARANAKDIERAWHALEHAARPRIHVFLATSDIHLKYKLRMTREQCIAQAFEQVRFARSLCPDVEFSPEDATRSDLEFLCAVCEAVVEAGATTLNLPDTVGFTVPSDIARMFTAVRNRINRDDIVLSCHCHNDLGLAVANSLAAVEAGARQIECTINGIGERAGNASLEEVTMAIKVRADVFPVETAIHSEHLYPASAMLQEITGADVQANKAIVGRNAFAHEAGIHQDGMLKNPLTYEIMTPRSVGVPDSKLVLGKHSGRSALNHRCEELGYRFTRRDLDNVYRRFVDVADQVKVVEDSHLLRIIREEIARGCMPDMIEPTRAGVASANAAAS

SEQ ID NO: 17926 - protein, 565 aa, Erwinia carotovora subsp. atroseptica SCRI1043
MELEYESKRPLYIPYAGPILLEFPLLNKGSAFTEEERADFNLAGLLPEAVETIEEQAERAWRQYQEFKHDIEKHVYLRNIQDTNETLFYRLLDGHLNEMMPIIYTPTVGEACEHFSDIYRRARGLFISYPNRANIDDMLQNATKQNVKVIVVTDGERILGLGDQGIGGMGIPIGKLALYTACGGISPAYTLPVVLDVGTNNPQRLNDPLYMGWRHPRITDDEYYAFVDEFIQAVKRRWPNVLLQFEDFAQKNATPLLNRYRDEICSFNDDIQGTAAVAIGSLIAASRAAGTQLRDQTVAFLGAGSAGCGIAEQIIAQMKSEGLSEEEARARVFMVDRFGLLTDKLPNLLDFQSKLVQKSELLADWDCNSDAISLLEVVRNAKPTIMIGVSGQPGLFTEEIIREMYKHCARPIVMPLSNPTSRVEARPEDIIRWTEGSALVATGSPFSPVHYQDKVFPIAQCNNSYIFPGIGLGVLASGANRITDGMLMAASRALADCSPLANNGEGALLPDLSDIQQVSKRIALDVGKAAQLQGVAVVTSADALQKAIDHNFWQPQYRSYKRTSF

SEQ ID NO: 17927 - protein, 576 aa, Desulfitobacterium hafniense Y51
MAARSGDAQTQPGSGREAVSSMKELYDLIIIGSGSAGMAAGIYAGRSKLKTLVIDRDRAGGQIKITSEVENYPGILNISGEELSQAMRRQAEKFGVKFRQAAVESVDLAGDIKKIRTAEGDYEALAVIIATGSVPRKLGFIGEEEFRGRGIGYCATCDGEFFTGMDVFVIGGGLAAAEEGIFLTRYARKVTMIVRGDGFSCPQTISERVLAHPKIEVKFNTELREAGGDAVLRYAEFVNNRSGERWRYDVREQKQTFGVFVFVGYIPQSAEYAQEVRIDERGYIPTDESMGTNVEGVYAAGDIRPKELRQLVTAVADGTIAATSAEKYLVGKKERLGLGELGELGESGERDELSDEEKTPVTRQGTSLLDDSLKEQLVPILERLENRIGLLAFLEGSSGFSEELRSFLSEFAGLTDKVEVEFLNRGEDAVREKEAKITLFPAVAVLGPDGVYTGVQFHGIPGGHEINSFILALYNAAGPGQAVGEETLAKIRRVSRKVNFKIGVSLSCTLCPDVVTLAQLMALKNPLIEAEMIDVAHYPDFKNKYGIMSVPAIVVNDEKVVFGKKNLEELLELAGG

SEQ ID NO: 17928 - protein, 638 aa, Corynebacterium glutamicum
MLHHMTSRANLLLLRRGGSQRSMSPNDAFISAPAKIETPVGPRNEGQPAWNKQRGSSMPVNRYMPFEVEVEDISLPDRTWPDKKITVAPQWCAVDLRDGNQALIDPMSPERKRRMFELLVQMGFKEIEVGFPSASQTDFDFVREIIEKGMIPDDVTIQVLVQAREHLIRRTFEACEGAKNVIVHFYNSTSILQRNVVFRMDKVQVKKLATDAAELIKTIAQDYPDTNWRWQYSPESFTGTEVEYAKEVVDAVVEVMDPTPENPMIINLPSTVEMITPNVYADSIEWMHRNLNRRDSIILSLHPHNDRGTGVGAAELGYMAGADRIEGCLFGNGERTGNVCLVTLALNMLTQGVDPQLDFTDIRQIRSTVEYCNQLRVPERHPYGGDLVFTAFSGSHQDAVNKGLDAMAAKVQPGASSTEVSWEQLRDTEWEVPYLPIDPKDVGRDYEAVIRVNSQSGKGGVAYIMKTDHGLQIPRSMQVEFSTVVQNVTDAEGGEVNSKAMWDIFATEYLERTAPVEQIALRVENAQTENEDASITAELIHNGKDVTVDGRGNGPLAAYANALEKLGIDVEIQEYNQHARTSGDDAEAAAYVLAEVNGRKVWGVGIAGSITYASLKAVTSAVNRALDVNHEAVLAGGV

SEQ ID NO: 17929 - protein, 422 aa, Acidobacteria bacterium Ellin345
MTTAEQFDKELNPWEQQAARFDTATTKLKLDEGLISVLRVPAREVTVNIPVSMDTGKIRMFTGYRVQHSFARGPAKGGVRFSPEVSLDEVRALAAWMTWKCAVVNIPFGGAKGGIICDPKTMSMGELERMTRRYTAELMEFIGPEKDVPAPDVNTNEQTMAWMMDTYSMHMRMTVNAVVTGKPLNMGGSRGRREATGRGVMITADQCLKKFNMSRESTRVIVQGFGNVGSNAAQLMHQAGYKVIGIGEWDGGLHNVNGIDINALVDYKAHNGSIHGFPGAEKAATADLMIADCDVLIPAATENVITTKNAEKVKARIIVEGANGPTTSGADEILNDKKVFVMPDILANAGGVTVSYFEWVQDRQGYFWKESVVNEQLEHIMVSSFEDVVNMSEQHNVPNRIGAYMLAIDRVAYTIRQRGIYA

SEQ ID NO: 17930 - protein, 647 aa, Bradyrhizobium sp. BTAi1
MCGLAGVWCWDTPIDRPAIARALGLLDHRGPDGNGLWISEDGKVALGHTRLSIIDLVTGEQPLSHPNGKLQLVVNGEFYDYERIRNDLTARGARFRTRSDSEIALWLYDESGTRCFADLNGEFAFILWDAGAGRLIAARDRFGIKPLFYAVQSGRILLASEIKALLAMGVPAQWDVEGYLDAAHVLQNGTLFSGIRQVPPGCYLSATRHGITIQRYWDAPFASALSPIEDEHGALDQIRAQMSRATRWRMRADVPVAAYLSGGIDSMSVLALAAATTNRAPDAFTIAYEDAAYDESHRAESFATQLGTRFHRVPVNGAALADHFATSLWHSETACFNPHGTAKFILSKAVRDAGYKVVLTGEGADEIFAGYAPSRVDALGGSAAMQAMIATRDRATYAVTPQHTATDQLPLIAQRFGTVPTWLRHQMAHLLGVADLLRDDLRTAWSTDRPLAAFLKYLEPWTVPALDTVDLGIALMLKTTLPNYVLVTLGDRMEMAHSIEGRLPFLDHQVVELAWRLPSHLKIRDGVEKFALRQAMRNLLPADAVDRQKHPFIAPPTATDAKHPFGAMIRDVLHGPALAALPFFEPRKVRKLIDRLTSLPPEDRLRLEPLLVEIASLCIIHDLFKMSSSSDPSAQLSIQMPSTEALA

SEQ ID NO: 17931 - protein, 750 aa, Ustilago maydis 521
MSQQTPLAYAVAQWLQQSSTSVPADQKAKLQQAAKSVSEAFGVDTSSAEQQAQYGSGPGLQAIFDIFLKTQAKMGAAPAPAAASSSSTAPAAAAATPSDEDLAKAEQLKAEGNKAMSAKDYGAAIEAYGKAIELNPNSPVYFSNRAAAFSQIGQHDSAIDDAKQASKIDPKFGKAYSRLGHALFSSGRYQEAVEAYQKGVEVDPSNEVLKKGLAASKEQLSSSSSSNANDATASRGAADAVSAPSAGADAGAGAGGFPNFGGGAGGMPDLAAMMNNPMIAQMAQNLMSNPDSLASLMNNPMLRQAAERFGSGGGMPDMSSMMNDPALRDMARNFMGGAGRGAGGNGGNNMVDVGGSEMSVWKRLWRRLAVFGRRSFLISPCIPTVSCVCLINTTSLSRIMSNGTPSVRVLYFASARTTIGHSSETISLPTTPFPLASLITLIANKYSSRGAEAVLRTCRWSVDNTLIEIDELIEWTLHGREEVAAIPPMPTSPSREVAVDATKVELVSKPLLASAALNKFSGYHFNPSSSGVDSNLLILLHGLGDNDSGFFNLGQNLQKTLPQTAILTLQAPLKVPFLEGDHWMWYPAFDQFAELLTKPNPTVTVASVVALLDHLVGKCGWSAGSIHIFGFGQGATLALEVLISWSKSHSQPLGSIVSIHGSFISHPTISSSSTPVLHIYRSAREIPLDSTRWSSHRKSTSALTLHRLRGNEEDESMLKGSEWDSVMSFWSKFFRNRIKWELEGKVVPIG

SEQ ID NO: 17932 - protein, 569 aa, Kluyveromyces lactis NRRL Y-1140
MNDTSEHSSDVSPIIFDDISQSKLKDSSENETTDRIIIKPVNDEDDTSVMITFNQKISPFILILTFTASISGFMFGYDTGYISSALVSIGTDLDNKALTYGDKEIITAATSLGALISAVFAGISADIFGRKPCLMFSNILFVIGAALQVSAHSFWQMAVGRLIMGFGVGIGSLLAPLFISEIAPKHIRGRLTVINSLWLTGGQLIAYACGAGLNKVHNGWRILVGLSLIPTVVQFTCFSFLPDTPRFYVIKGNYKKAAEVLQKSYINAPQELIDQKIRELSDLNEAIPGKTPVHKFFNTVKELHTVPCNFRALVIGCALQGIQQFCGWNSLMYFSGTIFQTVGFENSTAVSIIVAGTNFVFTLVAFFAIDKVGRRAILLIGLPGMMVSLVMCAIAFHFLDIKFTGAGESEVSNGGFSSWGIVVIVFIMVYAAFYALGIGTVPWQQSELFATSVRGVGTSYCTATNWAGSLIIASTFLTMLQNITPTGTFSLFAALAAVSTVFCYLCYPELSGLELEEVQTILSDGFNIKASKQLAKKRKQQNSEMQRRFREKDMEAYQKDKPSDELLES

SEQ ID NO: 17933 - protein, 478 aa, Glycine max
MGRAFVYVILGGGVAAGYAALEFVKKGVSHGELCIISDEPVAPYERPALSKGFLLPEAAARLPSFHTCVGANEERLTPKWYKEHGIELVLGTGVKSTDVKRKTLLTTTGETISYKILIVATGARALKLEEFGVSGSDAENVCYLRHIADANRLVDVMQSCPGGNAVVIGGGYIGMECAASLVINKINVTMVFPEEHCMARLFTSKIANYYEEYYKSRGVNFIKGTVLSSFDFDSNGKVTAVNLRDGTTLSVDMVVVGIGIRPNTGLFEGQLTLEKGGIKVNGMLQSSNSSVYAIGDVAAFPVKAFGETRRLEHVDSARKSAIHVVSSIMEPNKTGEFDYIPFFYSRVFTLSWQFYGDNVGEVVYYGDMSGSAFGAYWVSKGHLVGAFLEGGTKEEYEAIAKATRLRPAIEDLTELERQGLSFAVTVSQKPVVPPPVEVRASDLLLEKPLYAWHATAGVIIAASIAAFAYFYGKKRRRW

SEQ ID NO: 17934 - protein, 475 aa, Bacillus halodurans C-125
MFRGKLYIDGTWTGDLLDTFDVKNPATGEVVGVMPNGGKAEAAAAIEAAQRAFLKWRKYTAAERANFLMTWHDLLLQQKEEIAEMLTMEMGKPLAEARGEIEYSASFIRWFAEEGKRVYGRTVPASAENKRIHVQKQPVGVVAAITPWNFPAAMIVRKMAPALAAGCTFVGKPAELTPLTAVKIVELCEEAGFPKGVVNLVCGDAKEIGEEMTSHEHVRKLTFTGSTAVGKLLMKQSAGRMLNLSLELGGQAPMIICDDADLDKAVAGVVASKYRNAGQTCVCGNRIYVQETIVDEFVKRLTGKVVQLKVGNGLEEGVHIGPLIEKKGYEKVKAHVDDAVAKGARVVIGGKGQEGNDSYFYDPTILTDVHDEMLVMQEETFGPVAPIQTFATDEDVIEKANGTRYGLAAYFFTENYARGIRLSEALDFGIVGWNDGAPSIAQAPFGGMKESGLGREGGQEGIEAFLETKFVSIGL

SEQ ID NO: 17935 - protein, 330 aa, Broussonetia papyrifera
MKALEPFMKSAHNNINNNISPISSSSSSSYLSSEPNFYPESETCSPSTTQMFSSGLFSSFNHMGSEQTGSLGLNQLTQSQILQIQAQIYFQQQQQQQQNLLMTTITPPQNSLNYLGPRAVPMKNVGANSKPNKLYRGVRQRHWGKWVAEIRLPKNRTRLWLGTFDTAEEAALAYDKAAYKLRGDFARLNFPHLRHEGAHVSGEFGEYKPLHSSVDAKLQAICQSLANSQKQGSAKEACSEPEVKPVIEPKMASDNSPKGELEVSSSSLSSSSSLSLSLSLSSPLSDESSAGSSSPESDVTLLDFSDSHWDGNENFGLGKYPSVEIDWDAL

SEQ ID NO: 17936 - protein, 391 aa, Bartonella henselae str. Houston-1
MAKSKFERTKPHVNIGTIGHVDHGKTSLTAAITKYFGEFKAYDQIDAAPEERARGITISTAHVEYETEKRHYAHVDCPGHADYVKNMITGAAQMDGAILVVSAADGPMPQTREHILLARQVGVPAIVVFLNKVDQVDDAELLELVELEVRELLSKYDFPGDDIPIVKGSALAALEDKDKSIGEDAVRLLMSEVDNYIPTPERPVDQPFLMPIEDVFSISGRGTVVTGRVERGVIKVGEEVEIIGIRPTSKTTVTGVEMFRKLLDQGQAGDNIGALLRGIDREGIERGQVLAKPASVTPHTRFKAEAYILTKDEGGRHTPFFTNYRPQFYFRTTDVTGIVTLPEGTEMVMPGDNVAMDVSLIVPIAMEEKLRFAIREGGRTVGAGIVSKIIE

SEQ ID NO: 17937 - protein, 573 aa, Candida albicans SC5314
MCGIFAAYRQPEVEDFKSKALQYSKLIRHRGPDWSGNVVQNSTILCHERLAIVGLDSGAQPIVSPDGNFTLAVNGEIYNHIQLREQFPDYKFKSLSDCEPIIPLFTKYDIDAPKHLDGMFAWVLYDKKNDRIVAARDPIGITTLYMGKSSKSPKTRYFASELKCLIEECDEIFAFPPGHVYDSNTDEITRYFQPSWWDASKVPEQHVDFKKVRETLELAVRKRLMAEVPYGVLLSGGLDSSLIASIASRETKKAAQASFNPEGIDANKELSGVDDKGSLHSTGVFNQLHSFAIGLPGAPDLLAAEKVAHFIGTIHHSHTFTLEEGLDALDDVIYHLETYDVTTIRASTPMYLLSRKIKAQGVKMVLSGEGSDEIFGGYLYFANAPSAKEFHEECVKRVKNLHYADCLRANKSTMAWGLEARVPFLDKQFLEVCMNINPEDKLIQPGKIEKYILRKAFDTSDEPDVKPYLPEEILWRQKEQFSDGVGYSWIDGLKDTAEKMVSDEEFAHPKPEWGDDIPTTKEAYWYRCKFDKMFNGSKAAASTVMRWIPKAEWGCHADPSGRYAATHDHKVAQ

SEQ ID NO: 17938 - protein, 789 aa, Burkholderia mallei ATCC 23344
MSTTPSSASSEAGHAEATASSHARQYIDAVLEQSFRHLFGPTATPEQPRKHGVVSIAKLTAALADYLGAEEIKEVKAAFHFSDEAHLGQYRQSGEPYITHPVAVAEICAGWKLDAQAIMAALLHDVMEDQGVTKSELAERFGPKVAELVDGLSKLDKMEFRSREEAQAENFRKMLLAMARDVRVILVKLADRLHNMRTLGAVPMEKRRRVARETLDIYAPIAHRLGLNNTYRELQDMSFANFNPHRYATLEKAVKAARGNRREVIGKILESVQRAMADAKIDAEITGREKTIYSIYKKMRDKQLSFSQVLDVYGFRIVVEHPLDCYTCIGVLHALYKPVPGKFKDYIAIPKVNGYQSLHTTLVGPFGAPIEFQVRTRKMHEIAEAGVAAHWLYKNGGADLNDVQKRAHQWLKSLLDIQSEAGDSSEFLEHVKIDLFPDAVYVFTPKSKIMALPRGATALDFAYSIHSDLGNQCVAVKINNELLPLRTELKSGDIVEVITAPYSKPNPAWLGFVRTGKARSAIRHYLKTMRLNESVQLGERLVDQSLKGYGLALADVTPEVWEKLVQWTGNKSRQEIFADIGLGRRVAAVMAKRIEVLMSGRDADDDLPRAERHAANHAPPVVITGTEGMSVQLSACCRPIPGDDIMGYIGIGLGMAIHTTACRVAQRIHRRDPGRWIDVAWAPQPGRLFDVAVKALVKNTKGIFARVAADITSADANIVHIAMDEDLTHESTVLRFVIQVSDRVHLANVMRRVRTNPDVMRIMRERSNDDVVHARHDGGMRIDRERQDY

SEQ ID NO: 17939 - protein, 335 aa, Oligotropha carboxidovorans
MSVKVAINGFGRIGRNVLRAIVESGRDDIEVVAINDLGSVQANAHLLRYDSIHGRFPHEVKISGDTIDVGRGPIRVTAEKDPAALPHAAMGVDVALECTGIFTTREKAAAHLKAGARRVIVSAPADGADMTVVYGVNHQKLNKDHVVISNASCTTNCLAPVAKVLNDAVGIERGFMTTIHSYTGDQPTLDTMHKDLYRARAASMSMIPTSTGAAKAVGLVLPELNGKLDGVAIRVPTPNVSVVDFKFIAKKNTSVEEINEAISKASGGALKGILGATHEQNVSSDFNHDPHSSIFHMDQTKVIDGNFVRILTWYDNEWGFSSRMSDTAVALGRVM

SEQ ID NO: 17940 - protein, 482 aa, Staphylococcus aureus subsp. aureus MSSA476
MGSFFNKIARKEDPAIYQNKDGHLKRTLRVRDFLALGVGTIVSTSIFTLPGIVAAEHAGPAVALSFLLAAIVAGLVAFTYAEMAAAMPFAGSAYSWVNVLFGEFFGWVAGWALLAEYFIAVAFVASGFSANLRGLVKPIGIELPAALSNPFGTNGGFIDIIAAIVILLTALLLSRGMSEAARMENILVILKVLAIILFVIVGLTAINVSNYVPFIPEHKVTATGDFGGWQGIYAGVSMIFLAYIGFDSIAANSAEALDPQKTMPRGILGSLSVAIVLFIAVALVLVGMFHYSQYANNAEPVGWALRQSGHGVVAAIVQAISVIGMFTALIGMMLAGSRLLYSFGRDGLLPSWLSHLNDKHLPNRALVILTIIGVLIGSMFPFAFLAQLISAGTLVAFMFVSLAMYRLRKREGKDLPIPAFKLPLYPVLPAVTFVLVLLVFWGLGFEAKLYTLIWFIVGIILYLSYGLRHSKKNDVAEYHPPK

SEQ ID NO: 17941 - protein, 112 aa, Pseudomonas fluorescens PfO-1
MKLVTAIIKPFKLDDVRESLSEIGVQGITVTEVKGFGRQKGHTELYRGAEYVVDFLPKVKIDVAIDDKDLDRVIEAITKAANTGKIGDGKIFVVNLEQAIRIRTGETDTDAI

SEQ ID NO: 17942 - protein, 68 aa, Oryza sativa
FEKITKKLGIRKEVFPKIEEELELEIAKSELPEFKKECVEPMGVQLKRGGFKDEEMPDVKKLAIRNFL

SEQ ID NO: 17943 - protein, 480 aa, Pseudomonas putida KT2440
MHLTWLRSDLRIDDNTALSASTERGPTIALWLVSPGQWQAHDDADCKVDFWLRNLHDLRQSLEKLNIPLLIRTIDTWDQAPQAVLDICRQHQVQSVHWNEEYGINEQRRDDATRAMLEKSAIQAHSHLDQLFFRPGTVLTRSGDYFQVFSQFKKTCLEHLHRSLPALARRVKRQAPLNIGSDPIPQHVEGFGKTTPALRDHWPAGEAEAQSRLSRFLDETIDDYHHLRDLPAKPGTSQLSPYLAAGVISPRQCLHGALAGNRGEFDSGSTGVQTWINELLWREFYKHILSGYPQVSRHRAFRAQTEALPWRDAPADLAAWEQGRTGFPIIDAAMRQLLHTGWMHNRLRMVVAMFLSKNLLIDWRKGERHFMRHLIDGDLAANNGGWQWSASTGTDAVPYFRIFNPVSQSQRFDPQGRFIRHWVPELQELDEKAIHQPIKSTDLFGNTSYLSPIVDLSSSRQRALEAFKGLPRRQNQGITS

SEQ ID NO: 17944 - protein, 497 aa, Bordetella parapertussis
MKTIPHFINGQPYEGRNGRYTQGFNPATGEVSSSIPLASAQDVDTAVAAAAAAFPAWSETPPLKRARILFKFKALLDEHQDELAALITAEHGKVFSDAKGEVTRGIEVVEFACGIPHLLKGQYTDQIGGGIDNWSMRQPLGVVAGITPFNFPMMVPCWMFPVALACGNTFVLKPSERDPSAALRLAELLKEAGLPDGVFNVVQGDKQAVDALIAHPQVEALSFVGSTPIAEYIYAEGTRRGKRVQALGGAKNHMVVMPDADLDQVTDALMGAAYGSAGERCMAISVAVAVGEVADEVVARLAPRVRALVVKDGMQADAEMGPQVTAQHRAKVTGYIEDGQACGATLVVDGRGLQVPGNEGGFFLGGTLFDHVTPAMNIYREEIFGPVLCIVRVPDFAAAVELINAHEFGNGVSCFTSDGGIARAFARQIKVGMVGINVPIPVPMAWHSFGGWKRSLFGDHHAYGEEGVRFYSRYKSVMQRWPDSIGKGAEFTMPVAK

SEQ ID NO: 17945 - protein, 310 aa, Candidatus Carsonella ruddii
DYIKNMITGAAQMDGAILVCSAVDGPMPQTREHILLARQVGVPNIVVFLNKSDCVHDKELLDLVELEIRELLSEYDFDGDNTPIITGSALLALEGKDDNNQGISAIKKLLETLDFYITEPNRLIEKPFLMPIEDVFSISGRGTVVTGKIERGIIKNGEEIEIVGLKPSIKTIITGIEMFKKILDEGRAGENVGILLRSIKREEVERGQVIAKIGSIKSFDFFECEVYILSKEEGGRHTPFFNGYKPQFYFRTTDVTGICTLDKNIEMVMPGDNVKLKVKLLSSIAIEVGLRFAIREGGKTVGAGIVINIL

SEQ ID NO: 17946 - protein, 316 aa, Neisseria meningitidis Z2491
MSQHRKLIILGSGPAGYTAAVYAARANLNPVIITGIAQGGQLMTTTEVDNWPADADGVQGTELMARFLAHAERFGTEIIFDQINAVDLQKRPFTLKGDMGEYTCDALIVATGASAKYLGLPSEEAFAGKGVSACATCDGFFYKNQDVAVVGGGNTAVEEALYLANIAKTVTLIHRRSEFRAEKIMIDKLMKRVEEGKIILKLESNLQEVLGDDRGVNGALLKNNDGSEQQIAVSGIFIAIGHKPNTDIFKGQLEMDEAGYLKTKGGTADNVGATNIEGVWAAGDVKDHTYRQAITSAASGCQAALDAERWLGSQNI

SEQ ID NO: 17947 - protein, 381 aa, Arabidopsis thaliana
  misc_feature (90)..(90): Xaa can be any naturally occurring amino acid
  misc_feature (180)..(180): Xaa can be any naturally occurring amino acid
  misc_feature (268)..(268): Xaa can be any naturally occurring amino acid
MFHSCSVIREALAMETKNIAPSFDRASELKAFDETKTGVKGLVDSGISQIPRIFHHSSVKLANPEPVSSDLLHLKTIPTIDLGGRVFEDXLKHKNAIEKIKEAAEKWGFFQVINHGVSLELLEKMKDGVRGFHEQSPEVRKDFYSRDLTRKFQYSSNFDLYSSPAANWRDTVACTMDPDXPQDIPEICRDVTIEYSEQVMNLGEFLFTLLSEALGLNPNHLNDMDCSKGLIMLCHYYPPCPEPDLTLGTSQHADNTFLTVLLPDQIEXGLQVLREGYWFNVPHVPGALIINIGDLLQLITNDKFVSLEHRVLANRATRARVSVAGFFTTAMRPNPTMYGPIRELVSKENPPKYRETTIRDYTAYFSAKGLDGTSALLHFKI

SEQ ID NO: 17948 - protein, 471 aa, Glycine max
  misc_feature (50)..(50): Xaa can be any naturally occurring amino acid
MKDLLEAVVPFDILLDRRKRANYLSSIGNNLETCTKPKVVQDAGLALASXYVPGMEITLSSRLKSLYSLYSKMKRKDISIDKVYDARALRVVVGDKNGTLHGPAVQCCYSLLDIVHRLWTPIDGEFDDYIINPKPSGYQSLHTAVQGPDNSPLEVQIRTQRMHECAEQGLAAHWLYKETGNPFLSIDSMDEPETEASSYFSKDLEEGNSSDILLSKYKSLKAGHPVLRVEGSHLLAAIIISVENDERELLVAVSFGLAASEAVADRRSFQIKRWEAYARLYKKVSDEWWFEPGHGDWFTCLEKYTLCRDGMYHKQDQFGRLLPTFIQVINFTEQEESEYWAVVSAVFEGRQVDWITSRSKFDLVASTSVEAGINNKVNLLRTMLSWEEQLRSEVSFMQAKHDAKLYDLHGSLGEVVIICWPHGEILRLKAGSTATDAAQRVGLEGKLVLINGQLVLPNTKLRDGDVVEVRI

SEQ ID NO: 17949 - protein, 633 aa, Phalaenopsis hybrid cultivar
MEGCDCIEPQWPADELLVKYQYISDFFIALAYFSIPLELIYFVKKSSFFPYRWVLIQFGAFIVLCGATHLINLWTFTMHSRTLAIVMTVAKVSTAVVSCATALMLVHIIPDLLSVKTRELFLRNKAEELDKEMGLIRTQEETGRHVRMLTHEIRSTLDRHTILRTTLVELGRTLDLAECALWMPSRTGLNLQLSHTLNNQIPVGSVVSINLPVVNQVFNSSRAVRIPHTCQLARFQPHTGRYVPPEVVAVRVPLLHLSNFQINDWPELSAKNFAVMVLMLPSDSARKWHVYELELVEVVADQVAVALSHAAILEESMRARDQLMDQNVALDLARREAEMAIRARNDFLAVMNHEMRTPMHAIIALSSLLLETELTPEQRLMVETILKSSNLLATLINDVLDLSKLEDGSFELEVTVFNLHTVFREVVNLIKPIAAVKKLSLIVSLSPDLPSCAVGDEKRLMQTMLNVVGNAVKFTKEGSISITASIAKPDSLRDPRDPEFYPIPSDGHFYLRVQIKDTGCGISPQELPHLFTKFAHAQNGSDKGYNGSGLGLAICKRFVNLMKGHIWLESEGIGKGCTTIFIVKLGISEDPAHRYQHKLLPPIRAGQSEADAFGSKRMPTDLIPLKNRYQRSL

SEQ ID NO: 17950 - protein, 473 aa, Vibrio angustum S14
MATVITEERSNGTLSLEKSDLNKNVFIACIIAALAGLLFGLDIGVISGALPFIAKEFGLATHTQEWVVSSMMFGAAFGAIGSGPLSNKFGRKYSLVVASILFTVGSLGCALANNTEILIIFRIFLGLAVGVASFTAPLYLSEIAPQKLRGSLISMYQLMITIGIVVAFLSDTAFSYEGQWRWMLGVITVPALILLIGVLMLPRSPRWLALKGRHTEAKEVLELLRGSDETAKHELDAIRESLKVKQSGWSLFKTNRNCRRAVYLGVTLQIMQQFTGMNVIMYYAPKIFKIAGFASTEQQMWGTVIVGLVNVFATFIAIGLVDKLGRKPILKLGFLVMSASMATLGFLLNQGVTTSFEQYFAAFVLLIFIVGFAMSAGPLIWVLCSEIQPLKARDFGITVSTATNWIANMIVGATFLTFLQVLGNAQTFWLYAVLNIIFLFVTLILIPETKGISLEKIEQNLMAGIPLSKLGKK

SEQ ID NO: 17951 - protein, 967 aa, Cryptococcus neoformans var. neoformans B-3501A
MAEDNHNEPPPPNIPTPTFPQSKTINTAFARSPTTDSEIEPADEEEGDHRPFNPRTSTTDEHQTLFYQDASHFNVEHHVGRVCRSFAPLALLAIIALAFIPVASATDLDPYTSCPALPQKSTPILSTTGYVFNHVVRFIGLDDSFVGQHLANVKRNLDNTSIIEACMVPVLVLLSGMFAGLTLGYFSVDQTQLQVLAISGTPKHQEYARLIMPVRKNSHLLLTTLILGNMIVNEALPVVMDGLLSGVVSVVVSTAMVVIFAEIIPQSICSRYGLLIGARMAWPVRIMIWIAYPIAWPIAKLLEWVLGAHHGIIYRRGELRELIKMHAAGGEGGGDLDFDTVQITQGALDLARKTVKDSMTAIEQVFMLPIEAKLDYETLGHVVRSGHSRIPVYQMVEVPDIDLSAPTLGPTKTKMVKKVLGSLLVKSCVLLDPEDATPLASIPINAIPSIPFDEPLTNMLNVFQEGRSHMAIVSRRVRRVGPVDPEDAQSAMTAAAGGLRQRFFRRVAGISGNRSFSDGDSSASGEEDLEKGEGGKKKKRRRKNAEKHDRAGSCSSDNHTIVRPISSDDDGLTEADEIKRMAKEQQEAEMKQQRGKDSKKGSLVQAAKLTQLEQSVPADAQLSNDAVENFFDGLEGAPLGIITLEDVLEELIGEEIYDEYDEHGVPRSAASAFVPLEAMLAARKAALARQELAIAQSTPIPPVSDADVEQVVAAPTPGAGRRVKAKIQIPKFSLKKPVSQPGRPRTERLAANETPAATPPADPPCYTNKPDEKSTYSAQIITIPGELDEPPLACAQSDSRLVNRRLSTPLDSGATATPSPQPQYSLSVPGPASAVPTRLLPAGGTVSTPAVIPASHQPSLLNEAIFIGRERKRMAASHPGQVRSQSSGPTVSSKQPTPPISVYDFGIQAAGVNGERVEGQEIVSPRPIAAQQKKIPKFKSVPTPVATPSFGFDPSAESKSSSREEKE

SEQ ID NO: 17952 - protein, 141 aa, Brassica napus
MAYLAPISPSLSIFKNPQLTSFHFAFSPPKPLLARPGEQNLRMSTNKTSVVIAATTAPAASEKQKKRYPGESKGFVEEMRFVAMKLHTKEQAKEGEKETKSPEERPVAKWEPTVDGYLRFLVDSKFVYDTLEELQATFPTM

SEQ ID NO: 17953 - protein, 488 aa, Vibrio cholerae O1 biovar eltor str. N16961
MRSLAMLPTDFPFFHQSAFINGQWILGEPQARQTVTNPFDGSLIGSVPLLSAAQVQEAIAGAQAAQILWCQQPAENKAKILRRWYELIEQHHESLAKLLTIEQGKPLAEARGEIHYAASFVEWYAEEAKRAYGELIPSHKPDARIMVSRQPVGVVAAITPWNFPAAMITRKCAPAFAAGCAVVLKPAPDTPFTALALADLAQQAGIPDGLLQVVTGDAIEIGRVLTESKTVRKLSFTGSTGVGKLLMAQSANNVKKLSLELGGNAPFIVFEDADINAAIDGVMVAKFRNAGQTCVCANRIYVHDAVYDQFAAKLVDRVSRLNVGYGLDAGVNIGPLINDAAVAKVTSHIVDAQSKGAKVMFGALPEAGSRLFQPHVLTEVTDEMRVADEETFGPLAALFRFSSEQEVIERANATDSGLAAYCYTQSLRRAWHMSEALEAGIVGINEGLISTTLAPFGGIKESGLGREGAKHGLEEYLEVKYTLMGGLA

SEQ ID NO: 17954 - protein, 522 aa, Triticum aestivum
  misc_feature (144)..(144): Xaa can be any naturally occurring amino acid
  misc_feature (211)..(211): Xaa can be any naturally occurring amino acid
MRRAAALGARHILAASVSASSRVASRRHMGSVDAGAAMEKIRAAGLLRTRGLIGGKWVDAYDGKTIEVQNPATGEVLANVACMGNRETADAITSANTTFYTWSKLTASERSKALRKWHDLLMSHKEELALLMTLEQGKPMKEAXGEVNYGASFIEFFAEEAKRVYGDIIPPTLADRRLLVLKQPIGVVGAITPWNFPLAMITRKVGPALGXGCTVVVKPSEFTPLTALAAADLALQAGIPAGALNVVMGNAPEIGDELMQSMQVRKITFTGSTAVGKKLMAGSANTVKKVSLELGGNAPCIVFDDADIDVAVKGSLAAKFRNSGQTCVCANRILVQEGIYEKFASAFVKAVQSLQVGNGLEESTSQGPLINEAAVQKVEKFVGDATSKGANIMLGGKRHSLGMSFYEPTVVGNVSNDMLLFSEEVFGPVAPLIPFKTEEEAIHLANDTNAGLAAYMFTKNIARSWRVSEALEYGLVGVNEGLISTEVAPFGGVKQSGLGREGSKYGMDDYLEIKYVCMGNLG

SEQ ID NO: 17955 - protein, 218 aa, Oryza sativa
MDMDSWERLAADARLQGSCFDALIGMEEAEGSEGEEEAAEVACPFCDEEFDGFGLCCHIEGDHQAENRAGVCPICYDAVGMDLVSHITSEHPSFFKGKWRNRRVSHGSHSSTRATLKKDAAYLQYRYGGSTRAASHNTDPDPLLSSFVGNFTDTDLPKDVQQEFRDETDEKSDSLVQKEQKPVESADEPLLPEVKEERTRRSQFVQGLVLSLMFDDIL

SEQ ID NO: 17956 - protein, 281 aa, Mycobacterium tuberculosis H37Rv
MGAIMLDGKATRDEIFGDLKQRVAALDAAGRTPGLGTILVGDDPGSQAYVRGKHADCAKVGITSIRRDLPADISTATLNETIDELNANPDCTGYIVQLPLPKHLDENAALERVDPAKDADGLHPTNLGRLVLGTPAPLPCTPRGIVHLLRRYDISIAGAHVVVIGRGVTVGRPLGLLLTRRSENATVTLCHTGTRDLPALTRQADIVVAAVGVAHLLTADMVRPGAAVIDVGVSRTDDGLVGDVHPDVWELAGHVSPNPGGVGPLTRAFLLTNVVELAERR

SEQ ID NO: 17957 - protein, 409 aa, Bordetella pertussis Tohama I
MKRRVVITGLGIVSPVGNDIASAWDNIVNGRSGISRISRFDPTPLTTHIAGEVKDFDVTQYMPAKEARQMDTFIHYGLAAGMQAWRDCGLEVTETNAERIGVIVGSGIGGLPRIEETQTEMLAKGPRRISPFFVPASLINLISGQLSIAYGMKGPSYAVVSACTTGLHCIGDAARLIEYGDADVMLAGGAESTVSPLGIGGFAAMRALSTRNDDPTTASRPWDRDRDGFVLGEGAGVLVLEEYEHAKKRGARIYGELAGYGMSSDAHHITAPDKDGPRRGILNALRNGGINADEVSYVNAHGTSTPLGDKNETDALKLAFGDHASKLVVNSTKSMTGHLLGAAGGIEAVFTTLAVHNQISPPTINIFNQDPECDLDYCANEARPMKIEIGLSNSFGFGGTNGSMAVRRV

SEQ ID NO: 17958 - protein, 708 aa, Oryza sativa
MSLPAISLYTSPPPGAVYSSEFDPSSRGSSPPCSTAPPSTSHRPPAAAGGLSCLFSSPAAAASAPRAPPHDELGALWQDRSDEPAFAGGGGGYSSSPLKWRDLHHHHHHSPVSVFQGPSSSPAASRSPPASWLAGRDRDRERLFAGFVRNALGSCVDYAPALSPRSEVGGGELAFELDENLAEASPACEPCARELLAGAQARHRIFHEELVVKTFFEAEKAHRGQTRASGDPYLQHCVETAVLLANIGANSTVVSAGLLHDTIDDSFIDYDHIFHMFGAGVADLVEGVSKLSHLSKLARDNNTASRIVEADRLHTMLLAMADARAVLIKLADRVHNMKTLEALPLGKQQRFAKETMEIFVPLANRLGIASWKDQLENLCFKHLNPEEHKDLSSKLTKSFDEVLITSAVDKLDRGLRDAGLSYHNLSGRHKSLYSIHNKMLKKNLTMDEIHDIHGLRLVFEKEEDCYRALDVVHELWPQVPGRFNCRNSARGLNGYRSLHTVVMSENVHPFEVQIRTKEMHLQAEYGFAAHWRYKEGTCRHSFVLQMVEWARWVLTWQCEAMNKERPASLGDSDAIRPPCPFPMHSEDCPYSYTRQCDHDGPIFVILLEHDKMSVQEFQANSTVMNLMDRVGTNTPRWSPYRIPMKEDLRPKVNHEPISDLNRKLSMGDVVELTPALPHESLPNYREEIQRMYDRGGFALATRGGSSRR

SEQ ID NO: 17959 - protein, 541 aa, Arabidopsis thaliana
MVSGKGKAIKKNMAASPKIGIGIASVSSPHRVSAASSALSPPPHLFFLTTTTTTRHGGSYLLRQPTRTRSSDSLRLRVSATANSPSSSSSGGEIIENVVIIGSGPAGYTAAIYAARANLKPVVFEGYQMGGVPGGQLMTTTEVENFPGFPDGITGPDLMEKMRKQAERWGAELYPEDVESLSVTTAPFTVQTSERKVKCHSIIYATGATARRLRLPREEEFWSRGISACAICDGASPLFKGQVLAVVGGGDTATEEALYLTKYARHVHLLVRRDQLRASKAMQDRVINNPNITVHYNTETVDVLSNTKGQMSGILLRRLDTGEETELEAKGLFYGIGHSPNSQLLEGQVELDSSGYVLVREGTSNTSVEGVFAAGDVQDHEWRQAVTAAGSGCIAALSAERYLTSNNLLVEFHQPQTEEAKKEFTQRDVQEKFDITLTKHKGQYALRKLYHESPRVILVLYTSPTCGPCRTLKPILNKVVDEYNHDVHFVEIDIEEDQEIAEAAGIMGTPCVQFFKNKEMLRTISGVKMKKEYREFIEANK

SEQ ID NO: 17960 - protein, 258 aa, Oceanicola granulosus HTCC2516
MAYETIVVETSDDVCTITLDRPDAMNAINSQLLGELVKALEEADRSDKVRCIIVTGSDKAFAAGADVTEMADKSFVDMYVNQLYARDTDRFANVRKPVIAAVAGYALGGGCELAMMCDFVIAAENAKFGQPEINLGVIAGMGGTQRLTRLVGRSKSMDMHLTGRFMDAEEAERAGLVSRVVPVKKLREEALAAAGRIAEKSLLATTAVKQAVNRAEETSLAEGLRFERAMFYAMFSTDDQSEGMSAFREKREAQFRDK

SEQ ID NO: 17961 - protein, 596 aa, Vibrio parahaemolyticus RIMD 2210633
MHNDTLSRVNAIREWLAQHNIDALLIPHEDEYLGEYVPAHNERLHWLTGFTGSAGAAVITQDKAAIFVDGRYTVQVTKQVPSDLFEYRHLIEEPALDWIQDNLTANASVAIDPRMHSSAWLDMAQAKLAGKLELNILSSNPIDELWHDRPAPVVSDVRLMPTKAVGQSSESKRKEIAQLVAKAGADSAVITALDSICWLLNVRGLDVSRLPVLLSHAILHADSSVEYFLDPARLPAEFAAHVGTGVTVHHPEALQSRLEAMSGKKVLLDPAISNAWFKLVLQNAGASVIAAADPCLMPKAAKNEVEIAGMKACHIRDGVAMSKFLCWLDAEVAAGNLHDEATLADRLEAFRKEDPTLMDLSFDTISAAGGNAAMCHYNHENQPEPGKLELNTLYLVDSGGQYLDGTTDITRTIAIGQPSAEMIKQFTLALKGHIGVARARFPKGTRGYQIDTLARQHLWAEGYDYDHGTGHGVGHFLSVHEGPASISKKQIDVPLTEGMVLSNEPGYYRADAFGIRIENLELVVETSTNGDFPVLSFESLTRCPIDKRNINVDMLTRPELAWLNDYHQKVWEQISPLVDGEVKEWLREATLPLAHS

SEQ ID NO: 17962 - protein, 319 aa, Ashbya gossypii ATCC 10895
MFRHVSRRCFSRESTPYDKTIKNLLMPKGTKVIFQGFTGKQATFHAKISQEYGTQVVGGTNPKKAGQVHLGQPVFASVAEAVRETGATATGIFVPPPIAAPAIREAIEAEVPLAVCVTEGIPQHDMLYIAEMLRTQDKTRLVGPNCPGIINPGSNVRIRHSAHEVLTPGKIGIVSSSGTLTYELVQQTSPVGLGQSLVIGIGGDAFPGTDFIDALRLFMEDGVTEGIILLGEIGGKAEIEAAEFLKAYNQTRATPMPVASFIAGTVAGQMKGVRMGHSGAIVEGSGTDAESKKAALRAAGVAVVESPGRLGEALLKQFQ

SEQ ID NO: 17963 - protein, 367 aa, Ashbya gossypii ATCC 10895
MLRQKLFQGSRRWLASVRQPSIGRYAGKPNAAGKYTVSFIEGDGVGPEISQSVKDIFSAASVPVEWEYCDVTPLLVNGLTTIPEPAVASINKNLVALKGPLATPIGKGHRSLNLTLRKTFGLFANVRPAKSIEGYKTTYSDVDLVLIRENTEGEYSGIEHVVSPGVVQSIKLITREASERVIRYAFEYARTVGRPKVVVVHKSTIQRLADGLFVNVAQELGREYPDIELQTELLDNTVLNVVTKPEAYKDVVAVCPNLYGDILSDLNSGLSAGSLGLTPSANIGHQVSIFEAVHGSAPDIAGQNRANPTALLLSSVMMLNHMGLHEHAGRIEKAVLSTIASSRENRTADLAGTASTSSFTNAVIERL

SEQ ID NO: 17964 - protein, 236 aa, Kluyveromyces lactis NRRL Y-1140
MNTSHSQEPKDRSVKISKALAYLLRHGAVKENLPIDSDGYIALDRILQHNRLKSLKATSTEIQHIVASNDKQRFHIKTDPNTGIMYVCATQGHTLKQIAPSQHVLKPITNIEQLSSKLVHGTNVSNCISILHSGFIKKMSRNHVHLSPGITGKDTDVISGMRSSSNVYIHIKRIQEMLDSLNLVKSLNNVYLTSQDIPLKFIDFIQVRKGRSAASSEQLQQLKKLATEMKVPIEII

SEQ ID NO: 17965 - protein, 421 aa, Oceanicola granulosus HTCC2516
MTVKTHTLPNGFRIVTELMPSMKSAALGIWVNAGGRHERADQNGIAHFLEHMAFKGTKRRSALQIAEEIEDVGGYINAYTSREMTAYYARVLEEDVDLGLDLISDILLNPVFDEREIEVERGVILQEIGQSHDTPDDVVFDWLQEVAYPDQPMGRSILGLPERVQGFGRDDLTSFVGEHYGPGQMILAAAGAVDHDHLVRLAEDLFGHLKPVNLTFQTEPARFGGGERRVKKRLEQVHFALALDGPDYRDPEIYTAQVYATALGGGMSSRLFQELRENRGLCYTIFAQAGAYADAGMTTIYAGTAADQIESFAHLTIDEMKRAADDLSDAEIARARAQMKAGMLMGLESPSNRAERLARMISIWGRVPTIDETVERIDAVGRDDVRAFGAKMAGQAGTAMAIYGPIERAPTLQALRERLAA

SEQ ID NO: 17966 - protein, 190 aa, Wolbachia endosymbiont of Drosophila simulans
MVQATYASMSLPGISSVEDVLEDARSGKLFILVDDENRENEGDLIVLAEKIKPEHMAFMVRYGTGVVCLAMTKFHMKRLGLNFMEKKNIGENHTAFTTSIDARYGITTGVSAEDRTKTIHAAINKDGTQDDIITPGHVFPVIAHKGGVAQRAGHTEASVEMAKLVGFDHSAVICELVNDDGSMMRLLSVT

SEQ ID NO: 17967 - protein, 424 aa, Bacillus licheniformis ATCC 14580
MVADQNTGHTEENTHDVLKSTQTVIHKALEKLGYPEEVYELLKEPIRFLTVKIPVRMDDGSVKIFTGYRAQHNDAVGPTKGGIRFHPGVTEKEVKALSIWMSLKCGIIDLPYGGGKGGIICDPRDMSFPELERLSRGYVRAISQIVGPTKDVPAPDVFTNSQIMAWMMDEYSRIDEFNSPGFITGKPLVLGGSHGRESATAKGVTICIKEAAKKKNIDIEGASVVVQGFGNAGSYLAKFMYDAGAKVVGISDAYGGLYDPEGLDIDYLLDRRDSFGTVTKLFNDTITNKELLELECDILVPAAIENQITAENAHNIKAKIVVEAANGPTTLEATKILSDRDILLVPDVLASAGGVTVSYFEWVQNNQGFYWTEEEVEERLEKMMVKSFNNIYEMAHNRRIDMRLAAYMVGVRKMAEASRFRGWI

SEQ ID NO: 17968 - protein, 140 aa, Arabidopsis thaliana
MAASVMLSSVTLKPAGFTVDKTAARGLPSLTRARPSFKIVASGVKKIKTDKPFGINGSMDLRDGVDASGRKGKGYGVYKYVDKYGANVDGYSPIYNENEWSASGDVYNGGVTGLAIWAVTLPGILAGGALHVDNPSALAQ

SEQ ID NO: 17969 - protein, 338 aa, Pseudomonas putida KT2440
MTDHALLLVNLGSPASTSVADVRRYLNQFLMDPYVIDLPWPVRRLLVSLVLIKRPEQSAHAYASIWWEEGSPLVVLTRRLQAAMAEHWPHGPVEIAMRYGQPALPDVLARLAAQGVRKVTLAPLYPQFADSTVTTVIEQAKQTVSEHQLPLQMRVLQPFYEHPAYIEALAASARPYLEQGYDHLLLSFHGLPERHLKKLFPKGVKHDLRAADCCHGATAEVSSVCYRGQCLATAKAFAQSMGIPDGKWSVSFQSRLGRDKWIEPYTETRLDELAKAGVKKLLVMCPAFVADCIETLEEIGMRGSEQFVEAGGQELVLVPCLNDHPEWVRVLADMCEKA

SEQ ID NO: 17970 - protein, 355 aa, Colletotrichum lagenarium
MSRANAPNPSGSRKISFNVSEQYDIQDVVGEGAYGVVCSAIHKPSGQKVAIKKITPFDHSMFCLRTLREMKLLRYFNHENIISILDIQKPRSYETFNEVYLIQELMETDMHRVIRTQDLSDDHCQYFIYQTLRALKAMHSANVLHRDLKPSNLLLNANCDLKVCDFGLARSAASQEDNSGFMTEYVATRWYRAPEIMLTFKEYTKAIDVWSVGCILAEMLSGKPLFPGKDYHHQLTLILDVLGTPTMEDYYGIKSRRAREYIRSLPFKKKVPFRTLFPKTSDLALDLLEKLLAFNPVKRITVEDALKHPYLEPYHDPDDEPTAPPIPEEFFDFDKHKDNLSKEQLKQLIYQEIMR

SEQ ID NO: 17971 - protein, 547 aa, Listeria monocytogenes str. 4b F2365
MTVKPGFDYMNNPLLNKGTAFSKEERASYQLDGLLPPIIETIEQQAVRIETQIENLETPLHKHQLLTNLYNENRTLYYYVVTKNVTDYLPIIYTPTIGDAVIQYHKEYTAPDEALFIDAFAPEKLSASIKNYAKNNPNIDMIVITDGEGVLGIGDWGVNGVKIAVGKLAVYTVAAGLAPDRVLPVVIDAGTNNETLLNDPLYLGNKRPRLSESEYDAFIASFVNVMKEVFPKAILHWEDFGRANASRILHNYRDKICTFNDDIQGTGAMVVAAVLATIQVSKIPLSEQKIIIFGAGTAGIGIADQLSAQWMRETGLPFESAKKHFYLVDRNGLVLDNMTDLTTGQKKYAHPSTEWSNVPTDTLENLMEAVHPTMLIGCSGVTGAFKESIVKKMTQYTERPAILPLSNPTKLAEATASDLIQWTDGKALIVTGSPSKPVEYQHTTYEIGQANNALLYPGLGLGALVTRAKYITDGMLAAASMAVAEQISPNKAGAALLPHVRTLRETSRAVAIAVANQAIKENIHQVELTNVTEAIEREMWQPIYKGV

SEQ ID NO: 17972 - protein, 445 aa, Oryza sativa
  misc_feature (14)..(14): Xaa can be any naturally occurring amino acid
MGCAQGKCCVPRRXRGRGGGGAVGGRGGATLGRVAVPGAALVLEYATLAVAGLYPDSPGRESQDAHLVATRFAGHPDLHLFAVFDGHGACGAACAGFARDALPRLLAGVGVGAGEEGGGRMVVVEDPAAAFREALPAANAEMHAADEVDDSMSGTTAVAALVAGGALHVANVGDSRAVAGVWREGRVAAEELSWDQTPFRADERARVKACGARVMSVEQVEGVRDPEAESWVADEGDPPRVWARDGLYPGTAFTRSLGDQAAEAVGVIAEPEVKSVEITPAHLFFVVASDGVFEFLSSQDVVDMCVNLSAFGLYEASDVPRTGVAAKLMKCLNENGISPASTSKLDVHSQKPNQSMTLAYVLFRGSMKLLQWDTEVSLMLNAFVKITNTKTKWYMLVPIRILMSIVLHARVRKTSMYRDVYSLWITEHHQRFTDYSEGEVICGVI

SEQ ID NO: 17973 - protein, 350 aa, Wolbachia endosymbiont of Onchocerca volvulus
VVANTDAQALEKSLCDKKIQLGINLTKGLGAGALPDIGKGAAEESIEEIMEHIKDSHMLFITAGMGGGTGTGAAPVIAKAAREARAAVKDKMLKEKKILTVGVVTKPFDFEGVRRMRIAELGLEELQKYVDTLIVIPNQNLFRIANEKTTFADAFRLADNVLHIGIRGVTDLMVMPGLINLDFADIGTVMNEMGKAMIGTGEAEGEDRAVTAAEAAISNPLLDNMSMKGAQGILINITGGEDMTLFEVDAAANRVREEVDEDANIIFGATFDQAMEGKVRVSVLATGIDNSSNIRDGRAETSSVSQTKISKEEKFKWSYSQASVLKTKPAEQVSERVKWSNNIYDIPAYL

SEQ ID NO: 17974 - protein, 177 aa, Zea mays
MVLTSNISVQKTLYEVLSVSEDATYDEIRAAYRSAALNTHPDKAQTTLESSSVPSTEQQEFSSVQKAWEVLRHPTSRADYDKQLQSSRQSIEIIASEIQVGDMIVESAAGALELLYPCRCGDYFSITSGELSGMGIVVTGDGEEVEGLQASDSGSASVVLGCGSCSLKIRLVIDGTS

SEQ ID NO: 17975 - protein, 417 aa, Rhodopirellula baltica SH 1
MRSSTKAPPMLSEKTIRIVKEITPLVAANAETITRRFYERMFEANPEVKAFFNQAHQHSGGQQKALAGAICAYFTHIDNPAVLMPAVELIAQKHVSLGIKPEHYPIVGSNLLAAIGDVMGDAATPEIVEAVSEAYGFLADIFIGREGAIYEEQASMPGGWNGTRTFVVTKKVRESEIVTSFYLKPEDEGPLPPFKPGQYITVHMDHPHTPTSPRNYSLSDCASQPHYRISVKREERLVPDAPDGLISNHLHDGIEEGHRIELGPPCGEFTVDPATIAKPIVLIAGGIGVTPLLSMAKSIVHANPNAELHFIQAARNSKVHAFADELRRLAQAGPNVHTKVIYDSPLPGDVEEGKCDEAGFVTENQIRESTPFTDADFYFCGPKPFMKNVHSCLRELGVDEHRVRYEFFGPKEELVAV

SEQ ID NO: 17976 - protein, 312 aa, Candidatus Carsonella ruddii
DYIKNMITGAAQMDGAILVCSALDGPMPQTREHILLARQVGVPTIIVYLNKADCVKDKEILELVEMEIRELLTEYDFDGNNSKIVVGSALLALENKDDNQLGTSSIIKLLDILDQNIPVPNRIIDKPFLMPIEDVFSISGRGTVVTGKIERGIIKTGEEIEIVGFKNTIKTIVTGIEMFKKTLDEGLAGENVGILLRSIKREEVERGQVLVKPGTIKPHTNFSCEIYILSKEEGGRHTPFFKGYKPQFYFRTTDITGICDLPKNIEMVMPGDNVKITVKLLSSIAIEKGLRFAIREGGKTVGAGIITEILND

SEQ ID NO: 17977 - protein, 555 aa, Gloeobacter violaceus PCC 7421
MAKPALLTVDDDPEVLQAVGRDLQSKYGGRFRVLRADSGASALAALKQLQLRNQPVALFLVDQRMPQMSGVEFLEQALPLFPEAKRVLLTAYADTDAAIRAINSVRTDYYLLKPWDPPEERLYPVLDDLLDDWLANHKPPFEGIRVVGNRWSPQSHRVKDFLARQQVPYQWLDLEIQPEAQHLLNAAGDDQAHLPLVVFADGSRLAQPTNAEIAEKLGLRTRAERPFYDLIIVGGGPAGLAAAVYGASEGLSTVMVERQAPGGQAGSSSRIENYLGFPVGLSGADLARRAVAQARRFGVEILSPQEVTGIRIEPPYRVVTLADGSEVSCHALLIATGVSYRKLEVAGAEALTGAGVYYGAAQSEALACSNEAVFIVGGANSAGQAAVYFARYAKQVTMLVRGESLTASMSQYLIEQIAQTENIVVRTRTSVTAVKGESNLEAITVHDDATGETQTLPANSLFILIGAAPNTDWLAGVVERDERGFILAGPDLMRDRRRPRGWTLDRDPFLLETSVPGIFVAGDVRCKSVKRVASGVGEGSIAVQFIHQYLSKVGT

SEQ ID NO: 17978 - protein, 623 aa, Psychrobacter arcticus 273-4
MCGLLGLIDYTKTTSEDIFSEMLSCLVKRGPDSEGIDLFYDDSCSVLLGHRRLAIQDLSNHGHQPMKYDNLVTIYNGEVYNFKEIQQQLLEKGYFFESDSDTEVILKAFHCWGIKSVDKFRGMFAFAIYDINKREITIFRDRVGVKPLYYSQTEDSFIFSSELKPFISFPNFDKSIDFEAVSSYLQFGYIHAPKSIFSSAKKLLPGHYLKFDIASKKLSIDCYWDVTDYFEDKTNVTDITAITDELESIIIESFNLRMISDVPVGTFLSGGVDSSLVTAILQKYSDIPINTFTIGFEDKNYDESIYAKAIADHLGTNHTEYICKKEDALEIIKELPKIFDEPFADSSAIPTTLVSKLAKEKVSVILSGDGGDELFCGYSSYTLMEKRFASISKIPFKNSIKKLSDFIPFPLVLLNGINENLYTKFMKFRNLLEHDDIANAFKVSNSVFCKDEIDKIISQEYFFNEDSISHVSTLEKMMISDFKGYLPDDLLVKVDRSTMSVSLEGREPLLDHKIIEFAARMPISLKKNKSILKDILKRYVPEELFLRKKQGFGIPINSWLRNDLKYLLDQYLNEDIIKEYGVFDPKYVTDLLRLFHAGKNDDRKIWTLLMFQMWFSEHLATSK

SEQ ID NO: 17979 - protein, 116 aa, Helianthus annuus
MKGTSMGVAILAMIVMAQLMVHPSVAITCNDVTGNLTPCLPYLRSGGKPTPACCAGAKKLLGATRTQADRRTACKCAKTAAPQLKVRPDMASSLPGKCGISTSIPINPNVNCNTIP

SEQ ID NO: 17980 - protein, 397 aa, Zymomonas mobilis subsp. mobilis ZM4
MAKAKFERNKPHCNIGTIGHVDHGKTTLTAAITKVLAEAGGGNTFVDYANIDKAPEERERGITISTSHVEYETETRHYAHVDCPGHADYVKNMITGAAQMDGAILVVSAADGPMPQTREHILLARQVGVPALVVFMNKVDQVDDPELLELVEMEIRELLSSYDFPGDDIPIVKGSALAALEDKNPEIGKEAILSLMAAVDEYIPQPERPLDKSFLMPIEDVFSISGRGTVVTGRVETGIVKVGEEVEIVGLRDTKKTTVTGVEMFRKLLDQGQAGDNIGALLRGTARTEVERGQVLAKPGSITPHTEFKAEVYVLSKDEGGRHTPFFANYRPQFYFRTTDVTGEITLPEDVEMVMPGDNIAFGVKLIAPIAMDPGLRFAIREGGRTVGAGVVSSIIK

SEQ ID NO: 17981 - protein, 651 aa, Psychrobacter arcticus 273-4
MCGVNGFFNAHTTIPVQNVIAQMNAAIDHRGPDAGDAWLDENIGLVLGHQRLAIQDLSPAGAQPMHSACGRYVLAFNGEIYNHLQLREQLMIEGHAPAWRGHSDTETMLACFVAWGIEKTLQAMVGMFAIVLWDRQQKVLTLARDRMGEKPLYWGWQGQSLYFSSELKGLKAHPSFKTDINRDAITLLLRHNCIPAPYSIYQGIEKLRPGHWVQLPLSDIQQAKTAQSKAYWRFNDIVEAGLADPFTGSPEQAVDALESALMQSIGGQMQSDVPLGAFLSGGIDSSTVVALMQAQSSRPVKTFTIGFDDAGYNEATHAKAIAKHIGTEHTEMYMRPEDALAVIPKLSSIYCEPFSDSSQIPTFLVNQLAHQHVTVALSGDGGDELFGGYNRYLMAQQVWSKSRKLPRPMRQLAAVSLTALSPKSWDTLVNTLSPVIPKRLNLRTPGDKAHKLAGVLNIDSEQAFYQNLTSHWQDPAQLVIGAQEPATLISDSSCWPTTDSFQHAMMAMDAQTYMTDDILVKVDRAAMANSLETRVPMLDHRIAELAWRMPLDYKIRNGEGKWLLKQVLYRHVPRELIERPKMGFGIPLHDWLRGSLRDWAEALLDRNLLQQQGYFNPAPIRKIWNEHLSGVFNHQHQLWDILMFQAWLETQ

SEQ ID NO: 17982 - protein, 406 aa, Frankia sp. CcI3
MDEAADLLSRTIDVLVVGGGPAGSAAALGALRERPDAHVVIADAAEFPRDKTCGDGIAPHGLDVLRDLGVTDAVAGYRPVDRMRLRTPGGAEVATPSARANYVVPREVFDARLVAAAQARGAQLIRRRVRSLEFTDRPRLDGRGREPVVVVNGSLTARVVIGADGANSAVRRGLGLPGNPPGAMAIAVRAYTEVAFGDGPPEQFIHMTDEGWPAYAWSFPIGDGRANIGYGMLRSRLAGGTDGTSAKTVLRRTLARMLPETPAHPATLRAHHLPLSTHRPRQPNGPVLLAGDAASLINPLTGEGIYYAVLSGSLAGHAAVRAAHPAAAGRVYRRALDAELGRHLRHTALLAGLAGRRRTLMDAAVRAARTRTELYDMLVEIGLGRGTIPTSSLTRLAMRRTMTGLR

SEQ ID NO: 17983 - protein, 340 aa, Glycine max
MGMDYYGILEVDRNASDEELKRAYRKLAMKWHPDKNPTNKKEAEIQFKQISESYEVLSDPQKRAIFDRYGEGGLNGGMQTPDEGVASFFRTGDGPTAFRFNPRNANNIFAEVFGCSSPFGGMGRGFGCGGSGRGRGMGMGGGSWVSRSFGGMFGNDMFREGRSMNQGPRRKAPPIENTLLCSLEELYKGSTRKMKISREITHASGRIFLVEEILNIEIHPGWKKGTKITFPEKGNEQPNVIAADLVFIIDEKPHSVFTRDGNDLVVTQKISLTEAEALTGYTIQLTTLDGRGLNIVVKNVTNPDYEEVITGEGMPISKDPTKKGNLRIKFNIEIPDIVGA

SEQ ID NO: 17984 - protein, 262 aa, Burkholderia xenovorans LB400
MSAELLTSRPTGSESTLVLTLSNPGARNALHPDMYAAGIEALDSVERDPSIRAVVITGADNFFCAGGNLKRLLENRAKDPSVQAQSIDLLGEWISALRLSSKPVIAAVDGAAAGAGFSLALACDLIVAADTAKFVMSYARVGLTPDGGGSWFLAQALPRQLATEVLIEGKPIGATRLHELGVVNKLAKTGAVRDAAVAWADELGKISPNSVARIKGLIGAAGTQQLADHLVAERDNFVASLHHRDSLEGISAFLEKRAPAYK

SEQ ID NO: 17985 - protein, 526 aa, Cryptococcus neoformans var. neoformans JEC21
MMRIPAAPRFASKASTSSRLLVPSRRATTAATSSAHTLNPAGTVTTLPNKLRVATESIPGHFHAVGVYIDAGSRYESQRTSGVSHLLDRLAFKSTDKHTDAQMTTLIDSLGSQVTCASSRETIMYQSTVFPQSLPLAFELISSTIRHPLLLPEELLAQKEAAAYEIREIWAKPELILPEILHTVAFRDNTLGMPLLCPESQLGVLGEEEVRGFMRDWYRPERMVVAGVGMPHEELVMLAEKFFGDMPATTTSPGSLHPSVTQAQQPLGSKSFATASALPVSQDYTDLAHAKAQYTGGELYMEKPEEEFVHIHIGFEGLGIHDPDIYALATLQTLLGGGGSFSAGGPGKGMYTRLYTKVLNQYHAVDFCAAFHHCYADSGLFGISASVYPQFASRIVDVMAGQLHALTGPMFGGVEEKEVRRAKNMLKSTLVMALESRLTAVEDLGRQVQIHGHKVPVEDMCAKIDALTMADLHRVANRILRPGNSSEGRVNYGLGSGKATVVAQGPGLGALGDVRRILKDRWVLGV

SEQ ID NO: 17986 - protein, 279 aa, Cryptococcus neoformans var. neoformans JEC21
MASIVSPLSTKDSLLVTQFRAITGTSSAEAAKYIKRYKHIEAAVDAFYNNEPAPRADPAQERKLGEIWEKFKDPSDPKLIKIDGTMELCEELDIDPGTDAVLFCLAADLGSKATGEWEKAPFVAGIASYPGNIDSLPKLKAYLPTLRKKLVSDPEYFKKVYNHAFQLARGGPQSLTRSLPLDTAIDLWTLFFPPAFNHSPSALSHLPDNSPPQFTQPEFDLWIEFMQQKNKAVSKDTWALLVDFARGIDKDFKEYDEDGAWPSMIDDFVEYVREQKRGQ

SEQ ID NO: 17987 - protein, 482 aa, Ehrlichia chaffeensis str. Arkansas
MSIPITVAYGDGIGPEIMEAVLLILSEAESGLVVETIEVGHNLYKKEWSSGIAPSSWDSIYRTKVLLKSPTMTPQGRGHKSLNVTLRKRLGLYANIRPCISYHPVIKTRYPNLNVVIVRENEEDTYTGIEHRLTNDTYQCSKVITRSGSERICDYAFHYAKVHNRKRVTCLIKDNIMKMTDGIFHKSFSKIAENYPDIESDHYIVDIGMAKVASNPENFDVIVTTNLYGDIVSDIVAELSGSIGLAGSANIGNNYAMFEAVHGSAPDIAGKNIANPSGLLNAAIQMLMYLKQFDKAQLIYNAFLKTLEDGIHTADIYQSQVSKKKVSTMDFAKAVVENFGQSPSQLPKSMFQDNVDRTGVSYTYEPSYVTRVLVGVDITIGCDGVGLDFKQLINNLQNITHDKLELVLIHNKGLEIWPDESVSVNLSYMDQVCCRFYMKSKDDKIMNEHINQLLFDIEQKKIDVVKMEKLYLYNDQPGFFTM

SEQ ID NO: 17988 - protein, 921 aa, Daucus carota
SLSSAISPSSYAAIAAAYSARTPIFNKKKTAAVLSPLSLFHQSPSLSKTGIFLHRGRKESSSKFYIAASVTTAVPSLDDSVEKVHLPRGAMWSIHKFGGTCVGSSERIRNVAEIVVEDDSERKLVVVSAMSKVTDMMYDLIYKAQSRDDSYESALDAVMEKHKLTAFDLLDEDDLARFLTRLQHDVITLKAMLRAIYIAGHATESFSDFVVGHGELWSAQLLSFVIRKNGGDCNWMDTRDVLVVNPAGSNQVDPDYLESEKRLEKWFSSNQCQTIVATGFIASTPQNIPTTLKRDGSDFSAAIMGALLRAGQVTIWTDVNGVYSADPRKVSEAVVLKTLSYQEAWEMSYFGANVLHPRTINPVMRYDIPIVIRNIFNLSAPGTMICRESVGETEDGLKLESHVKGFATIDNLALINVEGTGMAGVPGTATAIFGAVKDVGANVIMISQASSEHSICFAVPESEVKAVAKALEARFRQALDAGRLSQVANNPNCSILATVGQKMASTPGVSATLFNALAKANINVRAIAQGCTEYNITVVLSREDCVRALKAVHSRFYLSRTTIAVGIVGPGLIGATLLDQLRDQAAILKENSKIDLRVMGITGSRTMLLSETGIDLSRWREVQKEKGQTAGLEKFVQHVRGNHFIPSTVIVDCTADSEVASHYHDWLCRGIHVITPNKKANSGPLDQYLKLRALQRRSYTHYFYEATVVAGLPIITTLQGLLETGDKILRIEGIFSGTLSYIFNNFKSTTPFSEVVSEAKAAGYTEPDPRDDLAGTDVARKVIILARGSGLKLELSDIPVQSLVPEPLRGIASAEEFLLQLPQFDSDMTRKREDAENAGEVLRYVGVVDAVNQKGVVELKRYKKEHPFAQLSGSDNINAFTTERYNKQPPIIRGPGAGAEVTAGGVFSDILRLASYLGAPS

SEQ ID NO: 17989 - protein, 539 aa, Ustilago maydis 521
MVFQVRGTPIGALTIFIAALASMGGFLFGWDTGQISGLLEMSDFRARFATIDDPSATGGKSWNPWIEGVVVSLLSVGTAIGVLIGAPLADKLGRRYAMVVECIVFDIGVIIQVTSFYAWYQVAIGRLVTGLGVGALSAAVPLYQSETVPRQVRGALVGTYQLFITLGILLAYCTNIGTRDYSNSGQWRVPIALGIFFSSILAIGILFCPESPRWLAAQGRNEEAYKACAAVRGAKYGDGNPWVEAEYREIVSMVKADEKLEEAGWLDCFKPQHKTLYRTLLGMALQAGQQFTGANYFFYFGTAIFRSAGLDDSFVTQIILGAVNFVCTFLGLYVLERFGRRWPLIYGAAWQSFWLFVFAIAGVVGGPQPEQISSGIGKLLIVAACFFILGYASTWAPGIWIWIGESFSYRTRAKQASLATLSNWISNFLISYFSSPIANDINFAYGFVFAGCNLANCLIAFFFVYESADLTLEDVDAMYNDPNCKPWNSTKWVPAGYTSRDQIKEKDSGQASEVGEWSNSPSALPDEQEKNKSNPLQVA

SEQ ID NO: 17990 - protein, 219 aa, Triticum aestivum
  misc_feature (118)..(118): Xaa can be any naturally occurring amino acid
  misc_feature (172)..(173): Xaa can be any naturally occurring amino acid
  misc_feature (189)..(189): Xaa can be any naturally occurring amino acid
  misc_feature (191)..(191): Xaa can be any naturally occurring amino acid
  misc_feature (198)..(198): Xaa can be any naturally occurring amino acid
  misc_feature (203)..(203): Xaa can be any naturally occurring amino acid
  misc_feature (208)..(208): Xaa can be any naturally occurring amino acid
  misc_feature (214)..(214): Xaa can be any naturally occurring amino acid
MKLNIANPTTGCQKKVEIDDDQKLRNLYDKRISQEVVGDLLGEEFKGYIFKIMGGCDKQGFPMKQGVLTSGRVRLLLHRGTPCFRGFGRRNGERRRKSVRGCIVSQDLSVINLVIVKXGENDLPGLTDTEKPRMRGPKRASKIKKLFNLGKDDDVRSYVNTYRRTFLNKKGXXVSKAPKIKRLVTPLTXQXKRARIPXKKKRXAKKNXKAAEYXTASQS

SEQ ID NO: 17991 - protein, 230 aa, Arabidopsis thaliana
MNSLAIRVSKVLRSSSISPLAISAERGSKSWFSTGPIDEGVEEDFEENVTERPELQPHGVDPRKGWGFRGVHRAIICGKVGQAPLQKILRNGRTVTIFTVGTGGMFDQRLVGATNQPKPAQWHRIAVHNEVLGSYAVQKLAKNSSVYVEGDIETRVYNDSISSEVKSIPEICVRRDGKIRMIKYGESISKISFDELTNIRKEKRDSCLCFNICFTFGRRRIDLVGARIFR

SEQ ID NO: 17992 - protein, 619 aa, Aspergillus oryzae
MPVLAGCEGAAIPANLVSQTQSYNSNLIENSLSCEQQVTSSRHVLYSRPLFHLTAPRGWLNDPCGLGYDPATGLYHLSFQWNPKGNDWGNISWGHSVSQDLISWKTSPEPCLTPSAEYDSCGIFTGCFRPSDINGVAGALTYIYTSVRRLPLHYTLPYEVGSESLSIAVSRDNGVTWQRLDSNPILPAPPPDLNVTAWRDPYIGVWTAKQGEHDNDILPPLSLSGFLSGGIAGRTPTVFVYSVNPDDLREWTYVGPLVNVGLNFRPSRWSGDLGVNWETTNWVVLTDHEGTTKNFIIMGVEGCLVSEREQKRVSRSQLWMAVDPRPEQPKSEPIDALTDYAFSGIFDHGCAYAANSFWDPVTSQYIVYCWITEEDLPDGIRHRQGWSGVISLPRSLKLTTLRNVTKTRHSNLSDVTSIEKEANGEGSFTIRTLGVEPDQRLKKLRGEAQSITNVALWDRQHCGNYLSLTTSRWELEAEFAVGKLCKLVGIEFQHDLDPRNSTVLAWAPCSETFSIHRPPPYDPGINHNPEIAPHTLFTFADESGMEKEETLRIHAFLDRNVLEVFVNERTVISTRIYTPCVESVSRLRFFAELDPSAPNLKHAPAVLLKADLWDGLEAS

SEQ ID NO: 17993 - protein, 89 aa, Synechococcus sp. WH 7805
MIRVTSPCPDSVIVALGVHDWPVWASEVSEFPWHYDQRETCLLLEGDVTVTPDSGESVHIKAGDLVEFPAGLRCTWTVHQPVRKHYQFG

SEQ ID NO: 17994 - protein, 643 aa, Candida glabrata CBS 138
MVEDAVDTHEDKKLKVEESATPTSQTEEHAHTDKVIEEEKSESKVSEDKEGKEEGKEESKEAEAAEDKSEDKSEDAAETKNVVDTSNMTPAPAPPQEPDMDNLPANPIPQHQQKHALMAIKAVKRLKDARPFLQPVDPVALNIPLYFNFIKRPMDLQTIERKLNANAYETPEQITEDFNLMVENSAKFNGPTAVITQMGRNIQAAFEKHMLNMPAKDLPQRDPLPGTKATTGRGKKKTTDSDTPVVIRRAQTHNGRPKREIHPPKSKDIYPYEMNSKPKSKSLQRAMKFCQGVVRELMSKKYASFNYPFLEPVDPVALNCPTYFDYVKEPMDLGTVSKKLSNWEYENLDQAEHDIRLIFQNCYAFNPDGTIVNMMGHRLEDIFNTKWADRPLYSDVESEEAESAYDDEESDESDVEIDETSITNPAIQYLEDQLERMKVELQQLKKQELEKIRKERRLARGPKKTRGRRGRKKGSTKAKTGRGKKKLKSVVTYDMKKIITENINDLPTAKLEKVIEIIKKSMPNIGDDEEVELDLDTLDNNTILTLYNTFFRQFEAPANDSGNDNQSVSPTNGLGRRKRSKNLSREEQSKQIEKIRNKLALLDGASPLSQNGSPVTPASFASNIQNGYSSSSSDDDSSESEEE

SEQ ID NO: 17995 - protein, 146 aa, Lycopersicon esculentum
MDATKTTKGAGGRKGGPRKKSVTKSIKAGLQFPVGRIGRYLKKGRYAQRVGSGAPIYLAAVLEYLAAEVLELAGNAARDNKKSRIIPRHVLLAVRNDEELGKLLAGVTIASGGVLPNINPVLLPKKSAVAEEKSPKAKAGKSPKKA

SEQ ID NO: 17996 - protein, 409 aa, Photobacterium profundum SS9
MELTTTVTELRYALDTFFFLISGALVMWMAAGFAMLEAGLVRSKNTTEILTKNFCLYAIACTTYLIVGYNIMYVDNGEGGWLPSIGALIGTQAEGADHSLESDFFFQVVFVATAMSVVSGAVAERMKLWSFLLFSVVLTAFIYPMEGYWTWGGGFLSEAGFSDFAGSGIVHMAGASAALAGVLLLGARKGKYGKNGEINPIPGSNMPLATLGTFILWLGWFGFNGGSQLMLSDFENASAVGQIFLNTNAAAAAGAVAALAVCKTMWGKADLTMILNGALAGLVAITADPLSPSPIASVIVGVVAGALVIFSIIMLDKIKIDDPVGAISVHGVCGFFGLMVVPFSNGDASFGAQLLGAAVIFAWVFTASFVVWFVIKVTIGIRVTEEEEMAGMDLHDCGVDAYPEFVSLK

SEQ ID NO: 17997 - protein, 112 aa, Photobacterium profundum SS9
MKLISAIIKPFKLDDVREALADVGVEGMTVSEVKGFGRQKGHTELYRGAEYQVDFLPKVKIEIATQADNFEAIVDAISKAAQTGKIGDGKIFVYDLDHAVRIRTGETDLEAL

SEQ ID NO: 17998 - protein, 263 aa, Wolbachia endosymbiont of Drosophila simulans
MSRRVVVTGVGLITPLAADVDNTWSRLIKSESGIKAINTDRFDSSDLACKIAGQVPLQSDNIEHHFNPLDYISEKDSKRTDRFIHYGIAAAIQAVDDSLILESQNINRERVGVTIGSGIGGLPSIQENVITMQEKGPRRVSPFFVPASLINLISGHVSIKYEFTGPNDSAVTACATGAHAIINSARTIKLGEADVMIAGGAESALCRVGIAGFASMKALSTKFNDKPEEASRPWDAERDGFVMGEGAGILVLEEYEHAKKRGA

SEQ ID NO: 17999 - protein, 482 aa, Bacteroides fragilis YCH46
MNHTNEGSKLYLYSITSVAILGGLLFGYDTAVISGAEKGLEAFFLTATDFQYDKVMHGITSSSALIGCVLGGALSGIFASRLGRRNSLRLAAVLFFLSALGSYYPEFLFFEYGKANMNLLITFNLYRILGGIGVGLASAVCPMYIAEIAPSNIRGTLVSCNQFAIIFGMLVVYFVNYLILGDHQNPVILKDAAGTLSVSSESDMWTVTEGWRYMFGSEAFPAAFFGMLLFFVPKTPRYLVMIDQDQKAYSILKKVNGATKAQEILAEIKATSQEKTEKLFTYGAAVIVIGILLSVFQQAIGINAVLYYAPRIFENAGAEGGGMMQTVIMGIVNIVFTLIAIFTVDRFGRKPLLIIGSVGMAVGAFAVALCDSMGIKGILPVLSVIVYAAFFMMSWGPICWVLISEIFPNTIRGKAVAIAVAFQWIFNYIVSSTFPALYDFSPMFAYSLYGIICMIAALFVWRWVPETKGKTLEDMSKLWKKR

SEQ ID NO: 18000 - protein, 451 aa, Schizosaccharomyces pombe
MSTPYEPEFQQAYKEIVGSIESSKLFEVHPELKRVLPIISIPERVLEFRVTWEDDKGNCRVNTGYRVQFNSALGPYKGGLRFHPSVNLSILKFLGFEQIFKNALTGLPMGGGKGGSDFDPKGKSDNEIRRFSQAFMRQLFRYIGPQTDVPAGDIGVTGFVVMHMFGEYKRLRNEYSGVVTGKHMLTGGSNIRPEATGYGVVYYVKHMIEHRTKGAETLKGKRVAISGSGNVAQYAALKCIQEGAIVKSISDSKGVLIAKTAEGLVPEEIHEIMALKEKRASIADSASLCKKHHYIAGARPWTNVGEIDIALPCATQNEVSGEEAAALIKQGCRYVAEGSNMGSSAEAVEVFEKSRASGEGCWLAPGKAANAGGVAVSGLEMAQNAQFSTWTHAEVDAKLAGIMQNIFEQSTDVASKYCDSGSNNIPSLVDGANIAGFLKVATAMQAVGDWW

SEQ ID NO: 18001 - protein, 165 aa, Staphylococcus aureus subsp. aureus MSSA476
MNNRNVYDIEVSDYKGLTYKLEAFRGKVILVVNTATECIYSEQLKKLETLFQKYKDRGFVVLSFPNNNFDNRQPGSNEEILKISREKFGVTFPVLAKISVNGNDEHPLFTHLKNEQPGIFGSPIKWNFTKFIIDRQGNVVNRFLPMEDPLDISTNIEILLQESSS

SEQ ID NO: 18002 - protein, 335 aa, Xanthomonas campestris pv. vesicatoria str. 85-10
MTQTITVIRGDGIGPEIMDATLFVLDALQAGLTYEYADAGLVALEKHGDLLPESTLASISKNKVALKSPLTTPVGEGFSSINVAMRRKFDLYANVRPAKSFPNTKSRFADGVDLITVRENTEGAYLSEGQTVSEDGETAFSGTRITRKGSERIVRYAFELAKSTGRKKVTAVHKANIIKSTSGLFLKVARDVAAQYPDIEFQEMIVDNTCMQLVMRPEQFDIIVTTNLFGDIISDLCAGLVGGLGLAPGANIGLDAAIFEAVHGSAPDIAGQGKANPCALLLGAAQMLDHIGQPQNAERLREAIVATLEAKDSLTPDLGGTGNTMGFAKAIASRL

SEQ ID NO: 18003 - protein, 535 aa, Neisseria meningitidis Z2491
MSIVEIKVPDIGGHENVDIIAVEVKAGDTIAVDDTLITLETDKATMDVPADAAGVVKEVKVKVGDKISEGGVILTVETGAAAAEAAPAAAEAQPAPAAAPAAAGGATVQVAVPDIGGHTDVDVIAVEIKVGDTVAEDDTLITLETDKATMDVPCTAAGVVKAVFLKVGDKVSEGSAIIEVETVGSAAAAPAQAAQAAAPAAAPPPTAAAAPAAAPAPSAPAAAKIDEAAFAKAHAGPSARKLARELGVDLGQVKGTGLKGRIVGDDIKAFVKSVMQGGAAKPAAVGASLGGGLDLLPWPKVDFSKFGNVEVKELSRIKKISGQNLSRNWVVIPHVTVHEEADMTELEEFRKQLNKEWEREGVKLSPLAFIIKASVSALKAFPEFNASLDGDNLVLKNYFNIGFAADTPNGLVVPVIKDVDQKGLKQISQELTELSKKAREGKLKPQEMQGACFTISSLGGIGGTGFTPIVNAPEVAILGVCKSQIKPVWNGKEFAPRLMCPLSLSFDHRVIDGAAGMRFTVFLANLLKDFRRITL

SEQ ID NO: 18004 - protein, 295 aa, Psychrobacter arcticus 273-4
MSIASIASTAQGSATILDGKALAKQIEQQLSTRVDAIKAKTGRTPSLATILVGDDPASATYVRMKGNACQRVGMDSIRVEMPSATTTAELMAKIDELNNNPDVHGILLQHPVPAHIDERACFEQIDLAKDVDGVTCLGFGRMAMQQSAYGSCTPQGIMHLLEHHNIELAGLEAVVVGRSAILGKPMAMMLLNANCTVTICHSRTQDLESHIKRADIVVGAVGVPELIKANWIKAGAVVIDAGFHPTDNGGVGDIELQGVENIASAYTPVPGGVGPMTINTLIRQTVDAAEKSAGL

SEQ ID NO: 18005 - protein, 1213 aa, Pseudomonas syringae pv. tomato str. DC3000
MQSRVRETGSTMRGRAWRMVWVLLALVFARSIDAAQSLPFTLTAPFVVSQDLDLDASDRAWLDQRKVLRVGIAIADYEPIDITSDRNRYQGISADYLGLVSDQLNISTQVTGFAKRDEAIEALREGRIDLLTSANGFERGVRGLSFSSEYMPDRSVVVGRGNDVSPPSSLADKKVVLLDGYADSDVVHRVYPNSEIIIAPNLYSALEALSQGEVDIFIGNEVIVRAYIALRPYLGLQIKFESQLPPVGFAFAARQDEQRLLALIDRALNSIDPAVGREVLVRWTIGLGADVEGQRIRLSGAERRWLLKHPSVTISTTQHPPYIYKDKNGHWVGLNADLLARISRMTGLQFVHKEAASTQQSIEVLRAGRADMNTTLAENAERRKFLDFTYSFGGNSWMFVVHSDRSSQVSLDSLSGQVLALPARHALEDMIKREYPLIKLRLVETYDQARALVESGAADATIQNEAGAYLFPSGQLKVARSVDGKWSPDRFSVIKTQPELLGILNKALEEFPVAELRSIRLKWLGSSLPQPSLWGRIPRWVFWVVALALLTGLVSLAWSSRLKVQIRQRLKAERQLNDQLAFKHALLDGIPNPIYVRDLKGRLISCNRSYEQSLGVSFEQMNGRRLLDVEVIPRPLAEQMHADYLALLENHQPVFSDRTIELSGKRMNVWQWTVPFFAADGQLQGLLGGWIDITERKLLEQQLEQAVRLAAQANEAKSVFLASMSHEIRTPMGAIIGLLELECEQALRRGEEPTQGLQVAHRSATELVALIGESLDLARIEAGGMQLSLVVTPLQTFFEGVLALFSAQAREKGLELRLELAEQARGDYWLDPLRLRQVVHNVLGNALKFTRQGAVVVKVEVSDDPPDASRVRIGIMDSGVGIEPARQQQIFQPFTQAADDTAARYGGSGLGLSITRQLVELMKGDISLHSEPGKGTRVTVDVPLARVTEPVLPSAEALDATLDALPDTRILNLLVVDDMSANRLVLTRQLEFLGHRVVPVEGGEAALSIWRKEPFDALITDCNMPGISGYALTEAIRQIEETEQRQRCPVIGCTANAMTDEAARCEQAGMDGLLIKPLSLARLARELADRVREPTFDIRTLQNMTRANPDQMQRLLSELWKNLRHEHALLEPAVTANDWKTMSASLHRLKGAASLVDAVPLARACAALDDSVRQQRMSDVHERWLALENAMTGLRADIEMQLVAVPETAPPRD

SEQ ID NO: 18006 - protein, 618 aa, Kineococcus radiotolerans SRS30216
MSNSVQMPALGESVTEGTVTRWLKAVGDTVEVDEPLLEVSTDKVDTEIPSPVAGTLLEILVPEDETADVGADLARIGDPSEQGGGSPAPQEQPAPAAPQDAPAPPSTEDTQAAPQAAQEPSPEEPPAAAAAPAPGGGEAVKMPALGESVTEGTVTRWLKAVGDSVEVDEPLLEVSTDKVDTEIPSPVAGTLLEILVGEDETADVGADLARIGDASAAPSPAPAAPAQEAPAAPQEESLADEVAERETARAQAESATQPSSTPSAEPASAPAQPVAPAPAPAAPAPQAPASTPAPAEVTGGGTYVTPLVRKLAKDLGVDLATVTGTGVGGRVRKQDVQEAADKAAEAARAAEAKAAEAAAPAPAAAAEKPAAKPAPAVEVSAKRGTTEKMSRLRKVIAQRMKESLQNSAQLTTVIEVDVTKIARLRARAKDGFLATEGAKLTFLPFFVKAAVEALKQHPSLNASIDGENIVYHGSENVSMAVDTPKGLITPVIKDAGDLNLGGLARKIADLAARTRASKITPDDLSGGTFTITNTGSIGALFDTPILNAPQVAILGTGAIVKRPVVLEVDGQETIAIRSMMYLALSYDHQIVDGADAARFLQTVKKRIEAGEFEGELGL

SEQ ID NO: 18007 - protein, 261 aa, Brucella melitensis 16M
MAASEDRFVSVERHADGVATVRINRPEARNALNLTTRQQLAEHFRALSGDESVRAIVLTGGETCFVDGADVREFASAGPIEMYLRHTEYLWDAIASCAKPVIAAVNGYALGGGCELAMHCDIIVAGEGAVFGQPEVKLGLMPGAGGTQRLIRAVGKFQAMRIALTGCMVPAAEALSIGMISEMTANERTLPRAHELAVEIARLPALAVAQIKEVMLVGADLPLDGALALERKAFQLLFDSKDQKEGAAAFLEKRKPAYNGR

SEQ ID NO: 18008 - protein, 210 aa, Chromobacterium violaceum ATCC 12472
MNANTDILSLRVHAALDALRRGLPVIVADDADRENEADLILAADTLTVPEMARMIRDGSGIVCLCLTPERAERLQLPPMAAENGSRYGTAFTVAIEAAQGVTTGVSAADRTTTIRAAIHPDAKPGDLVRPGHVYPIVARAGGVRERRGHTEASVELARLAGFSPAGVLCELMNPDGTMMRGQQVQDYAERHDLPQLSVAELAEWLQREPA

SEQ ID NO: 18009 - protein, 624 aa, Bordetella parapertussis
MCGVAGLIHLDGAAVDPAVLQGMTDAIAHRGPDGEGHWIDGNVGLGHRRLAIIDLSPAGHQPMISADSRYVLSYNGEIYNFRELRAELETAGYRFKSRTDSEVLLYAVIAWGLKALKRFNGMFAFALWDCHERRLILARDRYGIKPLYYAEQGGTLAFGSEQKAILALPGFRRKLDKAALLEYFTFQNIFTSKVLLEDIQILPAGHYAIVEPDRCASISLTQYWDFCFREPDVAATDQEYREELDRLFVQAVKRQLVTDVELGSYLSGGMDSGSIAAVAAAEHPYIKTFTCGFDLNSASGIELGFDERSKAEYMSYCFKTEHYEMVLKAGDMERILPHVACHLEEPRVGQSYPNFFAAKLASRFVKVVLSGAGGDELFAGYPWRYYRAVVNDDFEHYVDKYYNFWQRLLPNSELKRVFAPIAGEVEHVWTRDIFRNVFRHHADQLYRPEDYINHSLYFEAKTFLHGLLVVEDKLSMAHGLETRVPFLDNDLVEFAMRCPIRLKLNNLAEVVKINENETGNKVRKFFEKNRDGKTILREVMNHRLPADISKAEKQGFSAPDASWFKGESLEFVRRKLLDGHSPLYEIMDAATVRELVNEHLGGIRNRRLLIWSLLSVDAWMRQTF

SEQ ID NO: 18010 - protein, 498 aa, Magnetospirillum magnetotacticum MS-1
MKTYSIAAIPADGIGIEVIAAGIEVLDALAEKTGSFRFKFDHFDWGSDYYKRHGVMMPADGREQIKDHDAIFFGAVGAPDVPDHITLWGLRLAICQPFDQYANVRPTRILPGITSPLRHVTGPELNWVIVRENSEGEYAGVGGRVHQGHPNEVATDVSMMTRSGVDRIIRFAFKLAQSRPRKLLTVVTKSNAQRHAMVMWDEIAAEVARDFPDVTWDKMLVDAMTMRMTMKPETLDTIVATNLHADILSDLAAALAGSLGIAPTANINPERTYPSMFEPIHGSAFDITGKGVANPIATFWTACQMLGAPRRERRPADRLMRAVERVTGRSEPAHAAHLRGQGDDPPGHGRGHRTTPSVTTSRPVLRGHHPREPLCPAVPDRRATPRRNSTRPDRIRRNGGRPADGAAGRAGAPAAARPPLNHGSKPGDAARPPGKPQCQSIPARRQMRTITAKGLTTQKHNQKPGTNTHHHTQTRKESPHETTHPYDENKHTHPPRHQ

SEQ ID NO: 18011 - protein, 169 aa, Hordeum vulgare
MAAAASSASSVHDFTVKDASGKDVDLSTYKGKVLLIVNVASQCGLTNSNYTELAQLYEKYKDQGFEILAFPCNQFGGQEPGTNEEIVQFACTRFKAEYPIFDKVDVNGDNVAPVYKFLKSSKGSLFGDNIKWNFSKFLVDKDGNVVDRYAPTTSPLSIEKDIKKLLASS

SEQ ID NO: 18012 - protein, 322 aa, Wolbachia endosymbiont of Asobara tabida
LCDKKIQLGINLTKGLGAGALPDVGKGAAEESIDEIMEHIKDSHMLFITAGMGGGTGTGAAPVIAKAAREARAAVKDRAPKEKKILTVGVVTKPFGFEGVRRMRIAELGLEELQKYVDTLIVIPNQNLFRIANEKTTFSDAFKLADNVLHIGIRGVTDLMVMPGLINLDFADIETVMSEMGKAMIGTGEAEGEDRAISAAEAAISNPLLDNVSMKGAQGILINITGGGDMTLFEVDAAANRVREEVDENANIIFGATFDQAMEGRVRVSVLATGIDGRNNKSETSPISQSEDSEKEKFKWPYSQSESTQDKTLGTKPAEQVS

SEQ ID NO: 18013 - protein, 281 aa, Triticum aestivum
  misc_feature (73)..(73): Xaa can be any naturally occurring amino acid
  misc_feature (96)..(96): Xaa can be any naturally occurring amino acid
  misc_feature (112)..(112): Xaa can be any naturally occurring amino acid
  misc_feature (162)..(162): Xaa can be any naturally occurring amino acid
  misc_feature (198)..(198): Xaa can be any naturally occurring amino acid
RGKVLCDLGTRREEGFINEVAPIGLIHHANIVRLLGLCSEGLRRALIYDFMPNGSLEKYIFAHVSDISRQLLXPNKMLDIALGIARGMEYLHQGCXKRILHFDIKPHNILLXDYNFNPKISDFGLAKLCSRDQSIVTLTATRGTMGYIAPELYSRNFGGVSXYKSDVYSFGMLVLEMVSGRRNTDPSVESQNEVYLPXWIYEKITTEQEWELNLEMTAEDKEKMRQLTIVALWCIQWNPKNRPSMTKVVNMLTGRLQNLQIPPKPFVSSENHPMLQNRANT

SEQ ID NO: 18014 - protein, 299 aa, Thioreductor micantisoli
AHDVTLLSGQTGRLTHFIVEPFTPHTQEQEYYISATTVGEDDVLYLSAEGGMEVEENWDKVNEIHIPIDLNDNDIEKAIKADIPAGITADKVEEFAAFAFAFYKFYRDLNFAYLEINPIVMLDNNKMAILDLVARLDDTAGFLMADKWGDIEYPTAFGMEDKSPEEEAIALADSKSGASLKLTILNPMGRIWTMVAGGGASVVYADTIADFAGVKDLANYGEYSGGPTTAETEFYADTIFDLMTRHQDPRGKILIIGGAIANFTDIAKTFTGIINAFEKYADKLKENKTKIYVRRGGPN

SEQ ID NO: 18015 - protein, 495 aa, Salmonella typhimurium LT2
MSRNTEATEEVGIWTGGRLNYKEGFFTQLPTDELAKGISEEVVRAISAKRNEPEWMLEFRLNAYRAWLDMDEPHWLKAHYDKLNYQDYSYYSAPSCGNCDDSCVSQPGAVQQTGANTFLSKEVEDAFEQLGVPVREGKEVAVDAIFDSVSVATTYREKLAEQGIIFCSFGEAIHDHPDLVRKYLGTVVPGNDNFFAALNAAVASDGTFIYVPKGVRCPMELSTYFRINAEKTGQFERTILVADEGSYVSYIEGCSAPVRDSYQLHAAVVEVIIHKDAEVKYSTVQNWFPGDNNTGGILNFVTKRALCEGENSKMSWTQSETGSAITWKYPSCILRGDNSIGEFYSVALTSGHQQADTGTKMIHIGKNTRSTIISKGISAGHSQNSYRGLVKIMPTATNARNFTQCDSMLIGADCGAHTFPYVECRNNSAQLEHEATTSRIGEDQLFYCLQRGISEEDAISMIVNGFCKDVFSELPLEFAVEAQKLLAISLEHSVG

SEQ ID NO: 18016 - protein, 348 aa, Staphylococcus aureus subsp. aureus MW2
MTYNIVALPGDGIGPEILNGSLSLLEIISNKYNFNYQIEHHEFGGASIDTFGEPLTEKTLNACKRADAILLGAIGGPKWTDPNNRPEQGLLKLRKSLNLFANIRPTTVVKGASSLSPLKEERVEGKDLVIVRELTSGIYFGEPRHFNNHEALDSLTYTREEIERIVHVAFKLAASRRGKLTSVDKENVLASSKLWRKVVNEVSQLYPEVTVNHLLVDACSMHLITNPKQFDVIVCENLFGDILSDEASVIPGSLGLSPSASFSNDGPRLYEPIHGSAPDIAGKNVANPFGMILSLAMCLRESLNQPDAADELEQHIYNMIEHGQTTADLGGKLNTTDIFEILSQKLNH

SEQ ID NO: 18017 - protein, 877 aa, Staphylococcus aureus subsp. aureus NCTC 8325
MKKRIDYLSNKQNKYSIRRFTVGTTSVIVGATILFGIGNHQAQASEQSNDTTQSSKNNASADSEKNNMIETPQLNTTANDTSDISANTNSANVDSTTKPMSTQTSNTTTTEPASTNETPQPTAIKNQATAAKMQDQTVPQEANSQVDNKTTNDANSIATNSELKNSQTLDLPQSSPQTISNAQGTSKPSVRTRAVRSLAVAEPVVNAADAKGTNVNDKVTASNFKLEKTTFDPNQSGNTFMAANFTVTDKVKSGDYFTAKLPDSLTGNGDVDYSNSNNTMPIADIKSTNGDVVAKATYDILTKTYTFVFTDYVNNKENINGQFSLPLFTDRAKAPKSGTYDANINIADEMFNNKITYNYSSPIAGIDKPNGANISSQIIGVDTASGQNTYKQTVFVNPKQRVLGNTWVYIKGYQDKIEESSGKVSATDTKLRIFEVNDTSKLSDSYYADPNDSNLKEVTDQFKNRIYYEHPNVASIKFGDITKTYVVLVEGHYDNTGKNLKTQVIQENVDPVTNRDYSIFGWNNENVVRYGGGSADGDSAVNPKDPTPGPPVDPEPSPDPEPEPTPDPEPSPDPEPEPSPDPDPDSDSDSDSGSDSDSGSDSDSESDSDSDSDSDSDSDSDSESDSDSESDSESDSDSDSDSDSDSDSDSDSDSDSDSDSDSDSDSDSDSDSDSDSDSDSDSDSDSDSDSDSDSDSDSDSDSDSDSDSDSDSDSDSDSDSDSDSDSDSDSDSDSDSDSDSDSDSDSDSDSDSDSDSDSDSDSDSDSDSDSDSDSDSDSDSDSDSDSDSDSDSDSDSDSDSDSDSRVTPPNNEQKAPSNPKGEVNHSNKVSKQHKTDALPETGDKSENTNATLFGAMMALLGSLLLFRKRKQDHKEKA

SEQ ID NO: 18018 - protein, 297 aa, Acinetobacter sp. ADP1
MSLALLQQHSPKIIDGKAIAQSVLEEVKLEVERYKAQGIEPCLAVVLVGEDPASQVYVRNKVQKAAFVGIRSLEFRFDADLSEDELLTQIDRLNTERGVHGILVQLPLPKQINETRVLERIHPQKDVDGFHSENVGGLSQGRDVLTPCTPTGCIRLLKDSLGDDLSGLHAVVIGRSNIVGKPMAALLLKESCTVTVVHSKTRNIEQVCQQADIVVAAVGKANMINASYLKADAVVIDVGINRIMTHEKTRLVGDVDFEDALPMVSAITPVPGGVGPMTIAYLMKNTLQAVRLQHPQI

SEQ ID NO: 18019 - protein, 317 aa, Thermus thermophilus HB8
MNVLLMAYGTPYAPEEVEPYYTDIRRGRRPSEELLKELAERYEAIGKSPLNEITLAQAVRLQALLNLEAPPYPKRLLSPFPPRAPHGPARVYVGTKHWHPSIGEAVAAMHEDGVRRAVAIVAAPHYSLRSVAEYREKVDSALKALPEPIDFVWVESYEAHPGLIAAYARRLEEVIWRLKNPGKAAYVFTAHSIPLSAVEKGDPYPRQVEKTAELIAKKLALPRFHVAYQSAGRTPEPWLGPDINELLRTLKEEGYEEVAVQAVGFPADHLEVFYDLDLEAQATARELGLRLLRARSLNADLDYIQVLKDLVEAAWPR

SEQ ID NO: 18020 - protein, 97 aa, Zea mays
DISATTALLLLLAAGAGTATAAVSCGEVTSSVAPCLGYAMGSAASPSAACCSGVRSLNSRASSTADRQATCNCLKSMTDRLGGGFSMVNAGNIPGKC

SEQ ID NO: 18021 - protein, 579 aa, Hordeum vulgare subsp. vulgare
MGEVAAEMYTQDGTVDIKGNPALKKDTGNWRACPYILANECCERLAYYGMSTNLVNFMKDRMGMANAAAANNVTNWGGTCYITPLIGAFLADAYLGRFWTIASFMIIYIFGLGLLTMATSVHGLVPACASKGVCDPTPGQSAAVFIALYLIALGTGGIKPCVSSFGADQFDEHDDVERKSKSSFFNWFYFSINIGALVASSVLVYVQTHVGWSWGFGIPAVVMAIAVGSFFVGTSLYRHQRPGGSPLTRIAQVLVAATRKLGVAVDGSALYETADKESGIEGSRKLEHTRQFRFLDKAAVETHADRTAAAPSPWRLCTVTQVEELKSVVRLLPIWASGIVFATVYGQMSTMFVLQGNTLDASMGPKFKIPSASLSIFDTLSVIAWVPVYDRILVPAVRSVTGRPRGFTQLQRMGIGLVVSMFAMLAAGVLELVRLRTIAQHGLYGEKDVVPISIFWQVPQYFIIGCAEVFTFVGQLEFFYDQAPDAMRSMCSALSLTTVALGNYLSTLLVTVVAKVTTRGGKQGWIPDNLNVGHLDYFFWLLAALSLVNFAVYLLIASWYTYKKTAGDSPDAKGGAHDQ

SEQ ID NO: 18022 - protein, 391 aa, Zea mays
MLASAATVKPSTAAAAATCKAAFKPLHLPPLPAAAGLRPLSLSVSARPLYRQEHVLASVAVAAAGRNERATSPAPPSATADGARPLEVAAPAETGRRAKIGVYFATWWALNVIFNIYNKKVLNAFPYPWLTSTLSLAAGSAIMLASWATRIAEAPQTDLDFWKALTPVAIAHTIGHVAATVSMAKVAVSFTHIIKSGEPAFSVLVSRFFLGEHFPAPVYFSLLPIIGGCALAAVTELNFNMVGFMGAMISNLAFVVRTIFSKKGMKGKSVSGMNYYACLSIMSLVILLPFAVAMEGPKVWAAGWQTAVAEIGPNFVWWVAAQSVFYHLYNQVSYMSLDEISPLTFSIGNTMKRISVIVASIIIFQTPVQPINALGAAIAILGTFIYSQAKQ

SEQ ID NO: 18023 - protein, 447 aa, Salmonella typhimurium LT2
MKKVKKLSLTDLVLYGLVFMVPIAPVSLYGVVYNLSHGMVALVYIIGAIAMFFTAYSYSTLSQHISSSGSAYAYAGVCINPAVGFLTGWILLLDYLLFPTLVAVLGGVAVHAILPQIPVWVWPLIYVAIGTGVNYLGIQQTAKFDKLLVFIQLGILAIFVLLIVRLMLLDSSQITLSFRPFFDSQWFTPGLIATAISVAALNFLGFDAISTLSEESEGGGRAVSKATLLALVLATVLFIIVVAFAAFATGNVDRFAEGNATNEAFFTIAGNVGGIWLKVAFSIIVAFVCAVGNIITAQTAVSRVLFSMGRDRMLPAFLAHVHTTRKTPDYAILFTGGVTLLLSYLFSGKIESISTLVNFGALFAFFVVNLCVFILFNFRMKAQRRIFAHVISPIMGMIVIGYVCLNMNIHALILGISWAAIGIAILCYRKAHNQNIAIDLEGKKLLD

SEQ ID NO: 18024 - protein, 347 aa, Sinorhizobium meliloti 1021
MKSYSIALIPGDGIGQDVTDAAWQVLSTVARHSGFTLTGTSFPWSCAFYKETGAMMPADGIEALRPFDAILLGSVGWPAEVPDSISLHGLLLPIRKAFVQYANIRPHRLLSGVEGPLKASDFDILCVRENTEGEYSGAGGRVHQGTADEVAVETSIFTRAGVERILRFAFEQARQRRGKLASVTKSNAQKHSMVFWDEVTRQLADEYPDVEVTSYHIDAMAARVVMAPESLDVVVASNLFGDILTDLGAAIQGGLGFAASANINPDRSAPSMFEPVHGSAPDIAHLGIANPIAAIWSGAMMLEHLGEREAAGMIMAALERTTIRGIGTVPGKDRTRSITAAVLAALD

SEQ ID NO: 18025 - protein, 444 aa, Listeria monocytogenes str. 1/2a F6854
MNPDPESQQIILQLILIVVLTMLNAFFASAEMALVSLNKNRVKSQAETGDKKAVMLAKLVDDPSKFLATIQVGITLAGFFSSASAATSIATRLESVFGGSSFAKELSIIVVTIVLSYITLVFGELYPKRLALQKSEKIARVSVRPIMAVGVVLRPFVKFLSFSTDILVKLTRMEKNTDNEKMTREEMQLLIETGRRDGVIEVEELQMLRGVFEMDNKYAREVMVPRTDAFMIDAETESEELCDALLSENFSRVPVYTGDQDSVLGILHMKDFFAEARKSGFENIDVKGLVKDAYFAQETMFIDDLLKNMQRTRNQMAILMDEYGGVAGIVTVEDLLEEIVGEIDDENDVFSDEVKKVDETTFIVEGRMPLDDFNKMFHVELPSRGVDTVAGFVLTLTGTIPEEDDKVVVEYGTLRFTVEEMNDARLVSVRVEKDIQTSELEQMA

SEQ ID NO: 18026 - protein, 484 aa, Sinorhizobium meliloti 1021
MRLKDRELFRQLGLIGGEWIAGASGVVVDVIDPANQAVLGTVPDMGTAETRAAIEAANAAFGPWKKKTHAERAAVLERWHALMIENLEDLAVLVTMEQGKPLEEARGEIRYGAAFVKWFAEESRRIGGHTIPSPTSDRRIVVLKEAVGVCAIVTPWNFPNAMITRKVAPALAAGCTVVIKPSEFTPFSALALGVLAERAGIPAGVVNIVTGMPTAIGNEFMTNETVRKISFTGSTRVGSLLMRGAADSVKRLSLELGGNAPFIVFDDANLDLAVEGAIASKFRNGGQTCVCANRILVQAGVYDAFAEKLGARVNAMKVGPGTEPGIAIGPMINEAAIDKIDRHVEDAIAKGAKLAARGRSVPEGRQYTAPIVLTGATTDMLLASEETFGPVAPLFRFETEDEAIAIANGTPFGLAAYFYTEGLKRSWRVAEALEFGMIGLNTGAISTEVAPFGGVKQSGLGREGAQVGIEEYLEMKSFHIGGLD

SEQ ID NO: 18027 - protein, 488 aa, Oryza sativa
  misc_feature (280)..(280): Xaa can be any naturally occurring amino acid
  misc_feature (291)..(291): Xaa can be any naturally occurring amino acid
MAMAVLLRKVWGSVLARAAAGAAPPEAFAAAASPRRPQAAGEYGSLGALDVLPIDVLAQILRLLGPADAARSTAVCRAWRLLASDNGLWAFFLRLGPDPWELVVFAETHLGAGPALHPGLYYDSSPQLSFKHVYTRRAVVPGSIIVDGGSGYCKYGWSKYAAPSGRCATFLEFGNIESPMYARLRHFLSTIYTRMQVKPSTQPIIVVLPLCHSDDTESARASRKQYRDTLYSVLFDMNVPAVCSVDQAVLALYAAKRTSGIVVNIGFNATSIVPIFQGRXVMHEIGVETVXGQGALKLTGFLKGLMQQRNITFESLDTGPTIKGTLCAGAADYEAEKRKDTQASCEVDGEGWFTLSEERFKTAEILFQPQIGGVRAMGLHKAVSLCMDHCYNSEVFGDDNWYKTVVLSGGSSCLPGLSERLEKELRELLPAHISEGIRVIPPPFGTDSAWFGAKMISNVSTFTEAWCIKKKQFRQKTRRNGPSFVNVW

SEQ ID NO: 18028 - protein, 311 aa, Chlamydomonas reinhardtii
VCRDFLFLEKVKRQCEKTLHRPATSEEIAAAVAMDVESLKLRYDAGLKAKELLLKSNYKLVMTVCKSFVGKGPHIQDLVSEGVKGLLKGVEKYDATKGFRFGTYAHWWIRQAVSRSLAETGRAVRLPMHMIEQLTRLKNLSAKLQTQLAREPTLPELAKAAGLPVTRVQMLMETARSAASLDTPIGGNELGPTVKDSVEDEREAADEEFGSDSLRNDMEAMLLELPEREARVVRLRFGLDDGKEWTLEEIGEALNVTRERIRQIEAKALRKLRVKTIDVSGKLMEYGENLEMLMDGSREMAARTSSGTRKT

SEQ ID NO: 18029 - protein, 662 aa, Photobacterium profundum SS9
MISTNLLLHKQSLNSTSMQTRRTRYTRKRQLNMAIEINVPDIGADEVEVTEILVSVGDKVEEEQSLITVEGDKASMEVPASQAGIVKEIKIAEGDTVSTGSLIMLFVEEKSEAEGAAAAPAVEAAAPVAAAPAAAELKEVHVPDIGGDEVEVTEIMVAIGDSIEEEQSLLTVEGDKASMEVPAPFAGVLKEIKIAAGDKVSTGSLVMIFEVAGSGASVAPAAPVAQAAAPVAAAPVASAAKEVNVPDIGGDEVEVTEIMVAVGDTVEEEQSLITVEGDKASMEVPAPFAGTVKEIKIVAGDKVSTGSLIMVFEVAGSAPAPVAQAAAPVAASAPAAKPAQAAAPAGDFQENNEYAHASPVVRRLAREFGVNLSKVKGTGRKSRIQKEDVQNYVKDALKRLESGAAASAKGGDGSALGLLPWPKIDFSKFGEIETKPLSRIKKISGANLHRNWVMIPHVTQWDNADITALEAFRKEQNAIEAKKDTGMKITPLVFIMKAVAKALEAFPSFNSSLSDDGASLILKKYVNVGIAVDTPNGLVVPVFKDVNKKGIYELSEELMAISKKARSGKLTASDMQGGCFTISSLGGLGGTAFTPIVNAPEVGILGVSKSEMKPVWNGKDFEPRLMLPLSLSYDHRVVDGAEGARFITYLNGCLSDIRRLVL

SEQ ID NO: 18030 - protein, 230 aa, Camellia sinensis
MSPSQSPSVAQVQIESHVFPPTVKPPGTSKPFFLGGAGERGLEIQGKFIKFTAIGVYLEDSAIPSLAVKWKGKTAEELTDSVDFFRDIVSGPFEKFTQVTMILPLTGQQYSEKVTENCVAYWKAVGTYTDAEAKAIEKFIEVFKDETFPPGGSILFTQSPLGSLTIAFSKDGSLPETGTVVMENKQLSEAVLESIIGKHGVSPAAKKSLAARMSELLKEKPEAQTAAAAE

SEQ ID NO: 18031 - protein, 117 aa, Flaveria trinervia
DESWCQGLDGLASRSAAYYQQGARFAKWRTVVSIPNGPSALAVKEAAWGLARYAAISQDNGLVPIVEPEILLDGEHGIDRTFEVAKKVWAEVFFYLAENNVMFEGILLKPSMVTPGA

SEQ ID NO: 18032 - protein, 599 aa, Bartonella henselae str. Houston-1
MTNHPRMQESANGKKMLGAEMVVQALIDQGVKHLFGYPGGAVLPIFDVLYQQDSLQHILVRHEQAAGHAAEGYARSTGKVGVMLVTSGPGATNAVTPLQDALMDSIPLVCFSGQVSTTVIGTNGFQEADTVGITKSCTKQNWLVKDVNDLAAIIHEAFAVAQSGRPGPVLVDIPKDIQLASGVYRAPQVLVSRHFSPQLERNIEAIECAVSLLEEAKRPVIYSGGGVISSGLQAVQLLRDLVQLGDFPITSTLMGLGAYPASGKNWLGMLGMHGTYEANMAMHDCDVMLAVGARFDDRITGRLDAFAPHARIIHIDVDPSSINKIVKVEVPIIGDVADVLGDMMQCLHRQQPIFKSEGRDAWWKQIDCWRARNSLAYPKKKDIIMPQYALERLYALTKDVNAYITTDVGQHQMWAAQYYHFDEPNHWMTSGGLGTMGYGLPAAIGVQIAHPDAFVVCISGDASIQMNIQELATAMQYNTPVKIFILNNQYMGMVRQWQQLLHGNRLSHSYTESMPDFVKLAQAYGGIGIHCSKPDELDDKIQQMIDCDKPVLFDCRVDNLENCFPMIPSGCAHNDMLLPDEAHDEAVANAISAEGQCLV

SEQ ID NO: 18033 - protein, 263 aa, Flaveria trinervia
MDLKHPTTHTPPHSHSTNLLTSTNGKHHHHHHHPPPHTAVAYKQCLKNHAVGIGCHAVDGCGEFMPAPTYNPSQPSSFKCAACGCHRNFHRREPTIATRTHFIDFHHHHPSTSASLSPPSPAPELTNFAVGPHLLLSLGTAAEQNHMVATPETPAAIKISGRKRFRTKFSQDQKEKMLTFAEKVGWKLQRCDDKMVADFCSEIGIRRRVLKVWMHNNKNTSAKKEQETTATATVVTTAITVATGVDSAGVRSDDQENGSSFSS

SEQ ID NO: 18034 - protein, 398 aa, Burkholderia mallei ATCC 23344
MEFEMLETETNGTIIKVIGVGGAGGNAVQHMINKGVQGVDFVVMNTDAQALSRSRAPSVIQLGNTGLGAGAKPEMGRAAAEEARERIADALRGAHMVFITAGMGGGTGTGAAPVVAQIAKEMGILTVGVVSKPFEFEGGKRMRVAEAGSQQLEDHVDSLIVVLNDKLFEVMGDDAEMDKCFQCADDVLNNAVAGIAEIINVDGLVNVDFEDVKTVMGEQGKAMMGTATVAGVDRARLAAEQAVASPLLEGVDLSGARGVLVNITSSRSLRLSETREVMNTIKSYAADDATVIFGAVYDDAMGDALRVTVVATGLGRAAKKQQSAPMTLLRTGTDNQPISAAPQGYAASHHVSTGDYGAFDTPAVWRNSRETAASHVQALQEKGVDTYDIPAFLRKQAD

SEQ ID NO: 18035 - protein, 905 aa, Staphylococcus aureus subsp. aureus MSSA476
MKKRIDYLSNKQNKYSIRRFTVGTTSVIVGATILFGIGNHQAQASEQSNDTTQSSKNNASADSEKNNMIETPQLNTTANDTSDISANTNSANVDSTAKPMSTQTSNTTTTEPASTNETPQLTAIKDQATAAKMQDQTVPQEANSQVDNKTTNDANSIATNSELKNPQTLDLPQSSPQTISNAQGTSKPSVRTRAVRSLAVAEPVVNAADAKGTNVNDKVTAKDFQLEKTTFDPNQSGNTFMAANFTVTGQVKSGDYFTAKLPDSVTGNGDVDYSNSNNTMPIADIVNDKNEVVAKATYDILTKTYTFVFTDYVNDKQNINGKFSLPLFTDRAKAPKSGTYDANINIADEMFNNKITYNYSSPIAGIDKPNGANISSQIIGVDTASGQNTYKQTVFVNPKQRVLGNTWVYIKGYQDKIEESSGKVSATDTKLRIFEVNDTSKLSDSYYADPNDSNLKEVTDQFKDKITYKYQNVASINFGDINKTYVVLVEGHYDKTGKNLKTQVIQENVDPATGKDYSIFGWNNENVVRYGGGSADGDSAVNPKDPTPGPPVDPEPSPDPEPEPSPDPDPEPTPDPEPSPDPDPDSDSDSDSGSDSDSDSDSDSDSDSDSGSDSDSDSDSDSESDSESDSDSDSESDSDSDSDSESDSDSDSDSDSDSDSDSDSDSDSDSDSDSDSDSDSDSESDSDSDSDSESDSDSDSDSDSDSDSDSDSDSDSDSDSDSDSDSDSESDSDSDSDSDSDSDSDSDSDSDSDSDSDSDSDSDSDSESDSDSDSDSDSDSDSDSDSDSDSDSDSDSDSDSESDSDSDSDSDSDSDSDSDSDSDSDSDSDSDSRVTPPNNEQKAPSNPKGEVNHSNKVSKQHKTDALPETGDKSENTNATLFGAMMALLGSLLLFRKRKQDHKEKA

SEQ ID NO: 18036 - protein, 266 aa, Nocardioides sp. JS614
MTSPATDAPHCLVEQDGHKLVVTMNRPETRNALSGEMLAIMEEAWDRVNQDDAIRACILTGAGGYFCAGMDLKAATKRPPSESFESGFDPSVIKGLLKGFRLTKPLIAAVEGPAIAGGTEILQGTDIRIAGESARFGISEARWSLYPMGGSAVRLPRQIPYTVAMDLLLTGRHIKAPEAKEIGLIGYVVPDGQALAKAHEVADLVCANGPLAVQAILRTARAAEGRHEADCWADDAAVGMAVFASDDAKEGPRAFAEKRSPEFQGR

SEQ ID NO: 18037 - protein, 322 aa, Wolbachia endosymbiont of Asobara tabida
LCDKKIQLGINLTKGLGAGALPDVGRGAAEESIDEIMEHIKDSHMLFITAGMGGGTGTGAAPVIAKAAREARAAVKDRAPKEKKILTVGVVTKPFGFEDVRRMRIAELGLEELQKYVDTLIVIPNQNLFRIANEKTTFSDAFKLADNVLHIGIRGVTDLMVKPGLINLDFADIETVMSEMGKAMIGTGEAEGEDRAISAAEAAISNPLLDNVSMKGAQGILINITGGGDMTLFEVDAAANRVREEVDENANIIFGATFDQAMEGRVRVSVLATGIDGRNNKSETSPISQSEDSEKEKFKWPYSQSESTQDKTLETKPAEQVS

SEQ ID NO: 18038 - protein, 586 aa, Gibberella zeae PH-1
MGFLTLVLHKLSICPFSFLLFILYASAVPLATTNTRPSYHITPEKKWMNDPQRPFFLGDEWHLYYLYNSNFDSSNPGSGGTEWYHITSTDMVHWTRRGVVLEKYKPNPPSGIILGDIETGSAVVDINNTAGFGRSAVVAIVTQMADGVQQQSLFYSTDNGYSFIPYEGNPVMPNPSPSAKPAFRDPKIFWDDKEGRWVMSLAEGDKIGFYTSIDLKTWAYVSEFKPENAGVDLGILECPDLYQIDLDGDSTKRTWILALGANGYRYNRTTGTAYWTGKWDGNGFTATESFPQWMDDGPDFYATVSWENPDDRYGSRYAIAWMNSWDYAASLPYYADFAGQDSLVREVKLKTINSSPTLVSIPIGGYGEIFASPKSVSGKTITTDPASASLPSGMEQGAYIIRATISKNDGDKGNEVRFVIKSDGTFSTTVGYDFVHSQAFLVRDSDGSATDSMAAGPKQAYDTVRTAPDPTGGSTVKLVIYVDWNSVEIFVNDGEAVLSGLIYPNQEANGIQVVSDIGSLTLVSFSYAACDSIDYLVINCQLSPPVDLFIISRAISDSFSLTELRHFRILSSCVNICKSVISRHLR

SEQ ID NO: 18039 - protein, 127 aa, Arabidopsis lyrata subsp. lyrata
TEKDFLCKILGEMIKAGATTVGFADTVGINMPPEFGELVAYVKENTPGADDIVLAIHCHNDLGVATANTISICAGARQVEVTINGIGERSGNAPLEVVMALKCRGEYLMNGVYTNIDTRQIMATSKM

SEQ ID NO: 18040 - protein, 540 aa, Zea mays
  misc_feature (86)..(86): Xaa can be any naturally occurring amino acid
  misc_feature (112)..(112): Xaa can be any naturally occurring amino acid
  misc_feature (121)..(121): Xaa can be any naturally occurring amino acid
MAVTRVAVAAALSAAPISSRRHRVALPSACRLLPASATCCNSRAAMSLQAAAAAPAAGAVDEETPASSPPSDASKGVENLVIIGSXPAGYPAAIYAARANLKPVLFERGQNXGGAPDGQLXMTTTEVDLVPPPPPLVPPPPPNFPGFPDGITGPDLMDRMRKQAERWGAELYQEDVEFVNVKSSPFVIRSSDREVKCHSLIIATGATAKRLRLPREDEFWSRGISACAICDGASPLFKGQVLAVVGGGDVATEEAVYLTKYARHVHLLVRKDQLRASKAMQDRVLNNPNITVHFQYRSHGMFVSNDKGQMSGVHLKRRDTGEESVLTVKGLFYGIGHTPNSQLLQGQIELDSAGYILVKEGSAKTSVDGVFAAGDVQDHEWRQAITAAGSGCIAALSVERYLVANDLLVEFHQPVQEETKKDITDKDVQMGFDISHRKHKGQYALRKLYHESPRLICVLYTSPTCGPCRTLKPILSKVIDEYGEFVHLVEIDIEEDPEIAEAAGIMGTPCVQFFKNKEMLRTVSGVKRKKEYREFIEANK

SEQ ID NO: 18041 - protein, 322 aa, Wolbachia endosymbiont of Asobara tabida
LCDKKIQLGINLTKGLGAGALPDVGKGAAEESIDEIMEHIKDSHMLFITAGMGGGTGTGAAPVIAKAAREARAAVKDRAPKEKKILTVGVVTKPFGFEGVRRMRIAELGLEELQKYVDTLIVIPNQNLFRTANEKTTFSDAFKLADNVLHIGIRGVTDLMVMPGLINLDFADIETVMSEMGKAMIGTGEAEGEDRAISAAEAAISNPLLDNVSMKGAQGILINITGGGDMTLFEVDAAANRVREEVDENANIIFGATFDQAMEGRVRVSVLATGIDGRNNKSETSPISQSEDSEKEKFKWPYSQSESTQDKTLETKPAEQVS

SEQ ID NO: 18042 - protein, 127 aa, Arabidopsis lyrata subsp. lyrata
TEKDFLCKILGEMIKAGATTVGFADTVGINMPPEFGELVAYVKENTPGADDIVLAIHCHNDLGVATANTISICAGARQVEVTINGIGERSGNAPLEVVMALKCRGEYLMNGIYTNIDTRQIMATSKM

SEQ ID NO: 18043 - protein, 521 aa, Bdellovibrio bacteriovorus HD100
MLDSSLLEQLRSVFGSLENTVELVYENSSHEDQKDLLDMLQSVASTSDKITLTQNTSGTSPMPQFRIDYKGKHTGIVFKGIPGGHEFTSLILAILNTDGKGKLLDSVIADRVRRLNKNITIQSYISLTCENCPEVVQALNQIALIHGSLRHEIIDGGYVQDDIKTLGIQGVPSLVANAKMFHSGRIQLLDLVSKLESTFGVDANAAPSEPVNKNLGHFDVLVIGGGPAGASAAIYTVRKGLSTAMITEKIGGQVQETKGIENLIGVTYTEGPQLAAQLNQHIASYPVKVLENRRVKKIHTESKVKAIELESGEHLTADAIIVTTGAKWRELGVEGEKEYLGRGVAYCPHCDGPFYKGKKVAVIGGGNSGVEAAIDLAGIVREVVVFEYNDQLKADKILVDKLKSLPNVSIVTSAKTEKVIGDGNKVQQIQYLDRSLNKEEKMDLDGIFVQIGLVPNSQFLKETVELTKFGEIIVDEKGRTSAKGIYAAGDVTTTPYKQIVIAMGEGAKAALAAFEDRMYHS

SEQ ID NO: 18044 - protein, 1241 aa, Zea mays
MPASAATTTTTSSAAPSPSLLPCLHVHAHGRASAAAACCLLVLVTFLVVAACWWDPRTREASSWFLSPPRSAPSSFSSLTSAGGVGGGGEHLLATASSYYSAAAGFRNSTGKEVHQEVRGHGGDDRGFLSFVNSSFGYDEAPPPSAPAPASPVTGGSDEVIIQSTPPQVERRRDDVKLERLELGLARARSAIMEAIRKKDKVSPLPDKDYVPMGPVYRNAHVFHRSYLEMERQLKVYVYEEGEPPVFHDGPCRSIYSTEGRFIHSMETETEAEEGRRLRTRDPARAHVFFLPFSVVKMVQTIYEPGSRDMAPLKRTVADYVRVLSSKYPYWNRSLGADHFMLSCHDWGPYVSSANAQLFGNSIRVLCNANTSEGFDPARDVSLPQVNLRSDAVERQVGGPSASRRPVLAFFAGGNHGPVRPALLAHWGPGGRRGGDPDVRVSEYLPRGGGAPSYADMMRRSRFCLCPGGYEVASPRLAEALYLGCVPVVVDDGEYALPFADVLDWDAFALRLRVADIPRLKEILAAVSPRQYIRMQRRVRMVRRHFMLHGGPPRRRHACLIFESSVRWLHFDTKVGGILVGPRDAGAAAIQNYRHDDIHRSHPRAQQTTPTRWLVLGRQATPRPNPEAPPPPIDRPSTHAPLGALPLRYARGPAAPRRAGAFLSLTDRATDPTLPHARSPRAPPVSGDGPLIHRRRRRRSVALQRPCLRPGTCPRLLPVPQSVLCFCLIARAALGTSSRLTSRIPPPQSRVRLLIGGEFVESRADEHVDVTNPATQEVVSRIPLTTADEFKAAVDAARTAFPGWRNTPVTTRQRVMFKFQELIRANMDKLAENITTEQGKTLKDAWGDVFRGLEVVEHACGMGTLQMGEYVSNVSNGIDTFSIREPLGVCAGICPFNFPAMIPLWMFPIAVTCGNTFVLKPSEKDPGAAMMLAELAMEAGLPKGVLNIVHGTNVCLFGSNPALPMQDVVNNICDDEDIKAVSFVGSNTAGMHIYSRASAAGKRVQCNMGAKNHAIILPDADRDATLNALIAAGFGAAGQREDELVKRASGLVVSSGMVNDADLGPVISRQAKDRICKLVQSGVDSGARILLDGRKIVVPRYEDGNFVGPTILADVKSDMECYKEEIFGPVLLLMKAESLEDAIQIINRNKYGNGASIFTTSGVSARKFQTDIEAGQVGINVPIPVPLPFFSFTGSKASFAGDLNFYGKAGVQFFTQIKTITQQWKESPVQRVSLSMPTSQK

SEQ ID NO: 18045 - protein, 121 aa, Glycine max
MAETTQSNAELLEWPKKDKRRFLHVVYRVGDLDRTIKFYTECFGMKLLRKRDIPEEKYANAFLGFGPEQSHFVVELTYNYGVTSYDIGTGFGHFAIATPDVYKLVEDIRAKGWKCHQGRPG

SEQ ID NO: 18046 - protein, 322 aa, Wolbachia endosymbiont of Asobara tabida
LCDKKIQLGINLTKGLGAGALPDVGKGAAEESIDEIMEHIKDSHMLFITAGMGGGTGTGAAPVIAKAAREARAAVKDRAPKEKKILTVGVVTKPFGFEGVRRMRIAELGLEELQKYVDTLIVIPNQNLFRIANEKTTFSDAFKLADNVLHIGIGGVTDLMVMPGLINLDFADIETVMSEMGKAMIGTGEAEGEDRAISAAEAAISNPLLDNVSMKGAQGILINITGGGDMTLFEVDAAANRVREEVDENANIIFGATFDQAMEGRVRVSVLATGIDGRNNKSETSPISQSEDSEKEKFKWPYSQSESTQDKTLETKPAEQVS

SEQ ID NO: 18047 - protein, 740 aa, Cryptococcus neoformans var. neoformans JEC21
MLRAFFKHSRAFITTRHHIHTMSVTDTAILDRLAQLQIAHPDVISHAPVKGAAEWKAELTLASANHATTPLTKTLLFKPKTAKSAVPTPVMVLAQENTETPSGAIGKLLELKELRLASEDLIKEVIPSAASKDDVSAFALSNPVPETLHLLLDAELAKSEEQHAVHLTSSATTLLIKGSDIKAYLDSLVEGEGVKIVDFAELKASAPAPTEKKPAAPKEAKAETSTAAADDDRYEMAIRFKKDEDFSGWYTDVLLKGQMLDYYDISGCYILRPWSYSIWQIIQNWFDDEIKKLGVQDCYFPMFVSSARLEKEKDHIEGFAPEVAWVTKAGSSDLDEHIAIRPTSETVMYPYYAKWINSHRDLPLKLNQWNSVVRWEFKNPQPFLRTREFLWQEGHTAFLDKADADKEVLDILDLYRKVYEDILAVPVIPGKKSEKEKFAGGDYTTTVEGFIPTTGRGIQAATSHHLGQNFSKMFDITVESPDKSQGRLYAYQNSWGLSTRSLGVMVMVHGDDQGLVLPPRVALQQVAIVPVGLSKGEGKNQPIYDACLKLERELVAAGIRAKADLRDGYTPGWKFNDWEMRGVPLRLELGPRDIANNSTLSVRRYDNHKTPMPLSDIANTVRTYLDDIQKSMLDRAAATFNDRLKIVTNWEDVVPTLDAKNVLVLPWCETEECEDEIKEKSKSLANKGAAEDAKAPSAGAKSLCIPFDQKRFGEFPQGEEQKCVQCGKKAKSWTLFGRSY

SEQ ID NO: 18048 - protein, 417 aa, Streptococcus mutans UA159
MATEIVMPKLGLTMTEGLINQWLVKEGDTVAAGDPVLEISSEKLTSEVEAPEAGVILKIVKGEGETVPCKQIIAWIGQEGEAVPDAAGDAPEVDTEAESEVASAGQTVVPEESRTVSAAPVAEKHEDGRIFITPLARKIAKEKGLDITYIKGTGGNGRITRRDVEAFNPASIPTAEPVTALSAPTNVNYGVGLTGIRKVIAERMMSSIHSSAQLTLHRKADVTPLMAFRQDIKTKVNAPLENGEIGITTLLTKAVTKALKDYPEANAWYAGGQYEEKEDIHIGMATALSDGLVVPVIRHADKLTLSDLGRTIKEEAEQVRKGTLDPSLYSGSTFSITNLGAQGIEYFTPILNAPEVAILGVGAIQKALTLDENGQVAEKQFLPLSLTFDHQVLDGAPAAEFLGAVISYLEDAYSLVF

SEQ ID NO: 18049 - protein, 343 aa, Streptococcus mutans UA159
MARELLFMKAINEALDMAMAKDDKIILLGEDIAGGVKVKHLEEQNEEAWGGVMGVTSGLMAKYSRDRVIDTPLSEHGYMSASVGMALTGLHPVPELMFNDFIGFCFDALIGQGSKMRYMFGGKAKVPMTVRTMHGAGASAAAQHSGSYYGIFGSIPGIKVVVPATPYDAKGLLLSALEDDNIVIFSEDKTLYGFKGEVPEDYYTVPIGKAVVRREGNDLTIVTIGKMLYVAYEVADRLAKDGISVEVIDLRTVAPWDQETVLNSVKKTGRLIVIDESNPHNNTATDIASVVNDKAFDYLDGPIKCVCAPNVPVPFAINLEQLYIPNADRVIEAAAELIDDLKA

SEQ ID NO: 18050 - protein, 494 aa, Staphylococcus aureus subsp. aureus NCTC 8325
MTEWTREERYQRIEDVDTEYFKTLKQQVDQSKFRQQFHIQPETGLLNDPNGLIFYKGKYYVSHQWFPLGAVHGLKYWYNYTSDDLINFKAEGPILNPDTKYDSHGVYSGSAFEYNGHLYYMYTGNHRDNHWQRHASQMIARLKEDGSVEKFPKPVISQQPEGYTSHFRDPKVFKYDEKYYAIIGAQNNDQQGRLLLYNTEDIINWHYLGEINTELDDFGYMWECPDYFNVDNQDVILICPQGIEPKGDQFKNIYQSGYILGKFDIEKLTYEHENFVELDNGFDFYAPQTFLDEKGRRVLIGWMGLPEIEYPTDNEGWAHCLTIPRVLNVENGQLKQRPYPALEKLRHNKETALGYANKFTRKLHPYEGKQYELIIDILDNDATEVYFELRTSKTSSTLIAYNKRENKITLDRSDSGLLPTNVEGTTRSTILDTPLKQLQIFVDTSSIEIFCNDGERVLTSRIFPTEDALGIKTSTESGQVYLQFTKYDLKDEHK

SEQ ID NO: 18051 - protein, 322 aa, Pediococcus pentosaceus ATCC 25745
MKRIGIMTSGGDAPGMNLAIRAVARKALSSGLEAYGINYGFAGLVAGDIHEFKAADLDDMVSQGGTMLYSARYPEFAQEESQLKGIEQLKKFGIDALVVIGGDGSYHGALRLTEHGYNTIGLPGTIDNDIPFTDFTIGFDTALNTAVDAIDKIRDTAKSHQRVFAVQVMGRNAADIALWAGVASGADAVIAPGFDYDVEAIANKLKKNRANGKDYGIIVIAEGDANSDAAPEFIDQLKQYGDFDARATVIGHVQRGGVPSAKDRVLASKMGAYAVELLLEGKGGLAVGILENKVQAHNMLDLFDAKHQADDSLYQLSEDLSF

SEQ ID NO: 18052 - protein, 69 aa, Brassica napus
  misc_feature (57)..(57): Xaa can be any naturally occurring amino acid
MADWGPVVIATVLFVLLTPGLLFQLPAHGRIVGFGTMHTSGIAILVHAVLYFALITXFLIAIGVHIYAD

SEQ ID NO: 18053 - protein, 396 aa, Thiomonas cuprina
MAKSKFERTKPHVNVGTIGHVDHGKTTLTAAITTVLSSKFGGEAKAYDQIDAAPEEKARGITINTAHVEYETANRHYAHVDCPGHADYVKNMITGAAQMDGAILVVSAGDGPMPQTREHILLARQVGVPYIIVFLNKCDMVDDAELLELVEMEVRELLSKYDFPGDDTPIIKGSAKLALEGDKGELGEGAILKLAEALDTYIPTPERAVDGAFLMPVEDVFSISGRGTVVTGRVERGIIKVGEEIEIVGLKPTLKTTCTGVEMFRKLLDQGQAGDNVGILLRGTKREEVERGQVLCKPGSIKPHTHFTAEVYVLSKDEGGRHTPFFNNYRPQFYFRTTDVTGAIELPKDKEMVMPGDNVSITVKLIAPIAMEEGLRFAIREGARTVAGGVVAKIIE

SEQ ID NO: 18054 - protein, 744 aa, Hevea brasiliensis
  misc_feature (642)..(642): Xaa can be any naturally occurring amino acid
  misc_feature (645)..(645): Xaa can be any naturally occurring amino acid
  misc_feature (659)..(659): Xaa can be any naturally occurring amino acid
MEACNCIEPQWPADELLMKYQYISDFFIALAYFSIPLELIYFVKKSAVFPYRWVLVQFGAFIVLCGATHLINLWTFTMHSRTVAIVMTTAKVLTAAVSCATALMLVHIIPDLLSVKTRELILKNKAAELDREMGLIRTQEETGRHVRMLTHEIRSTLDRHTILKTTLVELGRTLALEECALWMPTRSGLELQLSYTLRQQNPVGYTVPIQLPVINKVFSCNRAVKISPNCPVARIRPFAGKYMPGEVVAVRVPLLHLSNFQINDWPELSTKRYALMVLMLPSDSARQWHAYELELVEVVADQVAVALSHAAILEESMRARDLLMEQNVALDLARREAETAIRARNDFLAVMNHEMRTPMHAIIALSSLLQETGLTPEQRLMVETILKSSNLLATLINDVLDLSRLEDGSLQLDLGTFNLRAVFREVLNLIKPIASVKKLPVTLNLAPDLPEYAIGDEKRLMQTILNVVGNAVKFSKEGNISITAFVARPESLRDLRFPDFFPVPSDDHFYLRVQVKDEGLGINLQDIPKLFTKFAQNQSLATRNSGGSGLGLAICKRFVNLMEGHIWIESEGLGKGCTAIFVVKLAILECSNESKHPFMQNGPKPNQGAKQTSFMGPESSLLMDDTGGYQDGNKRTFWGTLXCDXTTVSSSDECLRVVXLDHKVVFMDVCMPDGLELLSAYMKDFTKRHERPLIVALYWNANKVTKENCMKVGMDGVILKPVSVDKMRGVLSDLLEHRVLFEAM

SEQ ID NO: 18055 - protein, 181 aa, Arabidopsis thaliana
MASSMLSSAAVVTSPAQATMVAPFTGLKSSAAFPVTRKTNKDITSIASNGGRVSCMKVWPPIGKKKFETLSYLPDLSDVELAKEVDYLLRNKWIPCVEFELEHGFVYREHGNTPGYYDGRYWTMWKLPLFGCTDSAQVLKEVEECKKEYPGAFIRIIGFDNTRQVQCISFIAYKPPSFTEA

SEQ ID NO: 18056 - protein, 468 aa, Deinococcus radiodurans R1
MTVNPEASQINKEYEYGWSDPEKYAIKAPKGLSREVVEMISKAKDEPQWMLDFRLKALDIFLSKPMPEWGADLSGLNLDEIYYYIKPEGFNARSWDDVPEDVKNTFERLGIPEAERAALAGVGAQYESEMVYHNLKEEWEKLGVVFLSIEDGMRQYPDLFREHFATIVPPEDNKFAAINSAVWSGGSFVYIPKGVKVDIPLQTYFRINAESSGQFERTLIIVDEGAQAHYIEGCTAPAYNADSFHSGVIEIVVKEGARFRYSTIQNWSHNVYNLVTQRAAVYGSGVMEWVDGNLGSKVTMKYPACYLLEDGARGEVLSIAMAGRGQHQDAGAKIVHFAPHTSGTIVSKSISKDSGRSSYRGLVKIYEGAKGSKTNVECDALLLDEEARTDTYPYIEIEEKDASVGHEATVSKINDEQILYLQSRGLSEDEAAGLIVRGFIEPIAKELPLEYAVELNRLIELEMEGSVG

SEQ ID NO: 18057 - protein, 241 aa, Erwinia carotovora subsp. atroseptica SCRI1043
MNSALYVGKVRHRRFTPVTHRFDYALFMALIDLDEIPALPHAGIALERFAPASFYRGDYLGGGDIKTKAQDRIAELTGERLTGKVLLLCQLRYLGCYFNPVNFYYLYDEHNQLRWLLAEVRNTPWNERHTYAVVPDGSTTVSKAFHVSPFNPMDMVYHWRLTPPVERLRIHIENHRQGREFDATLLLHRQPLTRAALRKQLWSLPLMTIKIACTIYWQALKLWIKRSPVYPHPQSGRKDNP

SEQ ID NO: 18058 - protein, 224 aa, Triticum aestivum
HASAGVEYCHRNMVVHRDLKPENLLLDSKYNVKLVDFGLSNVMHDGHFLKTSCGSLNYAAPELISGNLYAGPEVDVWSCGVILYALLCGKVPFEDDNIPKLFKKIKMRQNGGFYILPSYLSDLAMDLIPRILVVDPMKRITIREIRDHPWFQNRLPRYLAVPPPNTPQQAKMINEDTLQNVVNLGYDKDHVGGSLCNRLQNEATVAYYLLLDNRFRATSDYWGR

SEQ ID NO: 18059 - protein, 454 aa, Salmonella typhimurium LT2
MTMSHNVTPNTSRVELRKTLTLVPVVMMGLAYMQPMTLFDTFGIVSGLTDGHVPTAYAFALIAILFTALSYGKLVRRYPSAGSAYTYAQKSISPTVGFMVGWSSLLDYLFAPMINILLAKIYFEALVPSIPSWVFVVALVAFMTAFNLRSLKSVANFNTVIVVLQVVLIAVILGMVVYGVFEGEGAGTLASTRPFWSGDAHVIPMITGATILCFSFTGFDGISNLSEETKDAERVIPRAIFLTALIGGLIFIFATYFLQLYFPDISRFKDPDASQPEIMLYVAGKTFQVGALIFSTITVLASGMAAHAGVARLMYVMGRDGVFPKSFFGYVHPKWRTPAMNIILVGAIALLAINFDLVMATALINFGALVAFTFVNLSVISQFWIREKRNKTLKDHFQYLFLPMCGALTVGALWVNLEESSMVLGLIWAGIGLIYLACVTKSFRNPVPQYEDVA

SEQ ID NO: 18060 - protein, 482 aa, Mycobacterium sp. JLS
MDTTALLKSVPTGLWIGGEEREAKSTFNVLDPSSDEVLVAVGDATAEDAVAALDAACAVQAEWAATPARKRGEILRSVFETLTDRADDIAALMTLEMGKVLAESKGEVTYGAEFFRWFAEEAVRIGGRYTPSPAGTGRIIVTKQPVGPCYAITPWNFPLAMGTRKMGPAFAAGCTMIVKPAQETPLTMLYLAKLMAEAGLPKGVLSVLPTSSPGPVTEALVDDGRLRKLTFTGSTGVGKSLVKQSADKLLRTSMELGGNAPFIVFDDADIDAAVDGAMLAKMRNGGEACTAANRFHVANSVREEFTEKLVKRMSEVTLGNGLDESATLGPLINNKQLQKVTELVSDAVSRGATVAVGGVAPGGPGNFYPATVLADVPADARILKEEVFGPVAPITGFDSEEEGVAAANDTEYGLAAYVYTRSLDRALRVAEAIESGMVGINRGVISDAAAPFGGVKESGFGREGGTEGIEEYLDTKYIALTK

SEQ ID NO: 18061 - protein, 336 aa, Candida albicans SC5314
MPSFELDSLPYLNPNVDRRIAFITGGSSGLGFYSVLQLYLHGYTVYIAGRSKSRCLKSIKELKNKAIDIRSEYTSSQLNERFLGDLRFLEVDLSNLNSVISAVENFKKLEDHLHILINNAGAMALPYTLTIDKFEIQLQTNFVSPLVLTTKLLPILQKTADKFPKLPTPRIIYLGSFGHQFALPYFNLSNNLNHYPNFIFTWIRYGMAKVAGIHFMKMLTLRNPKVLFLTVHPGLVMNTNLFSYWTRLPIVGIIFWFAFYLFGYFFGVTSKEGADVVIKCALDENLTVENDNGKYFGPDGKESQPSSIATNMDYAARTWIWTIKELSQRGIDIPNP

SEQ ID NO: 18062 - protein, 452 aa, Candida glabrata CBS 138
MLARRGVQYVWDSGIAVSSTAFLVVASALVFFMVPGIGFLYSGLARRKSALSLLWVTLMASLVGMLQWYFWGYSLALSRTATNNKFIGNLDSFGFRNVYGLNAVWTENLEVAYASFQMMFLCVTLSLVAGSTAGRGRFFPHMVYLFLFATLVYCPIVYWIWAPGGWANKWGVLDWAGGGPVEIVSAISGFVYSYFLGCRNERFLVNFRAHNVSYVTLGTTVLWFGWLLFNAASALSPNLRSVYAFLNTNISAVTGGMTWCILDYRLEKKWSTVGLCSGIICGLVAATPSSGCITLYGSLIQGIVAGICCNFATKIKHFFQVDDAMDLLAEHGVAGMIGLLFNGFFAADWVIGMDGHTTHGGGWITQNYKQMYKQIAYIGAVTGYCAAVSALLCFIIDKIPGLQLRVSADGEEKGTDDDQIGEFAYDFVEIRREFDIWGKEEDEDENEQSTDE

SEQ ID NO: 18063 - protein, 554 aa, Mycobacterium sp. JLS
MTADDQLTDISATSAWQALQRHHGEIAGRHLRELFAEDPSRGTELTVSVGDLYIDYSKHRVTRETLRLLVDLARAAGLEKRRDAMLSGVHINTSEDRAVLHTALRLPRDASLTVDGQDVVADVHEVLDRMGDFTDRLRSGDWTGATGERIRTVVNIGIGGSDLGPVMVYEALRHYADAGISARFVSNVDPADLVAKLDGLDPATTLFIVASKTFSTLETLTNATAARRWLTDTLGDAAVARHFVAVSTNQKLVDEFGIDTANMFGFWDWVGGRYSVDSAIGLSVMAAIGRERFAEFLAGFHLVDEHFRTAPLEANAPALLGLIGLWYSNFFGAQSRAVLPYSNDLSRFAAYLQQLTMESNGKSVRADGTPVSTDTGEIFWGEPGTNGQHAFYQLLHQGTRLVPADFIGFSQPTDDLPTADGTGSMHDLLMSNFFAQTQVLAFGKTAEEIAAEDTPADVVPHKVMPGNRPTTSILATKLTPSVVGQLIALYEHQVFTEGVVWGVDSFDQWGVELGKTQAKALLPVITADDSPAEQSDTSTDALVRRYRAERGRSA

SEQ ID NO: 18064 - protein, 226 aa, Photorhabdus luminescens subsp. laumondii TTO1
MKDFLIAPSILSANFARLGEDTDKVLAAGADVVHFDVMDNHYVPNLTIGPMVCQALRDYGITAPIDVHLMVKPVDRIIPDFAKAGATYITFHPETSEHIDRSLQLIKEHGCKAGLVFNPATPLSHLDYVLDKLDIILLMSVNPGFGGQSFIPGTLEKLRQVRKIIDESGYDIRLEVDGGIKASNIAAAATAGADMFVAGSAIFSQPDYKTVIDNMRSELSKVSHGK

SEQ ID NO: 18065 - protein, 163 aa, Zea mays
NFQKLKEMYNEWPFFRVTLDLLEMVFAKGDPGIAGLYDELLVSEELKPFGKQLRDKYVETQQLLLQIAGHKDILEGDPYLKQGLRLRNPYITTLNVFQAYTLKRIRDPSFKVTPQPPLSKEFADENKPAGLVKLNPASEYPPGLEDTLILTMKGIAAGMQNTG

SEQ ID NO: 18066 - protein, 471 aa, Vibrio sp. Ex25
MILVWFRRDLRTLDHTALKAALDSGQPVVACFIATPEQWREHHMAPMQADLIARRLEYLNDELESLNVPFLYKEVPSFSDCTEVISEWAKTLEATSVMANIHYEVNERELDAQVSEALASHDIDFELFHDKCVHPPTTVLNKQGEYFKVFTPFKRAWLTQFQMPAVTKPQEQAPLSSKLLEQLEPIRFSSDFTFSYPRESSEDWFASTNDVLKQLREFARERSDAYKEERDFPAIDGTSQLSPYLAIGALSPRQCIARLYAENQQNDLTEGKATWLSEIIWREFYQHLLVFEPKLVKGKGFIDWEDKIQWSYDEQAFERWKAGATGYPIVDAAMRQLNQTGWMHNRLRMVVASFLTKDLHIDWRWGEAYFMSKLVDGDFAANNGGWQWSASTGCDGQPYFRIFNPISQGEKFDSDGQFVRHWVPEIKSVPNKYIHKPWTWEGFSLLEYHKPMVDHKTEREITLRLFKSAKE

SEQ ID NO: 18067 - protein, 481 aa, Thiomicrospira crunogena XCL-2
MSNTQKTTLSVEKIGGTSMSDYQAVRDNIILYPENFYNRIFVVSAYGGITDDLLEHKKTDQPGVYGLFANDDVDDDWRIALDQLSLKLNKINANLFSDDELRLKANDFIDERIAETKQLLNHLQDLCRHGHFSLESHLLTVRELLASLGEAHSAWNLAHLLQTEGVNARFVDLTGWQADEALPLDAMIETHLGDIDFTKELPIVTGYTHCRENLMYTFDRGYSEMTFSRIAVLCQATEAVIHKEYHLSSADPRLVGEDNVVPIGKTNYDIADQLANLGMEAVHPRAAQGLRQAQIPLRIKNTFDPGHHGTIFTEDYVSEYPQVEIIAGMQHLIALEVFDQEMMGQQGSYEKVIIDATNRLKCQVITKDFNANTITIYLKASLKKVKRLAEQLKQGLPTATINTSKVALASAMGSDMRIKGLLAKAVQTLFDQGINVEAIHQNTRQVEMQFFVNETDYEKAVKALHTNLIEVHNHGKAICEH

SEQ ID NO: 18068 - protein, 322 aa, Wolbachia endosymbiont of Asobara tabida
LCDKKIQLGINLTKGLGAGALPDVGKGAAEESIDEIMEHIKDSHMLFITAGMGGGTGTGAAPVIAKAAREARAAVKDRAPKEKKILTVGVVTKPFGLEGVRRMRIAELGLEELQKYVDTLIVIPNQNLFRIANEKTTFSDAFKLADNVLHIGIRGVTDLTVMPGLINLDFADIETVMSEMGKAMIGTGEAEGEDRAISAAEAAISNPLLDNVSMKGAQGILINITGGGDMTLFEVDAAANRVREEVDENANIIFGATFDQAMEGRVRVSVLATGIDGRNNKSETSPISQSEDSEKEKFKWPYSQSESTQDKTLETKPAEQVS

SEQ ID NO: 18069 - protein, 413 aa, Bradyrhizobium sp. BTAi1
MSIEAAGSPAESQRLLRSLSLTQAVLYGLGVTIGAGIYVLVGIAAARSGMHAPLAFIGAALVMAFSAASFAELGTRMPVSASEAAYVQAAFGRKWLSLGVGLLVVATATISAATISVGSSGYVAVFLPISAPWIISGVVLAMGVVACLATAQSVTFAGIMTVVEVGGLVLIIVTGLGHGTDVVTRLPEMWPPTRDTEAWIGLGGTALIAVFSFIGFEHVVNIAEEMKEPSRTLPRALFLTLGLTALIYALVVWIAVTAVPPQELARSSAPLALVFERLTGLPLVTMSAIAIVATLNGIIVHMIMIGRVIYGLADQGNLPRVFARLNSVTQTPLLATAFGIGAILVLSLAVPLGGLADLTARFTLVVFAIVNIALIRIKGRRQPAPSGAFICPMWVPCFGLASSLLLLVVDLVA

SEQ ID NO: 18070 - protein, 127 aa, Arabidopsis lyrata subsp. lyrata
TEKDFLCKILGEMIKAGATTVGFADTVGINMPPEFGELVAYVKENTPGADDIVFTIHCHNDLGVATANTISICAGARQVEVTINGIGERSGNAPLEVVMALKCRGEYLMNGVYTNIDTRQIMATSKM

SEQ ID NO: 18071 - protein, 322 aa, Wolbachia endosymbiont of Asobara tabida
LCDKKIQLGINLTKGLGAGALPDVGKGAAEESIDEIMEHIKDSHMLFITAGMGGGTGTGAAPVIAKAAREARAAVKDSAPKEKKILTVGVVTKPFGFEGVRRMRIAELGLEELQKYVDTLIVIPNQNLFRIANEKTTFSDAFKLADNVLHIGIRGVTDLMVMPGLINLDFADIETVMSEMGKAMIGTGEAEGEDRAISAAEAAISNPLLDNVSMKGAQGILINITGGGDMTLFEVDAAANRVREEVDENANIIFGATFDQAMEGRVRVSVLATGIDGRNNKSETSPISQSEDSEKEKFKWPYSQSESTQDKTLETKPAEQVS

SEQ ID NO: 18072 - protein, 464 aa, Brucella melitensis 16M
MAQAALPEISRLDGVSNFTLPNGMQVVVIPDHRAPVVTQMVWYHVGAADEAPGVSGIAHFLEHLMFKGTKNHPAGEFSARIASIGGQENAFTSYDYTAYFQRVSPEALEMVMDFESDRMENLVLDEEAVKTEREVILEERRMRIDSNPGAMLMENTDAVLFYNHPYRKPVIGWQQEMEKLSLKNAIDFYNQYYTPNNATLVIAGDVTPERVRELAMKTWANVHKRAEVLLRERPQEPAKHAARVVTLHDERVSTPSFRISWLVPSYANEKRFANVKPGDAPALDLLSEILGGSQLSRLYQQLIVKQGIAAETGASYDGDALDDGTFSVYGVPRNGASLGDVEKAVAAQVDRIIRDGVTQAELDQARNRFLKAVIFARDSQTGMARIYGSALSVGQTVDDIQKWPDLIKSVTVDQIKDVARRYLVKDQAVTSYLLPPDTEAESARKKPNAPANDASASGAGGAIQ

SEQ ID NO: 18073 - protein, 322 aa, Wolbachia endosymbiont of Asobara tabida
LCDKKIQLGINLTKGLGAGALPDVGKGAAEESIDEIMEHIKDSHMLFITAGMGGGTGTGAAPVIAKAAREARAAVKDRAPKEKKILTVGVVTKPFGFEGVRRMRIAELGLEELQKYVDTLIVIPNQNLFRIANEKTTFSDAFKLADNVLHIGIRGVTDLMVMPGLINLDFADIETVMSEMGKAMIGTGEAEGEDRAISAAEAAISNPLLDNVSMKGAQGILINITGGGDMTLFEVDAAANRVREEVDENANIIFGATFDQAMEGRVRVSVLATGIDGRNNKSETTPISQSEDSEKEKFKWPYSQSESTQDKTLETKPAEQVS

SEQ ID NO: 18074 - protein, 628 aa, Bordetella parapertussis
MCGVLGAWWRHHDEHEDARFAAGLRKLAHRGPDDRGSEHFAAPHGRLSLGHTRLAVIDLSAAGHQPMHADADRLAVVFNGEIYNYRELRSELRQIDAIFRGDSDTEVLLAAWQHWGVAALRRFKGMFAFALYDRRQQTLTLARDAFGIKPMYYHAAPERLLFGSELPAVQALLPHPPRLNWQRAYDYLAYGQYDQPPDTFIAGIRQLPAGHLLTLDLRTGRAGEPMAWDDPASQECRPIGFQEAAEELRARFLDNVRLHLRSDVPIGAALSGGIDSSAIVCAMRWLEPDLPIQTFSFISDDAHRSEERWVDLVNQHCGATGHKIHIAPHELLDDLDDLIRVQGEPVGSTSIYAQYRVFKLAREHGVVVTLDGQGADELLGGYGGYPTERLASLLETSRLGAAARLLRQQGRGAPARLLQAAALAAGGRHLANLRHATGRQHAPAWLDAQVLRDQGVTMREPAHAWAAATPLRGRRLVNELAHALYHRGLGALLRHGDRNSMRFSVESRVPFLTQDLAEFALSLPERYLVSDSGQTKHIFRKAMRGIVPDLILDRDDKIGFATPEQQWMQATAPQMRQWLVDAADIPFLRNAEVTAQFDAMIAGATPFSWQAWRWVNFQRWMQHATVLP

SEQ ID NO: 18075 - protein, 127 aa, Arabidopsis lyrata subsp. petraea
TEKDFLCKILGEMIKAGATTVGFADTVGINMPSEFGELVAYVKENTPGADDIVLTIHCHNDLGVATANTISICAGARQVEVTINGIGERSGNAPLEVVMALKCRGEYLMNGVYTNIDTRQIMATSKM

SEQ ID NO: 18076 - protein, 322 aa, Wolbachia endosymbiont of Asobara tabida
LCDKKIQLGINLTKGLGAGALPDVGKGAAEESIDEIMEHIKDSHMLFITAGMGGGTGTGAAPVIAKAAREARAAVKDRAPKEKKILTVGVVTKPFGFEGVRRMRIAELGLEELQKYVDTLIVIPNQNLFRIANEKTTFSDAFKLADNVLHIGIRGVTDLMVMPGLINLDFADIETVMSEMGKAMIGTGEAEGEDRAISAAEAAISNPLLDNVSMKGAQGILINITGGGDMTLFEVDAAANRVREEVDENANIIFGATFDQAMEGRVRVSVLATGIDGRNNKSETSPISQSEDSEKEKFKWPYSQSENTQDKTLETKPAEQVS

SEQ ID NO: 18077 - protein, 1166 aa, Capsella rubella
MKQKWLFVLILCFFTALGIHGKRLINSDFDETALLMAFKQFSVKSDPNNVLGNWIYESGRGSCSWRGVSCSDDGRIVGLDLRNGGVTGTLNLANLTALPNLQNLYLQGNYFSSSSGGDSSSGSYCYLQVLDLSSNLISDYSLVDYVFSKCSNLVSVNFSNNKLVGKLGFAPSSLKSLTTVDFSYNILSEKIPESFISEFPASLKYLDLTHNNFSGDFSDLSFGMCGNLSFFSLSQNNISGVKFPISLPNCRFLETLNISRNNLAGKIPGGEYWGSFQNLKQLSLAHNRFSGEIPPELSLLCKTLETLDLSGNALSGELPSQFTACVWLQNLNIGNNYLSGDFLSTVVSKITRITYLYVAFNNISGSVPISLTNCTNLRVLDLSSNGFTGNVPSGLCSQQSSPVLEKLLIANNYLSGTVPVELGKCKSLKTIDLSFNELTGPIPKDVWMLPNLSDLVMWANNLTGSIPEGVCVKGGKLETIILNNNLLTGSIPQSISRCTNMIWISLSSNRLTGKIPTGIGNLSKLAILQLGNNSLSGNVPRQLGNCKSLIWLDLNSNNLTGDLPGELASQAGLVMPGSVSGKQFAFVRNEGGTDCRGAGGLVEFEGIRAERLERFPMVHSCPATRIYSGMTMYTFSANGSMIYFDISYNAVSGLIPPGYGNMGYLQVLNLGHNRITGNIPDSLGGLKAIGVLDLSHNDLQGYLPGSLGSLSFLSDLDVSNNNLTGPIPFGGQLTTFPVSRYANNSGLCGVPLRPCGSAPRRPITSSVHAKKQTLATAVIAGIAFSFMCLVMLFMALYRVRKVQKKELKREKYIESLPTSGSCSWKLSSVPEPLSINVATFEKPLRKLTFAHLLEATNGFSAETMVGSGGFGEVYKAQLRDGSVVAIKKLIRITGQGDREFMAEMETIGKIKHRNLVPLLGYCKVGEERLLVYEYMKWGSLETVLHEKSSKKGGIFLNWTARKKIAIGAARGLAFLHHSCIPHIIHRDMKSSNVLLDEDFEARVSDFGMARLVSALDTHLSVSTLAGTPGYVPPEYYQSFRCTAKGDVYSYGVILLELLSGKKPIDPGEFGEDNNLVGWAKQLYREKSGTEILDPELVTEKSGDAELFHYLKIASQCLDDRPFKRPTMIQVMAMFKELKADTEEDESLDEFSLKETPLVEESRDKEP

SEQ ID NO: 18078 - protein, 322 aa, Wolbachia endosymbiont of Asobara tabida
LCDKKIQLGINLTKGLGAGALPDVGKGAAEESIDEIMEHIKDSHMLFITAGMGGGTGTGAAPVIAKAAREARAAVKDRAPKERKILTVGVVTKPFGFEGVRRMRIAELGLEELQKYVDTLIVIPNQNLFRIANEKTTFSDAFKLADNVLHIGIRGVTDLMVMPGLINLDFADIETVMSEMGKAMIGTGEAEGEDRAISAAEAAISNPLLDNVSMKGAQGILINITGGGDMTLFEVDAAANRVREEVDENANIIFGATFDQAMEGRVRVSVLATGIDGRNNKSETSPISQSEDSEKEKFKWPYSQSESTQDKTLETKPAEQVS

SEQ ID NO: 18079 - protein, 429 aa, Nostoc punctiforme PCC 73102
MISKSLLPLEPASPAHICPFDQACSYLEAAAKELNLNQGLLEILSHPRKVVTVSIPVKLDDGEIQVLAGHRVQHSDVLGPYKGGIRYHPAVTLREVSALAMLMTWKCALLGIPYGGGKGGIPIDPKRYSVGELERISRRYISELLKDIGPSVDIPAPDMGTSAREMAWMMDTYSVNVGHAVPGVVTGKPLSIGGSLGREMATGRGTMIIVREALADRGKSLVGVRVAIQGFGNVGGAAAELLHQAGAKIIAVSTGAGGIFSEAGLDIPALKIYAAENRKSIVGFPQSVPISNADLLTLPCDVLIPAALENQITGENVNQVQAQIVAEAANGPVTLEANLALEARGVTVLPDILANAGGVVVSYLEWVQGLSYVFWDEERVNREMEHLMVQAYRKVIQQSNKRQISLRLAAYTLGVGRVAQALTDRGLYP

SEQ ID NO: 18080 - protein, 322 aa, Agrobacterium tumefaciens str. C58
MSDTNNPYGGSYGGQMTASAHHNGELNGAASGHIKDTTTAGFSKDVLEESRRQPVLVDFWAPWCGPCKQLTPVLEKVINEANGRVKLVKMNIDDHPSIPGQLGIQSIPAIVAFADGRPVDGFMGAVPESQIRQFIDKIAGPDAGDPKAEIEAALSEAKQLLADGDFNGAAQLFGAVMQADPENPAAIAGIAECMIAAGQYERASELLSSLPAELNDDAGIQLVSKKIAQYEEARKIGDPVALERDLAQNPDHHEARVKLAKVLNAQGRRDEAADHLLYVMRKDRTFDDDGARRQLLEFFESWGFKDPASIAGRRKLSAILFS

SEQ ID NO: 18081 - protein, 603 aa, Vibrio angustum S14
MNKVLSQINIFPIKSTQKISLSQAYVKSAGIDLDRRFMIALTDGSMITSRRYPQLLLISTTIESNGLLFNYPNKPPLSLSFEQLALMTTSTAVWNDNCEAYTTSSDADLWFSEIIGQPAQLLYNGVESQRTGGKAQVKVSFADNFPVMIVSEASLNALNDRTQEVHSMDKFRANLVVSGVNAFAEDSWKRIRIGEVELEIMAPCSRCVLVNYDPSTAKKADNNEPLATLMTFRTDKVIPTNVNFGMNAIVVKEGIVRQGDQVEVLEHRTPETYPDQRVALTCVKREIIAKDFVSFSFKAQKDTALAPYLPGQYLPIRIAINGNIVERCYTLSSSPLEQEYTISVKRIEQGTVSNWLHDNLQVGDTIWSEKPSGQFYLELHKHQNTLLLSAGSGVTPMMSMLRSLISEKNTQGLTFYHYCKTQTDIPFAAELAEIQRNHPEISIHICLTQDNDTSHAYHGRICSEHFANIDIQDNYHAYVCGSSGFNQIAQELLRNQGLPTDRFHQELFNKVLTKPEQEQSLNIQYKQQQFTGNNQTSLLDQIEAAELPIKSGCRAGLCGRCKVKVAEGNVLQQDSAALSEEEKQQGVVLACCSIPTSNITIEQ

SEQ ID NO: 18082 - protein, 614 aa, Oceanobacillus iheyensis HTE831
MCGITGFVNWGKTADEQRSVLGKMTDTLSLRGPDDTQLWTKGHTGFGHKRLSVVDLEGGKQPMSKTVNGITYTVCYNGELYNTEDLRKELLKRGYTFSTTSDTEVLLTSYIEWKEACVDHFNGIFAFGIWDEEKEQLFMSRDRLGVKPLFYAEKAKGFIFGSELKAILAHPDISTKVDRTGLSEIFGLGPSRTPGHGLFKDIDELRAAHSLTFSKHGLKVWRYWNMVSNHHTDSEEETAEKVRELFVDAVQRQLVADVPVSTLLSGGLDSSAITAIAANYYKEKGYGPLTTFSIDYQGNEQHFQKSKFQPSSDRAWIEKMVEGFSTDHHDEIIAGQELAILLKEAVEVRDQPGQADIDSSLLWFCREIKQHTTVALSGECADEIFGGYPWFHDPAAAGNNFPWIRSLDSRIDLLHGDWKKKLDLESYVQEQYQSTIAETPRLDGEDKIDAKRRELFYLNMQWFMSQLLDRKDRMSMGASLEVRVPFADHRLVEYVWNIPWDIKMVNGHEKGILRKAMEGILPNEVLYRKKSPYPRTFQPEYTEQVSQWMNRILVDPNARLFEFMKKEKVEAIVKSKGKEFKDPWYGQLMRGPQLIAHLCQIDHWLRQYDVEVVD

SEQ ID NO: 18083 - protein, 118 aa, Nostoc commune
MSTLYDNIGGQPAIEQVVDELHKRIATDSLLAPVFAGTDMVKQRNHLVAFLAQIFEGPKQYGGRPMDKTHAGLNLQQPHFDAIAKHLGERMAVRGVSAENTKAALDRVTNMKGAILNK

SEQ ID NO: 18084 - protein, 91 aa, Citrus sinensis
ITCGQVTGSLAPCIVYLRSGGPIPVPCCNGVRSLNAAARTTPDRQTACNCLKQAAGSIPNLNPNNAVGLPRACGVSIPYKISISTDCSKVR

SEQ ID NO: 18085 - protein, 403 aa, Acidobacteria bacterium Ellin345
MARPTVVTMPGDGIGNQVLPQAIRVLEAVGFEANYVHADIGWECWCNEGNALPDRTIQLLRKHKLGLFGAITSKPKKAADAELKPELRGKGLSYFSPIVTMRQLFNLDVCMRPCLSFPGNPLNFIRQTTCGGFEEPQVDVVVFRQNTEGLYAGVEWTNPPENVRTALASHKKFAAFANTPGEELAVSVRIITKKNAQRICEAAFKHAKKYRYKNVTICEKPNVLRETSGMMEEVAKQVQKQYPEIALWSTNIDAQTMWLTKNPEEYGVIVASNLFGDVISDAFAGLVGGLGFAASGNIGDEVAVFEPTHGSAPKYAELNPSIVNPIAMILSAAMMLDHIGESEKADRIRKAIADVVKEGKVRTYDMMRIAGGPKSLAQGAANTVQITDAILVHVETAIAAFAR

SEQ ID NO: 18086 - protein, 290 aa, Cytophaga hutchinsonii
MQLLDGKITSDQIKEELKTKVEAIKAKGGKIPHLAAVLVGDSGAAVTYVNAKVKACELVGFKSTLVKLPETITEADLLAKVAEINADKDIDGYIVQLPLPKHIDEQKVTEAISPDKDVDGFHPTSLGRMVLNLPTYLPATPYGIMQLLERNGIETSGKHCVVMGRSHIVGSPMSILMARNTNPGNATVTMVHSRTKNLKELTLQADILIVAIGKPEFVTADMVKEGAVVVDVGIHRIDDATKKSGFRLLGDVKFDEVAPKTSYISPVPGGVGPMTIASLLMNTLQAAALK

SEQ ID NO: 18087 - protein, 412 aa, Oceanicola granulosus HTCC2516
MPILVMKFGGTSVATLDRIRRAAKRVGREVANGYDVIVIVSAMSGKTNELVGWVSETSPLYDAREYDAVVSSGENVTAGLMALTLQEMDVPARSWQGWQVPLRTSSAHGSARIEEIPPANILRKFDEGMKVAVVAGFQGISPEGRITTLGRGGSDTTAVAFAAAFGAERCDIYTDVDGVYTTDPRICDKARKLDRIAFEEMLELASLGAKVLQTRSVELAMRYGVRLRVLSSFEDNDADAGTLVCAEEDIVESNVVAGVAYSRDEAKMTLISVADRPGIAAAIFGPLAEAGVNVDMIVQNISEDGRTDMTFSCPVDQVKRAEAAMEAAKESGAINYHDLVADTGVCKVSVVGIGMRSHAGVAAQMFQALKDENINIKVITTSEIKISVLIDRKYMELAVQALHDTFGLEKAA

SEQ ID NO: 18088 - protein, 240 aa, Oryza sativa
MALAARLVSRSRQLYSAQAALANGGATQVRLYAKEADRTPVNGDDLLKGIFFEVKKKFETALGVLKKEKITIDPDDPAAVSRYAQVMKTVRQKADLLSDSERIKYTIDTFTKGIPDARTYLNTLQEIRIKSGLIDDMGAEAMMMEALEKVEKEIKKPLLRSDKKNMGLLLAEFEKINKKLGIRKEDLPKIEEELELEIAKSELTELKKECVEAMEVQLKREEFKDEEMPDVKKLDIRNFL

SEQ ID NO: 18089 - protein, 468 aa, Triticum aestivum
MSAAAQETTAGGGGDGKRQGPCRPGHLKLGYHIVVSVATALATVYLARRPRAVYLLDFACYKPGPDHVVTRETFMKQSSKAGVFTDDNLAFQRKILERSGLGQGTYFPAAVLNSPPNPCMAEARREAEAVMFGAIDSLLAKTGVRARDIGVVVVNCSLFNPTPSLSAMVVNHYKLRGNVASYNLGGMGCSAGLISIELAKQLLQVHRNSYALVVSMENITLNWYWGNDRSMLMSNCLFRMGGAAILLSNRAADKRRSKYQLVHTVRTHHGADDRAYRCVFQEEDKAGRVGVALSKDLMAVAGEALKTNITTLGPLVLPMSEQILFLTSLIGKKIFGLKMKPYIPDFKMAFEHFCIHAGGRAVLDTIEKNLELSDWHMEPSRMTLNRWGNTSSSSLWYELAYTEAKGRVRRGHRAWQIAFGSGFKCNSAVWRALKDIHPSKEAGSNPWIEEIHRFPVEVPKVESVVSSP

SEQ ID NO: 18090 - protein, 189 aa, Oryza sativa (japonica cultivar-group)
MLTVEESLVTAGGVEGLVGSPLGLGLGLGLGLPSPFPVSAAGYGVNGRRGGSMSRRESGDGNEIGAPSESAPCPENFPSNGSEWVELLVNEMTTASNMDDAKSRATRVLEAFEKAVVSHVNAQGPHDFQKHERQDYDAKNQELQDEKQRIAEFQEQVRNLELNNYRLSMLLRQAQQGSSIPGRFNPDVF

SEQ ID NO: 18091 - protein, 704 aa, Acinetobacter sp. ADP1
MPGEEVSQAKQQLKLIIDAYLSESDVDNVLAACDFADLAHSGITRKSGEPYILHPIAVSCILAHMRLDAETLMAALLHDVIEDTEHTKDEIGERFGEVVADLVDGVTKLTHSSDKQYNKAASFRKILQATLQDPRVIIIKLADRYHNMTTLDALRPDKRARIAQETFDIFVPMARIVGMNEMGDNLELLCYQNLDLDMYNNVQEALLETKPRRCEYQTKWEHHLGELLTTYHIHGRVKKKNNNIELLRHFVKNEIDLQELTHSHAFEIILNSISDCDRLVDALKENFQILHFEDHIRRPLPGGNQSIMMKLKGEQTTLSLTIQTELMRKAARFGVVLGENAPQACRSAIQASMQNLTTLIDGECAKTTFNDLLDYLHQEKIWVYTPHGHLHELPQGATVIDFAYSASLFLGNHAVGAKIDGEIRPLSTPLVSGQVIDVITDVLATPNPDWLSFINTQKARRAIQNMLRDQDIEEQLLVGQQALNRALKLFNRSMHDLSESDWLNVLQWRHVENKEALFEQIAVGDLLPQLVANHLYAQDTSDKTGHAPDRLIQGTEGVDVKYAHCCNPILGDPIQGHLSRRGLIVHRARCHNLLHEQHLHPENIMPLQWTSDDLDDVSFTAYLCIDMPLDGEQISELIYLCRKSHTGVEMVQPHGDHTYVNIVVNNRKVVAQIIRDLRMLFGFPRVSRLFTPAAVTESVKIKVS

SEQ ID NO: 18092 - protein, 398 aa, Bacillus licheniformis ATCC 14580
MFHTIEEAIRDLKQGKVIIVVDDENRENEGDFVALAEYATPDVINFMASHGRGLICAPLNEEIASRLELQPMVDENTDSHHTAFTVSVDHRDTKTGISAQERSLTVMSLIADHAHPGDFKRPGHIFPLIAKKGGVLKRAGHTEAAVDLAEACGSAPAGVICEIMNEDGTMARVPELKKIADQHGLKMITIKDLIEYRYSKGTLINREVKITLPSEFGTFKVYGYTNEIDDKEHIALVKGDIPFGDEPVLVRVHSECLTGDVFGSYRCDCGPQLAAALAQIEQAGRGVLLYLRQEGRGIGLINKLKAYKLQEEGYDTVQANEKLGFLPDLRNYGIGAQILRDLGVKQMKLLTNNPRKIAGLEGYGLTIADRVPLQMETKKDNEKYLKTKKSKLGHMLHF

SEQ ID NO: 18093 - protein, 394 aa, Photobacterium profundum SS9
MFEPMMEMSDDAVIKVIGVGGGGGNAVDHMVRESIEGVQFISVNTDAQALRKTSVSTVIQIGGDITKGLGAGANPQVGRDSALEDRDAIKAELEGSDMIFIAAGMGGGTGTGAAPIIAEIAKELGILTVAVVTKPFSFEGKKRMAFAEQGIEELSKHVDSLITIPNEKLLKVLGRGITLLDAFAKANDVLKNAVQGIAELITRPGMINVDFADVRTVMSEMGHAMMGSGIATGDDRAEEAAEMAISSPLLEDIDLAGARGVLVNITAGLDMRLDEFETVGNTVKAFASDNATVVIGTSLDPDMSDELRVTVVATGIGKESKPDITLVTASKPVQATPAAPVSVEETKSSSMMQSSVATESNVQQPASAAAAPKSKPQADHDYLDIPAFLRKQAD

SEQ ID NO: 18094 - protein, 112 aa, Arabidopsis thaliana
MLQLCTSPVFLLFSVFEFLFSNCSLAGLSAYTTDQSLRQLFAPFGQITESRLIKDQQTQRPKGFGFITFESEDDAQKALKALNGKIVNGRLIFVETAKEVEAPTTSLKSNKD

SEQ ID NO: 18095 - protein, 188 aa, Arabidopsis thaliana
  misc_feature (153)..(153): Xaa can be any naturally occurring amino acid
  misc_feature (164)..(164): Xaa can be any naturally occurring amino acid
MASSMLSSATMVASPAQATMVAPFNGLKSSAAFPATRKANNDITSITSNGGRVNCMQVWPPIGKKKLETLSYLPDLTDSELAKEVDYLIRNKWIPCVESELEHGFAYREHGNSPGYYDGRHWTMRKLPLFGCTDSAQVPKEVEECKKEYPNAXFRTIGFDNTRXVQCISFIVYKPPSFHRSIPFLLLV

SEQ ID NO: 18096 - protein, 434 aa, Brassica insularis subsp. insularis
SYTLLFFVILFLFPHVFSTNTLSPNEALTISSNKTLVSPGDVFELGFFKTTTRNSPDGTDRWYLGIWYKTTSGHRTYVWVANRDNALHNSMGTLKISHASLVLLDHSNTPVWSTNFTGVAHLPVTAELLANGNFVLRDSKTNDLDRFMWQSFDYPEDTLLQEMKLGRNLIGSENEKILTSWKSPTDPSSGDYSFILETEGFLHEFYLLKNEFKVYRTGPWNGVRFNGIPKMQNWSYIDNSFIDNNEEVAYSFQVNNNHNIHTRLRMSSTGYLQVITWTKTVPQPNKFWSFPEDTCDLHKVCGPYAYCDMHTSPTCNCIKGFVPKNAGRWDLRDMSGGCVRSSKLSCGEGDGFLRMSQMKLPETSEAVVDKRIGLKECREKCVRDCNCTGYANMDIMNGGSGCVMWTEELDDMRKYDAGGQDLYVKVAAASLVPS

SEQ ID NO: 18097 - protein, 608 aa, Bartonella henselae str. Houston-1
MYQSFEAITNPAYAAERISSLRQELNRLELDGFLVPRSDEHQGEYVPPHAQRLSWLTGFTGSSGIALILKNKAILFTDGRYKLQVRQQTDPHIFEYEDLVICPPSQWLEKNGQKLSIGFDPWLHTIAATDTLRKALELKSSGKLVAVQSNPIDFIWHDQPHPPQSALSIHPLKYAGCKTDEKLTLIRKNIQQADADAFIFTDPSSIAWTFNIRGNDVSNTPFSLCFAFIPIKESPILFINSKKLGIEQKQYLERYAKLYEPEQLIPMLKDYVKKGMIFALDPRITCEKIHIIIEEQGGSFTTLTDPAALPRAIKNSTELNGTRQAHLRDGVALTRFFSWLDKQTPGSIHEISAAQKLEEFRINTAKEMGEKLEDLSFDTISAAGANGAIVHYRVTNETNKQLNAGELYLVDSGGQYRDGTTDVTRTVAIGNVGEEEKRCFTLVLKGMIALSTAHFPKGTRGQDIDVLARIALWKAGFDYAHGTGHGVGSYLSVHEGPQNLSRNGCQELIPGMIVSNEPGYYREGAFGIRIENLLIVKPAQKINGGDREMLSFETLTNCPIDRRLILPELLTEQEQQWLNDYHTHVYQVNAPYLSEEDKRWAKEATLPL

SEQ ID NO: 18098 - protein, 214 aa, Sinorhizobium meliloti 1021
MRRPPMAETLPFTLLPPEESKVGLLATPEPRFCNLTNTVHGGWIMTMLDTVMALAAQTTLSAGGGNTAVQEALYLSNLASKVTVVHRRDRFRAEPILQDRLPAKPNVEVIWNHVIDEVIGEQEPRKSVTGIRIREVNTDDVKELTTHGLFVAIGHDPATALFRGQLDMDDAGYIKVGSWLTKTTVPGGAGCRRCHRLGIPSGNHRCRHGKHGGP

SEQ ID NO: 18099 - protein, 1294 aa, Lactobacillus casei
MDEKKHYKMYKSKSVWVFACLSTCLIVSFFNDGQNVSAATSASSTQISQTNTGSQPNNETTGETAQSSVNSTATASSSSVADLPSSSDSKSSIGSTISQPTVDKKETSKSDTADNDLTKSVTTSDSDKALPTSKTTLPTSNEQVQSSVGQSQTDQSASSATIATNAVTSDVSQNDQYNEPYRNQYHYSSSQNWINDPNGLFYDSKTGLYNLYYQYNPEGNQWGNMSWGHAVSKDLINWTQEDVAIPMLQNQGWEDFTYTNTTGSLKDKGEVRYVGVPTTNWGDADGKKAIFSGSIVVDTNNVSGLGKDAILAFYTADYQIATRKNDGAEDGWGTWIGLTEIQEQHLAYSLDGGKTFIQYSKDGNAANPQAIIPTSMNQGGDAANFRDPSVVYDAVNKQYYLTVVSGQQALIYKSSNLLDWTYASKIERENDVGNGVWECPSLVPMKVAGTNETKWVFCISVQQGAHATGSGMQYYVGNMTADGTWVPESSKTLQNPMTMDSGEDFYAGIPFSNMPDGRTVMLAWQSNWSYVDEAKTSPWSGNMTLPRELSLKKNADTTDGYLLTNTVVKEIANNEEANVINKAESNFTVSRSDEQVQYEGKQYKISATFSWDEADKPKSVGFKLRVSDDQKYDMIVGYDLTTGLLYVQRLNTGEPNMGAPRDKMNATVNADGSITITVYVDETSIEAFANDGEKSITQNFFMRPENIGDQATTGVYVYSNDGTTKISDLTINPITSIWNSTGQLTEKFVDENGNTIASDKIQTGRVGQSYTSESATIPGYVFVKENTDHINSNQLYTTQNQTITYTYRASQASVVTKDTTLAAGPSAAWNAADNLVGATDADGNALAVSDLTVNGAVDPKTPGTYTVTYSYTDATGNKISKKATVTVIASKADIVTKDTTMVAGASTIWNAADNFVEAKNADGNALTVSDLMINGTVDSKTPGTYTVTYSYTDAAGNKINKEAIVTVIASKADIVTKDTTMVAGPSAAWNAVDNFVEATGADGNALALSDLTVNGAVDPKTPGTYTVTYSYTDVAGNKISKEAIVTVIASKADIVTKDTTKVAGPSATWNAADNLVIATDAKGNALALSNLTVTGSVDSKTPGTYTVTYSYTDAAGNKISKEATVTVIASKADIVTKDTTMVAGPSAAWNAANNLVSATDADGNALAMSNLTVTGTVDLKTQGTYTVTYTYTDVAGNKISKEATVTVLTEKETNIEDNTGSSISNDRENPPASITGKGGDDIHQNAKTTMTKKKTETLPQAGNHVNELAIVLGQMILAICVGGILWLKRRVKRV

SEQ ID NO: 18100 - protein, 511 aa, Azoarcus sp. EbN1
MKDHLIVFDTTLRDGEQSPGASMTRDEKLRIARQLERMRVDVIEAGFPAASNGDFESVRAIAEAIRESTVCGLARANEADIRRAGEAIAPAARGRIHTFIATSPIHMEMKLRMSPDQVVEQAVRAIGWAKEYTDDIEFSAEDAGRSEIDFLCRIFEAVIKAGAKTINVPDTVGYNVPEQYAHTIRTLIERVPGADKVVWSVHCHNDLGLAVANSLAAVMAGARQVECTLNGLGERAGNAALEELVMAVRTRQDVFPCDTRIDATQIVPASKLVSGVTGFPVQPNKAIVGANAFAHESGIHQDGVLKHRETYEIMRAEDVGWGANKLVLGKHSGRNAFRSRLQEIGIVVASEEHLNHAFARFKELADKKHEIFDEDIQALMSDEVVTPDQEHYRLVASRFHSETGETPRADLTLSVDGQETRTSAEGSGPVDAAFKAIEAIAGSGTELLLYSVNAITTGTDAQGEVTVRLAREDKVVNGQGADTDIIVASAKAYLNALNKLHSKLERLNPQL

SEQ ID NO: 18101 - protein, 694 aa, Hordeum vulgare subsp. vulgare
MSASLSMSGGAGEAATRTVVWFRRDLRVEDNPALAAAARTAGEVVPAYVWAPEEDGPYYPGRVSRWWLSQSLKHLDASLRRLGASRLVTRRSTDTVAALLELVRSTGATHLFFNHLYDPLSLVRDHRVKQVLAAEGISVQSFNSDLLYEPWEVLDDHGSPFTMFTSFWNKCLCMVDPPAPMLPPKRINSGDLTRCSSDDLIFEDDSERGSNALLARAWSPGWQNADKAFTAFINGPLIDYSVNRKKADSANTSLLSPYLHFGELSVRKVFHQVRMKQLTWSNESNRDGEEGCSLFLRSIGLREYSRYLAFNHPCSHEKPLLAHLRFFPWVVNEVYFKVWRQGRTGYPLVDAGMRELWATGWLHDRIRVVVSSFFVKVLQLPWRWGMKYFWDTLLDADLESDALGWQYISGSLPDGRELDRIDNPQFEGYKFDPYGEYVRRWLPELARLPTEWIHHPWDAPESVLQAAGIELGSNYPLPIVELDEAKSRLQDALSEMWELEAASRAEIENGMEEGLGDSSDEPPIAFPQELQHMEVDRATSHTPATAGPARRRADQMVPSITSSLVRAETETELSAVFESEVSRPEVPSQVHFQAQPRMESREQVASDGTAARYNQQYTLHRVQGGGIAPSTSEASSSWTGREGGVVPVWSPPAASGHSDPYAADETDISSRSYLDRNPQSHNRLMNWNQLSQSS

SEQ ID NO: 18102 - protein, 125 aa, Betula pendula
LKQEPGTSEETEQFACTRYKAEYPIFQKIRCNGPDTAPLYKFLKASKTGFLGSRIKWNFSKVAFPCNQFLKQEPGTSEETEQFACTRYKAEYPIFQKIRCNGPDTAPLYKFLKASKTGFLGSRIK

SEQ ID NO: 18103 - protein, 372 aa, Sinapis arvensis
SSNKTLVSPGGIFELGFFKPSGRSRWYLGIWYKKVSQKTYAWVANRDSPLSNSIGTLKISGNNLILLNQSNNTVWSTNITRSNARSSVIAELLPNGNFVMRCSNNKESSGFLWQSFDFPTDTLLPDMKLGYDSQNRAQQVPYIVEGSDDPSSGNLVYKLDIRRGLPEFILVNQFLNQRVEMQRSGPWNGIEFSGIPEVQGLNYMVYNYTENSEEIVYSFHMTNHKAIYSILTVSELALDRLTWIPPSSTWTLFWTLPTDVCDPLYLCGSYSYCDLNTSPNCNCIKGFVPKNPQQWDLRDGSQGCVRRTRLSGSGDGFLRLNNMNLPDTKTATVDRTIDVKKCEERCLSDLNCTSFAMRMFRNGGSGCVMWTG

SEQ ID NO: 18104 - protein, 202 aa, Brassica napus
  misc_feature (186)..(186): Xaa can be any naturally occurring amino acid
MDNYDGTNLAEMRPKRRAGRKVFNETRHPVFRGIRRRNGDKWVCEVREPTHQQRIWLGTYPTADMAARAHDVAALALRGRSACLNFADSAWRLPVPESNHPDVIRRVAAEAAEMFRPTEYGSEITVLPSYGSEVYMGSGSGSEERNVYGYVEEEEEVSTTMMRLATEPLMSPPRSYMEGVTPNGYXKEEMSYEDMSLWSYRY

SEQ ID NO: 18105 - protein, 878 aa, Pseudomonas syringae pv. tomato str. DC3000
MADIDARLREDVHLLGELLGNTIREQRGAEFLDKIERIRKGAKAGRRGSAEGAEQLSSSVDGLEDDELLPVARAFNQFLNLANIAEQYQLMHRRDDAQPLPFESRVLSELLDRLKAEGHQPETLARQLSKLEIELVLTAHPTEVARRTLIQKYDAIATQLAALDHRDLNSAERAQITSRLQRLIAEAWHTEEIRRIRPTPVDEAKWGFAVIEHSLWHAIPNYLRKADHVLHAATGLHLPLESAPIRFASWMGGDRDGNPNVTAAVTREVLLLARWMAADLYLRDVDNLAAELSMQQASDALRASVGDSAEPYRAELKRLRERLRATRNWANASLTETLPAPEAVLRDNRELLDPLLLCFQSLHECGMGVIADGPLLDCLRRAVTFGLFLVRLDVRQDSTRHCAAMTEITDYLGLGRYEEWDEQTRIDFLLRELNNRRPLLPSYFKPAADTAEVLATCREVAAAPAASLGSYVISMAGSASDVLAVQLLLKESGLQRPMRVVPLFETLADLDNAGPVIETLLGLPGYRSRLQGPQEVMIGYSDSAKDAGTTAAAWAQYRAQEKLVEICREQQVELLLFHGRGGTVGRGGGPAHAAILSQPPGSVAGRFRTTEQGEMIRFKFGLPDIAEQNLNLYLAAVLEATLLPPPPPQPAWRTMMDQMASDGVSAYRAVVRENPEFVEYFRQATPEQELGRLPLGSRPAKRREGGVESLRAIPWIFAWTQTRLMLPAWLGWEAALSKALERGEGEVLAQMREQWPFFRTRIDMLEMVLAKADADIARLYDERLVTAELQHLGAHLRDLLSQACNVVLGLTGQTQLLAHSPETLEFISLRNAYLDPLHLLQAELLSRSRNREASLDSPLELALLVSVAGIAAGLRNTG

SEQ ID NO: 18106 - protein, 581 aa, Bartonella henselae str. Houston-1
MTINLHRPDIAELKPRITVFGVGGGGGNAVNNMINAGLQGVDFVVANTDAQALAMSKAERVIQLGAAVTEGLGAGALPEVGQAAAEECIDEIIDHLADSHMIFITAGMGGGTGTGAAPVVARAAREKGILTVGVVTKPFQFEGARRMKTAEAGIEELQKSVDTLIVIPNQNLFRIADEKTTFADAFAMADQVLYSGVASITDLMIKEGLINLDFADVRSVMHEMGRAMMGTGEASGEGRALAAAEAAIANPLLDDTSMRGARGLLISITGGRDMTLFEVDEAANRIREEVDADANVIFGAIDDESLEGVIRVSVVATGIDREVSDLVQPSHPQLQRHATSIRKNDPGMPQSSFHVQSPPLRSESMVEVIEALEIEKGKTVGEQFRPKSQIFAQPADTVAARNAAAAYGSSAHGQISNAPRVQVSRSSQSSMVAPVSMEATAHVLDEMTGVVQQKENQVKQIQARSPMRMPELKDFPPVAHGQGERSSADQGPRNLWQRLKQSLTHREEAEPEAKLEPAVRSSQQQEVRVHNKNSRALVQDASVYVPRRAGELHPHVSQDQRNFVSEEDQLEIPAFLRRQAN

SEQ ID NO: 18107 - protein, 366 aa, Sinapis arvensis
SSNKTLVSPGDVFELGFFRTNSRWYLGMWYKKLPYRTYVWVANRDNPLSNSIGTLKITGNNLVILGHSNKSVWSTNLTRRNERSKVVAELLANGNFVMRDSNNNDASAFLWQSFDYPTDTLLPEMKLGYDLKKGLNRFLISWRSLDDPSSGNFSYKLENRKLPEFYLLSGVFELYRSGPWNGIRFSGIPDDQKLSYLVYDFTENTEEVAYTFRMTNNSLYSRLIVSSEGYIERQTWNPPIRDVERVLVFSLDSQCDAYRMCGPYSYCDVNTSPVCNCIQGFSPLNVEQWDQRSWSGGCIRRTRLSCSGDGFTRMKNIKLPETMMATVDRSIGVKECEKRCLGDCNCTAFANADIRNGGSGCVMWTG

SEQ ID NO: 18108 - protein, 566 aa, Kineococcus radiotolerans SRS30216
MDARLGDDGPVRVPRPDPLPRDVPFRRAAAADRARGVRAVGAGPGAAVHGRGPQGVVAEEDHPGRQDGLSVLASTVGIFRTKSVEDAIASTDEPGQRLRKSLSAWDLTVFGVGVIIGTGIFVLTGEAAGTRAGPAVALSFVVSGIVCALAALCYAEFASTVPVAGSAYTFSYASLGEVVAWIIGWDLILELALGASTVAVGWSSYAADLLGQTLGLAVPAWLYSATPSPTQPNLIAAAVVLVLTAVLCVGTKTSARFNAVVVGIKLAVVGVVIVAGLFFVKVSNWSPFVPPTGSAGASSTPADPSLWQDLGLPLGTFGVGGILTAAALVFFAFIGFDIVATAAEETKNPQRDVPRGIFGSLAVCTALYVLVSLVVTGMVRYDEISVEAPLANAFRAVGADVVATLISVGTVAGLLTVMMILMLGQSRVLFAMARDRLIPAWFSKVSERTQVPVRITAITGVVVAVVAAVTPISDLAEMVNIGTLFAFVLVSVGVVVLRRTRPDLPRAFRVPWVPVLPIASALAAVVLMGFLPAVSWVRLGIWMALGLLVYLAYGYRHSRLARRPGA

SEQ ID NO: 18109 - protein, 363 aa, Spinacia oleracea
MAISAIGFEGFEKRLEITFFEPSIFVDPEGKGLRALCKAQLDEILGPAECTIVDSLANESVDSYVLSESSLFIYAYKIIIKTCGTTKLLRAIPPILRLAGKLSLDVKSVRYTRGSFIFPGAQSYAHRSFSEEVAVLDGYFGKLAAGSKAFVMGDPAKPQKWHVYSASAETISFEEPVYTLEMCMTGLKKEKASVFFKSQSPNAAVMTESSGIRKILPDSKICDFDFEPCGYSMNAIEGPAISTIHITPEDGFSYASFEAVGYDLKKTDLNQLVERVLACFEPSEFSIAIHAEIAANSMEHNCYVNVNGYSREEGGIEELGFGAASVFYQKFCKASTGFGATNKPKPALKCCWKEDKFEEEKDY

SEQ ID NO: 18110 - protein, 127 aa, Arabidopsis lyrata subsp. petraea
TEKDFLCKILGEMIKEGATTVGFADTVGINMPPEFGELVAYVKENTPGADDIVLTIHCHNDLGVATANTISICAGARQVEVTINGIGERSGNAPLEVVMALKCRGEYLMDGVYTNIDTRQIMATSKM

SEQ ID NO: 18111 - protein, 500 aa, Thermobifida fusca YX
MSIWRTKSIEQSIRDTDEPGYRLRRDLNGFDLIVFGIGVIIGTGIFVVTGRQAAENAGPAIVLSFLAAGAVCALAAMCYAEFASTVPVAGSAYTFGYATLGEFVAWIIGWDLILEFTLAASVVSVGWSEYAGDLLALPTTVTLAGLPVNLGAVAIAVLLGLVGMLGAKLSGRVTAVVVAIKVGIVLFIIAVGAAYVDPANWTPFIPPAQPAAADTTGVSDATLTHVLFGLEPTSFGPWGVVAAASVVFFSFIGFDIVATTAEETRNPRRDIPVGIFGSLLIVTLLYMAVAAVVTGMRPYTELNVTAPLSDAFRSVGADWAATLISLGGVIGITTVILVLMMGQARVAFAMSRDGLLPRALSRIHPRFGTPYVTTLLTTAAVALLGGLVPISTLEEMVNIGTLFAFVVVSVGVVVLRSLRPDLPRAFRVPWSPVLPLLAALSCLWLMLNLTALTWIRFAVWLVIGVAIYFLYGIHHSRLAAPPAQPSGEEGEGVGEGFLGA

SEQ ID NO: 18112 - protein, 178 aa, Brassica napus
KINNSFDQTGVDISNLFPKLADLTIDHCDDLVSLPSSICGMTSLNSLSITNCPRLSELPKNLSKLQALEILRLYACLELKALPVEICELPKLKYLDISQCVNLSCLPEEIGKLRTLEKIDMRECFFSDRLSSAVSLESLRHVICDKDVAFIWEEVEKAVPGLKIEAAEKCFSLDWLDE

SEQ ID NO: 18113 - protein, 491 aa, Vibrio angustum S14
MKKINVVWLKRDLRLTDHQALSVAANNDYPVMLIYIMEPMLLSDPHYSERHWRFIWQSLEDMNHQLACVNSQVFIFHGNAVECLDKLMHHCPINALFSHQEIGLGCTFERDLNIKAWCDKQQIQWHEFQQGAVIRGAKNRTNWDKHWNRVMRAPVFSVNLDKVNWVGTCPEQLAYMLFSPPESWRERVQGMQTGGSTLALQTLDDFFSRRGKEYYRSISSPTASRTACSRLSPYLAWGNISLRQVYQQVLAHWNVKGFRRSLIAFSSRLHWHCHFIQKFESEPDIEFYCMNRTYDRLLAESCSKNKMKLNAWKKGNTGIPLIDACMRCLYHTGYINFRMRSMLVSFLTHHLNIDWRDGVTHLAQLFLDFEPGIHYSQFQMQAGVTGINTIRIYNPTKQAQEHDPDGEFIHKWVPELANIPVPLLFEPWTLTELEVVMYQLDNNSCYLYPIIDLERSAKNARERLWGWKARKDVKSEVNAILNRHVRTKNTK

SEQ ID NO: 18114 - protein, 127 aa, Arabidopsis lyrata subsp. petraea
TEKDFLCKILGEMIKAGATTVGFADTVGINMPREFGELVAYVKENTPGADDIVLTIHCHNDLGVATANTISICAGARQVEVTINGIGERSGNAPLEVVMALKCRGEYLMNGVYTNIDTRQIMATSKM

SEQ ID NO: 18115 - protein, 355 aa, Gibberella fujikuroi
MSRSNPPNAAGSRKISFNVSEQYDIQDVVGEGAYGVVCSAIHKPSGQKVAIKKITPFDHSMFCLRTLREMKLLRYFNHENIISILDIQKPRNYESFNEVYLIQELMETDMHRVIRTQDLSDDHCQYFIYQTLRALKAMHSANVLHRDLKPSNLLLNANCDLKVCDFGLARSAASQEDNSGFMTEYVATRWYRAPEIMLTFKEYTKAIDVWSVGCILAEMLSGKPLFPGKDYHHQLTLILDVLGTPTMEDYYGIKSRRAREYIRSLPFKKKVPFRTLFPQDLGSALDLLEKLLAFNPVKRITVEEALKHPYLEPYHDPEDEPTAPPIPEEFFDFDKHKDNLSKEQLKQLIYQEIMR

SEQ ID NO: 18116 - protein, 127 aa, Arabidopsis lyrata subsp. petraea
TEKDFLCKILGEMIKAGATTVGFADTVGINMPPEFGELVAYVKENTPGADDIVLTIHCHNDLGVATANTISICAGARQVEVTINGIGERSGNAPLEVVMALKCRGEYLMNGVYTNIDTRQIMATSKM

SEQ ID NO: 18117 - protein, 409 aa, Sphingomonas sp. CB3
MIGSVAIVGASAAGVAAATTLRDEGYEGEITLIGGETDLPYERPAVSKDILLTGAAPPIIPEQRYAELNIKLLLGTRAERIDARYGQIELSDGRTMVSDRLLLATGGWPRRLPVPGAELGGLHYVRDARDGQAIRSGLRPGARIAVVGGGLIGAEVAASAVQAGCEVDWIEAEGLCLARALSRPLAEAMMDVHRQRGVRVHANALVVRLIGERSVQAVELADGRRIDADMVVVGIGITPAAELAEEADLTVSDGIVIDPFCRTSAENVYAAGDVARHQTRYMATPSRLEHWRNAQEQGVTAARAMLGHRQPYDELPWFWTDQYDLHIEGCGVMRADDETILRGNLADGNATVFHLRAGSLVGACALNRQGDVRGAMRLITRGLTPSADILSDPTKDLRKIEKELSRASA

SEQ ID NO: 18118 - protein, 230 aa, Arabidopsis thaliana
MAFSYASFSTPFNGFAANPSPITSAFLGPSLRFSTRTSKTRNPSNGVSVKSSNSHRFLVKSKNFSVYARAAAEKSVHDFTVKDIDGNDVSLDKFKGKPLLIVNVASRCGLTSSNYSELSQLYEKYKNQGFEILAFPCNQFGGQEPGSNPEIKQFACTRFKAEFPIFDKVDVNGPSTAPIYKFLKSNAGGFLGDIIKWNFEKFLVDKKGKVVERYPPTTSPFQIEVPNSKL

SEQ ID NO: 18119 - protein, 497 aa, Zea mays
MVLSHASSGRDDDDAVASTFASRYVRERLPRYRMPERSIPREAAQQIISDELMLDGNPRLNLASFVTTWMEPECDKLIMDSINKNYVDMDEYPVTTELQNRCVNMIAHLFNAPIKEDETAIGVGTVGSSEAIMLAGLAFKRKWQNKRKEQGKPCDRPNIVTGANVQVCWEKFARYFEVELKEVKLSEGYYVMDPVKAVEMVDENTICVAAILGSTLTGEFEDVKQLNDLLTEKNKETGWDVPIHVDAASGGFIAPFLYPELEWDFRLPLVKSINVSGHKYGLVYPGVGWVIWRSKDDLPEELIFHINYLGTDQPTFTLNFSKGSSQIIAQYYQLIRLGFEGYRNIMQNCQENAAILREGIAATGRFDVLSKDAGVPLVAFSLRDSSRFSVFDVSENLRRFGWIVPAYTMPADAEHVAVLRVVVREDFSRSLAERLVSDVRKILRELDARATHAVRVATATAEQSGDGVVAKKSVLEIEREVAARWMNAVNKKKTGVC

SEQ ID NO: 18120 - protein, 589 aa, Staphylococcus aureus subsp. aureus NCTC 8325
MSKTQHEVNQNIDPLKMAESLEPEQLNEKTLNDMRSGSEVLVEALLKENVDYLFGYPGGAVLPLYDTFYDGKIKHILARHEQGAVHAAEGYARVSGKTGVVVVTSGPGATNVMTGITDAHCDSLPLVVFTGQVATPGIGKDAFQEADILSMTSPITKQNYQVKRVEDIPKIVHEAFHVANSGRKGPVVIDFPKDMGVLATNVDLCDEINIPGYEVVTEPENKDIDTFISLLKEAKKPVVLAGAGINQSKSNQLLTQFVNKHQIPTVTTLLGLGAVPYEDTLFLGMGGMHGSYASNMALTECDLLINLGSRFDDRLASKPDAFAPNAKIVHVDIDPSEINKVIHVDLGIIADCKRFLECLNDKNVETIEHSDWVKHCQNNKQKHPFKLGEEDQVFCKPQQTIEYIGKITNGEAIVTTDVGQHQMWAAQFYPFKNHGQWVTSGGLGTMGFGIPSSIGAKLANPDKTVVCFVGDGGFQMTNQEMALLPEYGLDVKIVLINNGTLGMVKQWQDKFFNQRFSHSVFNGQPDFMKMAEAYGVKGFLIDKPEQLEEQLDAAFAYQGPALIEVRISPTEAVTPMVPSGKSNHEMEGL

SEQ ID NO: 18121 - protein, 335 aa, Thermobifida fusca YX
MTIRVGVNGFGRIGRNFWRAVQAAGGSDVEIVAVNDLTDKATLAHLLKYDTVLGTLPGEVEVGEDSITVGGTTMKALAQRDPAQLPWGDLGVDIVVESTGFFTKAEDAKKHLDAGAKKVIISAPAKGEDLTVVMGVNDDKYDPANHHILSNASCTTNCVAPMAKTLMENFGIVKGLMTTVHAYTNDQVILDYPHKDLRRARAAAQNIIPTTTGAAKATALVLPELKGKLDGLAMRVPVPDGSVTDLVVTLEREVTKEEVNAAFKAAAEGALKDILVYTEDPIVSSDIVGTPASCTFDASLTMAFGTQVKVVGWYDNEWGYSNRLVDLVKLVGSNL

SEQ ID NO: 18122 - protein, 502 aa, Aspergillus nidulans FGSC A4
MKPPYYMETGCKRNPGSDSTLKVRWTLYTRLLQSANQGLGIDPGSGQVFASCPTNTVADVDAYVSSAHRSFLSYRETNPRARAKMLLNWHNLIAQSKNDIAKLVVYETGKPMAEAVGEVDYALGFAWWFAGEAERVRGSIAQPSISERRTFVIKQPIGVCIALVPWNFPVAMIIRKAAAALAAGCTVVIKPSPETPLSVLALADLALQAGFGPGVINVLTTDNLNTPDVSEALCKHPLVRKVTFTGSTAVGQLIARHCSEGLKKVTLELGGNCPFIIFDDGDLEQALAALMILKWRTAGQACTHANRVYVQSGVYDTFLRMIVNATKQLKVGHGASPGTTMGPLTTSRGIEKLERHVADALAKGARLELGGHRLQLEGNYFQPTIISGMSAYMLTTQEEIFGPLLGLYRFETEEEAVRMANDTSMGLASYFFTRDVSRTWRLLENLEAGMIGMNTGNSSAAESPFGGIKASGYGKEAGKDVAIEEYLIAKTGTLTVGAVSKL

SEQ ID NO: 18123 - protein, 608 aa, Streptomyces hygroscopicus
MCGITGWVSFHQDPRTQAPVIEAMTATLAPRGPDAAGVWLGPRAAIGHRRLAVIDLAGGVQPMTDRPDAPTTVLTYSGEIYNHHELRSQLSGLGHEFRTRSDTEVVLRGYAEWGEKVADHLDGMFAFAVWDERAQRLLLVRDRLGVKPLFWAEVDGGLAFASEPKALFAHPEIRPRVDADGLREAYSLLFNTGPTVWSGVREVEPGGLLLLDRDGIRERRYWQLEADAHPDDRDATIARVHDLVSTAARAQLEADVPLCSLLSGGIDSTVLTALLADELRLREGPGARIRSYAVDYSDQAESFTGDVLRTGHDTPYATEAGAFLGTDHSTVVLDPRALLDPEHRRAVVVARDSPIGVGDMDTSLHLLFGEIRKHSTVALSGEAADEVFGGYPWFHNPKALATATFPWLLVTGDEAAMPLNPELDLRIGEFRDDTYRTALAAVPHLDGETPTEHRQREMQHLSLTRWLRQLLHRKDRLSMAQGLEVRVPYCDHRLVEYAFTTPWALKNFDGREKSLLRAAGTGLAPDSVLHRPKNHYPATHHPDYNRGLQNMARDALADDTVRSLADETRLKPCLDTPPGQLEWGHRLRLERVVDLALWLDHYQPELAL

SEQ ID NO: 18124 - protein, 112 aa, Frankia sp. CcI3
MRLVTAILRPHRIDDVRTALETFGIQGMTVSQVTGFGIELWRTQTYRGQTFHDESVSAVRVECVVADCDVEDVIEVIRRSGGSAASGAGKIWVLPVDAIARVRTGERGPDAL

SEQ ID NO: 18125 - protein, 318 aa, Vibrio cholerae O1 biovar eltor str. N16961
MSNVKHSKLLILGSGPAGYTAAVYAARANLKPVLVTGMQQGGQLTTTTEVENWPGDAEGLTGPALMERMKEHAERFDTEIVFDHINSVDLSSRPFRLTGDSQEYTCDALIISTGASAKYLGLESEEAFKGRGVSACATCDGFFYRNQKVAVVGGGNTAVEEALYLSNIASEVHLVHRRDSFRSEKILIDRLMDKVANGNIVLHTHRTLDEVLGDEMGVTGVRLKDTQSDMTENLDVMGVFIAIGHQPNSQIFEGQLEMKNGYIVVKSGLEGNATQTSIEGVFAAGDVMDHNYRQAITSAGTGCMAALDAERYLDSQGK

SEQ ID NO: 18126 - protein, 509 aa, Staphylococcus aureus subsp. aureus NCTC 8325
MSSHIQIFDTTLRDGEQTPGVNFTFDERLRIALQLEKWGVDVIEAGFPASSTGSFKSVQAIAQTLTTTAVCGLARCKKSDIDAVYEATKDAAKPVVHVFIATSPIHLEHKLKMSQEDVLASIKEHVTYAKQLFDVVQFSPEDATRTELPFLVKCVQTAVDAGATVINIPDTVGYSYHDEYAHIFKTLTESVTSSNEIIYSAHCHDDLGMAVSNSLAAIEGGARRIEGTVNGIGERAGNAALEEVALALYVRNDHYGAQTALNLEETKKTSDLISRYAGIRVPRNKAIVGQNAFSHESGIHQDGVLKHRETYEIMTPQLVGVSTTELPLGKLSGKHAFSEKLKALGYDIDKEAQIDLFKQFKAIADKKKSVSDRDIHAIIQGSEHEHQALYKLETLQLQYVSSGLQSAVVVVKDKEGHIYQDSSIGTGSIVAIYNAVDRIFQKETELIDYRINSVTEGTDAQAEVHVNLLIEGKTVNGFGIDHDILQASCKAYVEAHAKFAAENVEKVGN

SEQ ID NO: 18127 - protein, 348 aa, Staphylococcus aureus subsp. aureus NCTC 8325
MTYNIVALPGDGIGPEILNGSLSLLEIISNKYNFNYQIEHHEFGGASIDTFGEPLTEKTLNACKRADAILLGAIGGPKWTDPNNRPEQGLLKLRKSLNLFVNIRPTTVVKGASSLSPLKEERVEGTDLVIVRELTSGIYFGEPRHFNNHEALDSLTYTREEIERIVHVAFKLAASRRGKLTSVDKENVLASSKLWRKVVNEVSQLYPEVTVNHLFVDACSMHLITNPKQFDVIVCENLFGDILSDEASVIPGSLGLSPSASFSNDGPRLYEPIHGSAPDIAGKNVANPFGMILSLAMCLRESLNQPDAADELEQHIYSMIEHGQTTADLGGKLNTTDIFEILSQKLNH

SEQ ID NO: 18128 - protein, 164 aa, Oryza sativa
MENYQGQHGYGADRVDVYGNPVAGQYGGGATAPGGGHGVMGMGGHHAGAGGQFQPVKEEHKTGGILHRSGSSSSSSSSEDDGMGGRRKKGIKEKIKEKLPGGNKGNNQQQQQMMGNTGGAYGQQGHAGMTGAGTGTGVHGAEYGNTGEKKGFMDKIKEKLPGQH

SEQ ID NO: 18129 - protein, 112 aa, Corynebacterium glutamicum ATCC 13032
MKLITAIVKPFTLTDIKDALEQAGVQGMTVTETQGFGQQKGHTEVYRGAEYAVDFVPKVKIEVIISDAQAEEVINIIVETARTGKVGDGKVWMTNIEELVRVRTGERGEAAL

SEQ ID NO: 18130 - protein, 490 aa, Sinorhizobium meliloti 1021
MTISETLLVKLKDPSLAVDKGLIGAEWLDRSDSGKTFDVSNPATGEVIAILPDMSRSETARAIDAAHAAQRAWAEKTGKERAAVLRNLYDLVVANADDLATILTMEMGKPLTEAKGEILYGASYVEWFGEEAKRVYGDTIPGHQPDKRIIVLKQPIGVVAAITPWNFPNAMLARKLAPAAAAGCAVVSKPAAETPLSALALALLAERAGLPAGVFNVILSTDSAEVGKEMCANDKVRKLTFTGSTNVGKILMRQGADQIMKLGLELGGNAPFIVFDDADLDAAVEGAMVAKYRNNGQTCVCANRIFVQAGIYDAFAARLTAKVSEMTIGDGFEPDVDAGPLISEKALAKVEEHIRDAVTKGADLVLGGNARGGLFFEPTVLTGATMDMKIAGEETFGPVAPLFKFETENEVVSMANKTEFGLASYFYSKDVSKVFRVAEALEYGMVGINTGLISTEVAPFGGVKQSGQGREGSKYGIDDYVETKYLCLSI

SEQ ID NO: 18131 - protein, 480 aa, Oceanicola granulosus HTCC2516
MSQPHRPHGEPSFRQSVDIMFNRAVALMDLPPGLEEKIRVCNATYTVRFGVRLRGGIHTFTGYRSVHSEHMEPVKGGIRYAMSVNQDEVEALAALMTYKCALVETPFGGSKGGLRIDPREWEEDELERITRRFAYELAKRDLIHPAQNVPAPDMGTGEREMAWIADQYRRMNTTDINANACVTGKPLNSGGIAGRVEATGRGVQFALREFFRHPDDINAAGLSGTLEGKRVIVQGLGNVGYHAAKFLQEEDGCRIVGIIERDGALTAPDGLDVDDVHAWIGEHGGVTGYPRATYTPEGDAVLEATCDILIPAALEGVIHKDNAARIQAPLIIEAANGPITAGGDEILREKGCVIIPDMFANAGGVTVSYFEWVKNLSHIRFGRMQRRQEEARHELIVRELERLSADRDLGWELSPNFKDRYLKGAGELELVRSGLDDTMRTAYQAMSETWHGRNDVHDLRTAAYLVSIERVAASYRAKGL

SEQ ID NO: 18132 - protein, 259 aa, uncultured Bartonella sp.
NNMINAGLQGVDFVVANTDAQALAMSKAERIIQLGAAVTEGLGAGALPEVGQAAAEECIDEIIDHLADSHMVFITAGMGGGTGTGAAPVVARAAREKGILTVGVVTKPFQFEGARRMKTAEAGIEELQKSVDTLIVIPNQNLFRIADEKTTFADAFAMADQVLYSGVASITDLMIKEGLINLDFADVRSVMHEMGRAMMGTGEASGEGRALNAAEAAIANPLLDDTSMRGARGLLISITGGRDMTLFEVDEAANRIREE

SEQ ID NO: 18133 - protein, 379 aa, Schizosaccharomyces pombe
MVADTKLYDCLEVRPEASEAELKKAYRKLALKYHPDKNPNGEKKFKEISLAYEVLSDPQRRKLYDQYGITEGNAAPPPPGAEGGPGAGFGGFPGAGPGGARTFHFNMGGPGGAQFFSASDPNDIFERVFGHAFAGGGGMGGGMGGMGGMDDDMDMDGGFGTRTRGGGMPGGFANMFGGGGAGPHARRSHPSFGGSRPSQPPAQNEVITRPLNVSLEDLFTGCTKKMKISRHIIDASGQSVKADRILEIKVKPGWKAGTKIKFAGEGDEKPDGTVQDIQFVLAEKPHPVFTRSGDDLRMQVELSLKEALLGFSKQISTIDGKKLKVSSSLPTQPGYEITYPGFGMPLPKNPSQRGNMIIECKVKFPTELTPAQKTAAEAF

SEQ ID NO: 18134 - protein, 816 aa, Buchnera aphidicola str. Bp (Baizongia pistaciae)
MKILKFGGTSLSNSELFFHVATIIENNLNNEQIAIVLSAPGNTTNLLEIAINQTINNKNIIPIVQKIEKNFLKLINDIYQVEQKLLYEKIKNNIENKLLELKNLLQGINLLRQCPDKIRAKIISSGEYLSISIMNSILISRGYNTTIIDPVKKLLTKEDTYLNATVNIKISKFRILSMKIPKHHIILMPGFTAGNKQGELVTLGRNGSDYSATILSVCLNSTMCEIWTDVNGVYTCDPKLVSDAKLLTSLSYREAIELSYLGAKILHPNTIYPIQKFKIPCTIKNTHNPSSIGTKISCNHVKNKNLITGVTYLENVHMFSISCLYSKNIETIIPKIFSCMSLSKIWIILTIQTSSQNTISFCILKTMTNTALHVLHKALYLELKHKLLKPIKVEKKLTLISVISSDILNNTKITEKVFSILKHVNINTLAISKGASKNSISIVVKHDDGILGVRALHKGIFNKNCTAEIFLIGIGRVGQTFLKQIIEQKNWLKSKNIDLKICGIANSKNFILNLDGINPKNWKRDLNLSKKSFNFKHLLNSIQNYYLINPIIVDCTSDKNIANQYISFINCGFHIVTPNKKANTTNWKYYEDIRLAAQKEKKKFFYETNVGAGLPVIENLKNLLRTGDTLIHFKGILSGSLSFIFGKLEDNISLSEATKQAQSLGFTEPNPKDDLSGIDVARKLLILAREVGYKLELKDIKIEPLLPKEFNNISNTTDFITKLKELDQIFCNRVKKARKLGKRLRFVGIINQKGNCQVKIDEVDHNDPLYNIKNGENALAFYSKYYQPIPLVLRGYGAGNNVTASGIFSDVLRILL

SEQ ID NO: 18135 - protein, 712 aa, Hordeum vulgare subsp. vulgare
MSVSSSSMCGGDAGMKCVVWFRRDLRVEDNPALAAAARTAGEVVPAYVWSPEEDGPYFPGRVSRWWLSQSLKHLEASLHRLGAGKLVTRRSADSVAALLQLVRDTGATHLFFNHLYDPISLVRDHRLKEMLTSEGIVVQSFNADLLYDPWEVNDDDGQPFNMFMPFWNRCLSMPYDPPAPLLPPKRINSGDLSMCPSDDLIFEDESERGSNALLARAWSPGWQNADKALSAFLNGPLIDYSVNRKKADSANTSLLSPYLHFGELSVRKVFHLVRMKQLVWSNEGNHAAEESCTLFLRSVGLREYSRYLCFNHPCSHEKPLLAHLRFFPWVVDESTFKFWRQGRTGYPLVDAGMRELWATGWLHDRIRVVVSSFFVKVLQLPWRWGMKYFWDTLLDADLESDALGWQYISGSLPDSRELDHIDNPQLEGYKFDPHGEYVRRWLPELARLPTEWIHHPWDAPASVLQAAGVELGSNYPLPIVELDTAQVRLQEALSEMWQLEAASRAAMDTGMEEGLGDSSEVPPIEFPQDLQMEVHWEPARVAPNVLTTAQRRQDQMVPTMTTSLNRVETEISADLGNSVDSRAEVPFRMHFEPRTEREEIIQSTGNAVGTNGIHHHNNFQQPQHRMRNIFAPSVSEASSSWTGRDGGVVPVWSPPAASGHSETYGADEADVSSRSYLDRHPQSHRIMNWHQLSQSLTTGRDVENSVQPNYIG

SEQ ID NO: 18136 - protein, 332 aa, Listeria monocytogenes str. 4b F2365
MPNKVYDVTIIGGGPIGLFSAFYSGLRSMKTKIIDAEPAVGGKVRYFFPEKIIRDIGGIPAITGENLVANLKQQAETFHPTIVCSERVVDVTKLSDGTFQLTSHNGSIHFSKTIVIATGSGTFEVNKLEALHAEDFPFAIHYDVKNIEQFRDKVVVVSGGGNSAIDWAQTLEPIAKQVHLIYRGEDFKAHEESVRELQNSRVEIHIHHEINELIGTNNQLTKINVCCNKTQATKTIQTDALFINHGVKVDLGTMAEWGFEQADFGIVVDDEMKTTVPGIFACGDSATYPRKIRIIAAGLHEGPIAINSAKKYLEPTAADEAMISTHHESFIG

SEQ ID NO: 18137 - protein, 1045 aa, Arabidopsis thaliana
MYYHSLSSYSILFFLFSLFHHLPCASSNQGLGWCESLFQCGNITADFPFWGGNRHKPCGHPLLELHCNNNNITSLYISNQEFYVRQINQTSNTLTLARSDLLGSFCSSYAYNTTTLPPEIFELSPTYKSLTVLYHCDPKLSYRSSYTCPALGTFSMSQSVDYQYSCQNSFTVNVPTSFHPEERGLNLTNLESALRKGFEVKLVIDEIPCQQCSSTRGICSFNGTTQSCCNATSPSGGVSCVPYQHSADEVYRRCSESFSCGSQRDLNYPLWKPGREECGHPNFKLNCSGGFAEINIASVKFRILDSYRSLIRLARSDYIGDLCPANPLTAPFIEKFLPVLELTGETELLTLYYGCRFNSSDIPANIYVGELGCDEGRSYYVTRNLSSPLLDSSRGVLNNLREMCKRNVSVPASGPALFDLQTRPNQDNLKMALDQGFRMLITSDCERCRGSGGACGYNQTSSGFGCYCKDGKCGYEYDALGALTGVVIVFLVLLCPCFRVQIFRKRKTSDEVRLQKLKALIPLKHYTYAEVKKMTKSFTEVVGRGGFGIVYSGTLSDSSMVAVKVLKDSKGTDGEDFINEVASMSQTSHVNIVSLLGFCCEGSRRAIIYEFLGNGSLDKFISDKSSVNLDLKTLYGIALGVARGLEYLHYGCKTRIVHFDIKPQNVLLDDNLCPKVSDFGLAKLCEKKESILSLLDTRGTIGYIAPEMISRLYGSVSHKSDVYSYGMLVLEMIGARKKERFDQNSRSDGSSIYFPEWIYKDLEKANIKDIEKTENGGLIENGISSEEEEIARKMTLVGLWCIQSSPSDRPPMNKVVEMMEGSLDALEVPPRPVLQQISASSVSDSFWNSEESSSASDILVFSTNSKLESSSLCFSPVITLPTLNSTNNILQREETVKTENKSQESIPEVFSCKTRIVHFDIKPQNVLLDDSFCPKVSEFGLAKLCEEKESILSMLDTRGTVGYIAPEMISRVYGNVSDKSDAYSYGMLVLEIIGARNKEKANQACASNTIQCTFLNGYIGILNHASLEGILRMELTAKKMSLQRR

SEQ ID NO: 18138 - protein, 416 aa, Buchnera aphidicola str. Bp (Baizongia pistaciae)
MDKQVVMPDIGTDLVEVIEILVKIGDQVKKDDSLITVEGQKASIEIPASHTGTIKNIIVHIGEKITTGSLIAILNGIDDNVKSKNDSSSYSFKNSKNTSTNSNLGNVNNNINNRTILVHATPTVRRLARKFDIKLENITGTGRKGRILKEDVISYKNISLFNDIKKSLKKTNVNYYKDNVTCDDFKSIELTRTQIRSSKNLLKSWLTIPHVTQFDESDITELENFRQKYNSDLKDKSKKLTILIFVIKAVSKALEMFPKFNGRLINKDNRIAIVLNEHINIGIVVDTDDGLLVPVINRVNKKNISSISNDLRIISERARSRKLNFSDIKEYGSFTISNLGGIGGTNFTPIIKYPELAILGISRALIKPYWNSHAFIPKLMLPLSLSYDHRAIDGVAAVRFITFVKKMLTDIRFLMI

SEQ ID NO: 18139 - protein, 406 aa, Mesorhizobium loti MAFF303099
MRRVVVTGLGIVSSIGNNANEVQTSLHDARSGISFSDSFAEHGFRCQVWGAPTLDPSAMIDRRAMRFLSQGAAWNHVAMDQAIADAGLGESDITNERTGIVMGSGGPSTRTIVEAAETTLKNGSPKRIGPFAVPKAMSSTASATLATWFKIHGVNYSISSACSTSAHCIGNGYELIQWGKQDMVFAGGHEDLDWTMSDLFDAMGAMSSKFNDRASAASRAYDVNRDGFVIAGGAGVLVLEELEHAKARGAKIYAEIVGYGATSDGYDMVAPSGEGAVRCMRQALATVSTPVDYINTHGTSTPVGDSKEMGAIREVFGEKMPFITSTKSLTGHSLGAAGVQESIYSILMMQGGFIGESAHIETLDPEFEGMPIVRKRIDNAKIDTVLSNSFGFGGTNATLVFQRYSA

SEQ ID NO: 18140 - protein, 130 aa, Arabidopsis thaliana
  misc_feature (91)..(91): Xaa can be any naturally occurring amino acid
  misc_feature (103)..(103): Xaa can be any naturally occurring amino acid
CWSQTPRVPDLEEFYAVFRSMVVSPAQATMVCPFNGLKNSDDLPATQQANNDITSISCNGGRVNCMQVCAPHVKKKCETLYYLPDLTEYEXAKEVDYLIHNKXIPYVEFELEHGFVNREHVNSPGYYDGR

SEQ ID NO: 18141 - protein, 352 aa, Arabidopsis thaliana
MKWVFPIEEDRVKFEERIKEEEEEGGGIAMGVDYYKVLQVDRNAKDDDLKKAYRKLAMKWHPDKNPNNKKDAEAKFKQISEAYDVLSDPQKRAIYDQYGEEGLTSQAPPPGAGGGFSDGGASFRFNGRSADDIFSEFFGFTRPFGDSRGAGPSNGFRFAEDVFSSNVVPPRKAAPIERQLPCSLEDLYKGVSKKMKISRDVLDSSGRPTTVEEILTIEIKPGWKKGTKITFPEKGNEQRGIIPSDLVFIVDEKPHAVFKRDGNDLVMTQKIPLVEALTGYTAQVSTLDGRSVTVPINNVISPSYEEVVKGEGVPIPKDPSKKGNLRIKFTVKFPSRLTTEQKSGIKRMFSSS

SEQ ID NO: 18142 - protein, 338 aa, Gloeobacter violaceus PCC 7421
MTIKVAINGFGRIGRNFLRCWLGRKQSDFEVVAINDTSDPNTNAHLLKYDSMLGQFSGEVSADENSLTANGHTIKCFSDRNPLNLPWKDWGVDLVIESTGVFTSRDGASKHLAAGAKKVLITAPGKNDDGTFVMGVNDHNYDPEKHTIISNASCTTNCLAPVAKVLHENFKIVKGTMTTIHSYTGDQRLLDASHRDWRRARAAALSIVPTSTGAAKAIGLVLPELKGKLDGLAFRVPTPNVSVVDLVVEVEKPTLVEQVNHVLKEASENELKGILAFSEIPLVSIDYRITDVSSIVDAQLTMVLKDNLVKVISWYDNEWGYSQRVVDLAELVARKWAA

SEQ ID NO: 18143 - protein, 848 aa, Glycine max
  misc_feature (102)..(102): Xaa can be any naturally occurring amino acid
LERTTAGVVQQFPNNTCSVYITYSKEEEAIRCIQNVHGFVLEGRPLRACFGTTKYCHAWLRNMPCSNPDCLYLHEIGSQEDSFTKDERISAYPTRHGPSQYXQPPPLDDCMDNSSGKPIVKNSSSTSVSIVRSSPPNGTSGRPIALSAVAWGTRATNCQPAADGLLCPNGLSRPKPDTISSSLPFSSAVACTIQASLNSDVTKRPLLSDGSRSMTPQIKNELLKPVEQNRSMDILDSAGERTLVSDVSLSAVKLNNQLSSLPLAGDSGRGSFTATNTTSSIDITRQPLSFGPEEAVISTCEEIENLSCEFSSVYIDRNAQNKHYSLSIPSSSPDNVLVKSMQSQELQYNTDKLKDLMIKNADSKAAALYNEVCNLKEQCDLSLDSQSQVVSANTEVEDDVTTFDNQRLKDPEVIGSYLPESASFLHVSNHSSPLLLQRGDPCNVVNAGFLDANDKVEDNSLLHAHNICNGYSDEISTSSYWFRHDASNEHHIGRLVSDAVNIGSDAVMDKGESSIISNILSMEFDAWDDSLASHESLTKLLGDNTDSQNGPLKKSSSRKVQSNNQSRFSFAWQEESKFQANVPPSSGATQPFPKNGSLIQDFVERDFSLNKLGFANGFPSNNLKESGNLGSGHFIASNNKLSAVSRAQISAPPGFSVPNRAPPPGFSSVERMGQAFDSLSGNSLLDPSFLLRNSYQTPSNGNIGGPGDVEFMDPAILAVSKGPEQFNYFENEARVQLLMQRSPSPQQDLRFSEIGNSFSQFGDSYGISSRLNQSQVSNLASFPQLSLQQSRNAVLSNGQLDGRNGNGLGVAELLRNERLGFNKFYRGYDDSKYRMPNSMDVFNRTFGI

SEQ ID NO: 18144 - protein, 127 aa, Arabidopsis halleri
TEKDFLCKILGETIKAGATTVGFADTVGINMPPEFGELVAYVKENTPGADDIVVAIHCHNDLGVATANTISICGGARQVEVTINGIGERSGNAPLEVVMALKCRGEYLMDGVYTNIDTRQIMATSKM

SEQ ID NO: 18145 - protein, 588 aa, Vibrio cholerae O1 biovar eltor str. N16961
MSIYNPTSKSVSFSRFTSTLPINRPNMNNDKRPLYISYAGPALLSTPLLNKGSAFSAEERASFNLEGLLPEATETIQEQVVRAYQQYRGFESDMDKHIYLRNIQDTNETLFYRLVQNHISEMMPIIYTPTVGAACENFSNIYRRGRGLFISYANRDRIDDLLNNAANHNVKVIVVTDGERILGLGDQGIGGMGIPIGKLSLYTACGGISPAYTLPVVLDVGTNNPQRLADPMYMGWRHPRITGPDYDNFVEEFMQAVQRRWPDALIQFEDFAQKNAMPLLERYKNRVCCFNDDIQGTAAVTVGSLLAACKAAGSQLSQQRITFLGAGSAGCGIAEAIIAQMVSEGISDEQARSQVYMVDRWGLLEEGMPNLLDFQQRLVQKKANTQHWTTENNGYSLHDVIRNAKPTVLVGVSGAPGLFSEEIIKEMHQHCPRPIVFPLSNPTSRVEALPSDIIRWTNGEALVATGSPFDPVLHEGKTYPIVQCNNSYIFPGIGLGVLAANARRVTDEMLMESSRALASCSPLAINGHGPLLPPLESIHSVSKKIAFAVAKKAIEQGVAPEVTDEALEASIEQHFWQPVYRRYKRTAF

SEQ ID NO: 18146 - protein, 774 aa, Arabidopsis thaliana
MKFFGWMQNKLHGKQEITHRPSISSASSHHPREEFNDWPHGLLAIGTFGNKKQTPQTLDQEVIQEETVSNLHVEGRQAQDTDQELSSSDDLEEDFTPEEVGKLQKELTKLLTRRSKKRKSDVNRELANLPLDRFLNCPSSLEVDRRISNALCDEKEEDIERTISVILGRCKAISTESKNKTKKNKRDLSKTSVSHLLKKMFVCTEGFSPVPRPILRDTFQETRMEKLLRMMLHKKVNTQASSKQTSTKKYLQDKQQLSLKNEEEEGRSSNDGGKWVKTDSDFQASVHEYRSERFVSKGNAFVFHGGSEGIYSSSPSDNFTSDSDSVSFIRFEKIKFQRPEEVSNRSSLSIHAVVFEVEDRENIGGSAYGGQRAVCCTSDLAKLGVCSHGDVIYRPSAKDSGWPQVFGVSLAENEFSVILPTRSIQVTRTGMYNLYFIHCDSDLKDLVVEGKTIWKNPTGYLPGRMAPLMYFYGFMSLAFVLLGIFWFSQCARFWREVLPLQNCLTLVITLGMCEMALWYFDYAEFNETGIRPTVITIWAVTFGSIKRTSARIIILMVSMGYGVVRPTLGGFTSKVIMLGVTFFIASEILELMENVGAVSDLSGKARLFFVLPVAILDAFFIIWIFKSLSATFKKLQTRRLLVKLDIYRKFTNALAVDILVSLGWICYELYFKSKDVYNEHWQNAWIIPAFWQLLSFSLLIVICSLWAPSQNSTRYAFSGSSGDTSAEFEKDDYTLTLIKPSPIPSHEVKNLSETRLLPADEGEPEKDLEEDKRE

SEQ ID NO: 18147 - protein, 182 aa, Arabidopsis thaliana
MDSIVSSSTILMRSYLTPPVRSCSPATSVSVKPLSSVQVTSVAANRHLLSLSSGARRTRKSSSSVIRCGGIKEIGESEFSSTVLESAQPVLVEFVATWCGPCKLIYPAMEALSQEYGDKLTIVKIDHDANPKLIAEFKVYGLPHFILFKDGKEVPGSRREGAITKAKLKEYIDGLLNSISVA

SEQ ID NO: 18148 - protein, 316 aa, Methylobacillus flagellatus KT
MATKHARLLILGSGPAGYTAAVYAARANLKPVLITGIAQGGQLMTTTEVDNWPADADGVLGPELMARFQKHAERFNTEIIFDHIHTTHLTEKPIRLVGDAGEYTCDALIIATGASAKYLGLPSEEAFAGKGVSACATCDGFFYRNQEVAVIGGGNTAVEEALYLANIASKVTLVHRRDKFKAEAILVDKLMERVKEGRIVLETFQTLDEVLGDDSGVTGIRLKDVNSGATKEIALKGVFIAIGHKPNTDIFEGQLEMEGGYIVTKAGREGNFTATSVPGVFAAGDVQDHIYRQAVTSAGTGCMAALDAERYLDQLS

SEQ ID NO: 18149 - protein, 556 aa, Frankia sp. CcI3
MSTTEPAAPVAPLDITATEEWAALTTHLREISEVSLRDLFAADPRRGETFAAEADGLYLDYSKNRLTARTVELLTALARRAGLADRIEAMFRGERINVTENRPVLHVALRAPAGTRIEVDGVDVVPDVHRVLDAMSQFADRVRSGDWLGATGERIRTVVNIGIGGSDLGPAMAYDALRDYADRSIEVRFVSNVDPTDIWEATADLDPASTLFIVSSKTFTTLETISNARAARSWLTGLLGEDAVSRHFVAVSTNAEKVAEFGIDTVNMFEFWDWVGGRYSVDCAIGLSLMIAIGPPNFREFLAGFAAMDTHFRTAPFERNLPVLLGLIGLWYRDFFGTATHAVLPYSHYLGRFPAYLQQLDMESNGKSVDLTGRPVSTPTGPIVWGTPGTNGQHAYYQLLHQGTTIVPADFIGFVRPNHPGVGTADGAGVDQHALLLANFLAQTEALAFGRTAAEVAAEGVTPDLVAHRTFPGNRPSNTLLAQKLTPFALGQLIALYEHKVFTQGVIWGINSFDQWGVELGKVLAGRIIPELGSEQEPELGHDSSTNALIKRLRAG

SEQ ID NO: 18150 - protein, 491 aa, Listeria monocytogenes str. 1/2a F6854
MVFLSIKETALPKVQTKLFINGKWTDGDNKETKDIVNPANGDVIAKIAQAGPSETKKAIKAAKDAFPDWAKMELADRVKLLHKIADLMEEKADTLAKIMTLEQGKPLKESKGEVLTGVENFRFAAEEARRLYGETIPAPNNHAFIVKKQPIGVVAAITPWNFPGGMVTRKLAPALATGNTIVLKPSGDTPLSALAIFEIFEEAGLPKGVANIVMGSSKEIGETLTDSDDVRKLTFTGSTKVGQTLFKQSADTLKKISLELGGHAPFIVFDDANLDAAVNDLVAAKFRNNGQVCVSPNRIFVAKEIKEKFTKALVAKVEQLKVGNGLDNVNVGPLIREDAIDKIDKQLKNATDKGAKVLTGGGRLTGSDYDNGNFYKPTVLDNVTREMDIFYEETFGPVIPLITFETEDEAIEMANDSEFGLASYFYTKDLARVEKVGAALEYGMVGANEIAISNPETPFGGVKHSGFGRENGHYGMEEYIQVKFINLKYRD

SEQ ID NO: 18151 - protein, 133 aa, Arabidopsis thaliana
  misc_feature (30)..(30): Xaa can be any naturally occurring amino acid
  misc_feature (32)..(32): Xaa can be any naturally occurring amino acid
  misc_feature (36)..(36): Xaa can be any naturally occurring amino acid
  misc_feature (38)..(38): Xaa can be any naturally occurring amino acid
ILRAKWPPPLNLPGSESPLVFGNKSPTGNXKXFGVXPXAPHALFMLQPMVMASSGSNVKWSQKRYGPGSLKRTQCPSECDRRCKKTQYHKACITFCNKCCRKCLCVPPGYYGNKQVCSCYNNWKTQEGGPKCP

SEQ ID NO: 18152 - protein, 681 aa, Arabidopsis thaliana
MSGSVSGCGSGGCSIVWFRRDLRVEDNPALAAAVRAGPVIALFVWAPEEEGHYHPGRVSRWWLKNSLAQLDSSLRSLGTCLITKRSTDSVASLLDVVKSTGASQIFFNHLYDPLSLVRDHRAKDVLTAQGIAVRSFNADLLYEPWEVTDELGRPFSMFAAFWERCLSMPYDPESPLLPPKKIISGDVSKCVADPLVFEDDSEKGSNALLARAWSPGWSNGDKALTTFINGPLLEYSKNRRKADSATTSFLSPHLHFGEVSVRKVFHLVRIKQVAWANEGNEAGEESVNLFLKSIGLREYSRYISFNHPYSHERPLLGHLKFFPWAVDENYFKAWRQGRTGYPLVDAGMRELWATGWLHDRIRVVVSSFFVKVLQLPWRWGMKYFWDTLLDADLESDALGWQYITGTLPDSREFDRIDNPQFEGYKFDPNGEYVRRWLPELSRLPTDWIHHPWNAPESVLQAAGIELGSNYPLPIVGLDEAKARLHEALSQMWQLEAASRAAIENGSEEGLGDSAEVEEAPIEFPRDITMEETEPTRLNPNRRYEDQMVPSITSSLIRPEEDEESSLNLRNSVGDSRAEVPRNMVNTNQAQQRRAEPASNQVTAMIPEFNIRIVAESTEDSTAESSSSGRRERSGGIVPEWSPGYSEQFPSEENGIGGGSTTSSYLQNHHEILNWRRLSQTG

SEQ ID NO: 18153 - protein, 498 aa, Aspergillus oryzae
MSPRPFTLNDPSLLHEASLLNGEWVAAQSNKRLSLTDPGSRHVFATCPTNGPEDVDKYVETSHAAFERYRHVNPRERAKFLLKWHELITKAREDIATIVVYETGKPMAEALGEVDYALGFAWWFAGEAERVRGSIALPSVSNRRTFVIKQPIGVSAALVPWNFPVAMIVRKVAAALAAGCTMIVKPSPETPLSVMALADLALRAGLAPGVLNVITTDNEYTPSVSERLCKHPLVRKVTFTGSTRVGSIIAKHCSEGLKKVTMELGGNCPFIVFDDGNLEQAVAALMILKWRTAGQACTHANRVYVQAGVYDKFAQMMLEATQKLKVGHGTDSGTTMGPLTTERGVEKLKKLVSDAISKGGKVLCGGKQPNGPQGYFFEPTIISGMTSEMLASQEEIFGPLLGLHRFETEEEAVKMANDTSMGLASYFFTKDIDRTWRLLESLAAGMIGMNTGNSSCAESPFGGIKESGYGKEAGKDVAIEEYLISKTGTLTVEGAPGP

SEQ ID NO: 18154 - protein, 241 aa, Ipomoea purpurea
MSAPPCVAEVKVESYVFPATVKPPGTAKTLILGGAGARGLNIDGKFVKFTAIGVYLEADAVPSLAVKWNGKSVEELTDSVQFFRDIVTGPFEKLTRITMILPLSGKQYSEKVTENCVAFWKAAGMYGDAESKAIDKFNDVFSDQMFPPGASIFFTQSPLGSLTVSFSKDGSMPEIASAVIENKPLSEAVLESIIGSKGVSPEAKQSLAVRLSEMFINGGDAISGKVGVENDVIPQTVVVSK

SEQ ID NO: 18155 - protein, 259 aa, uncultured Bartonella sp.
NNMINAGLQGVDFVVANTDAQALAMSKAERVIQLGAAVTEGLGAGALPEVGRAAADECIDEIIDHLADSHMVFITAGMGGGTGTGAAPVVANAAREKGILTVGVVTKPFQFEGARRMKTAEAGIEELQKSVDTLIVIPNQNLFRIANEKTTFSDAFAMADQVLYSGVASITDLMIKEGLINLDFADVRSVMHEMGRAMMGTGEASGDGRALAAAEAAIANPLLDDTSMRGARGLLISITGGRDMTLFEVDEAANRIREE

SEQ ID NO: 18156 - protein, 259 aa, uncultured Bartonella sp.
NNMINAGLQGVDFVVANTDAQALAMSKAERVIQLGAAVTEGLGAGALPEVGQAAAEECIDEIIDHLADSHMVFITAGMGGGTGTGAAPVVARAAREKGILTVGVVTKPFQFEGARRMKTAESGIEELQKSVDTLIVIPNQNLFRIANDKTTFADAFAMADQVLYSGVASITDLMIKEGLINLDFADVRSVMHEMGRAMMGTGEASGDGRALAAAEAAIANPLLDDTSMRGARGLLISITGGRDMTLFEVDEAANRIREE

SEQ ID NO: 18157 - protein, 594 aa, Gibberella zeae PH-1
MKIAKSQRQDKANKHTTPDANAATAATQTEALSNTDWEYGTLQSNPAKNKGPPNWWFICVLQQQQQQQQQQHTVINSLSAALSNRTNPGHRVRVGQGLCTVLAKFALSLAYDLIVPMLKCVTLYGNFFISPPPFGAQPLAQIHVPKSLPASSARASESPSSSRYPRFPFLSHHIITSKLPIMSNVEVTENGAAPTIHKPHHNAALPYQSVGDFLSNTNNFKIIESTLREGEQFANAYFDTETKIKIAKALSDFGVEYIELTSPLASPQSRKDCEEICKLGLKAKILTHVRCTMEDAKVAVETGVDGVDVVIGTSQYLREHSHGKDMAYIKESAIEVIRYIKSQGKEVRFSSEDSFRSDLVDLLSLYQAVDKEGVHRVGVADTVGCASPRQVYDLVRTLRGVVGCDIECHFHNDTGCAIANAHAALEAGATHIDTSVLGIGERNGITPLGGLLARMIVNSHDYVTSRYKLHKLKEIEDLVAEAVEINVPFNNYITGFCAFTHKAGIHAKAILNQPSTYEIIDPADFGMSRYVHFASRLTGWNAIKSRVEQLGLNMTDDQIKQVTAKIKDLADVRPLAIDDTDSIIRSFHFDLQRS

SEQ ID NO: 18158 - protein, 127 aa, Candida albicans SC5314
MISMTNIFTPIEEALEAYKNGEFLIVMDDEDRENEGDLIMAAELITQEKMAFLVRYSSGYVCVPLSEERANQLELPPMLANRSDRHGTAYTITCDFAEGTTTGISAHDRALTTRSLANPIFKTTRFH

SEQ ID NO: 18159 - protein, 230 aa, Glycine max
YGCEKTTEGQAGLLKHRGTYEILSPEDIGHEKSNGVNMVLGKLSGRQALKSRLKELGYELRDEEVESVFRNFKAIAEKKKRVTDVDLKALVSDQASHAEPIWKLGGLQVTCGTMGSSTATIKLVTSDGSTHVACSVGVGPVDSAYKAINLIVKETVKVLEYSPSTVTGGTDAIATTRVVIRRENKQSPTPALNGNVIYPTFSGTGEGVDIVTSSVEAYITALNKMLDSKE

SEQ ID NO: 18160 - protein, 170 aa, Glycine max
MGASQSISENSIHEFTVKDARGKDVNLNAYRGKVLLVINVASKCGFADANYSQLTQIYSTYKSRGLEILAFPCNQFLKKEPGTSQEAQEFACTRYKAEYPIFGKIRVNGSDTAPVFKFLKTQKSGVMGSRIKWNFTKFLVDEEGRVIQRYSPTTKPLAIESDIKKALQVA

SEQ ID NO: 18161 - protein, 259 aa, uncultured Bartonella sp.
NNMINAGLQGVDFVVANTDAQALAMSKAERVIQLGAAVTEGLGAGALPEVGQAAADECIDEIIDHLADSHMVFITAGMGGGTGTGAAPVVARAAREKGILTVGVVTKPFQFEGARRMKTAEAGIEELQKSVDTLIVIPNQNLFRIADEKTTFADAFAMADQVLYSGVASITDLMIKEGLINLDFADVRSVMHEMGRAMMGTGEASGEGRALNAAEAAIANPLLDDTSMRGARGLLISITGGRDMTLFEVDEAANRIREE

SEQ ID NO: 18162 - protein, 385 aa, Buchnera aphidicola str. Bp (Baizongia pistaciae)
MFEPVELNNNAIIKVIGIGGGGGNAVEYMVQEHIEGVEFFAINTDAQALRKIEVEQTIQIGSDITKGLGAGANPEIGRRAAEEDSDNLKSILKDADMVFIASGMGGGTGTGAAPIIAKISKKLGILTVAVVTKPFNFEGKKRMISAEQGVSELSKYVDSLIIIPNDKLIKVLSKGISLLDAFNTANNVLKGAVQGIAELITKPGLMNVDFADVRTVMSEMGYAMMGTGIASGDERAKEASKIAISSPLLEDINLSGAKGVLVNITSGLNMKLDEFETIGNTIRSFSSDNATVVIGTSLDTNMNDSLRVTIVATGIGTYNDIKHNNNTENHTSKHVPKNLENLQTKESPKYNNPKQHIYDTFNQQGITNKEMNYLDIPAFLRKKHK

SEQ ID NO: 18163 - protein, 1447 aa, Candida glabrata CBS 138
MTFLKKIAGSNGHSKSGSVSSIRYSANSQASPSASVSSSRSFKTHVRNSSNSTDYSGSTYVFGTGNTASSGSNHGTPTSSKTFSKMGSSYNRRSIDSPRSTSNRNSEYTLDNSSLNSHPQANKGGDNVSRPTSLEKNADTDSSTYSRKSSGSTSSLSFDNLILSWDPTNPDEWTLSRVIAWFKFHDFPDSWIAVFKRHQLCGQRFLRLLAYDNFAIYEKHLPISKNASFDKFQALLKDTMKKNVSSSHSRQRSGNSVAAMHIEPNKGVNLRHKSSRSQDDIVGSRSASESGINNEQLNLGKPPEKGVVKSHKKTKSTGSLYRRSFISLMGSSSHSSAENTQMEKNNPNIKIHIPSRPQSVVESEPSTAKTLSPLSPPYSALFNKLDQKNRSDPTLFEISDEKYSRLKNDDYNDDIAAQSSSTNFNGKQQHSSSATYSKSKKNEKGGFNVRNSAVMPEDKSTFWEKLKRKSQTISPSTQNHTQLNSANLSKNRVSLQQIQGGFDMTDQVKPDNIVTPKIHQAHKSSSIDTKSQNFENVFDKFLLDKKYYPAKIKSSTNEEDFVLITKDNVSFIPLLISELPNECSKLKEYFMRKLRIVSGECSVHMTDFGCDIGASLNDTLLDTIRNSLFMNTSRKLFIRDTGTHKYSPGKPIINSSQREMLRKKESIKSINSSILASNDEISTITSSSDIASFDDRSSAPGRQYPQTPSYFYDASNVNDDVNYWNFKENQSSLVPGKVPDVKPEAQFTLKIPDKIKHKGLEDDLQRNSFHVLRKDEGKEIDFNNRRRSPYTNPELAPKREAPKAPITGSPMRLQKSRSLSKSVSIVTNNDRSRRDELSPSRKSYKNSETNSPSSEKIVSSYTPGSSHVLVPQPYKGVGDISRKGKLEDDHMFSMTEVLRSRVNRSTSSVSNNSVIYSTSPILKRGSSKRIVSSASAADVFEENTINFNDVPELSDSDEDSASSEDIIWGSETKISETEVVPENNNFNKTDSEDDDKIYSMNNKLTPVRKMTLRPTAEIVYQNLERFFPRAHLDKPVVEELHNSKSPVSKTSDKARINSILEQHSNISEKGVKSQNNDNVIKEKKSNTSLPRRTRTIRAIAHEAGEARRNSMKVKRSNTKMWGTKIVEITDKNTIEINKSKNARGEYKEFAWMKGEMIGKGSFGAVYLSLNITTGEMMAVKQVEVPKYGTQNELVKDMVEALKSEVATLKDLDHLNIVQYLGSEIRGNIYSLFLEYVAGGSVGSLIRLYGRFDEKLIRHLNTQVLSGLKYLHSKGILHRDMKADNLLLDEDGICKISDFGISKKSKNIYSNSDMTMRGTVFWMAPEMVDTKQGYSAKVDIWSLGCVVLEMFAGKRPWSNLEVVAAMFQIGKSKSAPPIPDDTIQLISSKGKDFLSKCFEIDPEKRPTADDLLEHSFSKVDPAFNFSRTRLYEFIKTNDKLNSSVLRNT

SEQ ID NO: 18164 - protein, 455 aa, Acidobacteria bacterium Ellin345
MVTYTLLRLIAVAFLVALNAFFVAAEFALVSVRDTRLQQLIDAGKIGARTVERLHNRLDEVLAAVQLGVTIASLALGWIGELAIAVILEPHFVHLPHGLYYAHGLAATISFTIITFFHVTLGEVVPKTLALQRAEQVALAVATPMEVFIAVARPLLAVMRMAARFVLRLFGTKEMREGGVHSPEELKLMVTASRKFGLVPRLQEEMINRAIDLENISVREIMVPRPDIFSLPGHMTLDEAVQRVVDEQHSRIPIYDAERGPEHIIGVLYAKDLMRWMRYRIARLQQNRPARIASNLKVQHIMREVLVVPETKPLTDLLEEFKERKRHLAVVVDEFGSTAGVVTVEDVLEELVGEIEDEHDVPEESALTPGGTTLVLDGGINIRDLESQYQVRLPRDEGFETLAGFVMTRLQRIPREGDSFAFHNYRFTVLEMEGRRIDSVKLELIQQAEELEQPT

SEQ ID NO: 18165 - protein, 486 aa, Magnetospirillum magnetotacticum MS-1
MQETIDRVRSIDLDQYKYGFETVIEMEKSEKGLSEDVIRFISAKKNEPAWLLEWRLDAYKRWLTMKEPEWARVAYDKVDYNDIYYYAAPKRQGPESLDDIDPEILKTYEKLGIPLREVEALEGIAPERRVAVDAVFDSVSVATTFKKELEKAGVIFMPISEAVREYPDLVKTYLGSVVPVTDNFFATLNSAVFSDGSFVYIPPGVRCPMELSTYFRINERDTGQFERTLIIADKGSYVSYLEGCTAPKRDDNQLHAAVVELVALEDAEIKYSTVQNWYPGDNEGKGGIYNFVTKRGDCRGARSKISWTQVETGSAITWKYPSCILRGDDSRGEFYSIAVSNGMQQVDSGTKMIHLGRNTTSRIISKGISAGRSQNTYRGLVSAHKKAKGARNFTNCDSLLIGDQCGAHTVPYIESKNASAVFEHEATTSKISEDQKFYCQQRGLSEEEATALIVNGFVRDVLQQLPMEFAVEAQKLISISLEGSVG

SEQ ID NO: 18166 - protein, 566 aa, Brucella melitensis biovar Abortus
MTINLQKPDITELKPRITVFGVGGGGGNAVNNMINAGLRGVDFVVANTDAQALTMSKSDRMIQLGAAVTEGLGAGSQPEVGRAAAEECIDEMVDHLNGTHMCFVTAGMGGGTGTGAAPVVARAARERGILTVGVVTKPFHFEGARRMKTADLGIEELQKNVDTLIVIPNQNLFRIANDKTTFADAFAMADQVLYSGVACITDLMVKEGLINLDFADVRSVMREMGKAMMGTGEASGEGRAMAAAEAAIANPLLDETSMRGAKGLLISITGGRDMTLFEVDEAATRIREEVDPEANIILGATFDEGLEGVIRVSVVATGIDKQQGDAAPAPLEFRQPVKPTAAQAKPMAPHGALRPPVAEQPRQADPVAQVIQAAEAEMPVAPAAPAASAEPEFRPQSRIFQAPAPEAFERAPVARAPMQPAQAMHAPQPQQYQQPQMHEQPVREPRPAPRMPAVSDFPPVAQAEINARRAPQQPVQEEPRGPMGLLKRLTHGLSRREEEQPAARLEPAQHREPGMRPAEPRRPMQQDSSIYAPRRGQLDNQGRPQPRTASEEDQLEIPAFLRRQSN

SEQ ID NO: 18167 - protein, 591 aa, Triticum aestivum
NKFVQKSRLVPVRNSRDIVDPRVRAHQPPPPRSIPSAHLSPPIPIPTAAGAAMALLLRHSRKLRRVHGVLDCERGSIARHFSVAAAKEDAVSSSSVHGEYGKKVGRSSIFLHRQSEKDLHTFKVSSREARGSYSSKRMPIAATGVNSLFSCGQVVSARHFSSGADLPPHEAIGMPSLSPTMTEGNIARWVKKEGDKVSPGEVLCEVETDKATVEMECMEEGYPAKKVWGDGAKEIKVGEIIAITVEEEGDIEKFKDYKASSSPPAESKPQSEPVEPKEEKKEVSKAPEPTATKTEESSQSGDRLFSSPVARKLAEDNNVPLSSLKGTGPDGRILKADIEDYLSSAAKGSKKEAAAAPGLGYVDLPNTQIRKVTANRLLQSKQTIPHYYLTVDSRVDKLIKLRSELNPMQDASGGKKISINDLVIKAAALALRKVPACNSSWMNDFIRQYHNVNINVAVQTEHGLFVPVVRDADKKGLATIADEVKQLASRAKDNSLKPEDYEGGTFTVSNLGGPFGIKQFCAIVNPPQSAILAIGSAEKRVIPGAAEGQYEIGSFMSATLSCDHRVIDGAMGAEWLKAFKGYLEDPTTMLL

SEQ ID NO: 18168 - protein, 391 aa, Listeria monocytogenes
MLEFDTSSESLATIKVIGVGGGGNNAVNRMIEHGVQGVEFISVNTDAQALNLAKAETKLQIGTKLTRGLGAGAVPEIGKKAAEESREQIEEALKGSDMVFVTAGMGGGTGTGAAPVIAQIAKEMGALTVGVVTRPFGFEGPKRTKQALTGTEAMKEAVDTLIVIPNDRLLQIVDKNTPMLEAFREADNVLRQGVQGISDLIAVPGLINLDFADVKTIMTNRGSALMGIGIATGENRAAEAAKKAISSPLLETSVDGAKGVLMNITGGSNLSLYEVQEAAEIVSSASDEDVNMIFGSVINDELKDELIVTVIATGFDEAKQAQQQAQANRRPNQSIQVNRPNYAVQDEQQNDYAQNAPQQANAPVHEQQAEPQQNSSDVDVPAFIRNRNRRG

SEQ ID NO: 18169 - protein, 500 aa, Psychrobacter arcticus 273-4
MTDSTDLKHMDNAEQTQTAYINGSYLAVDKALSTFDSINPVTGEVLSTIQQTTTEQINDAVIAAQKGQKVWAAMTAIERSRILLNAVAILRERNDELAVLETKDTGKAISETKYVDIVTGADVIEYYAGLAPMIEGRQIPLRDTSFVYTRQEPLGVIAGIGAWNYPIQIAMWKAAPALAAGNAMIFKPSEVTPLSALKLAEIFTEAGLPEGVFNVVQGNYEVGEALTQHPDIAKVSFTGGVPTGKKVMSSAATSSLKDVTLELGGKSPLIIFDDADIDTAADIAMMANFYSTGQVCTNGTRVFIPKALQAKFEQAIQTRVKRIKLGDPMDDSITMGPLVSFPHMDRVLGYIEQGKASGARLLCGGARVTTGSLADGAYVAATVFTDCTDDMSIVREEIFGPVMSILTYETEEEVIRRANDTEYGLAAGVVTADLNRAHRVIAQIEAGICWLNTWGESAAQMPVGGYKHSGIGRENGIQTLEHYTQTKSIQVELGAFESVF

SEQ ID NO: 18170 - protein, 127 aa, Arabidopsis halleri
TEKDFLCKILGETIKAGATTVGFADTVGINMPPEFGELVAYVKENTPGADDIVVTIHCHNDLGVATANTISICAGARQVEVTINGIGERSGNAPLEVVMALKCRGEYLMDGVYTKIDTRQIMATSKM

SEQ ID NO: 18171 - protein, 347 aa, Symbiodinium sp. JCUCS-1
MATKIGINGFGRIGRMVFQAICDQNLLGTKLDVVGVVDMSTDAEYFAYQMKYDTVHGRFKHDVKIGEKDELIVNGNKIKCIQASREGPKALPWKEMGVEYVIESTGLFVEAEKAAGHIEAGAKKVIISAPGKGDLKTLVCGVNHTEYDKANHNVVSNASCTTNCLAPIVHVLLKEGVGIEKGLMTTIHSYTATQKTVDGVSAKDWRGGRAASCNIIPSATGAAKAVGEVLPTTKGKLTGMAFRVPTPDVSVVDLTFTAEKDTSIEEIDALFKKASETYMKGVLSFTDEELVSADFIHNVNSSIYDSKATLQNNLKGEKRFFKIVSWYDNEWGYSNRVVDLLMHMISA

SEQ ID NO: 18172 - protein, 557 aa, Xanthophyllomyces dendrorhous
MFILVLLTGALGLAAFSWASIAFFSLYLAPRRSSLYNLQGPNHTNYFTGNFLDILSARTGEEHAKYREKYGSTLRFAGIAGAPVLNSTDPKVFNHVMKEAYDYPKPGMAARVLRIATGDGVVTAEGEAHKRHRRIMIPSLSAQAVKSMVPIFLEKGMELVDKMMEDAAEKDMAVGESAGEKKATRLETEGVDVKDWVGRATLDVMALAGFDYKSDSLQNKTNELYVAFVGLTDGFAPTLDSFKAIMWDFVPYFRTMKRRHEIPLTQGLAVSRRVGIELMEQKKQAVLGSASDQAVDKKDVQGRDILSLLVRANIAANLPESQKLSDEEVLAQISNLLFAGYETSSTVLTWMFHRLSEDKAVQDKLREEICQIDTDMPTLDELNALPYLEAFVKESLRLDPPSPYANRECLKDEDFIPLAEPVIGRDGSVINEVRITKGTMVMLPLFNINRSKFIYGEDAEEFRPERWLEDVTDSLNSIEAPYGHQASFISGPRACFGWRFAVAEMKAFLFVTLRRVQFEPIISHPEYEHITLIISRPRIVGREKEGYQMRLQVKPVE

SEQ ID NO: 18173 - protein, 221 aa, Zea mays
VPETPLHRPTELSPLLNHSPVNESTDHHSQEQGIPTLITWSQGGDEVFLEGSWDNWTSRRALERSGKDHAVLLVLPSGVYHYRIIVDGELRYIPELPHAADERGRVANVLDVHDYVPESLDSVAEFEAPPSPVHSYDLHCPGDEEFAKEPPTLPPQLLVSVLGGDVDSAGHGNQALKPQHVVLDHLFIEKGWGSQSLLALGVTHRFESKYVSFVLYKPLER

SEQ ID NO: 18174 - protein, 435 aa, Thermobifida fusca YX
MSQTAPTPVTDTTVPHEEADVIVVGAGPAGSTAAHYLATAGLDVLLLEKTAFPREKVCGDGLTPRAVKQLVAMGIPINEEDGWIRNRGLRIIGGGTRLELPWPELSEYPGFGLVRTRYDFDQILARHAVKTGVRLLERTNVTAPIIDERSNRVVGVQAKDAEGRIRSFRAPLVLAADGNSSRLAIALGIRRRDDRPMGVAVRTYFTTPRHNDDYLESWLELWDTTDGKQVLLPGYGWIFGVGDGTSNVGLGILNSTPAFQKIDYRKLLRRWTQSMPEEWGFTEENQKGPIRGAALPMGFNRTPHYARGMMLVGDAGGMVNPFNGEGIAYAMEAGRIAADVAVQALSRPTPRDRERTLLRYPEILRDTYGGYYTLGRYFVKLIGNPYFMKYATKYGLPRPLLMRFTLKMLANLTEPSHGDALDRLINGLSKIAPAS

SEQ ID NO: 18175 - protein, 304 aa, Mycoplasma penetrans HF-2
MIYTITFSPSIDYVINTKQDFVSDGLNRVSDYQLFPGGKGINASVILKRIGFENKAISFLGDPVKNLFLELLKKEGLELVNIDVNEPTRINVKMFSNNHSFEINGKKPEITNNEFNKLNTILDSLNQDDIVLIMGICDESYLIEIVKKLNNKKIKFILDIDSSNMLELIKYQPYLIKPNLDELERILSIKINNEEQIKSSLLLLKEKGCINAMVSNGAKGSYLINDKNEIYKSTIQPIKDVVSTVGAGDTLISSFAALYLKSNNVLDSLKQATSLSIGTVKSKWLASREDLAKHLDKIEVVKIN

SEQ ID NO: 18176 - protein, 99 aa, Chlorogloeopsis sp.
MSVYVGNLSYEVTEDSLNAVFAEYGSVKRVQLPTDRETGRVRGFGFVEMGTDAEEAAAIEALDGAEWMGRDLKVNKAKPKEDRGSFGGGRGSYGGRNRY

SEQ ID NO: 18177 - protein, 517 aa, Pediococcus pentosaceus ATCC 25745
MLGLGSLIGSGWLFGSMEAASVAGPAAIFSWIIGFVVIGVIAYNYIELGTMFPESGGMSKFAQYSHGSLVGFIASWANWISLITLIPIEAVAAVQYMSSWPWAWANWTHSFFKNGNITTSGLLVVFCFILIFTLLNYWSVTLLTRFTSLISIFKIAVPLITIIFLTLSGFHPENYGKSLSEFMPYGSASIFAATSASGIIFSFNAFQTVINMGNEVENPKKNIGLGVGLSLSISAVLYLVLQSTFITSVPTALITQSGWHGINFESPFADLAILLGIHWLSVLLYLDAFISPFGTGVSFAASTGRALAAMSSNNHFPKILGRINAKYGIPRVAMAFNAVLSMVMVSIFRSWGTLASVISTSTLIAYLTGPITVVSLRKMASRFNRPVRLKAIKFMAPLAFILASLAIYWAMWPTTVEVILVILLGLPIFIYYEWRLHWKETMKQLRSSLWLIVYLIFLSVMSYIGSDNFNGRNLIHYPLDFIVIIIVAFIFYIWGMRSRIITVSFGNAQEVNKHVKK

SEQ ID NO: 18178 - protein, 162 aa, Saccharomyces cerevisiae
MTTSFYDLECKDKKGESFKFDQLKGKVVLIVNVASKCGFTPQYKELEELYKKYQDKGFVILGFPCNQFGKQEPGSDEQITEFCQLNYGVTFPIMKKIDVNGSNADSVYNYLKSQKAGLLGFKGIKWNFEKFLVDSNGKVVQRFSSLTKPSSLDQEIQSLLSK

SEQ ID NO: 18179 - protein, 300 aa, Bacillus licheniformis ATCC 14580
MSVFINKDTKVIVQGITGSTALFHTKQMLEYGTKIVGGVTPGKGGTEVEGVPVFNTVEEAVKQTGANASVIYVPAAFAADAIMEATDAELDLVICITEHIPVLDMVKVKRYMEGKKTRLIGPNCPGVITPEECKIGIMPGYIHKKGHVGVVSRSGTLTYEAVHQLSEAGVGQSTAVGIGGDPVNGTNFIDVLKAFNEDPDTHAVIMIGEIGGTAEEEAAEWVKANMTKPVVGFIGGKTAPPGKRMGHAGAIISGGKGTADEKIKTMNACGIEVAETPSVMGETLIKVLKEKGLYETCKTH

SEQ ID NO: 18180 - protein, 346 aa, Burkholderia vietnamiensis G4
MTGINAATVAARMVEPRPARAPSRRACHRLHKTHTMTDIVTVTLNPAVDVATSVEHIVDTHKLRCARPRRDPGGGGINVARTIHRLGGDCIALYLAGGPTGDVLTLLLEAERLPSVRIRIVGETRENVCVTETSTGREYRFLMPGPSVSDAEWRDCAARLDAMQPAPRYLVLSGSLPPGAPDDLYATLARAAKARGSRVVVDASGRALGAALEEGVHLVKPSIGELSALAGEALDDASACRVASELVARGQAEIVALTLGARGAWVVTRDRSLRLPGRPAAVCSTVGAGDSFVGGMVWALARGVPLDDACRYALAASASSVEHPGTALCTRADVERIHDEIVALAS

SEQ ID NO: 18181 - protein, 1033 aa, Oryza sativa
MERARRLANRALLRRLLAAAASTTSPAPSRGISTLAKAPGAGSRPRAPRPAPHQYTTGRPVSASALQPSDTFPRRHNSATPAEQAAMASECGFNTLDALIDATVPAAIRAPTMHFSGKFDAGFTESQMIDHMQRLAAMNKAYKSFIGMGYYNTHVPAVILRNLMENPAWYTQYTPYQAEIAQGRLESLLNYQTMVADLTGLPMSNASLLDEATAAAEAMAMCNGILKSKKKTFLIASNCHPQTIDVCQTRAAGFDLNVIVADAKDFDYSSGDVCGVLVQYPGTEGEVLDYAEFVKDAHAHGVKVVMATDLLALTSLRPPGEIGADIAVGSAQRFGVPMGYGGPHAAFLATSQEYKRLMPGRIIGVSVDSSGKPALRMAMQTREQHIRRDKATSNICTAQALLANMAAMYAVYHGPEGLKAIADRVHGLAGTFAHGLKKLGTVTVQELPFFDTVKVKVADANAIAQEACKNEMNLRVVDATTITVAFDETTTLEDVDKLFKVFNGGKPVNFTAESLASEVSSSIPSSLVRKSPYLTHPIFNMYHTEHELLRYLHKLQSKDLSLCHSMIPLGSCTMKLNATVEMMPVTYPSFANMHPFAPTEQAAGYHEMFDDLGDLLCKITGFDSFSLQPNAGASGEYAGLMVIRAYHRARGDYHRDVCIIPVSAHGTNPASAAMCGMKIVAVGTDSKGNINIEELRKAAEANKDNLAALMVTYPSTHGVYEEGIDEICRIIHENGGQVYMDGANMNAQVGLTSPGFIGADVCHLNLHKTFCIPHGGGGPGMGPIGVKKHLAPFLPSHPVITTGGFPLPEKTDPLGTISAAPWGSALILPISYTYIAMMGSKGLTDASKIAILNANYMAKRLEKHYPVLFRGVNGTVAHEFIIDLRGFKTTAGIEPEDVAKRLMDYGFHAPTMSWPVPGTLMIEPTESESKAELDRFCDALISIREEIAEIESGKADVNNNVLKSAPHPPQLLMSDSWTKPYSREYAAFPAAWLRGAKFWPTTCRVDNVYGDRNLICTLQQGSQVAEEAAAATA

SEQ ID NO: 18182 - protein, 151 aa, Brassica napus
  misc_feature (9)..(9): Xaa can be any naturally occurring amino acid
  misc_feature (11)..(11): Xaa can be any naturally occurring amino acid
  misc_feature (18)..(18): Xaa can be any naturally occurring amino acid
  misc_feature (21)..(21): Xaa can be any naturally occurring amino acid
  misc_feature (29)..(29): Xaa can be any naturally occurring amino acid
  misc_feature (34)..(35): Xaa can be any naturally occurring amino acid
  misc_feature (38)..(40): Xaa can be any naturally occurring amino acid
  misc_feature (47)..(49): Xaa can be any naturally occurring amino acid
  misc_feature (53)..(53): Xaa can be any naturally occurring amino acid
  misc_feature (57)..(59): Xaa can be any naturally occurring amino acid
  misc_feature (67)..(68): Xaa can be any naturally occurring amino acid
  misc_feature (79)..(79): Xaa can be any naturally occurring amino acid
  misc_feature (82)..(82): Xaa can be any naturally occurring amino acid
  misc_feature (91)..(91): Xaa can be any naturally occurring amino acid
  misc_feature (96)..(96): Xaa can be any naturally occurring amino acid
  misc_feature (99)..(99): Xaa can be any naturally occurring amino acid
  misc_feature (101)..(101): Xaa can be any naturally occurring amino acid
  misc_feature (103)..(103): Xaa can be any naturally occurring amino acid
  misc_feature (105)..(106): Xaa can be any naturally occurring amino acid
  misc_feature (119)..(119): Xaa can be any naturally occurring amino acid
  misc_feature (121)..(121): Xaa can be any naturally occurring amino acid
  misc_feature (123)..(123): Xaa can be any naturally occurring amino acid
  misc_feature (127)..(127): Xaa can be any naturally occurring amino acid
  misc_feature (135)..(135): Xaa can be any naturally occurring amino acid
  misc_feature (142)..(142): Xaa can be any naturally occurring amino acid
  misc_feature (144)..(144): Xaa can be any naturally occurring amino acid
MASSMLSSXAXVTSPAQXTMXAPFTGLKXSAAFXXTRXXXNDITSFXXXGGRXSCMXXXPPVGKKKXXTLSYLPDLTEXELXKEVDYLLRXKWIPXVEXEXEXGXXYREHGSTPGYYDXRXWXMGKXPLFGCTDXAQVLKEXQXCKTEYPN

SEQ ID NO: 18183 - protein, 386 aa, Candida albicans SC5314
MMFRSTFKPTCIARRGFFRFNSSNSSKPPTGIVFMNMGGPSKVEETYDFLLRLFSDGDLIPFGRFQNILAKFIAKRRTPKIEEHYREIGGGSPIRKWSEYQCKKVCEILDKTSPETAPHKPYVAFRYANPLTEETLNDMKKDGVTKAVAFSQYPQFSYSTSGSSMNELYRQTLIHDPERTIDWSFIDRWPQQPGLVKAFANNIKEKLAEFPPQDRDDIVILFSAHSLPMEIVNLGDSYPAEVAATVYKIMEELKFSNPYRLVWQSQVGPKPWLGGQTSKIIDKLEKRDDIKGIVLVPVAFTSDHIETLHELDIEILEDATNPHKIKRAESLNGNETFIEGLADLVKSHLKSGEKYSKQLELDCILGSERAQGTFKHPNEIFGNRKN

SEQ ID NO: 18184 - protein, 407 aa, Synechococcus sp. WH 5701
MTSTSTRDLVSQPYKYGFVTEIETDKIDKGLSEEVVRLISSKKDEPEFLLNFRLKAFRHWLTLEEPDWAALGYEAIDYQDIIYYAAPKQQAKKASLDEVDPKLLETFDKLGIPLSEQKRLSNVAVDAVFDSVSIATTYKEKLAEHGVVFCSFTEAVKDHPELIEKYLGSVVASNDNYFAALNSAVFSDGSFVFIPKGVECPMELSTYFRINSGDTGQFERTLIVAEEGASVSYLQGCTGPMVDTNQLHAAVVELVVLDDASIKYSTVQNWYAGNENGVGGIYNFVTKRGQCRGARSRISWTQVETGSAITWKYPSCVLQGADSVGEFYSVALTNNCQQADTGTKMIHVGPRTRSTIVSKGISAGRSSNSYRGLVQMGPGAKGARNYSQCDSMLIGDQAAANTYPYIR

SEQ ID NO: 18185 - protein, 292 aa, Candida albicans SC5314
MSAIYKALQSKSSKETSEKTKHINRQRLLVISSRGITYRHRHLIQDLLALLPHARKEPKFDSKKNLHQLNEVAELYNCNNIFFFECRKHQDLYLWISKPPNGPTLKFHIQNLHTLDELNFTGNCLKGSRPILSFDKSFLENDHYKLLKEMFLQTFGVPPNARKSKPFIDHVMTFSIVDGKIWIRNYQINETLDVKENDKIEDDEDYDVDQLNLVEIGPRLVLTLITVLEGSFSGPKIYENKQYVSPNFVRAQLKQQAADQAKSRSQAALERKIKKRNQVLKADPLSNDALFK

SEQ ID NO: 18186 - protein, 422 aa, Acidobacteria bacterium Ellin345
MITFWHVVILLLLMALLTLVSYVDRVFKEAGKFLSREFQENIDYFESNIEPKLGRNPQRAALAMAVLPQMLLGTIAFLMAYTVFSHPWSGLELLQAALVLVFVIVICSRLVPYLLFARTRGEWAKNFVWLFRLMIYLAIPVTIMLGFTISVAALAKENAEEEPEHPSEAVDALIEAGTEEGILEESDRHLIQSVVEFGDKTVREVMTPRPRIFAVPTDWTLEQLTDALRDQGYSRIPVFRGSIDNLVGIVFSRDLLQIADTDARTRKVGDLVREELMFVPETKRGSELLREMQRDNVRMAVVIDEYGSVAGLVTIEDLIEEIVGELRDEDETDIVKEGEHTYVVPGSMDVDRLNELFGVRVDEDHESSTVAGLVSEIAGRIPQPGEVVENLGLRFEVLASTDRRIERLRISEATQTPDQVQA

SEQ ID NO: 18187 - protein, 490 aa, Bacillus licheniformis ATCC 14580
MSQTLFIDGKWVGAKKGETRQIINPYNQEHIETVSEGDREDAVRAIAAARRAFDDGEWANTPGLERGNIVLKIAELIRRDHEELAELESLDTGKTIEESRADMDDIANVFQYYAGLADKDGGEVISSPIPDSKSKIVREPVGVCGQITPWNYPLLQASWKIAPALAAGNTIVVKPSEITPLTTIKIFKLMEEAGVPEGVANLVLGPGATVGDELARNKDVDLISFTGGIETGKKIMQAASTNVKKIALELGGKNPNIVFKDADFDVAVDQALNAVFFHAGQVCSAGARLLVEESIQDEFVAELVKRAKKIKLGNGFHEETQSGPLISAEHRSKVEKYVEIGLQEGAKLETGGKRPEDPELANGFFYLPTIFSSCTSDMRIVKEEVFGPVLTVETFKTEEEVVSLANDTIYGLAGAVWSKDIEKAERVASKLRMGTVWINDFHPYFAQAPWGGYKQSGIGRELGRMGLEEYTEVKHVYRNTKPAAVNWFKA

SEQ ID NO: 18188 - protein, 447 aa, Photorhabdus luminescens subsp. laumondii TTO1
MSCLLSLSSFLGSIQRRDEYQPEYLQAVREVFTSLWPFLEQNPKYREYSLLERMVEPERVIQFRVCWVDDQGKVQVNRAWRVQFSSAIGPYKGGMRFHPSVNLSILKFLGFEQTLKNALTTLPMGGGKGGSDFDPKGKSQGEVMRFCQALMTELYRHLGPDTDVPAGDIGVGGREVAFMSGMMKKLSNNTACVFTGKGLSFGGSLIRPEATGYGLVYFVNAMLKRHGMGFEGMRVSVSGAGNVAQYTIEKCMALGAKVVTASDSGGTLVDEDGFTPEKLTHLEEIKNQRYGRVEEYARERGLTFLKGLQPWSVPVDIALPCATQNELDLDAAKVLIKNGVKAVAEGANMPATISATEAFIEAGVLFAPGKAANAGGVATSGLEMAQNAARLGWKAEKVDARLHHIMLDIHHACVEYGGEGKQINYVQGANIAGFVKVADAMLAQGIL

SEQ ID NO: 18189 - protein, 127 aa, Arabidopsis halleri
TEKDFLCKILGETIKAGATTVGFADTVGINMPPEFGELVAYVKENTPGADDIVVAIHCHNDLGVATANTISICGGARQVEVTINGIGERSGNAPLEVVMALKCRGEYLMDGVYTKIDTRQIMATSKM

SEQ ID NO: 18190 - protein, 352 aa, Pseudomonas putida
MNDHNNSINPETAMATTTMTMIQALRSAMDVMLERDDNVVVYGQDVGYFGGVFRCTEGLQTKYGKSRVFDAPISESGIVGTAVGMGAYGLRPVVEIQFADYFYPASDQIVSEMARLRYRSAGEFIAPLTLRMPCGGGIYGGQTHSQSPEAMFTQVCGLRTVMPSNPYDAKGLLIASIECDDPVIFLEPKRLYNGPFDGHHDRPVTPWSKHPHSAVPDGYYTVPLDKAAITRPGNDVSVLTYGTTVYVAQVAAEESGVDAEVIDLRSLWPLDLDTIVESVKKTGRCVVVHEATRTCGFGAELVSLVQEHCFHHLEAPIERVTGWDTPYPHAQEWAYFPGPSRVGAALKKVMEV

SEQ ID NO: 18191 - protein, 667 aa, Bartonella henselae str. Houston-1
MATKVKQKDNTEVTTQASVDSPLLDFSDDAIKKMVKIAKKNGYVTMDELNAVLPPDEVTSEQIEDTLAMFSEMGINVVDDEGEAENYEEEVRVEGGDLVEATSNALVTTAKRELTDRTDDPVRMYLREMGAVELLSREGEIAIAKRIEAGRETMIAGLCESPLTFQALIIWREELKEQRILLREIIDLEMTYAGPEAKQAPVIERSEVQKVKEEKSSSAMRDMENIARDIGVEEDDEEDDDVNLSLAAMENELCPQVMGTLDFIAETYVKLRKLQDQHVESSLAERKEGALSPSQRKKCIQLKSELVQAVKSLSLNQNRIESLVEQLYDINKRLIHNEGKLKRIANNYGVGHEEFLKEYQGRELDADWINYIATLSGRGWKEFSKREAKEIKTLRSEIQNLAQETAISIGEFRRIVTQVQKGERESTIAKKEMVEANLRLVISIAKKYTNRGLQFLDLIQEGNIGLMKAVDKFEYRRGYKFSTYATWWIRQAITRSIADQARTIRIPVHMIETINKIVRTSRQILHEIGRDPTPEELSSKLSMPLEKVRKVLKIAKEPISLETPVGDEDDSHLGDFIEDRNALLPIDAAIQANLRDTTTRVLASLTPREERVLRMRFGIGMNTDHTLEEVGQQFSVTRERIRQIEAKALRKLKHPSRSRKLRSFLDS

SEQ ID NO: 18192 - protein, 396 aa, Thiomicrospira crunogena XCL-2
MKFNLQETISADAGMPKIKVVGLGGGGGNAVDYMVRSEVEGVDFICANTDVQALKNSTVETCIQLGANGLGAGANPEKGMEAAKENIEQVKEALKGADMVFITAGMGGGTGTGSAPVVAQAAREMGILTVGVVSRPFGFERRAKIAEAGIQQLAEHVDSLITVPNDKLLKVLGRDFVLAKAFDYANEVLHGAVQGISELVTRPGMINVDFEDLRTVMSERGVAMMGVGHASGEDRAIKAAEKAIANPLLEDISVSGAKGLLVNITSGLDFTLGEFNEVGDVIDQVASEDAKVIIGTSIDETMTDEIRVTVVATGLSEIGDAKRPEVVKPNLQAVEASKAEEKVEAEKVSSRSNASAEKPSPEVVRPKMVVNGGVTGSVDSSSNYLDIPAFLRRQVD

SEQ ID NO: 18193 - protein, 265 aa, Bdellovibrio bacteriovorus HD100
MASNYKTILLEQKTHGVWVLTINRPESLNALNSTVLNEMGEALRQIGEMDYSDARALIITGAGEKAFVAGADIKEIHDLDEEKALVFAQRGQSIFHELTLLKIPVIAAVNGFALGGGCELALGCDFIYAAENAKFGLPEVSLGLIPGFGGTVRMARAVGSRRARELTYTGGMITAAEALSAGLVNKVVPQAELMNTVMKTVEAILAKAPIAVGSAKFSINQAWDMDVEEAQKNEARIFAELFTSEDVKEGTGAFIEKRKAEFKGR

SEQ ID NO: 18194 - protein, 339 aa, Pseudomonas putida
MATTTMTMIQALRSAMDVMLERDDNVVVYGQDVGYFGGVFRCTEGLQTKYGKSRVFDAPISESGIVGTAVGMGAYGLRPVVEIQFADYFYPASDQIVSEMARLRYRSAGEFIAPLTLRMPCGGGIYGGQTHSQSPEAMFTQVCGLRTVMPSNPYDAKGLLIASIECDDPVIFLEPKRLYNGPFDGHHDRPVTPWSKHPHSAVPDGYYTVPLDKAAITRPGNDVSVLTYGTTVYVAQVAAEESGVDAEVIDLRSLWPLDLDTIVESVKKTGRCVVVHEATRTCGFGAELVSLVQEHCFHHLEAPIERVTGWDTPYPHAQEWAYFPGPSRVGAALKKVMEV

SEQ ID NO: 18195 - protein, 127 aa, Arabidopsis thaliana
TEKDFICKILGESIKAGATTVGFADTVGINMPQEFGELVAYVIENTPGADDIVFAIHCHNDLGVATANTISICAGARQVEVTINGIGERSGNAPLEVVMALKCRGESLMDGVYTKIDSRQIMATSKM

SEQ ID NO: 18196 - protein, 423 aa, Pseudomonas putida
MGTHVIKMPDIGEGIAQVELVEWFVKVGDIIAEDQVVADVMTDKATVEIPSPVSGKVLALGGQPGEVMAVGSELIRIEVEGSGNHVDVPQAKPAEVPAAPVAAKPEPQKDVKPAAYQASASHEAAPIVPRQPGDKPLASPAVRKRALDAGIELRYVHGSGPAGRILHEDLDAFMSKPQSAAGQTPNGYARRTDSEQVPVIGLRRKIAQRMQDAKRRVAHFSYVEEIDVTALEALRQQLNSKHGDSRGKLTLLPFLVRALVVALRDFPQINATYDDEAQIITRHGAVHVGIATQGDNGLMVPVLRHAEAGSLWANAGEISRLANAARNNKASREELSGSTITLTSLGALGGIVSTPVVNTPEVAIVGVNRMVERPVVIDGQIVVRKMMNLSSSFDHRVVDGMDAALFIQAVRGLLEQPACLFVE

SEQ ID NO: 18197 - protein, 382 aa, Mycobacterium tuberculosis
GSHMTPPHNYLAVIKVVGIGGGGVNAVNRMIEQGLKGVEFIAINTDAQALLMSDADVKLDVGRDSTRGLGAGADPEVGRKAAEDAKDEIEELLRGADMVFVTAGEGGGTGTGGAPVVASIARKLGALTVGVVTRPFSFEGKRRSNQAENGIAALRESCDTLIVIPNDRLLQMGDAAVSLMDAFRSADEVLLNGVQGITDLITTPGLINVDFADVKGIMSGAGTALMGIGSARGEGRSLKAAEIAINSPLLEASMEGAQGVLMSIAGGSDLGLFEINEAASLVQDAAHPDANIIFGTVIDDSLGDEVRVTVIAAGFDVSGPGRKPVMGETGGAHRIESAKAGKLTSTLFEPVDAVSVPLHTNGATLSIGGDDDDVDVPPFMRR

SEQ ID NO: 18198 - protein, 217 aa, Legionella pneumophila subsp. pneumophila str. Philadelphia 1
MTFQILPSLLSADVTRLGEEVDTVMKAGADFIHFDVMDNHYVPNLTFGPAFCDALIKKFPNLPIDVHLMTTPVDTLIEAFAKAGAKRISIHPDATIHLDRSLQLINNLGCEAGLVLNPATSIDTLTWCAHNLKFVLVMTVNPGFGGQKLIPEVIPKLSKIRQQHPNLDLCVDGGVTPQNIASLAHAGANQFVAGSAIFNSSNYSETIKRMREQLASI

SEQ ID NO: 18199 - protein, 353 aa, Frankia sp. CcI3
MTSGAVVAGEQRSDEVGERVARAPVTMAKALNLGLRSAMAADPKVLIMGEDVGKLGGVFRVTDGLQQEFGEARVIDTPLAESAIVGTAIGLAMRGYRPVCEIQFDGFVYPAFDQIVSQLAKLHYRSAGRIRLPVTIRIPFGGGIGAVEHHSESPEAYFCHTAGLKVVACSNPVDAHHMIQQAIRSDDPVIFLEPKRRYWEKGVVDPRPLAELPAGELTQLHASRVVRTGTDATLVGYGPTVRTCLDAAEISAADDSRSLEVIDLRTLSPLDLEPVLDSVRRTGRLVVVHEAPSNVSVSAEVAARVTERAFYSLEAPVLRVTGFDTPYPPARLEDHYLPDVDRILDAVDRSFAY

SEQ ID NO: 18200 - protein, 317 aa, Vigna radiata
MANFPVVDMGKLNTEERGAAMEMIKDACENWGFFELVNHGISIELMDTVEKLTKEHYKKTMEQRFKEMVANKGLESVQSEINDLDWESTFFLRHLPVSNVSENTDLDQDYRKIMKQFAEELEKLAEHLLDLLCENLGLEKGYLKKVFYGSKGPNFGTKVSNYPPCPTPDLIKGLRAHTDAGGIILLFQDDKVSGLQLLKDDQWIDVPPMRHSIVINLGDQLEVITNGKYKSVMHRVIAQTDGTRMSLASFYNPGDDAVISPAPALVKESDETSQVYPKFVFNDYMKLYAGLKFQAKEPRFEAMKAVSSVDVGAIATV

SEQ ID NO: 18201 - protein, 369 aa, Oryza sativa
MEQGQGDRYWCHHCEEVIEPVEPDMKCPSCDSGFVEEMGSAGFEPSTNLRSDRISLWAPLLLGMMGGSSQRARRLRRQIMEDDDDDDDNEDDEDDSDHELEDLFRRQRRGSSLVRLLQNLRDDLRGLDDIGRDSDRDRERERRERERLRERERERERMRERERERRRERTESLILINSNNEAIILQGTFGPDDNQDDSSNTSSGVSLGDYFLGPGLDILLQHLAESDLNRSGTPPAKKEAVEALPTVNIQEVLGCSVCLEDFEMGTEAKEMPCQHKFHSQCILPWLELHSSCPICRFQLPTEESKNPCESAGGIVSVNDDGDDAGTSSDVDSANQPGSPIFSALSALFSNPSSSSSSSSDDNAPHSSES

SEQ ID NO: 18202 - protein, 166 aa, Brassica napus
MTSPTALICETQAWKDLKGHVEDINKTHLRDLMSDAHRCESMMLEFEGLLLDYSRQRATVETMDKLLNLAKAAQLSEKISRMFNGEHINSTENRSVLHVALRAPKDAFIKADGKNVVPEVWNVLDKIKDFSDKIRSGSWVGATGKPLKDVIAIGIGGSFLGSLFVH

SEQ ID NO: 18203 - protein, 317 aa, Vigna radiata
MASFPVVDMGKLNTEERGAAMEMIKDACENWGFFELVNHGISIELMDTVEKLTKEHYKKTMEQRFKEMVANKGLESVQSEINDLDWESTFFLRHLPVSNVSENTDLDQDYRKIMKQFAEELEKLAEHLLDLLCENLGLEKGYLKKVFYGSKGPNFGTKVSNYPPCPTPDLIKGLRAHTDAGGIILLFQDDEVSGLQLLKDDQWIDVPPMRHSIVINLGDQLEVITNGKYKSVMHRVIAQTDGTRMSLASFYNPGDDAVISPAPALVKESDETSQVYPKFVFNDYMKLYAGLKFQAKEPRFEAMKAVSSVDVGAIATV

SEQ ID NO: 18204 - protein, 177 aa, Zea mays
  misc_feature (47)..(47): Xaa can be any naturally occurring amino acid
FVYRAFFIGAESFEPWKRIWKSWAAPKCKTFVWLAINNKCWTADRLXKRGLDHLENCVLFDQEDETVQHILSNCVFTRQFWHNILTPIGLSSVGPKRRDSVFAEWWRKASTKIPKSKRKGFNSMVILGAWSIWKQRNRCVLEGARPCLTTLEDGFKDEMRLWFSAGAKNMRSLFDPG

SEQ ID NO: 18205 - protein, 317 aa, Vigna radiata
MANFPVVDMGKLNTEERGAAMEMIKDACENWGFFELVNHGISIELMDTVEKLTKEHYKKTMEQRFKEMVANKGLESVQSEINDLDWESTFFLRHLPVSNVSENTDLDQDYRKIMKQFAEELEKLAEHLLDLLCENLGLEKRYLKKVFYGSKGPNFGTKVSNYPPCPTPDLIKGLRAHTDAGGIILLFQDDKVSGLQLFKDDQWIDVPPMRHSIVINLGDQLEVITNGKYKSVMHRVIAQTDGTRMSLASFYNPGDDAVISPAPALVKESDETSQVYPKFVFNDYMKLYAGLKFQAKEPRFEAMKAVSSVDVGAIATV

SEQ ID NO: 18206 - protein, 573 aa, Nicotiana plumbaginifolia
MPDYEGNGEDIDNYTGGSSPPPKSRSSHGHGPTPDDYSDSKSQHSSRENEKDRDSSRSREKDRERGRDKDRDRDRDRDRGRDRDRGRDRDKDREREKDRDRHHGDRHRDRSDRREKERTRDRDDDDRHRTRDYDQQREHAKDRESRHRHRSRSRGRSEHRSRSRSRSRSKSKRISGFDMAPPTSAMLPGITAAAGQVPGTNPPIPGMFPNMFPLASGQFGALPVMPIQAMTQQATRHARRVYVGGLPAHANEQSVATFFSHVMSAIGGNTAGPGDAVVNVYINYEKKFAFVEMRSVEEASNAMALDGIIFEGAPCKVRRPSDYNPSLAATLGPSQPNPNLNLAAVGLSPGSAGGLEGPDRIFVGGLPYYFTEAQIRELLESFGPLRGFDLVKDRETGNSKGYAFCVYQDVSVTDIACAALNGIKMGDKTLTVRRANQGTTQPKPEQESVLLHAQQQIALQRLMLQPATLATKVLSLTEVISADELNDDEDYQDILEDMRTECGKFGSLVNVVIPRPSPNGEPTPGVGKVFLEYADVDSSSKARQSLNGRKFGGNQVVAVFYPENKFYEGDYDG

SEQ ID NO: 18207 - protein, 687 aa, Citrus unshiu
MADSNVSYNPLPDGERPRPTRRRSIVLVLSGLLVVGFLVALLSDNGSITPANVIDNDNNNVNDNAKNGLNDVSSSSKEPERLRPFTSASSAGVSEKSNRRFGSRTASYPWTNNMLSWQRTAFHFQPQKNWMNDPNGPVFYKGWYHLFYQYNPNGAIWGDIVWGHAVSKDLIHWYHLPLAMVADQWYDIMGVWTGSATILPDGKLMMLYTGSTNESVQVQNLAYPADPSDPLLIKWVKYPGNPVLVPPPGIGSKDFRDPTTAWLTSEGKWRIAIGSRINRTGITFVYDTKDFINYELLRGVLHGVPNTGMWECVDFYPVSTTGEHGLDTSHNGLGVKHVVKASMDDDRHDYYAIGTYHEKNVTWVPDNPEIDVGIGIRYDYGLFYASKTFYDQNKKRRVLWGWIGESDSEIADVKKGWASLQGIPRTVALDTKTGSNLLQWPVEEVDSLRLTSKEFKKIELKPGSVMPLDVGSATQLDIVAEFELDKAALEKTAESNVEFSCSSSEGSAERGALGPFGLLVLADDSLSEQTPVYFYIAKGKDGSLKTYFCTDQSRSSEANDVNKSKYGSFVPVLEGEKFSMRVLVDHSIVEGFAQGGRTTITSRVYPTKAIYGAARVFLFNNATGASVTSSLKAWQMNSAFIRPYPDDDDERHSGTEPTHEVRGSKTKYLGNLLTSSLLFLNARNNFL

SEQ ID NO: 18208 - protein, 259 aa, Bacillus halodurans
MDSTVLQTIKNHVAIITFNRPDQLNCFNYQMLLDLEQVIQEVKANPAIRTVIFTGAGGKSFSAGADLKERRTLDENQVRRNVNKIRSVFNQIEELPQPTIAAINGYALGGGFELALACDFRLAVPEAKMGLTEVTWAIISGAGGTQRLPRLIGSQRAKEMILTGRKVAAEEAQRLGIILEVCDSKHLLTEAVRLAEKMSVNGPLAVIQAKYAIHYGCQTDLHTGLAIEAKAYETIIPTEDRLEALQAFKEKRPPQFKGK

SEQ ID NO: 18209 - protein, 336 aa, Agrobacterium tumefaciens str. C58
MTVKVAINGFGRIGRNVLRAIVESGRTDIEVVAINDLGPVETNAHLLRYDSIHGKFPADVKVEGDTIIVGGGKPIKVTAVRDPATLPHKELGVDIALECTGIFTARDKAAAHLTAGAKRVIVSAPADGADLTVVFGVNDDQLTKDHLVISNASCTTNCLVPVVKVLDDVIGIDHGFMTTIHSYTGDQPTLDTMHKDLYRARAAALSMIPTSTGAAKAVGLVLPHLKGKLDGTSIRVPTPNVSVVDFKFIAKRDTTVEEVNEAIKSASNGKLKGILGYTEEPLVSRDFNHDSHSSIFAIDQTKVMEGNFVRVLSWYDNEWGFSNRMSDTAVAFAKTI

SEQ ID NO: 18210 - protein, 554 aa, Cytophaga hutchinsonii
MAELIKMPKMSDTMTEGVIAAWHKKVGDKVKSGDLLAEVETDKATMEMESYEDGTLLYIAAEAKSAVPIDGVIAVIGKDGENIDALIKEIKGGGAPAEAPKTEAKAEAEVPKAEKPAEAAKQAAPAVDLSSIKAEAILMPKMSDTMVEGTIVAWHKKVGDAVKSGELLAEVATDKATMEMESYEDGTLLHIEVKEGDAVQIDGLIAIIGEKGTDVTPIINAYKNGGKPSAAPAAASEPAKQETASAPASNNAPAAQASSSSDERAKISPLARKIASDKGIDIKQVKGSGDHGRVIKRDIENFKAAPAEAAPAKGSGAPAASLPNIVGQEGFDEVPVSQMRKVIVKRLSESLFTAPHFYLTMEINMDKAIEARASINEVATAKVSFNDMVIRASAAALRKHPMVNASWQGDKIRVNHHIHIGVAIAIEDGLVVPVVRFADSKSLSHISQEVKELGGKAKSKKIQPADMAGNTFTISNLGMFGIDEFTSIINSPDACILSVGGIKQTPIVKNGQIVVGNIMKVTLACDHRVVDGAVGSAFLQTLKSYLEDPVRILA

SEQ ID NO: 18211 - protein, 172 aa, Citrus unshiu
PLFYKGWYHLFYQYNPDSAVWGNITWGHAVSADLIHWLYLPIAMVPDQWYDINGVWTGSATILPDGQIVMLYTGSTDKSVQVQNLAYPADPSDPLLLDWVKYPVNPVLVPPRHIGPKDFRDPTTAWAGPDGKWRLTIGSTIGKTGISLVYQTTDFKTYELLDEYLHPVPGAG

SEQ ID NO: 18212 - protein, 183 aa, Malus sp.
MASSMISSGTVATVSADRPAPAQARMVAPFTGLKSSSASPVTRKSNDITSIASNGGRVQCMQVWPPLGLKKFETLSYLPPLSTESLAKEVDYLLRKNWVPCLEFELEHGFVYRENHRSPGYYDGRYWTMWKLPMFGCTDSSQVLKELEEAKKAYPQSFIRIIGFDNVRQVQCISFIAYKPAGF

SEQ ID NO: 18213 - protein, 290 aa, Medicago truncatula
MATNIGIMDSAYFVGRNEILNWINNLLQLNLSRIEDAASGAVQCQMMDVTHQGVVPMHKVNFDAKTEYDKIQNYKVLQDVFNKLKIDKHIEVSRLVKGRPLDNLEFLQWLKRYCDSINGGIMNENYNPVERRVKVGKDRSSLKKSKSLQTNIMNNSGSGNTLGPNRTSVAKPFRSSGGAGGDNSSAEIQTLSKEITDLKFTVDRLEKERDFYFAKLRDVEIICQTPEVEDIPVTVAIKKILYATDAKESALDEAQDYLNQAMNVEEAQDYPSQTMNAVEAEAEIEVDSQN

SEQ ID NO: 18214 - protein, 56 aa, Glycine max
VEAVIDKIIEEARTGEIGDGKIFLIPISDVIRIRTGERGEQAARMTGGRSDMLSAV

SEQ ID NO: 18215 - protein, 85 aa, Glycine max
ENGELLGRADQGHTITAISSERLLKPILSADEVSVCVHGTYRKNLDSILKSCLKRMTRLHVHFSCGLPTSGDVISGTLLNIIILM

SEQ ID NO: 18216 - protein, 488 aa, Bacillus halodurans
MAHTVSEQRIHEVGSMKRDHYRMVINGERVDSDETFETFNPAKGEILATVAKASREHAEKAVQAARHAFDHGKWRKYPVGKRARVLNQIAAIMRERFQELVEIEVLNSGKAISAAQPQINQAIEDFEFYAGAIVGHRGTVNNVPNGFLNYTQKEPVGVCAQIIPWNYPLMMAAWKVAPALAAGCSVVVKPASLTPITAILLNEICHEAGVPEGVVNTVAGAGSVVGDYLVGHEDVNKVAFTGSTPIGKDIMEKASHTLKRVTLELGGKSPNLVFADADMEAAVAGSLFGIYFNTGQSCEARSRLFVHEEIYDEFIEEFITRAKKLQLGDPFDKGTHVGSIISRDQLEIIDSYVRSAEEEGATIALGGKERRVEGFENGHWYEPTVITNVTPDMKAVQEEIFGPVVVVETFQDEREVIKRANDTKFGLGSAIWTKDQGRATRVAHQLEAGIVMVNCPFSAFPGTPFGGYKESGFGRELCVETLDLYIGR

SEQ ID NO: 18217 - protein, 189 aa, Triticum aestivum
  misc_feature (143)..(143): Xaa can be any naturally occurring amino acid
  misc_feature (163)..(163): Xaa can be any naturally occurring amino acid
  misc_feature (165)..(165): Xaa can be any naturally occurring amino acid
MRPGAEFVAMSHRAGAPMVAPAHGLINGTAPHSPWQSPVPYLFGGLAAMLGLIALALLILACSYWKLSGYLDGDRDGQESGGDGEKASASGASKPALDFQEHVVVIMAGDDRPTFLAKPATSRAAEVELAAAAAASASAVDEXEKKMDEQGCEVSSQLGGDPXDXASGSSGHHHDHESSSTTGRQESLQ

SEQ ID NO: 18218 - protein, 135 aa, Salmonella typhimurium LT2
MRLLHTMLRVGDLQRSIAFYTNVLGMKLLRTSENPEYKYSLAFVGYGPETEEAVIELTYNWGVESYDMGNAYGHIALSVDNAAEACERIRQNGGNVTREAGPVKGGSTIIAFVEDPDGYKIELIEAKDAGRGLGN

SEQ ID NO: 18219 - protein, 341 aa, Agrobacterium tumefaciens str. C58
MTERLEDIAIKMVADGKGLLAADESTGTIKKRFDSINLESTETARRDYREMLFRSDDAMKKYISGVILYEETLFQKAADGTPFVDIIKAAGSLPGIKVDIGAKPMAFHPHEFITEGLDGLYERLRKYHEAGARFAKWRGVITIGEQRPSWGSIKANSQSLARYAALCQQADIVPIVEPEVLMDGEPGTHDIDRCAEVTQWVLQTVFADLFDARVNLEGMILKPNMIIDGKNARKASVEEVAEKTVKVLKATVPTAVPGIAFLSGGQSSEEATAHLSAMNAGYDLPWSLTYSYGRALQDTALKTWGGKSENVAAGQRAFTHRAAMNSLAAKGNWKQELEKAA

SEQ ID NO: 18220 - protein, 355 aa, Chlamydia trachomatis
  misc_feature (17)..(17): Xaa can be any naturally occurring amino acid
ACLQVDSRGSPQIGIKXSELGPKAMYFAMQGSCPSDKRIFFVSNIDPDNAAEVLLEIDLEQTLVVVVSKSGTTLEPAANEELFRQAYQNKGLSIAEHFVAVTSQGSPMDDKSAYLEVFHLWDSIGGRFSATSMVGGVVLGFAFGYEAFIEFLQGAAAIDAHALTPKMRENLPLLSAMLGVWNRNLLGYPTTAVIPYSTGLKYFTAHLQQCGMESNGKSISREGKEISFRTSPIIWGDVGTNCQHSFFSLHQGTDIVPVEFIGFLHNQRGLDCVLSGTSSSQKLFANLVAQSLALAQGRDNANPNKRFKGNSPSSILVAQQLSPRIAGSLLAFYSINLHFKGFAGESILLTKKGFH

SEQ ID NO: 18221 - protein, 157 aa, Malus sp.
VDALKWKGKTAEELSESVEFFRDIVTGPFEKFIQVTMILPLTGQQYSEKVSENCVFFWKSVGIYTDLEGKAIEQFIDVFKDQNFPPGASILFTQSPKGSLTISFSKDASMPEATNAVIENKLLSETVLESIVGKHGVSPATKQSLAARLSQLLNGCK

SEQ ID NO: 18222 - protein, 623 aa, Arabidopsis thaliana
MLFNLNDEARIIGISGMIGSGKTILAKELARDEEVRGHFANRVLFLTVSQSPNLEELRSLIRDFLTGHEAGFGTALPESVGHTRKLVILDDVRTRESLDQLMFNIPGTTTLVVSQSKLVDPRTTYDVELLNEHDATSLFCLSAFNQKSVPSGFSKSLVKQVVGESKGLPLSLKVLGASLNDRPETYWAIAVERLSRGEPVDETHESKVFAQIEATLENLDPKTKECFLDMGAFPEGKKIPVDVLINMLVKIHDLEDAAAFDVLVDLANRNLLTLVKDPTFVAMGTSYYDIFVTQHDVLRDVALHLTNRGKVSRRDRLLMPKRETMLPSEWERSNDEPYNARVVSIHTGEMTEMDWFDMDFPKAEVLIVNFSSDNYVLPPFIAKMGMLRVFVIINNGTSPAHLHDFPIPTSLTNLRSLWLERVHVPELSSSMIPLKNLHKLYLIICKINNSFDQTAIDIAQIFPKLTDITIDYCDDLAELPSTICGITSLNSISITNCPNIKELPKNISKLQALQLLRLYACPELKSLPVEICELPRLVYVDISHCLSLSSLPEKIGNVRTLEKIDMRECSLSSIPSSAVSLTSLCYVTCYREALWMWKEVEKAVPGLRIEATEKWFNMTWPDE

SEQ ID NO: 18223 - protein, 156 aa, Malus sp.
DAAKWKGKTAEELSESVEFFRDIVTGPFEKFIQVTMILPLTGQQYSEKVSENCVFFWKSVGIYTDLEGKAIEQFIDAFKDQNFPPGASILFTQSPKGSLTISFSKDASMPEATNAVIENKLLSETVLESIVGKHGVSPATKQSLAARLSQLLNGCK

SEQ ID NO: 18224 - protein, 402 aa, Sinorhizobium meliloti 1021
MDRRVVITGMGGLCGLGTDTTSIWKWMREGRSAIGPLLNTELHGLKGIVGAEVKALPDHNIDRKQLVSMDRISVLAVIAAHEAMRQAGLSCNEGNALRFGATVGVGLGGWDATEKAYRTLLVDGGTRTEIFTGVKAMPSAAACQVSMSLGLRGPVFGVTSACSSANHAIASAVDQIKCGRADVMLAGGSDAPLVWIVLKAWEAMRALAPDTCRPFSAGRKGVVLGEGAGMAVLESYEHATARGATILAEVAGVGLSADAFHITAPAVHGPESAMRACLADAGLNAEDVDYLNAHGTGTKANDQNETTAIKRVFGDHAYSMSISSTKSTHAHCIGAASALEMIACVMAIQEGVVPPTANYREPDPDCDLDVTPNVPRERKVRVAMSNAFAMGGTNAVLAFKQV

SEQ ID NO: 18225 - protein, 154 aa, Sorghum bicolor
MEYGQQGQHGHGTTGLDQYGNPVAARNRGMRTGTGHGAMLGLSTACSLAWVEHGQFQPAREGAKDRMHLHRSGSSSSSSSETDGMGGRRKKGIGEKIKEKLPGAHKDNQHATAPAAAAYGQQGHTGVRTYGTEGTASEKKGIMDKIKEKLPGQH

SEQ ID NO: 18226 - protein, 207 aa, Neurospora crassa
ARMLRTSNAMMPSVMGAAQRRALSDSAEPARVPSVESARVPEKLAKEDSPLATPKRNSPDYNVPIDKATSTWTPVPKHIQNGSEEGILPAAVVSGAPMELQARTVRIYLPSKPATQSSNSRVLWRMDWDVLEKGHRWENELMGWQSSGDFVQGTHLTFRTKEEAIQFAEKQGYEYFVQEPNQRHFTPKAYANNFLYSPKKLKIVRTK

SEQ ID NO: 18227 - protein, 129 aa, Vibrio vulnificus CMCP6
MLRVGNLDKSIQFYTEVMGMQLLRTNENKEYEYTLAFLGYGDESQGAVIELTYNWGKTEYDLGSAFGHIAIGVDDIYVTCDAIKAAGGNVTREPGPVKGGTTHIAFVKDPDGYMIELIQNKQASAGLEG

SEQ ID NO: 18228 - protein, 97 aa, Photobacterium profundum SS9
MSMQINITGHHVEVTQALREYVTTKFDKLERFFDKINNVQVILTVDKLHQIAEATLHINGGEIHAKADSENMYAAIDSLTDKLVRQLNKHKDKLNSH

SEQ ID NO: 18229 - protein, 336 aa, Porphyromonas gingivalis W83
MTKVGINGFGRIGRLVFRAAQTQNRSDIEIVAINDLIDVEYMAYMLKYDSVHGRFNGTVEVKDGQLIVNGKAIRVTAEKNPADLKWDQVGVEYVVESTGLFLTKEKSEAHLAAGAKYVVMSAPSKDDTPMFVCGVNTDKYVKGTKIVSNASCTTNCLAPIAKVLNDNWGMVGGLMTTVHATTATQKTVDGPSAKDWRGGRAAGGNIIPSSTGAAKAVGKVIPELNGKLTGMSFRVPTLDVSVVDLTCQLAKPAKYEDICAAMKKASEGELKGILGYTDEEVVSSDFIGETRTSVFDAKAGIALTDTFVKIVSWYDNEIGYSNKVLDLIAYMAKVNA

SEQ ID NO: 18230 - protein, 827 aa, Silicibacter sp. TM1040
MRDWLQSFFVALGNRTYLPTWIALFVVGIAFAYAERQNQIINDQELRAEVQAEVGLIRSHLEGKLTADVQLIKGLVGALMAEQLMTQETFNEVASYAAGDRHEILNIAIAPDLVVTMVYPYERNKAVLGLDYNKNEAQREAVMRMRDSGEIVLAGPVNLVQGGTGFIIRYPVFAGEGADRRFWGMVAAVIDADALYAEAGLAAEDLPIEIALSGRDGTGHQGGVFYGDQNIHDHDPIVTDVFLPTGTWELAAIPRGGWPKQPGNLLELRLVLLAAGILIIVPTFMACRLSAVRRATINTLRKRETELERNQAELEQLSTVAQNASDSIVLSGPDQRIFWVNEAFSRMTGYTVDEAVGKRPGELLNGPETDPATIREISEYISRGERLHREILNYTKSGKTIWVDTNLVPVLDEDGEINMVIGIERDVTSQKQNAAELAVAKVAAEQADRTKTEFLANMSHEIRTPMNGIIGMADLLSETELHEDQEQYVQIIRTSSKALLKIINDILDLTRMESGKLSLEPVDFDLESCIENAVDILRPVASEKGLDLTVNYASGLPRTVRADDGRLRQILVNLVGNAVKFTASGRVDVRVLCASTNPYRLTIDVQDTGIGMTSAQLHNIFDRFSQADAATTRSFGGTGLGLTISRLLAKQMDGDITVYSDPGRGSCFSLHIQCQAPLGLPGHIDADEAPDLDLIYGCKVLLAEDNRTNRLLIRKYLSDLSVDLIEASNGQEAVELCAHHRPDLILMDMSMPEMDGLTATRLIRMPQNPHQPPIVALTANAFASDREACLAAGMNGFLSKPINKRELLHGMAGVLDDPDNLRRVASG

SEQ ID NO: 18231 - protein, 170 aa, Triticum aestivum
  misc_feature (140)..(140): Xaa can be any naturally occurring amino acid
AARDPIGITSFYQGRSSTLPGAIFFASELKCLSSVCDEIIAFPPGHVYDSKTNETTRYFKPSWWDPHRQPAAPVDYRLLRTTLEKSVKKRLMAEVPFGVLLSGGLDSSLIASIAQRETLRLKAASLEQSSKLFDSKGTVXKQCRGKGKQLVGIDEDNNLSTLANYSAKPF

SEQ ID NO: 18232 - protein, 317 aa, Bartonella henselae str. Houston-1
MVQSHVRLLIIGSGPAGYTAAIYAARGMLKPVLITGLQQGGQLMITTDVENYPGFADPIQGPWLMEQMAKQAENMGTKIVYDNITKADLSKRPFILYGDSGAQYCCDALIIATGAQARWLGLESEQVFMGGGVSACATCDGFFYRDKDVIVVGGGNTAVEEALYLSHLAKRVSVVHRRDYFRAEKILQDRLFARDNVCVLWDHVVEEIIGLPARASIGAVVTGVRLKNVKTGQKVHVDTDGIFIAIGHDPAVSLFEGQLKQKSGGYLWTAPDSTATSIAGVFAAGDVVDDVFRQAITAAGRGCMAALEAERFLELQI

SEQ ID NO: 18233 - protein, 600 aa, Synechocystis sp. PCC 6803
MALIVQKFGGTSVGTVERIQAVAQRIKRTVQGGNSLVVVVSAMGKSTDVLVDLAQQISPNPCRREMDMLLSTGEQVSIALLSLALQEIDQPAISLTGAQVGIVTEAEHSRARILEIRPDRLEHHLREGKVVVVAGFQGISSVEHLEITTLGRGGSDTSAVALAAALKADFCEIYTDVPGILTTDPRLVPEAQLMAEITCDEMLELASLGAKVLHPRAVEIARNYGIPLVVRSSWSDEPGTKVVAPPVQNRSLVGLEIAKAVDGVEYDADQAKVALLRVPDRPGVASKLFRDIAQQQVDIDLIIQSIHDGNSNDIAFTVVKDLLNTAEAVTSAIAPALRSYPEADQEAEIIVEKGIAKIAIAGAGMIGRPGIAAKMFKTLADVGVNIEMISTSEVKVSCVIDQRDADRAIAALSNAFGVTLSPPKNQTDTSHLPAVRGVALDQDQAQIAIRHVPDRPGMAAQLFTALAEANISVDMIIQSQRCRINQGTPCRDIAFMVAEGDSSQAEAILQPLIKDWLDAAIVVNKAIAKVSIVGSGMIGHPGVAAHFFAALAQENINIEMIATSEIKISCVVPQDRGVDALKAAHSAFNLAGTKTVTVPA

SEQ ID NO: 18234 - protein, 373 aa, Candidatus Liberibacter asiaticus
HVDHGKTTLTAAITKYYSEEKKEYGDIDSAPEEKLRGITIATAHVSYETDKRFYSHIDCPGHADYVKNMITGATQADGAILVCAAEDGPKPQTREHILLARQIGISSIVVYMNKVDAVDDDELLDISEYEIRDLLKEHKYSDDTPIIRGSALCALQGTNKELGEDSIHALMKAVDTHIPTPQRSLDAPFLMHIEGSCGIEGRGTVVTGCIKRGRIKAGSDVEIIGMGGKKLKVKCTDVEMFRKKLDEAIAGDNVGLLLRGVNRADVPRGRVVCAPGSIQEYSRFRASVYILTASEGGRTTGFMDNYRPQFFMDTADVTGRIILSPGSQAVMPGDRVDLEVELIYPIAMEPNQTFSMREGGKTVGAGLILEIIE

SEQ ID NO: 18235 - protein, 302 aa, Akashiwo sanguinea
RIGRNVLRCWLKRETKPFDIVAINAGSMSAQTTAHLLKYDTVLGTLDAEVTYTDDALTIDGKEIKLLSGRDPAAMPWKDMGVEVIIESTGAFNSLDGGAKHLEAGAKKVVLTAPGKNCPTYVVGVNEGDYDAENDTVVSNASCTTNGMASVCKVLDDSFGVEYGLMTTTHSYTGDQMILDGRHRDLRRARAGACNIVPTSTGAAKAVAAVLPKYKGKLNGIALRVPTPNVSIVDLVVKVSKKCTTEEVNAAVKAAADGPMKGIINFEEQPLVSSDFKGTDYSNSVDAALTMVMGEDLVKVVM

SEQ ID NO: 18236 - protein, 232 aa, Candidatus Blochmannia floridanus
MHIIKTVLIRHGESQWNKDNRFTGWIDVDLSNQGYSEAKRAGQLLKKYKFIFDYGYTSVLKRTIHTLWVILDQLNQTWLPIQKVWQLNERHYGALQGLNKNEAIKTYGYDTIQKWRRSFKDIPPKNNKNDLFLGTNDIRYKNIETNTLPNGESLELTANRVIPYWQKYIEPKIYNNNCIIIVAHGNSIRAILKFLNQLDDSEIFNIEIPTGIPLIYEFDNNIKPIRYYYLSE

SEQ ID NO: 18237 - protein, 242 aa, Geobacillus stearothermophilus
AAAKPATTEGEFPETREKMSGIRRAIAKAMVHSKHTAPHVTLMDEADVTKLVAHRKKFKAIAAEKGIKLTFLPYVVKALVSALREYPVLNTSIDDETEEIIQKHYYNIGIAADTDRGLLVPVIKHADRKPIFALAQEINELAEKARDGKLTPGEMKGASCTITNIGSAGGQWFTPVINHPEVAILGIGRIAEKPIVRDGEIVAAPMLALSLSFDHRMIDGATAQKALNHIKRLLSDPELLLM

SEQ ID NO: 18238 - protein, 407 aa, Methanosarcina acetivorans C2A
MKDIYDVLVIGAGPAGSIAAKTAAEKGLDVLLIEKRQEIGDPVRCAEGVNKEYLKKHVEIDNSWICADLKGSRIYSPNGTKVEMAEEISGGEVGYVLERKIFDRALAEHAAKAGAEVRVKTRATGLIIEDDFVKGARLMNLGKEYEVRAKIVIGADGVESKVGRWAGIDTSLKPIDIETCAQYLIAGADIDPEYCEFYIGNEIAPGGYVWIFPKGEGKANVGVGILGNRTGKFKPRPVDYLNNFVEKKFPNAKIVEMVFGGVPVSGSIEKTSVNGLMLVGDAARQSDPITGGGILNAMDAGKIAGEAAYEAISSGDVSLEKLEEVYEKRWRETTGHDIDMSLIVKNCFINLKDEDLDSLADSLKEVKFESMRLFDLLQALFKANKKLLWDLRVLFKDAAKEVMKNRT

SEQ ID NO: 18239 - protein, 513 aa, Hordeum vulgare subsp. vulgare
MDGNNRGGGHSEVLKNYNLGKTLGLGTFGDVKVAEHKLTGQRVAIKILNRRKMETMEMEEKANREIKIMRLFIDFIHPHIIRVYQVIETPKDIFIVMEYCNNGELLDYIIENGRLQEDEARRIFQQILAGVEYCHRIMVVHRDLKPENLLLDSKYNVKLADFGLSNVMRDGHFLKTSCGSLNYAAPEIISSKLYAGPEVDVWSCGVILYALLCGSVPFDDDNIPSLFRKIKGGTYILPSYLSDSARDLIPKLLNIDPMKRITIHEIRVHPWFKNHLPCYLAVPPPYKAPKAKMIDEDILRDVVNLGYDKDHVCESLWNRLQNEETVAYYLLLDNRFRSTSGYLGADHQHLMDRSFNEFTLSESASPSTRNYLPGINDSQGGGLRPYYPVQRKWAIGLQSGAHPRDIMIEVLKALKELNVCWKKNGLYNMKCRWCPGFPQVSAMLLDSNHNFVDDSTIMDNGNADGRLPAVVKFEIQLYKTKDNKYLLDIQRVTGPQLLFLEFCGAFFTNLRVL

SEQ ID NO: 18240 - protein, 294 aa, Zea mays
MDGGGGAGGAEGELTAQETALYDRQIRVWGVDAQKRLSKAHVLVCGMNGTTIEFCKNIVLAGVGSLSLMDDNVVTEEDLNANFLIPPDESIYGGRSRAQVCCESLIDFNPMVRVFVEKGDPSLIDGEFLDKFDIVVLSRASLKTKKKPGGATEQQELTYSSLQEAISVPWNSLPKKTAKLYFAMRVLEDYELSEGRSPGETTLSDIDAVLARRKDMCDKMSLNESRIPTTLVERLLAAGKKEHPPVCAILGGILGQEVIKSISCKGDPVKNFFYFDVADGKGVIEDIPPPPPAK

SEQ ID NO: 18241 - protein, 513 aa, Hordeum vulgare subsp. vulgare
MDGNNRGGGHSEVLKNYNLGKTLGLGTFGDVKVAERNVTGQRVAIKILNRRKMETMEMEEKANREIKIMRLFIDFIHPHIIRVYEVIETPKDIFVVMEYCNNGELLDYIIENGRLQEDEARRIFQQILAGVEYCHRIMVVHRDLKPENLLLDSRYNVKLADFGLSNVMRDGHFLKTSCGSLNYAAPEIISSKLYAGPEVDVWSCGVVLYALLCGSVPFDDDNIPSLFRKIKGGTYILPSYLSDSARDLIPKLLNIDPMKRITFHEIRVHPWFKNHLPCYLAVPPPYKEQQAKMIDEDILREVVNLGYDKDHVCESLWNRLQNEETVAYYLLLDDRFRSTSGYLGADHQHLMDRSFNEFTLSESASPSTRNYLPGINDSQGGGLRPYYPVQRKWAIGLQSGAHPRDIMIEVLKALKELNVCWKKNGLYNMKCRWCPGFPQVSDMLLDSNHNFVDDSTIMDNGNADGRLPAVVKFEIQLYKTKDNKYLLDIQRVTGPQLLFLEFCGAFLTNLRVL

SEQ ID NO: 18242 - protein, 155 aa, Parasponia andersonii
VNKVFTEEQEALVVKAWAVMKKNSAELGLQFLKIFEIAPSAKNLFSYLKDSPVPLEQNPKLKPHATTFVMTTESAVQLRKAGKVTVKESDLKRIGAIHFKTGVVNEHFEVTRFALLETIKEAVPEMWSPEMKNAWGVAYDQLVAAIKFEMKPSST

SEQ ID NO: 18243 - protein, 470 aa, Mycoplasma penetrans HF-2
MSKIVKQEENFSKWYTSIIENANLVDYGLVKGTIMFKPYGFAIWKRIQEEFNKILVSLNTAEVCFPMLIPYSEFMKEKEHVEGFNPELFKVSHLGEKKLEDELVIRPTSEISFCNYFKKNIKSYNDLPCILNQWGSVFRVEKNTRPFLRTSEFLWQEQHAVFADKKEAFDFSITMVNEYKKFVNDYLSIAVLMGEKTENERFAGADNTFTIEALMPDGQVLQSATSHYLGTNFAKSYDLKYQTKNNNYDLMFQTSAGLSTRIIGAIIMSHSDNNGLVLPFKIAPIQFAIVTSNEVNKDSDELKAIYKNLFGYKYQTYFVEKSLGLQLQENEIKGIPFQLILGKKEIENNTITIYRRDTREKQNISFKEFNQNFIENLIKEYSSNLFNKTEKRLNSSIEFVNNIDEFKKALDNKKIISAYWSGNAEDEKKLKELTTATPRCFDWNQKIDKTKKCFFTNKPNAKLVYFARAY

SEQ ID NO: 18244 - protein, 155 aa, Pyrococcus horikoshii OT3
MGKRFGYSFQNFDPERMARASGRDLRISPKLAVEVCRELRGMMLNDALRYLDEVIALKRPVPLRRYNDSQGHKPGKGFGPGRYPVKVAKAIKKVLLNAKNNAEQKGLDPDKLKIIHIAAHRGPVLRGWYPRAFGRATPFNEQTTHIEVVVEEIRR

SEQ ID NO: 18245 - protein, 803 aa, Magnaporthe grisea
MAHCQDRGSNSRRGSLAHGTFEDEELSLSLTAIDPRNTAATTTRTTPTQHRRDDSNGRPRPKHSHSHSRRHSQHAQHQNQHQNQDQNQQSPPSAMPPTVHRGGGGGGPNAMPADGSTSSKIRVDQRISAYEISKTLGEGSFGKVKLAVHKGTKQMVALKIISRKRLASTDMAGRVEREIEYLQLLRHPHIIKLYTVIKTDNEIIMVLEYAGGELFDHIVTNGRLSEDEARRFFQQMLCAVEYCHRHKIVHRDLKPENLLLDDNLNVKIADFGLSNIMTDGNFLKTSCGSPNYAAPEVISGKLYAGSEVDVWSCGVILYVLLVGRLPFDDDHIPTLFSKIARGTYVVPHWMSPGAAALIKKMLVVNPVNRATITEIRQDPWFTTELPEYLQPPIEPFFNTGIDPEKAIRPSDIAPNAPPKVQEKLHAEVTDKISKTMGYGKQDVLDALEAEEPSAIKDAYMIVRENKMMQSNPALGGDNPFFATTPLGDENGSTGIMETMDSAMSASGHDPNASPMTSMSVRSATSSTLSAALAYQRPYTSKIGILPSSLPAYHNAYMESEKSGTAQDVPDMMALNEPPAPARTPAEQEETARRLRPHARSSQSAADSKPQSLTPSNAPKKTKPTRWQFGIRSRNAPFEALLCIYKALKKLDCSWKIDRDYHKVHGDENEKHRSRGDAGTPYILPADPWHIEARWETGPLRTHSVMTDPKNSAAFPGGKVRVQKKHSNNSSEDDDEEANATYEVIAMRLSIQIYEMESGVYLVDFKCAGYELPDGRLMEEKDVTSPFPFLDLAARLIIQLADAD

SEQ ID NO: 18246 - protein, 123 aa, Glycine max
  misc_feature (23)..(23): Xaa can be any naturally occurring amino acid
  misc_feature (45)..(45): Xaa can be any naturally occurring amino acid
  misc_feature (48)..(48): Xaa can be any naturally occurring amino acid
  misc_feature (67)..(67): Xaa can be any naturally occurring amino acid
  misc_feature (81)..(81): Xaa can be any naturally occurring amino acid
  misc_feature (87)..(87): Xaa can be any naturally occurring amino acid
  misc_feature (100)..(100): Xaa can be any naturally occurring amino acid
EARVSLLGTEFIKVATNIDPDCXMIINEKGRNAKCAMRKAFVDEXKSXLPKHILYKEHQQITDRDGXVETDSLKAHAEKPXPDRMIXNAANIFPFNTPTXRETYHYTMIIDRFFPQKSPRLTV

SEQ ID NO: 18247 - protein, 448 aa, Listeria monocytogenes str. 4b F2365
MAKHRYLPMTEQDEKEMLDVIGVKSIDDLFQDIPEKIRFKRDYDLKPAKSEPALLRELSKLASKNANTTEYASFLGAGVYSHYIPTVVDHVISRSEFYTAYTPYQPEISQGELQAIFEFQTMIAELTGMDLANSSMYDGGTALAEAAMLASGHTKRKKILISGAVHPESSNVLKTYATGQHIEVEVIPELDGKTDIEALKKALSDDIAGFVVQYPNFYGQVEPLAELEKLVHENNSLLLVSSNPLSLGLLTPPGEFGADIVVGDSQVFGIPESFGGPHCGFFAVTNKLMRKVPGRLVGETVDENGKRGYVLTLQAREQHIRRDKATSNICSNQALNALASSVAMATLGKTGLVEMAKQNLDKSHYAKQKFREKGFEVLFSDGFFNEFVVKLSKPIKEVNESLLDEGIIGGYDLGFYEEKYENHMLVAVTEMRTKEEIDAFVASLEGAK

SEQ ID NO: 18248 - protein, 482 aa, Listeria monocytogenes str. 4b F2365
MPLVFERSIPGRIGFSLPESDVPETKASDYFEQAYIRSVPADLPELSELEIMRHYTNLSNHNFGVDSGFYPLGSCTMKYNPKINEKVARFPGFANIHPNQPESSVQGALELLYDLQTSLVEITGMDEVTLQPAAGAHGEWTGLMLIRAFHEKNGDTKRTKVIIPDSAHGTNPASAAVAGFDVVTVKSNEKGLVDVADLKKVVGEDTAALMLTNPNTLGLFEKDIVEMAEIVHEAGGKLYYDGANLNAIMAKVRPGDMGFDVVHLNLHKTFTGPHGGGGPGSGPIGVKKELIPFLPTPVLTKKEEGYTFDYNYPDSIGRVKPYYGNFGINVRAYTYIRTMGPDGLKLVTEYAVLNANYMMRKLQEAYDLPFDQVCKHEFVLSGNRQKKLGVRTVDIAKRLLDHNFHPPTVYFPLIVGEAIMIEPTETESKETLDSFIDTMLKIAKEAEENPEIVQEAPHSTYVKRLDETRAARKPILRYQKEV

SEQ ID NO: 18249 - protein, 710 aa, Synechococcus sp. WH 8102
MGRGVRVLHLHLYGLFRSRDLELGRDADTGGQTLYVLDLVRSLAQRPEVDRVDVVTRLVQDRRVAADYERPLEVIAPGARILRFPFGPKRYLRKEQLWPHLEDLADQLVHHLTQPGHEVDWIHAHYADAGFVGALVSQRLGLPLVFTGHSLGREKQRRLLAGGGDRQQIEQAYAMSRRIEAEEQALTQADLVITSTQQEADLQYARYSQFRRDRVQVIPPGVDAGRFHPVSSAAEGDALDQLLSPFLRDPSKPPLLAISRAVRRKNIPALLEAFGSSSVLRDRHNLVLVLGCREDPRQMEKQQRDVFQQVFDLVDRYDLYGSVAYPKQHRRSQVPAFYRWAVQRGGLFVNPALTEPFGLTLLEAAACGLPMVATDDGGPRDIQARCENGLLVDVIDAGALQEALERAGKDASRWRRWSDNGVEAVSRHFSWDAHVCRYLGLMQAHLHQLPSVGPRPQGSPASSHRPDHLLLLDLDSTLDCPDGPSLTALRSQLERDGQRYGLGILTGRSLAAARQRYGDLHLPSPLVWISRAGSEIHLGEDLQPDHIWAQHIDTDWQRESVEAVMEDLHDLLELQSEEHQGPWKLSYLQRQPDESVLSHVRQRLRREGLSARPQRRCHWYLDVLPRLASRSEAIRHLALHWQLPLERVMVMASQQGDGELLRGLPATVVPADHDPCLVRHPQQKRVLLSGRPSLAAVLDGLSHYRFPSQR

SEQ ID NO: 18250 - protein, 489 aa, Photorhabdus luminescens subsp. laumondii TTO1
MRIQNKMLINGDWIDASDGQTIEVMNPHDGSLITRVAEAKEADVDCAVAAAKAAYPAWGRLQASERGALLLKLADKIEEHAAELAQLETMDTGHPIRDTLNIDVPRTAYCFRYFGGMADKLEGSVIPVEEGFLNYTTREPIGVVGQIVPWNFPLMFTSWKMAPALAAGNTIVIKPSEITPLSTLRIAELMMEVGFPPGVINVVVGYGNSAGARLSEHEDVGKIAFTGSTMTGQSIVAASAGNLKKVQLELGGKGANIIFEDADLTKAVGGSAWAIFHNQGQACIAGSRIILHESIADAFLEKFLTLAGSIRLGDPLLPETEMGPVTSLQHRERVLAYCDVARSQGCEILLGGKPPADPALANGCYIEPTVVRAKYSDRIAQEEVFGPFVTVITFKNDEEALAIANSTEYGLGSGLWTKDISRAHRFARDMHAGMVWINCYKRVNPASPFGGVGRSGYGREMGFEVMREYTQVKSVWVNVDAKIPPFYQR

SEQ ID NO: 18251 - protein, 438 aa, Prevotella albensis
MSDILDFGEPEKENSIIKVIGVGGGGGNAVNHMYREGIMTSVSCSVIPDNQALNDSSVPVHLQLGKEGLGAGNKPARARQAAEETLDDIKGMLNDGTKMAFITAGMGGGTGTGAAPVIARVSKELGILTVGIVTIPFRFEGDRKIDQALDGVEEMAKHVDALLVINNERLREIYPELSVLNAFAKADDTLSIAAKSIAEIITTHGLINLDFNDVKTVLKDGGVAIMSTGYREGEGRVKQAIEDALNSPLLNDNDIYNSRKILLSIAFSSENGGDNGLMMDEMNDVNDFMSKFGSDFEIKWGIAIDPELDKKVKVTILATGFGIENVDGMNNHLGKKHTQEEANRIAEEEEKAAERQDRRNRYYGKDNSNTQYKRRPHIFLFRPEDLDNEDVILAVESTPTYKRTRQMLDDIRNLAQGDIPENDKKDKQEPVQGIISFA

SEQ ID NO: 18252 - protein, 82 aa, Populus x canadensis
TLLKPNMVTPGSDAPKVANEVIAQFTVRALQRTVPAAVPAIVFLSGGQSEEEATRNLNAINKLKTKKPWSLSFSFGRALQQS

SEQ ID NO: 18253 - protein, 536 aa, Gossypium arboreum
MLQIAFSSYSWLLTASNQKDGMLFPVALSFLVAILGISLWHVWTIRKPKKDIAPLPPGPRGLPIVGYLPYLGTDNLHLVFTDLAAAYGPIYKLWLGNKLCVVISSAPLAKEVVRDNDITFSERDPPVCAKIITFGLNDIVFDSYSSPDWRMKRKVLVREMLSHSSIKACYGLRREQVLKGVQNVAQSAGKPIDFGETAFLTSINAMMSMLWGGKQGGERKGADVWGQFRDLITELMVILGKPNVSDIFPVLARFDIQGLEKEMTKIVNSFDKLFNSMIEERENFSNKLSKEDGNTETKDFLQLLLDLKQKNDSGISITMNQVKALLMDIVVGGTDTTSTMMEWTMAELIANPEAMKKVKQEIDDVVGSDGAVDETHLPKLRYLDAAVKETFRLHPPMPLLVPRCPGDSSNVGGYSVPKGTRVFLNIWCIQRDPQLWENPLEFKPERFLTDHEKLDYLGNDSRYMPFGSGRRMCAGVSLGEKMLYSSLAAMIHAYDWNLADGEENDLIGLFGIIMKKKKPLILVPTPRPSNLQHYMK

SEQ ID NO: 18254 - protein, 957 aa, Thermobifida fusca YX
MSDRSVSRPPALTFPDRHIGPDPAERAAMLETVGYASTADLMTAALPADILTAPDAPAPLRLPEPVGEAEVLAELRALAARNRLLVSMIGQGYYGTVTPPVIRRNILENPAWYTAYTPYQPEISQGRLEALLNFQTMVADLTGLPIAGASLLDEATAAAEAMTLARRVDKGKRSVFVVDADVFGHTLAVLRTRAEPLGIDLVVADLSAGLPDVDAFGVLVQYPAASGQVRDLRPVVDAAHERGALVVVAADLLALTVLRSPGEFGADVAVGSTQRFGVPMGFGGPHAAYMAVRDGLQRQLPGRLVGVSVDAAGKPAYRLALQTREQHIRREKATSNICTAQVLLAVMAGMYAVYHGPHGLRAIAERVHRRTAELAAGLRKLGVEVLTDAFFDTLRVRVPSRAAAVVRTARDLGINLFFADEDTVGVSCDETTTSEHVAAVLRAFGATTPPQTGDVPSALPEGLRRDVDYLTHPVFHTYRSETAMLRYLRRLADRDLALDRTMIPLGSCTMKLNATAEMEAITWPEFAELHPFAPLDQAEGLVQIVRDLETWLAEITGYDAVSLQPNAGSQGEFAGLLAIRGYHRSRGEEQRDICLIPSSAHGTNAASAVMAGMRVSVVACDSGGNIDLADLRAKIDAAGDRLAALMVTYPSTHGVYEETIAEVCRLVHEAGGQVYVDGANLNALVGWAKPGKFGADVSHLNLHKTFCIPHGGGGPGVGPVAVRAHLAPFLPNHPAHTEAGPHTSAGPVAAAPFGSASILPISWAYIRLMGEEGLRAATEQAVLAANYVARRLAPYYPVLYMGRNGLVAHECIIDLRGLQKRTGISNEDVAKRLIDYGFHAPTMSFPVPGTLMIEPTESEDLAELDRFIDAMIAIRGEIDRVAEGSYDRADNPLKNAPHTAEEVTADEWKHAYSRSEAAYPVPSLRASKYWAPVGRIDQAYGDRNLVCACPPPEAFAQ

SEQ ID NO: 18255 - protein, 101 aa, Populus x canadensis
TVVSIPNGPSALAVKEAAWGLARYAAISQDNGLVPIVEPEILLDGEHGIDRTFEVAQKVWAEVFFYMAENNVMFEGILLKPSMVTPSAECKDRATPEQVAE

SEQ ID NO: 18256 - protein, 238 aa, Kalanchoe fedtschenkoi
YRSIVSHEPRFVEYFRLATPELEYGRMNIGSRPSKRKPSGGIESLRAIPWIFAWTQTRFHLPVWLGFGAAFKRVIDKDIKNLLTLQEMYTRWPFFRVTIDLVEMVFAKGDPGIAALYDKLLVSEDLWPFGEQLRNNYNETKNLLLQVAGHKDLLEGNPYLRQRLRLRDSYITTLNACQAYTLKRIRDPNYHVTVRPRLSKEIMESNNAAAELVKLNPTSEYAPGLEDTLILTMKGIAA

SEQ ID NO: 18257 - protein, 153 aa, Arabidopsis thaliana
  misc_feature (106)..(106): Xaa can be any naturally occurring amino acid
  misc_feature (108)..(108): Xaa can be any naturally occurring amino acid
  misc_feature (114)..(114): Xaa can be any naturally occurring amino acid
  misc_feature (120)..(120): Xaa can be any naturally occurring amino acid
  misc_feature (126)..(126): Xaa can be any naturally occurring amino acid
  misc_feature (128)..(128): Xaa can be any naturally occurring amino acid
  misc_feature (133)..(133): Xaa can be any naturally occurring amino acid
  misc_feature (135)..(135): Xaa can be any naturally occurring amino acid
  misc_feature (137)..(137): Xaa can be any naturally occurring amino acid
  misc_feature (146)..(146): Xaa can be any naturally occurring amino acid
MASSMLSSTAVVTSPAQATMVAPFTGLKSSASFPVTRKANNDITSITSNGGRVSCMKVWPPIGKKKFETLSYLPDLSDVELAKEVDYLLRNKWIPCVEFELEHGIXCXREHGNXPGYYDXRYLAMXEXPFFGXTXSXKFLREFKDXRRPLGLN

SEQ ID NO: 18258 - protein, 408 aa, Arabidopsis thaliana
MAVEYECCGTSFFIHIAVIVLLVLFAGLMSGLTLGLMSMSLVDLEVLAKSGTPRDRIHAVGFGFDAAKILPVVKNQHLLLCTLLICNAAAMEALPIFLDALVTAWGAILISVTLILLFGEIIPQSVCSRHGLAIGATVAPFVRVLVWICLPVAWPISKPNNVACQFFQAGKGGELTHDETTIIAGALELSEKMAKDAMTPISDTFVIDINAKLDRDLMNLILDKGHSRVPVYYEQRTNIIGLVLVKNLLTINPDEEIQVKNVTIRRIPRVPETLPLYDILNEFQKGHSHMAVVVRQCDKIHPLQSNDAANETVNEVRVDVDYERSPQETKLKRRRSLQKWKSFPNRANSLGSRSKRWSKDNDADILQLNEHPLPKLDEEEDAVGIITMEDVIEELLQVLKQILPLQFS

SEQ ID NO: 18259 - protein, 365 aa, Kalanchoe fedtschenkoi
SDSGKDAGRLSAAWQLYKAQEELIEVAKKHGVKLTMFHGRGGTVGRGGGPTHLAILSQPADTIQGSLRVTIQGEVIERSFGEAQLCFKTLQRYTAATLEHGMIPPLTPKPEWRALMDDMAVVATERYRSIVFREPRFVEYFRPATPELEYGRMNIGSRPSKRKPSGGIESLRAIPWIFAWTQTRFHLPVWLGFGEAFKHVIDKDNKNLLMLQQMYNEWPFFRVTIDLVEMVFAKGNPGIAALYDKLLVSEELLPLGEQLRTAYNDTKSYLLKITGHNEILGGDPFLKQRLKLRNAYITTLNVCQAYTLKRIRDPSYQVPVRPPIAKEILEGSVTSANQLVKLNPTSEYAPGLEDTLILTMKGIAA

SEQ ID NO: 18260 - protein, 483 aa, Chlamydia muridarum Nigg
MDAPVDKFLQQQEYPYGFVTPVESEGLAPGISEEHIERLVHLRGEPKFLLDFRLKAFRLWQKMEEPKWARLHYAPISYDEMVYFSAPKSKKPLGKLEDADPELLETFKRLGIPIDEQKRLLNVQDVAMDLVFDSVSIGTTFKKTLEEAGVIFCSLREAIHNYPDLVKRYLGSVVPARDNFFAALNSAVFSDGSFVYIPKGVRCPMEISTYFRINDKESGQFERTLIIAEDDAYVSYLEGCTAPAFSSHQLHAAVVELIANNRSTIRYSTVQNWYPGDRNTGEGGIYNFVTKRGLCAGKQSKISWSQVEVGAAITWKYPSCILRGENSVGEFYSIALTNGKMQADTGTKMLHIGKGSSSTIVSKGISADESHNTFRSLVSISPQAVGSCNYTQCDSMLVGELCGAYTDPQILVHNGESCVEHEAATSKLREEQLFYLRSRGFDTEEAVSLVVHGFCKEVIELLPLEFAREATKLLMIKLENSVG

SEQ ID NO: 18261 - protein, 334 aa, Pseudomonas aeruginosa UCBPP-PA14
MTIRLAINGFGRIGRNVLRALYTGHYREQLQVVAINDLGDAAVNAHLFQYDSVHGRFPGEVEHDAESLRVMGDRIAVSAIRNPAELPWKSLGVDIVLECTGLFTSRDKAAAHLQAGAGKVLISAPGKDVDATVVYGVNHEVLRASHRIVSNASCTTNCLAPVAQVLHRELGIEHGLMTTIHAYTNDQNLSDVYHPDLYRARSATQSMIPTKTGAAEAVGLVLPELAGKLTGLAVRVPVINVSLVDLTVQVARDTSVDEVNRLLREASEGSPVLGYNTQPLVSVDFNHDPRSSIFDANHTKVSGRLVKAMAWYDNEWGFSNRMLDSALALAAARD

SEQ ID NO: 18262 - protein, 364 aa, Kalanchoe fedtschenkoi
SDSGKDAGRLSAAWQLYKAQEGLVKVAKEFGVKLTMFHGRGGTVGRGGGPTHLAILSQPPDTIHGSLRVTVQGEAIEQSFGEEHLCFRTLQRYTAATLEHSMCPPASPEPEWRELLDEMAVAATKEYRSIVFHEPRFVEYFRLATPELEYGRMNIGSRPSKRKPSGGIESLRAIPWIFAWTQTRFHLPVWLGFGAAFKHVIDKDIKNLLTLQEMYTRWPFFRVTIDLVEMVFAKGNPGIAALYDKLLVSEDLWPFGEQLRNNYNETKNLLLQVAGHKDLLEGNPYLRQRLRLRDSYITTLNACQAYTLKRIRDPNYHVTVRPRLSKEIMESNNAAAELVKLNPTSEYAPGLEDTLILTMKGIAA

SEQ ID NO: 18263 - protein, 173 aa, Zea mays
  misc_feature (48)..(48): Xaa can be any naturally occurring amino acid
MASRLAVAVAVAAPASSPSPVATVAPPRVALRRGLPPTWHALRALPRXRGAAVVCQAQGGQDTAIQVPDVSKSTWQSLVVESELPVLVQFWASWCGPCKMIDPIVGKLSKEYEGKLKCYKLNTDENPDIATQFGIRSIPTMMIFKNGEKKDSVIGAVPESTLVTCIDKYVGGR

SEQ ID NO: 18264 - protein, 473 aa, Bacillus megaterium
MKQNRNSLYIFSITLVAAIGGLLFGYDTAVISGAEESLKVYLIDSLGLGSLAHGVTVSSALIGCIIGGLVSGYFATKLGRKQSLILAAILFIVSALGASYPEFLFFTKGEPTLSLLLAFNFYRIIGGIGVGLASAICPIYIGEIAPADIRGRLVSFNQFMIIFGMLVVYFVNWGIANGETLEWINDVGWRYMFASGAIPALLFAALLFLVPETPRYLAIQNQDQKALAILTKINGSSEAKAILEDIKQTISTNVSSEKLLAYGKLVIVVGILLSVFQQFVGINVALYYAPRIFESMGAAKGSSMLQTIIMGLVNVIFTVIAILTVDRLGRKPLLITGSIGMAIGMFGVASMAFSNIIGIGTLVFIIIYTASFMMSWGPICWVLISEIFPNKIRGRAVAIAVAAQWAANYFISSTYPVMMEYSGGLTYGFYGLMSVLSALFVWKFVPETKGRTLEQMENMWRKKQGASKSKKAI

SEQ ID NO: 18265 - protein, 343 aa, Thermus thermophilus
MKVAVLPGDGIGPEVTEAALKVLRALDEAEGLGLAYEVFPFGGAAIDAFGEPFPEPTRKGVEEAEAVLLGSVGGPKWGTGSVRPEQGLLSLRKSQDLFANLRPAKVFPGLERLSPLKEEIARGVDVLIVRELTGGIYFGEPRGMSEAEAWNTERYSKPEVERVARVAFEAARKRRKHVVSVDKANVLEVGEFWRKTVEEVGRGYPDVALEHQYVDAMAMHLVRSPARFDVVVTGNIFGDILSDLASVLPGSLGLLPSASLGRGTPVFEPVHGSAPDIAGKGIANPTAAILSAAMMLEHAFGLVELARKVEDAVAKALLETPPPDLGGSAGTEAFTATVLRHLA

SEQ ID NO: 18266 - protein, 964 aa, Lycopersicon esculentum
MATRNLEKFASIDAQMRLLVPTKVSEDDMLVEYDALLLDRFLDILEDLHGEGIKTTVQECYELSAEYENTHDKKKLEELGSVLTTLDPGDSIVVAKSISHMLNMANLAEEVQIANSGRAKSKKGELSDESNLMTESDIEETLKRLVVNLNKSPREVFNALKNQTVDLVFTAHPTQAIRRSLLQKHARIRNCLSQLYAKDITPDDKEELDEALEREIQAAFRTDEIRRTPPTPQDEMRAGMSYFHETIWNGVPKFLRRVDTALKNIGIDERVPYNAPLIQFSSWMGGDRDGNPRVTPEVTRDVCLLARMMAANLYYSQIDDLMFELSMWRCNDELRDRADELHRSLKRDEKHYIEFWKQVPPSEPYRVIIGDVRDKLYHTRERTRQLLSHGFSEIPEEATYTNIKQFLEPLELCYRSLCACGDRPIADGSLLDFLRQVSTFGLSLVRLDIRQESDRHTDVLDAITHDLEIGSYREWSEERKQEWLLSELSGKRPLFGPDLPKTEEIDDVLNTFHVISELPSDCFGAYIISMATAPSDVLAVELLQRECHVKQPLRVVPLFEKLDDLDAAPAAIARLFSIEWYKNRINGKQEVMIGYSDSGKDAGRLSAAWQLYKAQEELIKVAKQYDVKLIMFHGRGGTVGRGGGPSHLAILSQPPDTIQGSLRVTVQGEVIEQSFGEEHLCFRTLQRFTSATLEHGMYPPFPPKPEWRALLDEISVVATEKYRSIVFKEPRFVEYFRLATPELEYGRMNIGSRPSKRKRNGGIETLRAIPWIFAWTQTRFHLPVWLGFGAAFKYALNKDKKNLNMLRDMHKKWPFFRVTADLIEMVFAKGDPGIAALYDKLLVSEDLWSFGELLRSDYEETKSLLLKVAGHKELLENDPSLKQRLRLRDSYITTLNVCQAYTLKRIRDPTYKVTPRPHITKEYIESKPAAELVSLNPQSEYAPGLEDTLILTMKGIAAGMQNTG

SEQ ID NO: 18267 - protein, 267 aa, Zea mays
LRHCRYLPAPTPHLRFAMNPSSSSTSSSGGYHSRAAAFASPQPRGGGGGGGGGRDGSDRIDALGRLLTRVLRHMAAELRLDMRTDGYVRVRDLLKLNLQTFAKVPLKSHTVDEIREAVRRDNKQRFSLLEEDGELLIRANQGHTISTVTSESLLKPILSPDEVSVCVHGTYRKNLDSILQFGLKRMARLHVHFSSGLPSDGEVTSGVRQNVNILIHLDVSKALKGGMKLYISDNKVILTEGFDGVVPVKYFERVETWPGRAPIPFQR

SEQ ID NO: 18268 - protein, 501 aa, Thermoproteus tenax
MRAGLLEGVIKEKGGVPVYPSYLAGEWGGSGQEIEVKSPIDLATIAKVISPSREEVERTLDVLFKRGRWSARDMPGTERLAVLRKAADIIERNLDVFAEVLVMNAGKPKSAAVGEVKAAVDRLRLAELDLKKIGGDYIPGDWTYDTLETEGLVRREPLGVVAAITPFNYPLFDAVNKITYSFIYGNAVVVKPSISDPLPAAMAVKALLDAGFPPDAIALLNLPGKEAEKIVADDRVAAVSFTGSTEVGERVVKVGGVKQYVMELGGGDPAIVLEDADLDLAADKIARGIYSYAGQRCDAIKLVLAERPVYGKLVEEVAKRLSSLRVGDPRDPTVDVGPLISPSAVDEMMAAIEDAVEKGGRVLAGGRRLGPTYVQPTFVEAPADRVKDMVLYKREVFAPVALAVEVKDLDQAIELANGRPYGLDAAVFGRDVVKIRRAVRLLEVGAIYINDMPRHGIGYYPFGGRKKSGVFREGIGYAVEAVTAYKTIVFNYKGKGVWKYE

SEQ ID NO: 18269 - protein, 470 aa, Vibrio parahaemolyticus RIMD 2210633
MIKFGTGGWRAFIGEEFTKDNVRLVAQAVANITNRESVADRGFVIGYDRRFLSDKAGRWFAEVLAANGIVVSFIDKFVPTPIVMFKAKEMGCAYSACITASHNPADYNGIKVFIEGGRDADEIITEKIETQISTLTAQDVKSVDFDQAVEDKLIEIINPMNEFVDSIIDFIDIEAIKKANLRVLIDPMFGVAKNALQTVLINGRCEVDVINDGKNPDFGGLMPSPSAATLYRLMHLVEQEGYDIGIGTDGDADRLGIIDEKGNFIHPNEVLILLYYYLLKYKGWKGSVVRNIATTHLLDKIAEDHGEKCFEVPVGFKHISSQMEADDSLIGGESSGGLTIRGHIKGKDGVFASSLLVEMISVTGKKLSELLDEIYGKYGYAYMAEGDCKFKPAQKAVLFNKIYVEKQLPEFEFDIEKVSYEDGAKVYFKNGGWIIARFSGTEPLLRIFAEMQDKDTAERVLQQFKDFLSL

SEQ ID NO: 18270 - protein, 315 aa, Cytophaga hutchinsonii
MSVEKVHCLIIGSGPAGYTAAIYASRAGLKPVMYQGAQPGGQLMITNDVENFPGYPDGVMGPEMMEHFKAQATRFGADIRYGTISSVDFTGPVHKVTVDEKVVLEADTIIISTGAGAKWLGIESETRLNGRGVSACAVCDGFFFRGQEVAIVGAGDTACEEASYLSKLCKKVYMLVRKDKFVAASVIMQQRVLNTPNIEVLFSTETDEILGKEDVEGMRVRNNVTGETREIPVTGFFVAIGHKPNTDIFKGWIDMDENGYIKTIPGTSKTNVEGVFACGDAQDHVYRQAVTAAGTGCMAALDAERYLAAKEAVTA

SEQ ID NO: 18271 - protein, 501 aa, Thermoproteus tenax
MRAGLLEGVIKEKGGVPVYPSYLAGEWGGSGQEIEVKSPIDLATIAKVISPSREEVERTLDVLFKRGRWSARDMPGTERLAVLRKAADIIERNLDVFAEVLVMNAGKPKSAAVGEVKAAVDRLRLAELDLKKIGGDYIPGDWTYDTLETEGLVRREPLGVVAAITPFNYPLFDAVNKITYSFIYGNAVVVKPSISDPLPAAMAVKALLDAGFPPDAIALLNLPGKEAEKIVADDRVAAVSFTGSTEVGERVVKVGGVKQYVMELGGGDPAIVLEDADLDLAADKIARGIYSYAGQRCDAIKLVLAERPVYGKLVEEVAKRLSSLRVGDPRDPTVDVGPLISPSAVDEMMAAIEDAVEKGGRVLAGGRRLGPTYVQPTLVEAPADRVKDMVLYKREVFAPVALAVEVKDLDQAIELANGRPYGLDAAVFGRDVVKIRRAVRLLEVGAIYINDMPRHGIGYYPFGGRKKSGVFREGIGYAVEAVTAYKTIVFNYKGKGVWKYE

SEQ ID NO: 18272 - protein, 500 aa, Candidatus Blochmannia floridanus
MIDKKISTHNINQHSTYTNNSYYKEGFFTQLKNEEFAQGINEKVIRNISEKRSEPEWMLKFRLSGYKAWINMQEPHWLKGHYHNLDYNSYSYYSAPEYSTHNQSEKQEKKLDHTISKKSPFLTKEVEKTFNKLGIPVNDIGNVAIDAIFDSVSVSTTFRNTLLKKGIIFCSLNDAIHDYPNLVRKYLGTVVSYKDNFFAALNAAVVSDGTFIYIPKNVRCPMELSTYFRINSKKTGQFERTILIADSGSYVSYIEGCSAPAHNNYQLHAAVVEVIVLKNAQVKYSTIQNWFSGHSKNSQGGILNFVTKRALCAEENAKMSWTQSESGSAITWKYPSVILKGKNSVGEFFSVAITNGIQQADTGTKMIHIGENSRSTIISKGISIGNSQNTYRGLVKILPTATHARNFTQCDSMLIGKKCGAHTFPNIESHNNTAQVEHEATTSKISDNQLFYCRQRGITEDNAISMIVNGFCKDIFSALPLEFSVEAQKLLEITLEHSVG

SEQ ID NO: 18273 - protein, 401 aa, Magnaporthe grisea 70-15
MAEGSGIDRKAEERMEFTTSKEVTVHPTFESMALKESLLRGIYAYGYESPSAVQSRAIVQVCKGRDTIAQAQSGTGKTATFSISMLQVIDTAVRETQALVLSPTRELATQIQSVVMALGDYMNVQCHACIGGTNVGEDIRKLDYGQHIVSGTPGRVADMIRRRHLRTRHIKMLVLDEADELLNQGFREQIYDVYRYLPPATQVVVVSATLPYDVLDMTTKFMTDPVRILVKRDELTLEGLKQYFIAIEKEDWKFDTLCDLYDTLTITQAVIFCNTRRKVDWLTDKMREANFTVSSMHGDMPQKERDSIMQDFRQGNSRVLISTDVWARGIDVQQVSLVINYDLPSNRENYIHRIGRSGRFGRKGVAINFVTSEDVRILRDIELYYSTQIDEMPMNVADLIA

SEQ ID NO: 18274 - protein, 573 aa, Burkholderia vietnamiensis G4
MAGQTMAEYLAKTLAAAGVERIWGVTGDSLNGLSFSLAQMGSIRWMHTRHEESAAFAAGADAASTGRLAVCAGSCGPGNLHLINGLYDCHRNHQPVLAIAAHIPSTEIGLGYFQETHPQELFRECSHFAELVTNASQFPRVLARAMRTAIEERGVAVIVLPGDIALGDGPQEAPSWSVSAPPSILPADADLDRLAALLNESDAVTLLCGSGTQGAHDEVVALADMLGAPVVHALRGKQFVEWDNPFDVGMTGLIGFSSGYHAMESCDTLLMLGTDFPYRPFYPAHAKIAQIDWKGSQLGHRAPLALGLVGTVKETIAALLPRLTRKTQRRFLENALKHYAAARKSLDDLAVPEPPGRAIHPQYLTKLVDEIAGEDAIFTADVGTPTLWAARYLTMNGKRQLHGSFNHGSMANAMPQALGAQGAHPGRQVVSLSGDGGLSMLLGDLLTARQLNLPIKVVVYNNSLLGFVSMELKAAGYLDTNVDLSATDFAAIAKGAGIFSVRVEHSENVAQALRSAFEHDGPALVDVVTSKYELAMPPKIELAHAKGFSLFMLRAILSGRGDEIVELARTNLR

SEQ ID NO: 18275 - protein, 176 aa, Citrus sinensis
LVAAVMSSFGITSMAVMAVYYRFWWQMEGGEVPLAEMFGTFALSVGAAVGMEFWARWAHKALWHASLWHMHESHHRPREGPFELNDVFAIINAVPAIALLSFGFFHKGLVPGLCFGAGLGITVFGMAYMFVHDGLVHKRFPVGPIADVPYFRRVAAAHQLHHSDKFHGVPYGLFLG

SEQ ID NO: 18276 - protein, 377 aa, Nostoc punctiforme PCC 73102
MNQIIINDTTLRDGEQAAGVAFTLQEKVAIAKFLDSIGIPELEVGIPAMGDEETRAIAAISDLGLQAKLLGWNRAVISDIKASIACGLNRVHIAIPVSGIQIAAKFHGQWRVSLQKLKDCISFAVDQGLWVAVGGEDSSRADENFLLDVALYAQEWGASRFRFCDTVGVLDPFTTYTKVKRLVSALMIPLEIHTHNDFGLATANALAGIKAGALSVNTTVNGLGERAGNAALEEVVMAIKRIYGVDLGIDTPGLLELSQLVAAASGASVPPWKAIVGENTFAHESGIHAHGVLQNPITYEPFAPEEVGWERRLVLGKHSGRHLVSNLLEQHGIFLNSQETQSVLDAVRHQSVQKKRSLTTEELLNLVREQRYSHATR

SEQ ID NO: 18277 - protein, 353 aa, Listeria monocytogenes str. 4b F2365
MSKLTKIQETLGKEKIEAVLVTSEFNRRYVSGFTGTSGVALILPEKAYFVTDFRYTEQAAKQAEGYEIVQHTGPIFDTVEDLLIKNDTKTLHFEADYVTVSEFKQMERVFNRQLIPLTGFFEEMRKVKTASELKAIRTACDIADAAFAHIIQFIKPGMAEIEVSNELEFFMRRAGATSSSFDTIVASGVRSALPHGVASDKKIEVGDFVTMDYGCYYDGYCSDMTRTIAVGEPAEKLKEIYQITLDAQLKVIDSLKPGMTGIEADAIARDYIASFGYGDAFGHSLGHGIGLEIHEGPNLSFKSPQKLEVGHVVTDEPGIYLPGIGGVRIEDDLLITETGNEILIHSPKELIIL

SEQ ID NO: 18278 - protein, 360 aa, Streptococcus pneumoniae TIGR4
MSKLQQILTYLESEKLDVAVVSDPVTINYLTGFYSDPHERQMFLFVLADQEPLLFVPALEVERASSTVSFPVVGYVDSENPWQKIKHALPQLDFKRVAVEFDNLILTKYHGLKTVFETAEFDNLTPRIQRMRLIKSADEVQKMMVAGLYADKAVHVGFDNISLDKTETDIIAQIDFAMKREGYEMSFDTMVLTGDNAANPHGIPAANKVENDALLLFDLGVLVNGYASDMTRTVAVGKPDQFKKDIYNLTLEAQQAALDFIKPGVTAHEVDRAAREVIEKAGYGEYFNHRLGHGIGMDVHEFPSIMEGNDMVIEEGMCFSVEPGIYIPGKVGVRIEDCGVVTKDGFNLFTSTSKDLLYFD

SEQ ID NO: 18279 - protein, 527 aa, Azospirillum brasilense
MLDSNVKGQLKAYFDKITQPIELAASLDDGAKSQDMQALLQDIASLSDKITFVRTDDDARKPSFAIKRTGTDVSVRFAGLPMGHEFNSLILALLQVGGHPSKESAEVIEQVKALEGEYSFETYFSLSCQNCPDVVQALNLMSVLNPRIKHVAIDGALFQQEVDSRKIMAVPSIFLNGEPFGQGRMGLEQILAKIDTGASQRDAEKIKAKDAFDVLVIGGGPAGAAAAIYAARKGIRTGVAAERFGGQVLDTMAIENFISVSHTEGPKLATALEQHVKEYEVDVMNLQRAEKLIPAEGPGGLIEIQLANGASLKSKTVILSTGARWRQMGVPGEDEYRNKGVAYCPHCDGPLFKGKRVSVIGGGNSGVEAAIDLAGIVAEVTLIEFDSQLRADEVLQRKLRSLPNVRVITSGLTTEVHGDGTKVTGLSYKNRNTGEVHRIDLEGIFVQIGLVPNTEWLKGSVALSPRGEIEVDARGQTSIPGVFAAGQTQTTVPYKQIIIAMGEGSKAALSAFDYLIRMAPVEAVAAA

SEQ ID NO: 18280 - protein, 502 aa, Staphylococcus epidermidis RP62A
MISKSSPLIFERSKKDRYAYSLPQNDIENISIASLLDDKYIRKHKAEFPEVSELDLVRHYTELSNKNFGVDTGFYPLGSCTMKYNPKINEKVARISGFSESHPLQEEEHVQGSLEIIYSLQEELKEITGMDEVTLQPAAGAHGEWTALMIFKAYHEKNGQSHRDEVIVPDSAHGTNPASASFAGFKSVTVKSNQRGEVDIEDLKRVVNDNTAAIMLTNPNTLGIFEQDIIEIGKIVHEAGGLLYYDGANLNAILDKVRPGDMGFDAVHLNLHKTFTGPHGGGGPGSGPVGVVEKLASYLPKPMVIKDNDRYKYDNDIPNSIGRVKPFYGNFGIYLRAYTYIRSMGANGLKEVSEAAVLNANYIKSRLKNHFEIPFNQYCKHEFVLSGTLQKQYGVRTLDMAKRLLDFGVHPPTIYFPLNVEEGMMIEPTETESKETLDYFIDAMIQIADETKNDPDKVLEAPHTTIIDRLDETTAARKPILKFEELKDEKYKEHTNIDSEDN

SEQ ID NO: 18281 - protein, 707 aa, delta proteobacterium MLMS-1
MPGRLFFGKRLALFLFTAILACTMIKFDDSQAGELAPRLHKEELANGLTVITRQTPATGVATVQIWLEAGSVYEEPHEAGITHFIEHLIFKGTEKRGPGEIAGAIEALGGRINAYTSFEHTVYHATLDARHWEQALEVLADAVLNSVFDPDEIEREKPVIFEEIRMRQDRPELHLFQELLSHAYQQHPYRLPIIGSQESVAAIERDDILAYVKEHYHPGNMTVVVVGDVNPAEVSAQTRKLFGELPAKEETPPRELPVEPPPTDFRFFLEEQAINQTHLTLALPIPAFKHPDTPVLSVLSQILGQGEASRLNERLRHEKGLVYRLGTSLLSLRDPGLLRISATLDAERAPEVLEEILAELFALRHFPVDDEELERARRNLEADFVFNLEQAEGMARVLGTFELLTGDPREHEYLERIRAVEAADIKRVANQYFRKEHLTAGLLTPLAASLELDRRQLTEIMVRAAERARKQVPDRRASDLPPHTHRFELDNGLTLLVRERPDVPTVAMRAVFPGGLRGETPATNGAFAFLAELLPRGAGELGARQMARTIADLAGELEGFSGRNTFGLKGDFLARFFDQGLLLLRDVIKKPAFDAEEAEKIRGELLANLRRQEDALPSVAIRELNRLLFRGHPYALNTMGSAGSLRELELATLKDIYQAHARPDKMVLSVVGDIDAEGVRRQVEELFGNWQAPPEVDTQVVETLLPP

SEQ ID NO: 18282 - protein, 537 aa, Cucumis melo
MSSIVIPSLQPHLRFPSSQETPQRSRSRVGFVSIRPIYATDGVSSSSSSSLQVPQRIVSPPEPTKLPLRKVPGDYGPPMFGALKDRHDYFYNQGREEYLKSRMLRYESTVYRTNMPPGPFITSDSRVVVLLDGKSFPVLFDHSKVEKKDLFTGTYMPVTELTGGYRVLSYIDPSEPDHAKLKQLIFFLLKHRRDKIMPEFHSTFSELFETLEKDLAAAGRAEYNASGEQAAFNFLARSLFGADPVDSKLGRDAPKLIAKWVLFQLGPVLSLGLPKVVEELLLRTVRLPPALIKADYRRLYDFFYKSSEAVFEEADRLGISREEACHNLLFTTCFNSFGGMKIFFPNMIKWIGRAGVNLHTRLAREIRTAVKANGGKITMGAMEQMPLMKSVVYEALRIEPPVPVQYGRAKKDLVVESHDAAFEIKEGEVICGYQPFATRDPKIFDRADELVPDRFTGEGEELLKHVIWSNGPETQSPSVQNKQCAGKDFIVFISRLLVVELFLRYDSFDIEASNTPLGAAVTVSAAVTVTSLKKASF

SEQ ID NO: 18283 - protein, 448 aa, Staphylococcus epidermidis RP62A
MSHRYIPLTEQDKNEMLNSIGAKSISELFDDIPTDILLKRNLNIAESEAETILLRRLNRLAAKNTTKETHATFLGAGVYDHYTPAVVDAMISRSEFYTAYTPYQPEISQGELQAIFEFQTLICELTDMDVANSSMYDGMTSFAEACILALSHTKKNKIVVSSGLHYQALQILHTYAKTRDEFEIIEVDLKGTITDLEKLEQLIDDNTAAVAVQYPNFYGSIEDLEQINNYIKDKKALFIVYANPLSLGLLTPPGTFGADIVVGDTQPFGIPTQFGGPHCGYFATTKKLMRKVPGRLVGQTQDDEGNRGFVLTLQAREQHIRRDKATSNICSNQALNALASSIAMSALGKQGIYEIAVQNLKNANYAKNKFEEHGFEVLKAQSFNEFVVKFNQPIKNINLKLAEYGYIGGFDLGEVSDDFKNHMLVAVTELRSKDEIDDFVTKAGELND

SEQ ID NO: 18284 - protein, 284 aa, Listeria monocytogenes str. 4b F2365
MGEIIDGKKLAKEIQEKVTREVAELVKEGKKPGLAVVLVGDNQASRTYVRNKQKRTEEAGMKSVLIELPENVTEEKLLSVVEELNEDKTIHGILVQLPLPEHISEEKVIDTISYDKDVDGFHPVNVGNLFIGKDSFVPCTPAGIIELIKSTGTQIEGKRAVVIGRSNIVGKPVAQLLLIENATVTIAHSRTKDLPQVAKEADILVVATGLAKFVKKDYIKPGAVVIDVGMDRDENNKLCGDVDFDDVVEEAGFITPVPGGVGPMTITMLLANTLKAAKRIWKMN

SEQ ID NO: 18285 - protein, 112 aa, Bifidobacterium longum DJO10A
MKLITAIIQPHKLDDVKEALAAAGVHGLTVSEANGYGRQRGHTEVYRGAEYTVDLIPKIRVEVLSDDADAETLVGVIIKSAGTGTIGDGKVWVAPLDSVARVRTGETGSAAI

SEQ ID NO: 18286 - protein, 287 aa, Burkholderia pseudomallei K96243
MPDRATHRRDASFPDAIESKETHCMSAELLASRPPESESTLVLTLSNPGARNALHPDMYAAGLEALNTAERDPSIRAVVLTGADRFFCAGGNLNRLLDNRAKAPSVQAASIDLLGEWITAINTVTKPVIAAVEGAAAGAGFSLALACDLLVAADDAKFVMSYARVALTPDGGGSWFLARALPRALAAEILFEGKPAAATRLHQLGVVNRLTKPGTTRDEAIAWADQLGTMSPNALARIKSLIADAQTQPLAAHLAAERDHFVASLHHADALEGITAFLDKRAPIYKR

SEQ ID NO: 18287 - protein, 406 aa, Glycine max
  misc_feature (330)..(330): Xaa can be any naturally occurring amino acid
MAASLQLFQCKLARPFRSFPLRRSTPPLSLRCCASPPSSYSITLIPGDGIGPEIISVAKDVLVLVGSLEGIKFEFQEVLMGGAALDATGVPLPDDTLSAAKQSHAVLLGAVGGYKWDKNEKHLKPETGLLQIRKELGVFANLRPATVYSPLVDASTLKREVAEGVDIMLIRELTGGIYFGEPTGFGTNENGEEIGFNTEIYATHEIDRIAHFAFKVAQKRCGKLCSVDKANVLEASMLWRKRFLAIAQEYPDVELSHMYVDNASMQLIRNPKQFDTMVTNNIFGDILSDEASMVTGSIGMLPSASLGASGPGLFEPIHGSAPDIAGQDKXANPFATVLSAAMLLRYGLGEEKAAKRIENAVVDTLNRGFRTGDIYSAGTKLVGCKQLGEEILKSVESNVHAGAATV

SEQ ID NO: 18288 - protein, 446 aa, Deinococcus radiodurans R1
MNDIFGLFAMFFLVLMNGFFVAAEFSLVSVRRTRIDQLAEEGNATAQAAQGALQNLDLYIAATQLGITMASLAIGFVAEPAIEHLLEPLLHQTDLSESSRKAIAFGVAFAISTTLHIVFGELAPKSWALQRPEQVVLMITRPLLAFAGVFKWAIRGLNALGNGVVRLFGLKAVTGHHTAYSEEEIRMIVSASSQEGVLEDSEKELVYNVFDLSDTTVREVMRPRVDMVTVDSALPLRRLLELNDEHGYSRVPVYQDTGDNIVGIAHIGDVLRHLGELDHLTIADIMRPVFFVPEAMKIKDLLAKMRAKKSHMSIVVDEFGGTMGLVTLEDAIEEIVGEIYDETVEEEEQPIIVIAEGIYLMDASLTVHEVEERLGSNLEDGEAEYDTLAGFMTSHFGDIPEVGQSFVHGGWSFTVEEADQRRVTRVRVERAPDADPFDIPIELPRD

SEQ ID NO: 18289 - protein, 328 aa, Arabidopsis thaliana
MATATSHQSVVSFASLRSSPSSTISQCGFKIDSSLSFTSKKTNFCKIKAMASSVSYDNTLLSPSKTIPDNSQKKSNEAALILIRHGESLWNEKNLFTGCVDVPLTEKGVEEAIEAGKRISNIPVDVIFTSSLIRAQMTAMLAMIQHRRKKVPIILHDESEQAKTWSQVFSDETKNQSIPVIPAWYGELQGLNKQETAERYGKEQVHEWRRSYDIPPPKGESLEMCAERAVAYFQDNIEPKLAAGKNVMIAAHGNSLRSIIMYLDKLTCQEVISLELSTGIPLLYIFKEGKFMKRGSPVGPTEAGVYAYTKRLAQYRQKLEDDSEVLCA

SEQ ID NO: 18290 - protein, 354 aa, Oryza sativa
  misc_feature (106)..(107): Xaa can be any naturally occurring amino acid
  misc_feature (274)..(274): Xaa can be any naturally occurring amino acid
  misc_feature (334)..(334): Xaa can be any naturally occurring amino acid
PWLWATFVLAVLVMSGAAALGRELAGDGAAAAAAADVAMASRHEKWMAKHGKTCEDEEEKARRLEVFRANAKLIDSFNAAAEKDGGGGHRLATNRFADLTDDEFRXXPRTRDQRPPAAVAGAGGGFLYENFSLAAAPQSMDWRAMGAVTGVKDQGSCGCCWAFSAVAAVEGLAKIRTGQLVSLSEQELVDCDVRGEDQGCEGGLMDTAFQYIARRGGLAAESSYPYRGVDGACRAAAGRAAASIRGFQDVPSNDEGALMAAVARQPVSVAINGXAGYVFRFYDRGVLGGAGCGTELNHAVTAVGYGTASDGTGYWLMKNSWGASWGEGGYVRIXRRGVGREGACGIAQMASYPV

SEQ ID NO: 18291 - protein, 194 aa, Cucumis sativus
GGSNAVNRMIESSMSGVEFWIVNTDIQAMRMSPVYPENRIQIGQELTRGLGAGGNPEIGMSAANESKEAIEEALYGSDMVYVTSEMGGGTGTGGAPVIAGIAKSMGILTVGIVTTPFSFEGRRRAVQAQEGIANLRDKVDTLIVIPNDKLLTAVSQSTPVTEAFNLADDILRQGVRGISDIITVPGLVNVDFAD

SEQ ID NO: 18292 - protein, 186 aa, Arabidopsis thaliana
  misc_feature (117)..(117): Xaa can be any naturally occurring amino acid
MASEARESPANNPGLSTNRDEATKGYIMQQTMFRIKDPKASLDFYSRVLGMSLLKRLDFSEMKFSLYFLGYEDTTTAPTDPTERTVWTFGQPATIELTHNWGTESDPEFKGYHNGNXSEPRGFGHIGVTVDDVHKACERFEELGVEFAKKPNDGKMKNIAFIKDPDGYWIEIFDLKTIGTTTVNAA

SEQ ID NO: 18293 - protein, 345 aa, Psychrobacter arcticus 273-4
MSTMQQPALTTLNIATRQSPLALWQAEHIRDRLLVLYPEMTINLLKIVTKGDKILDTPLAKIGGKGLFVKELEQALYDKQADIAVHSLKDVPMDLPEGLTLGVYCKRASPTDAFVSNTYHSIDELPQGAVVGTASLRRQCQIKAYRADLQIKTLRGNVGTRLSKLDAGEYDAIILATSGLQRLELNARIRSELDIDICLPAVGQGALAIECRADDDEVLKLLAPLNDDKARIRLIAERALNRHLQGGCQVPIAAYAVLQKADALAADNDDNGSVSNNNDAGDTLWLRGRVGQEDGSELLKVEKRQTLTGSQAEQEAQANQLGIEVAEMLLEAGAGAILSAIYHPE

SEQ ID NO: 18294 - protein, 303 aa, Eutreptiella sp. MBIC11104
RIGRNVLRCWHGRTNKPFDITVINAGSMTPQQAAHLLKYDSVLGTFDADVTYGEDWLAIDGKQIKLIASRDPTKCGWGDMGVEVIIEGTGAFNSLEGSSKHLEAGAKKVVITAPGKNCPTYVCGVNEADYDPATEHVVSNASCTTNGMASVCKVLDDEFGIEYGTMTTTHSYTGDQMILDGRHSDLRRARAGAVNIVPTSTGAAAAVALVLPSLKGKLNGIALRVPTPNVSIVDLVIKVTKKTNKEEVNAALKAASESGPMAGILGYTEDPLVSSDFKGTHVSNTVDGQLSMVMGDDMVKVVM

SEQ ID NO: 18295 - protein, 194 aa, Cucumis sativus
GGRNAVNRMIESSMKGVEFWVVNTDVQALKMSPVQSENCLQIGRELTRGLGAGGNPEIGMNAANESKEAIEGALYGADMVFVTAGMGGGTGTGGVPVIASNAKSMGILTVGIVTTPFSFEGRIRTVQAQEGIAALRDNVDTLIVIPNDKLLTAVAQSTPVTEAPNLADDVLRQGVQGISDIITIPGLVNVDFAD

SEQ ID NO: 18296 - protein, 194 aa, Cucumis sativus
GGRNAVNRMIESGMQGVDFWIVNTDAQAMRMSPVQSENCLQIGRELTRGLGAGGNPEIGMNAANESKEAIEGALYGADMVFVTAGMGGGTGTGGVPVIASIAKSMGILTVGIVTTPFSFEGRRRTVQAQEGIAALRDNVDTLIVIPNDKLLTAVTQSTAVTEAFNLADDILRQGVRGISDIITVPGLVNVDFAD

SEQ ID NO: 18297 - protein, 290 aa, Zea mays
MATGSEASKAAEAVVDWHKHDSKRMLHAVYRVGDLDRTIKYYTECFGMKLLRKRDVPDEKYTNAFLGFGPENTNFAVELTYNYGVDKYDIGTGFGHFAIANDDVYKLAENIKSKGGKITREPGPVKGGSTVIAFAQDPDGYMFELIQRADTPEPLCQVMLRVGDLERSIKFYEKALGMKLLRKKDVPDYKYTIAMLGYADEDKTTVLELTYNYGVTEYSKGNAYAQVAIGTNDVYKSAEAVDLATKELGGKILRQPGPLPGINTKIASFVDPDGWKVVLVDNTDFLKELH

SEQ ID NO: 18298 - protein, 163 aa, Arabidopsis thaliana
LRLSESGGLEVPRKPSGERKKQSGVRASVPCFDLKLKNTISNEKEALANNVASCDLDKKRKRSRGSDVLTFPVSLPDLNGEGNTSGTDKVPGFDLNQISREEEEPEVNGEHMVAEAMKNAMLDNRISDLHVERKLPICGDVEKELNRAVKRKVTWQDPVALSV

SEQ ID NO: 18299 - protein, 370 aa, Psychrobacter arcticus 273-4
MSLNTIPEIIEDIRAGKMVILMDDEDRENEGDIIMAATHVRPDDINFMITHARGLVCLTLSQARCQQLALPLMSDRNEAKFSTNFTVSIEAAEGVTTGISAADRARTIQAAVSSSAKPEDIVQPGHIFPIMAQNGGVLHRAGHTEAGCDLARLAGLEPAAVIVEIINADGTMARRDDLEVFAKEHDLKIGTIADLINYRIANEQTVEEIAAHPFETEYGTFTLHRFREFGADETHLALVKGDVSQGVSTVRVHGFHPLRDLFAAKNDTTGRSGWSVRSALEEISTSERGVLVWIGNHEPTDLGDALDKASLNEAMSTITQQPYRSIGVGAQILRHLGVRDMRLLSSPMKFHALSGFDLNVVDCVHAPKQD

SEQ ID NO: 18300 - protein, 402 aa, Medicago truncatula
MLPQKFRQNPMIEQHSLYQHPALITPQIEPILSGNLPPGFDSSTCRSVYVGNIHPQVSEPLLQELFSSAGALEGCKLIRKEKSSYGFVDYFDRSSAAIAIVTLNGRNIFGQSIKVNWAYTRGQREDTSGHFHIFVGDLSPEVTDATLYACFSAYSSCSDARVMWDQKTGRSRGFGFEAQSAINDLTGKWLGSRQIRCNWATKGANMNGENQSSESKSVVELTSGTSEEAQEMTSDDSPEKNPQYTTVYVGNLAPEARIHTVTSVDLHHHFHALGVGTIEDVRVQRDKGFGFVRYSTHGEAALAIQMGNTRFLFGKPIKCSWGSKPTPPGTASTPLPPPASTHVPVPGFSPAGLALYERQLALSKMNEAHAVKRAAMGMGALGAGYGAGFPNVATTQHLMYYQ

SEQ ID NO: 18301 - protein, 629 aa, Xanthomonas oryzae pv. oryzae KACC10331
MARALMANERPAQQSDIKLLISKGLEQGYLTYAEVNDHLPDDLVDPEQIEDIISMINGMGIDVHEVAPDAETLLLNDGNTGNREVDDTAAEEAAAALTALDTEGGRTTDPVRMYMREMGTVELLTREGEIAIAKRIEEGLSQVQAALGVFPLSTEMLLADYEAHKEGKKRLAEIVVGFNDLIEEADAAAAALAAAGPVAVDEDALDEDDDEDGDDAAAEEEVGPTGPDPVEVATRMQNLANEYAKFKKVYAKNGAEHKLVVKAREDMAAIFTTLKLPLPLTDALVTQLRGVVNGIKDHERKVLHLATTVARMPRKDFIRSWEGNQTNLEWVEDALKRKQKWSSALRDVKDQIISEQQGSMEMEKASYLTLGEIKEISRAMAYGEAKARKAKKEMVEANLRLVISIAKKYTNRGLQFLDLIQEGNIGLMKAVDKFEYRRGYKFSTYATWWIRQAITRSIADQARTIRIPVHMIETINKLNRISRQMLQQFGREATPEELAKEMDMPEDKIRKVMKIAKEPISMETPIGDDEDSHLGDFIEDTNVESPIDNTTNINLSETVRDVLAGLTPREAKVLRMRFGIDMNTDHTLEEVGKQFDVTRERIRQIEAKALRKLRHPSRSEQLRSFLDID

SEQ ID NO: 18302 - protein, 409 aa, Vibrio parahaemolyticus RIMD 2210633
MELATTVTELRYALDTFFFLISGALVMWMAAGFAMLEAGLVRSKNTTEILTKNFCLYAIACTTYLVIGYNIMYVDNGEGGWLPSFGGLIGTQGEGADHSLESDFFFQVVFVATAMSVVSGAVAERMKLWSFLLFSAVLTAFIYPMEGYWTWGGGFLSEAGFSDFAGSGIVHMAGASAALAGVLLLGARKGKYGKNGEIYPIPGSNMPLATLGTFILWFGWFGFNGGSQLMVSDFENATAVGQIFLNTNAAAAAGSIAALFVCKTTWGKADLTMILNGALAGLVAITADPLSPSPLYAVAIGAVSGALVVFSIIGLDKLKIDDPVGAISVHGVCGFFGLMVVPLSNGEATFGAQLLGAAVIFAWVFGASLVVWAILKATVGIRVTEEEEMEGMDMHDCGVGAYPEFVTVK

SEQ ID NO: 18303 - protein, 1012 aa, Desulfovibrio gigas
MLIKRRAFLKLTAAGATLSAFGGLGVDLAPAKAQAATMALKTVDAKQTTSVCCYCSVGCGLIVHTDKKTNRAINVEGDPDHPINEGSLCAKGASTWQLAENERRPANPLYRAPGSDQWEEKSWDWMLDTIAERVAKTREATFVTKNAKGQVVNRCDGIASVGSAAMDNEECWIYQAWLRSLGLFYIEHQARICHSATVAALAESYGRGAMTNHWIDLKNSDVILMMGSNPAENHPISFKWVMRAKDKGATLIHVDPRYTRTSTKCDLYAPLRSGSDIAFLNGMTKYILEKELYFKDYVVNYTNASFIVGEGFAFEEGLFAGYNKETRKYDKSKWGFERDENGNPKRDETLKHPRCVFQIMKKHYERYDLDKISAICGTPKELILKVYDAYCATGKPDKAGTIMYAMGWTQHTVGVQNIRAMSINQLLLGNIGVAGGGVNALRGEANVQGSTDHGLLMHIYPGYLGTARASIPTYEEYTKKFTPVSKDPQSANWWSNFPKYSASYIKSMWPDADLNEAYGYLPKGEDGKDYSWLTLFDDMFQGKIKGFFAWGQNPACSGANSNKTREALTKLDWMVNVNIFDNETGSFWRGPDMDPKKIKTEVFFLPCAVAIEKEGSISNSGRWMQWRYVGPEPRKNAIPDGDLIVELAKRVQKLLAKTPGKLAAPVTKLKTDYWVNDHGHFDPHKIAKLINGFALKDFKVGDVEYKAGQQIATFGHLQADGSTTSGCWIYTGSYTEKGNMAARRDKTQTDMQAKIGLYPGWTWAWPVNRRIIYNRASVDLNGKPYAPEKAVVEWNAAEKKWVGDVPDGPWPPQADKEKGKRAFIMKPEGYAYLYGPGREDGPLPEYYEPMECPVIEHPFSKTLHNPTALHFATEEKAVCDPRYPFICSTYRVTEHWQTGLMTRNTPWLLEAEPQMFCEMSEELATLRGIKNGDKVILESVRGKLWAKAIITKRIKPFAIQGQQVHMVGIPWHYGWSFPKNGGDAANILTPSVGDPNTGIPETKAFMVNVTKA

SEQ ID NO: 18304 - protein, 499 aa, Aspergillus nidulans FGSC A4
MAQQYKLPFELDNPDLLHFDSYVGNAWVTAKSGARFEVVDPGTDLPWASCPTNSAEDVDSAVQIAHDAFEKFKKVNPRQRAQWLLKWDSLIREARSDLAKILTHETGKPIAESYGEIDYATGFTWWFAGEAERIQGSIAVPAAPNRRVFTVKQPIGVAAALVPWNFPIAMVLRKAGAALAAGCTMIVKPSPETPLTALVLAHLAEKAGFPAGVFNVLTTDLENTPPLSEALCKHPLVKKVTFTGSTRVGKLIASHCAHGLKKVTLELGGNCPFLVFDDADLDQALDQLMALKWRHAGQACITANRIYVQAGIYDKFAQLLKERTAKLVIGHGAKEGTTLGPLTTPRSIDKAISQVEDARRLGADVILGGSRVQGTQGYFFEPTILKNMTKDMLVSREESFAPIAALYRFETEEEAVKLANDTSMGLASYAFSKNIDRMWRLLENLEAGMIGMNTGNSSAAESPFGGIKESGYGKESGKEVAVNEYLITKTGTLTIDGQY

SEQ ID NO: 18305 - protein, 112 aa, Vibrio parahaemolyticus RIMD 2210633
MKIINAIIKPFKLDDVREALADVGIEGMTVSEVKGFGRQKGHTELYRGAEYQVDFLPKVKIEIATHADNVDRVVEAITKAAQTGKIGDGKIFVYDLNQAVRIRTGEMDAEAL

SEQ ID NO: 18306 - protein, 325 aa, Cattleya bicolor
MESGSFPVINMELLESSQRPEAMALLREACENWGFFELLNHGISTELMNRVETVNKENYRRFREQRFKEFAAKTLDSGEKVDGDNLDWESTFFLRHLPTSNISQIPDLDEDCRSTMKEFARELEKLAERLLDLLCEDLGLEKGYLKRVFCGGSDGLPTFGTKVSNYPPCPKPELIKGLKAHTDAGGIILLFQDDKVSGLQLLKDGQWIDVPPLRHSIVVNIGDQLEVITNGKYKSVMHRVVAQTDGNRMSIASFYNPGSDAVISPAPELVEKEAEEEKKEATYPKFVFEDYMNLYIRKKFEAKEPRFEAMKTMETVSGSQLIPTA

SEQ ID NO: 18307 - protein, 243 aa, Glycine max
  misc_feature (190)..(190): Xaa can be any naturally occurring amino acid
  misc_feature (215)..(215): Xaa can be any naturally occurring amino acid
  misc_feature (220)..(220): Xaa can be any naturally occurring amino acid
MGKVFNGVEEFSESRNVFKTVPALVLYLGAIHFNLALILWATVFLPLSKGLLVFGLLLVFVLIPVDENSIFGHKLSKYICKHICSYFPITLHVEEAKAFRPDQAYVFGYEPHSVFPIGIVALGDSTGFMPLAKTKFLASSAVFYIPFLRHIWTWLGFTPVTKQNFISSLEAGYSCILVPGGVRETFFMEXGCEIAFLKQRRGFVRIALQMGLPLXPVFCXGQTKSLQWWEASRKVNAKSLQGF

SEQ ID NO: 18308 - protein, 408 aa, Rhizobium sp. NGR234
MSHIVIVGAGECGARAAFALREKGFEGEITLIGAEPHLPYERPPLSKSGLAGAEPPKYVAGPERYEEAGITLLTGASVEAIDRPRKAVQLADGRTIDYDRLLLATGARPRVLQGVPDNAERIRMLRTHADALAIRGALAPGRKLAIIGGGFIGLELAATARKLGAEVVLIEGLPRVLCRGVPEEIAAVVAERHRQEGVEIVCDARIAALEAGDNGARILFADGASRLADLIIVGIGAVPNTELAEAAGLLVENGIAVDETLRTSDPDIYAAGDCCSFPLSHYGGRRVRLEAWRNAQEQGTLAAANLLGVAEPVASVPWFWSDQYELTLQIAGLADGAATTVRRDLTDGAFILFHLDGEGRLVAASGIGPGNAVARDIRLAEMLIAAGSRPDPTALSSPETKLKKLLAA

SEQ ID NO: 18309 - protein, 287 aa, Cytophaga hutchinsonii
MRQLKISKQITNRESQSLDKYLQEIGKVDLLTPDEEVDLAKRIREGDQLALEKLTKANLRFVVSVAKQYQNQGLSLGDLINEGNLGLIKAAQRFDETRGFKFISYAVWWIRQSILQALAEQSRIVRLPLNRVGSLNKISKTFSELEQKYEREPSPDELAEVLEVSTAEVVDTLKISGRHVSMDAPFVQGEENSLLDVLENSSESAPDSSLMNDSLRREVQRALSTLTQREADVISLYFGLNGEHSMTLEEIGEKFNLTRERVRQIKEKAIRRLRHTSRSKALKPYLG

SEQ ID NO: 18310 - protein, 420 aa, Methylobacillus flagellatus KT
MIPLDSSLLWQLGILALLLFASAFFSMAETSLLMLNRHRLTILAQEGLRSAEFATRLLNEREQFLGAILLGNTLANAAAATLAAFISIRLFNLGELLMPVSTVLITFAILVFSEIIPKVIASRYAEPLALSLSYVLLPLVKIGYPVIWLANLCANSLLRLLGMKVSFTESNHTTSIEELRSIFSETTSPIPQKHREVLLNLLDLEQTTVDEIMTVHTQLEIIDFEAPMEEILSQITGSQHSRLPVRKGPNEEIIGMLHIRAIMTALRSQPLSQQLLGEHMEAPYFIPSGTPVYTQMQEFKQCQQRIALVVDEYGELKGLVTLEDIIKAIIGDFASVSAEQLAYRKEDKGSWLVDASNSLRDINKKLGIDLPVDGPRTLNGLIVEHFEDIPEPGIGLKIGNYKLEILKTQDRTVKTVRIYP

SEQ ID NO: 18311 - protein, 303 aa, Cattleya intermedia
MAVLREACENWGFFELLNHGISTELMNRVETVNKENYRRFREQRFKEFAAKTLDSGEKVDGDNLDWESTFFLRHLPTSNISQIPDLDEDCRSTMKEFARELEKLAERLLDLLCEDLGLEKGYLKRVFCGGSDGLPTFGTKVSNYPPCPKPELIKGLRAHTDAGGIILLFQDDKVSGLQLLKDGQWIDVPPLRYSIVVNIGDQLEVITNGKYKSVMHRVVAQTEGNRMSIASFYNPGSDAVISPAPALVEKEAEEEKKETTYPKFVFQDYMNLYIRKKFEAKEPRFEAMKTMETVSGSQLIPTA

SEQ ID NO: 18312 - protein, 135 aa, Arabidopsis thaliana
CQVMLRVGDLDRAIKFYEKALGMRLLRKIERPEYKYTIGMMGYAEEYESIVLELTYNYDVTEYTKGNAYAQIAIGTDDVYKSGEVIKIVNQELGGKITREAGPLPGLGTKIVSFLDPDGWKTVLVDNKDFLKELE

SEQ ID NO: 18313 - protein, 357 aa, Aspergillus nidulans FGSC A4
MAKTYRIATIPADGIGPEVIDAGVIVLKALADKLQSFSLDFTHLDWSSETFKATGKYIPDGGLEVLKKNDAILFGAVGAPDVPDHISLWGLRLAICQPFQQYANVRPTRVLRGTQSPLRKCNTGDLDWVIVRENSEGEYAGQGGRSHRGHPWEVATEVAIFSRQGVERIMRFAFETAAKRPRKLLTVVTKSNAQRNGMVLWDEVANIVAKDFPEVTMDKMLVDAMTTRMVLKPESLDTIVASNLHADILSDLAAALAGSIGIAPTSNLDPTRQNPSMFEPIHGSAFDITGKGIANPVATFWTAAEMLEWLGEKDAADKLMQCVESVCESGILTADLGGTATTKEVTSAVVEEINRLN

SEQ ID NO: 18314 - protein, 333 aa, Mycoplasma penetrans HF-2
MIKVAINGFGRIGRLALRRIFDVCKNVEIVAINDLTDAKTLCHLLKYDTAHRTFKGKLSYDENNNLIIDGKKIPILAEKDPANLPWAKLGVDIVVESTGRFVDEEGASKHLKAGAKKVIISAPAKGNIPTVVYNVNHQTLKATDKIVSAASCTTNALAPVANVLSKEFGIKWGFMNTIHSYTADQRLQDAPHSDLRRARAAAMSIVPTSTGAAKAIGLVLPELNKKMHGMALRVPTITGSLVDITVELEKDTTVEEIHKAMKKAANETLEYCEDPIVSTDIIGNTHGSIFDPGLSMELETNGKKTFKLFTWYDNEYSYVAQFVRVLEYFGNLK

SEQ ID NO: 18315 - protein, 148 aa, Novosphingobium aromaticivorans DSM 12444
MRIASEHAKTIVKATAPAIEKHGVDITTAMYKRLFQNDEVKAMFDQAAQDSGEQPRRLAGAILAYAKNIDKLENLGSAVQRMVQRHVDTGVKAEHYPYVAEALLPAIRDVLGAEVATDEVLAAWGEAYWMLADILIAAEKQAYLEAVA

SEQ ID NO: 18316 - protein, 547 aa, Glycine max
MASHLLNHSSKMRNASKLLHHERALLVRWFSGDAHSSLNRNRDVWKTQFHESSARSSVFEPASCFNKHSFGMQKRNIFMATIKRGSIIGSEFNGEISRSLQVLSRRCYASASDLPPHQEIGMPSLSPTMTEGNIARWLKKEGDRISPGEVLCEVETDKATVEMECMEEGFLAKIIRGDGAKEIKVGEVIAVTVEDEGDIAKFKDYQPSASEPSEPPAKETSAPPPPKKEEVVEEPAREPEPKVSKPSAPPSSGDRTFASPLARKLAEEKNVPLSSIKGTGPEGLIVKADIDDYLASGAKEVSASSKAKVAADAALDYTDIPVSQIRKVTASRLLLSKQTIPHYYLTVDTCVDKLMSLRTQLNSLQEASGGSRISVNDLVIKAAALALRKVPQCNSSWANDYIRQYHNVNINVAVQTDNGLFVPVVRDADKKGLSKIGEEVKQLAKKAKENSLKPQEYEGGTFTVTNLGGPFGVKQFCAIINPPQAGILAVGSAERRVVPGSGAEEFKFASFMSVTLSCDHRVIDGAIGAEWLKAFKGYIENPETMLL

SEQ ID NO: 18317 - protein, 408 aa, Rhodopseudomonas palustris CGA009
MRRVVVTGMGIVSSIGNNTQEVLASLHDAKSGISRAEKHAELGFRSQVQGAPTLNPADVVDRRAMRFLGEGAAWNHVAMEQAIADSGLEESEISNIRTGIVMGSGGPSARTIVEAADITRTKGPKRVGPFAVPKAMSSTASATLATWFKIKGVNYSISSACATSNHCIGNAYELIQWGKQDVMFAGGCEELDWSLSVLFDAMGAMSSKYNDTPATASRPYDVNRDGFVIAGGAGVLVLEELEHAKARGAKIYGEIIGYGATSDGYDMVAPSGEGAERCMKMALSTTGGIKIDYINPHATSTPAGDPPEMNAIRAVFGIGDKCPPISATKALTGHSLGATGVQEAIYSLLMMQNGFICESAHITELDPAFADMPIVRKRVDNAKLGAVLSNSFGFGGTNATLVFKRLEA

SEQ ID NO: 18318 - protein, 344 aa, Agrobacterium tumefaciens str. C58
MATELSALPANHPRVTFGKVGVLLVNLGTPDGTDYWPMRRYLAEFLSDKRVIEWSRLYWYPILYGIVLNKRPQKVGKAYEEIWNHERNESYLRTYTRSQGELMAAALKDFPNVVVDWAMRYGQPSIASRIDALKEQGCEKILLFPLYPQYAASTTATVNDKAFEHLMKLRWQPAIRTVPPYHDDPAYIEGLAASVKNHLATLDWEPEMLITSFHGIPQSYFKKGDPYYCHCQKTARLLREALGRTEKNFMITFQSRFGPEEWLQPYTDKTVEKLASEGIKRIAVMNPGFVSDCLETLEEIAGEAGEIFLHNGGEKFTHIPCLNDSTEGMNVLEKVVRRELQGWV

SEQ ID NO: 18319 - protein, 126 aa, Streptococcus pneumoniae TIGR4
MASKMLHTCLRVENLEKSIAFYQDAFGFKELRRRDFPDHAFTIVYLGLEGDDYELELTYNYDHGPYVVGDGFAHIALSTPDLEALHQEHSAKGYEVTEPNGLPGTTPNYYFVKDPDGYKVEVIREK

SEQ ID NO: 18320 - protein, 151 aa, Triticum aestivum
  misc_feature (87)..(87): Xaa can be any naturally occurring amino acid
  misc_feature (98)..(98): Xaa can be any naturally occurring amino acid
  misc_feature (101)..(101): Xaa can be any naturally occurring amino acid
  misc_feature (106)..(106): Xaa can be any naturally occurring amino acid
  misc_feature (119)..(119): Xaa can be any naturally occurring amino acid
MARLNSKAVVAAVVLAAVVLMMAGREASAALSCGQVDSKLAPCVAYVTGRASSISKECCSGVQGLNGMARNSSDRKIACKCLKSLAXTSINSINMGKXPGXPGKCXVNVPFPSTIPTNXHQLIQYITLPNVHADLVWSLPSMDGPNPKSYQ

SEQ ID NO: 18321 - protein, 105 aa, Synechococcus sp. WH 8102
MVADFTDAGFASEVLQAPGTVLVDFWAPWCGPCRLMAPLMDWAADTYGERLTVGKLEVDGNPSTRDAYEVQGIPTLILYRDGEVIARHEGAIAKPQLQAFLDANL

SEQ ID NO: 18322 - protein, 369 aa, Rhodopseudomonas palustris CGA009
MVGSCFRDPIMAHPIQEVLQAFAAGEIVVVTDDDDREGEGDLVVAASLCTAEKMAFIIRHTSGIVCAPITMEDARRLRLDPMVAHNDSNHTTAFTVSIDYKPDNGTGISADERASCCRALANPNAGAADFARPGHIFPLIAREGGVLLRSGHTEAAVDLCKLAGLPPVGVISELMNDDGTVTKGAQVVAFAKKHNLKLVTIADLIAHRQAREKLIERVATFPVESPIGVMQGYAYRSPFDEIAHIAFVFNGVGDGKNVLTRFHKPNIVKEIFTGPRRMESVLAQFKKNGSGVLIYLRDGAAGVPVSPIDEQKTAEADRHRQWREIGVGAQILRDLGVTSIRHLTTSQIDYKGLSGFGIEIVGNEHLEGT

SEQ ID NO: 18323 - protein, 629 aa, Burkholderia pseudomallei K96243
MRAFIDINRGGHPMIDRLKYSFTDLARYDASVVDTHAGLSRLIDALQLDALVITSQDEYISEWLPRCNNPRYALSGFDGSVGSGVFLSAAAARRIGVPQFVLFVDGRYHLQAEKQCDPALVQVEKLGLNVAMWPAIGDWLAAHAADIKRAGYDAPRLSVAQRARLLGQTERAGVQWTSLAGREIDGAISLPGWRVERPVFELPRSATGVSIAANVATLNSRISEHLGDPRAKAAFITCAADDLSYLLNSRGYHLPYASSHVGFLFVVGEAVALFLPEGFDRCPVRIDSYSALHVIRNDAAALQRFLAQFDVEYVCYGFEAVNCALPDTVRSVWPDARHVDHNPVEAMRASKTPEVLDQFRDAFARSSEAIAEAMRWAKAGEPGKRHSEHDLARVISEAYGARAAVALSFTTIAANGANSASAHYTAISPDVELTEGELVLLDSGAYFEGGFATDCTRVVLRRTHADTRPQPWQREIYTVALKACIKGLVTRFPQAATGADVDAAVRGVCRAHGYDYNHGTGHGIGIHVHEGGVRFNVGSQYGLVPNAVISVEPGIYLPGKGGVRIENIVVIHPSEREPGMMEFENLVTVGYDWDLIDVDLLTDDERAYLRDYERLCVERGTQVTDCPLL

SEQ ID NO: 18324 - protein, 296 aa, Triticum aestivum
  misc_feature (208)..(208): Xaa can be any naturally occurring amino acid
  misc_feature (260)..(260): Xaa can be any naturally occurring amino acid
  misc_feature (272)..(272): Xaa can be any naturally occurring amino acid
  misc_feature (279)..(279): Xaa can be any naturally occurring amino acid
MEARDGGSAPLPCSYAPLPEDAEAATMVGRARRTAGPLCAALMLVTAAVLLMVAALAGVRLAGQLPADGIVVMSGDQTTVDAAMMSTSSRGPESGVSEKTSGAAAHGGMLGADASGNAFPWSNAMLQWQRTGFHFQPEKNWMNDPNGPVYYKGWYHLFYQYNPDGAIWGNKIAWGHAASRDLLRWRHLPVAMSPDQWYDINGVWSGSXTVLPDGRIVMLYTGSTNASVQVQCLAFPTDPSDPLLINWTKYENNPVMYPPXGVGGEDFRDPTXAWFDGPXDTWRLVIGSRITTCRMV

SEQ ID NO: 18325 - protein, 319 aa, Brucella melitensis 16M
MCANDVMQDAASSAENGAITMAQLIDGKKLAEDVVSTVKTETEKLVAATGVVPGIAVVIVGEDPASQVYVASKSRKAKECGFHSVQHDLPETASEQELLNLIEGLNNDPAIHGILVQLPLPGHIDSGRVIQTIAPEKDVDGFHFINVGKLGTGEVETAFVPCTPAGAMIMIERVHGRDLSGLNAVVIGRSNIVGKPMFNLLLAANATVTVAHSRTKDLPAIARNADILVAAVGRPQMVKGDWVKPGATVIDVGINRIPAPERGEGKTRLVGDVDFAEAEKVAGAITPVPGGVGPMTIAMLMANTLTAACRSAGMKKPVF

SEQ ID NO: 18326 - protein, 946 aa, Staphylococcus aureus subsp. aureus MW2
MNMKKKEKHAIRKKSIGVASVLVGTLIGFGLLSSKEADASENSVTQSDSASNESKSNDSSSVSAAPKTDDTNVSDTKTSSNTNNGETSVAQNPAQQETTQSALTNATTEETPVTGEATTATNQANTPATTQSSNTNAEELVNQTSNETTSNDTNTVSSVNSPQNSTNAENVSTTQDTSTEATPSNNESAPQSTDASNKDVVNQAVNTSAPRMRAFSLSAVAADAPAAGKDITNQLTNVTVGIDSGDTVYPHQAGYVKLNYGFSVPNSAVKGDTFKITVPKELNLNGVTSTAKVPPIMAGDQVLANGVIDSDGNVIYTFTDYVDTKENVTANITMPAYIDPENVTKTGNVTLTTGIGSTTANKTVLVDYEKYGKFYNLSIKGTIDQIDKTNNTYRQTIYVNPSGDNVIAPVLTGNLKPNTDSNALIDQQNTSIKVYKVDNAADLSESYFVNPENFEDVTNSVNITFPNPNQYKVEFNTPDDQITTPYIVVVNGHIDPNSKGDLALRSTLYGYDSRFVWRSMSWDNEVAFNNGSGSGDGIDKPVVPEQPDEPGEIEPIPEDSDSDPGSDSGSDSNSDSGSDSGSDSTSDSGSDSASDSDSASDSDSASDSDSASDSDSASDSDSASDSDSASDSDSASDSDSASDSDSDNDSDSDSDSDSDSDSDSDSDSDSDSDSDSDSDSDSDSDSDSDSDSDSDSDSDSDSDSDSDSDSDSDSDSDSDSDSDSDSDSDSDSDSDSDSDSDSDSDSDSNSDSDSDSDSDSDSDSDSDSDSDSDSDSDSDSDSDSASDSDSDSDSDSDSDSDSDSDSDSDSDSDSDSDSDSDSDSESDSDSESDSDSDSDSDSDSDSDSDSASDSDSGSDSDSSSDSDSESDSNSDSESGSNNNVVPPNSPKNGTNASNKNEAKDSKEPLPDTGSEDEANTSLIWGLLASIGSLLLFRRKKENKDKK

SEQ ID NO: 18327 - protein, 410 aa, Psychrobacter arcticus 273-4
MAEIKAPVFPESVADGTIVEWHVTEGQQVNRDDLLAEIETDKVVLEVVAPDNGVVTRIVKQVDDTVLSDELIAEFEAGASASAEAAPAVDPDQPAAPVQPKQATDGGEPAQASAEADHKDQSPAVRKAAKVSGVDPKNVEGSGRGGRVTKTDMSNPTLKADSSITSDSGRPVAEAVGERTEKRVPMTRLRKTIANRLLAASQETAMLTTFNEVNMKPLMDMRTKYKDQFEKRHGTRLGFMSLFVKAATEALKRYPAVNASLDGDDIVYHGYYDIGVAVSSNRGLVVPVLRDTDRMSMADVEAKIREFGGKAQEGKLGLEDMVGGTFTISNGGVFGSLMSTPILNPPQTAILGMHAINDRPMAVNGEVKILPMMYLALSYDHRMIDGKEAVQFLVTLKELVEDPTMLLLDL

SEQ ID NO: 18328 - protein, 364 aa, Methanocaldococcus jannaschii
MKFLKNVLEEGSKLEEFNELELSPEDKELLEYLQQTKAKITVVGCGGAGNNTITRLKMEGIEGAKTVAINTDAQQLIRTKADKKILIGKKLTRGLGAGGNPKIGEEAAKESAEEIKAAIQDSDMVFITCGLGGGTGTGSAPVVAEISKKIGALTVAVVTLPFVMEGKVRMKNAMEGLERLKQHTDTLVVIPNEKLFEIVPNMPLKLAFKVADEVLINAVKGLVELITKDGLINVDFADVKAVMNNGGLAMIGIGESDSEKRAKEAVSMALNSPLLDVDIDGATGALIHVMGPEDLTLEEAREVVATVSSRLDPNATIIYGATIDENLENTVRVLLVITGVQSRIEFTDTGLKRKKLELTGIPKI

SEQ ID NO: 18329 - protein, 478 aa, Klebsiella pneumoniae
MTAPVQHPMYIDGQFVSGRGDGWIDVLNPATEALLSRIPDGTAEEARLAIDAAERAQPGWEALPAIERAGWLRKIAAGIRQRADEIAGLIVAEGGKIQQLAAVEVAFTADYLDYMAEWARRYEGEIVQSDRPGENILVFKRALGVTTGILPWNFPFFLIARKLAPALITGNTIVIKPSEFTPNNAIAFAEIVHQVGLPKGVFNLVLGRGETVGQELAGNPKVAMVSMTGSVAAGEKIMAAAAKNITKVCLELGGKAPAIVMDDADLELAVKAVVDSRVINTGQVCNCVERVYVQQGIYDRFVNRLGEAMKAVQFGDPATRDDIAMGPLINAAARDQVAGKVRSGGAGGAGGAGGQPLEGKGYFYPPTLLLDVRQEMDIIHEETFGPVLPVVAFSTLDEALATANDSDYGLTSSIYTRDLNVAMKAIKGLKFGETYINRENFEAMQGFHAGWRKSGIGGADGRHGLNEYLQTQVVYLQA

SEQ ID NO: 18330 - protein, 510 aa, Allium cepa
MPIPVLLLLTIFLALLLYLFFFVAKKHEGKRVPGPKGWPILGNLPQLGAKPHQSLCELSRTYGPLFGLRFGYVDVVVAASADVAEQFLRVHDVNFSNRPPNSGAEHIAYNYQDLVFAPYGPRWRMLRKLCALHLFSPKALEDLSPVRSLEVATLANTLYLRAQSDQPTVNLAQMLTTCTTNALSKAMMGRRVFVNETTDTETSKFKDMVLEIMSLAGVFNVGDFVPWLRPFDLQRVVRKMKDVHARFDSFLDKVIAEHRMVDNAHDLLSLLIRSKDDVDNDGVKLTNTDIKALLLNLFTAGTDTSSSTVEWALSEMIRHPDALKRAQRELDEVVGRDRLVSETDIRSLPYIQAIVKETFRLHPSTPLSLPRISSEACTVNGYLIPKNTTLLVNVWAISRDPGVWKEPLEFRPERFLGGGGYETVDLKGNDFELIPFGAGRRVCAGLSLGLRMVQFLTATLVHGFDWKLVDGQSAEKLDMEEAYGLPLQRAVPLMVRPVPRLDEKAYHVVV

SEQ ID NO: 18331 - protein, 486 aa, Vibrio vulnificus YJ016
MEVTAHYIGGKPFVGDTGESFATLNPATGEVLAHIEQADERVLAHAIESAKLGFSVWSSMSAAERSRCLLKAAQLIRDHNDELAELEVRDTGKPIQEASVVDIATGADVIEYFAGLVNGLGGEQQSLGSNQFFYTRREPLGICAGIGAWNYPIQIAMWKAAPALAAGNAMIFKPSEETPLSALKLAELFTQAGVPDGVFNVVQGDYRVGQMLTAHPEIAKVSFTGESGTGKKVMADSAATLKPVTMELGGKSPLIIFDDADLDDAVSAAMVANFYTQGEVCTHGTRVYVQRAMYDAFVEQLKERTEKLIVGDPMNMETQIGSLISKSHLEKVLGAISSAKESGATLLTGGFQVTERGLEKGCFVAPTVFVDCRDEMPHVQNEIFGPVMSVLVFDDEDEVIARANNTQYGLAAGVFTQNLSKAHRVIHQLQAGICWINTWGNSPAEMPVGGYKLSGIGRENGQETLLHYTQTKSVFVELGAFDSPYA

SEQ ID NO: 18332 - protein, 353 aa, Thermotoga maritima
MGFDLDVEKKKENRNIPQANNLKIKVIGVGGAGNNAINRMIEIGIHGVEFVAVNTDLQVLEASNADVKIQIGENITRGLGAGGRPEIGEQAALESEEKIREVLQDTHMVFITAGFGGGTGTGASPVIAKIAKEMGILTVAIVTTPFYFEGPERLKKAIEGLKKLRKHVDTLIKISNNKLMEELPRDVKIKDAFLKADETLHQGVKGISELITKRGYIRLTSRFARIESVMKDAGAAILGIGVGKGEHRAREAAKKAMESKLIEHPVENASSIVFNITAPSNIRMEEVHEAAMIIRQNSSEDADVKFGLIFDDEVPDDEIRVIFIATRFPDEDKILFPEGDIPAIYRYGLEGLL

SEQ ID NO: 18333 - protein, 1068 aa, Oceanospirillum sp. MED92
MAIGQVSLIVSLVLISVLVGIFPDEANVERQARKAISETIAAKGSLFITQSDMRGLETVLQVIVERNPTLLSSVVRRNGRVISEVGPHVQYWEPIGDSLSTNTQVVIPLWSGEQKWGQVELRFSPIIEPGIWGIMTSPVFVFLTFLSLTSFVAFFFYLGKMLKHLDPSQAVPDRVRSALDTMAEGLLVLDKNQNVVLANQSFSDMVERSAEKMIGVKASVFPWHDRKGNPLNTEKAPWTKALESGQVIMNQVVRLTLPNESRLTFMVNCSPVLLPGGKVGGVMVSLDDVTLLEEKELELRRSKEEAEAANRAKSDFLANMSHEIRTPMNAILGFADILRRDKKKLQTDQLKHINTISTSGQHLLDLINDILDLSKVESGRLEVEALDCKPVQLIHHVLQFMKVKADEKGLELKFVADTSLPEQIETDPGRVRQILTNLIGNAIKFTEQGGVTVHVSVVGDNPKQMKIAVVDTGIGMTQQQTDSVFEAFVQADSSITRRFGGTGLGLSISQKFAHALGGDILVTSEKGVGTTFTLVLEVGSLDSVEWLSADQLHLVIESEESDDAVEWEFPPAHVLVVDDGNENRELIKLVLDGLGLKVATAVHGQDGLTQALEQSFDLILMDVQMPVMDGYTAVAKMREEGIELPIVALTAHAMKGIEARCLEAGYSHYMTKPIDINALVKLMAELLGGVQVESAESNAVPVLDDPIAPVESKVSPDNEEPDLEPIYSTLPTENPKFAELVKTFIGRLQEKVAEIERAVETKDYEELANLAHWLKGSGGSVGFMEFTEPAMLLEVAAKESNGIAVQERFDEIQILCKRAAISIDREPEVKRPEPVSNSIKSDSCAEPLADAAETILRSTLPLANEKIARLVEQFLRRLEEQIDLLSRCVTDKDFVQIAELAHWLKGSAGSVGFAAFTEPSAELELAAKQQDFQQVESYYQVILELTKRVEGIDIEALPLGLNGQSESVNETPIHSSLLQANEKFRPIVVQFCDKLGSQINEMQDSLKHNKFQELADLAHWLKGSGGSVGFTDFTDIAAELENQAKLNNREGSEQMLKQIEALSKRIEL

SEQ ID NO: 18334 - protein, 515 aa, Methylobacillus flagellatus KT
MEFQAMTQNQLIIFDTTLRDGEQSPGAAMTKEEKLRIARQLEKLGVNVIEAGFAAASPGDFGAIRAIAEAITETTVCSLARANENDIRRAGEAIQPAKKRRIHTFIATSPIHMQNKLRMTPEQVLDRAVQAVQWALEYTDDVEFSAEDAVRSDIDFLVQVFDAVIAAGAKTINVPDTVGYSVPGQWGERMAQLIARVRNSDKVIWSTHCHNDLGMAVANSLSAVLAGARQVECTINGLGERAGNASLEEIVMAVKTRRDVFQLETTIDTTQIVATSKLVSTITGYPVQPNKAIVGANAFAHESGIHQDGVLKHRETYEIMRAEDVGWGANKLTLGKLSGRNAFRTRLTELGITLESEDALNAAFARFKELADKKSEIFDEDIQALVSDNVVNEENFKLGYLHVASQTGETPHAEVVVLENGVEHRADATGGGPVDAAFKAIEKIVRSGAELLLYSVNNITSGTDAQGEVTVRLSKGGRVVNGQGADTDIVIASAKAYLNGLNKLHAYAERAHPQV

SEQ ID NO: 18335 - protein, 454 aa, Mycoplasma penetrans HF-2
MKVVVVGINHAGTSAIRTLLSINPNAEVVAFDRNNNISFLGCGIALTVGGVVKNTDDLFYSNPEELKSMGAKVFMNTDVVEVNHEQKYVKVVDLETNEERTESYDKLIYAAGSWPVDLHFKNQDLKNVEICKLYQHALKLIEKANDDDIKKVAVVGAGYIGVELAEAYAEKGKEVALIDFLPRVLGNYYDESFTNKLEESMVQNGVSLHLGQKVSEFVSNSEGAVKQVITDKETIDADLVILCTGFKPNTELLPGLKKIQNGALVVNRKAQTSDPNIYAIGDCAAIFDAATKQYRHVALATNAVKLGIVAASQISGLENVIIPNIVGTNAICVFGLKYASTGVTEEVGARFGLKNLKTCEYFDNDRPEWMNTVEKVKVKLVYEEDTLRLVGAQILSFGESNHTEWIFALALAIQLGLNLFQIAFTDVYFLPHLNKPFNFVLSAILKSLGMKYIK

SEQ ID NO: 18336 - protein, 305 aa, Triticum aestivum
  misc_feature (238)..(238): Xaa can be any naturally occurring amino acid
MLLAIAVPSAAPLRRPHHFRFLHPPGKLSLSRTRCAPSPPAEAQPVPPQPRRYPRQYPGEAVGVAEEMRFVAMRLRNTKRTTRNKDNNRADGAGEDDESKEEEVEDNDEMDEEGNDEEVNEEEEDNHEVEEWMPSMEGFVGYLVDSKLVFDTVERIIAGSTDVAYVYFRKSGLERSASIEKDLEWFREQALRGPGPGTFGSTYAAYLSELAGSSAPAFLSHYYNLYFSHTTGGLAIGXKTCDKIWEGRLLEFYKWDSDPELLLKDAREKLNELSKHWSRKDRNLCLKEAAKCFQYMGRIVRLIVS

SEQ ID NO: 18337 - protein, 139 aa, Hordeum vulgare subsp. vulgare
MEYQGQHGHATDKVEEYGQPVAGHGGFTGGPTGTHGAAGVGGAQLQATRDGHKTDGVLRRSGSSSSSSSEDDGVGGRRKKGMKEKIKEKLPGGAHKDAAGQQQQTAMAGEYAGTHGTEATGEKKGVMDKIKEKLPGGQH

SEQ ID NO: 18338 - protein, 235 aa, Zea mays
  misc_feature (27)..(27): Xaa can be any naturally occurring amino acid
LHPLRCSRFHRAVRNLTWPCRRWWSTXVVFPPVARPPGSAGSHFLGGAGVRGLEIGGNFIKFTAIGVYLEDAAVPALAKKWGGKTADELASDAAFFRDVVTGDFEKFTRVTMILPPTGEQYAEKVTENCVAFWKAAGLYTDAEGVAVEKFREVFKPETFAPGASILFTHSPAGVLTVAFSKDSSVPAAGGVAIENKRREGVGAPRQGDRRARRRAVGGARLHHRLRRGAGGRANE

SEQ ID NO: 18339 - protein, 176 aa, Citrus limon
LVAAVMSSFGITSMAVMAVYYRFWWQMEGGEVPLTEMFGTFALSVGAAVGMEFWARWAHKALWHASLWHMHESHHRPREGPFELNDVFAIINAVPAIALLSFGFFHKGLVPGLCFGAGLGITVFGMAYMFVHDGLVHKRFPVGPIADVPYFRRVAAAHQLHHSDKFHGVPYGLFLG

SEQ ID NO: 18340 - protein, 143 aa, Hordeum vulgare subsp. vulgare
MEYQGQTGHATTDKVEEYGQPVAGHGGATGGPTGTHGAAAAAAGTGQLQPTRDDHKTDGVLRRSGSSSSSSSEDDGVGGRRKKGMKEKIKEKLPGGAHKDAAGQQHTPAAGEYAGTGTHGAEATGEKKGVMDKIKEKLPGGQH

SEQ ID NO: 18341 - protein, 577 aa, Helianthus annuus
LASAAYMEISHLFEGCCLLENIREESSKQGLKKLQENFLSLVLKTDVKVGNEIIGRSMIKSRLSHKRFLVVLDDVDNFEQLEALAGSHDWFGEGSRIIITTRDVHLLSSRAQTIYEVNLLSQDEAIKLLKRYAYHKDKPVEEYEMLAEEVVSYAGGLPLALKVLGSFLYGKDKDEWKSTLAKLKCIPEEKVMERLKISYDGLEPYQKELFLDIACFMRRWWLQSVLDRAMMVLDACNLHPVIGLKVLEQKSLIKVSKKGRFEMHDLIEEMAHYIVRGEHPNNPEKHSRIWNREDLEELCAMGAAAPSMENEVLANLPMYIISHPGLLLDVVPNMKNLRWIMLIGHGDPSSSFPSNFQPTKLRCLMLIESKQKELWEGCKSLPNLKILDLSGSSNLIKTPDFEGLPCLERLILKYCERLEEIHPSIGYHKRLVYVNMKGCARLKRFPPIIHMKKLETLNLSDCSKLQQFPDIQSNMDSLVTIDLHNTGIEIIPPSVGRFCTNLVSLDLSQCYKLKRIEDSFHLLKSLKDLNLSCCFGLQSFRQDRLVSLKLPQFPRFLRKLNLRGCRLEDGGIPSDIF

SEQ ID NO: 18342 - protein, 146 aa, Triticum aestivum
MKSLGLKIAASLKKNSGFPADGCLENDDTLSLKSTSVRAQDHPTTNSVIPVDSVVAAEIISTDLSCVVDTLSNEEDDAELDLDSPTEGFSSISEAIEDIRQGKLVIVVDDESRENEGDLILAASLVTPEAMAFIVRHSTGIVCVSM

SEQ ID NO: 18343 - protein, 192 aa, Picrophilus torridus DSM 9790
MFTGLSFSEIARHVAREGVYEYAKSVVTSSAGFVGGCMWTFGNIIGISAVSISFGSYLDRLFGLHYDPVILAILCIITFMALNIVGIKNSAKTITVLVIINVAVLVIFIFSGITRFHSGNFSDFIPHGYSGIITGTALIFFAFTGFSRVTTISDEVINPEKTLPFAIIISINNILCALYYGCTRPSWIKAIL

SEQ ID NO: 18344 - protein, 1038 aa, Trichodesmium erythraeum IMS101
MSSLLHSKEITLEPGFKNPKMTASDLFLHNRIKIVENLWESVLRQECGQELVDILQKMRSGHSPEGQASDFLGSEIEQLIEKLELKDAIRAARAFALYFQLINIVEQHYEQKIQQLAYSHNNSLEKLISKDDIAKDHDTRSLRVESIPVWNDNRIKHEGEGTFHYLFPLLQTLNVPSQLIQRLINNLDIRLVFTAHPTEIVRRTIRTKQRRIAKILQQLDQVNESLSESHVDEEQVNSLVSSWKIESLKEQLTEEILLWWRTDELHQFKPSVLDEVETTLHYFNEVLFDATPELHRRFKQALHSSFPYLKPPSYNFCKFGSWVGSDRDGNPFCTPAVTWQTACYQRQIVLEKYLNAIDRLKELLSLSLHWSDVLPELLDSLDRDHIQMSEVYDQWAIRYRQEPYRLKLSYIKKRLENTRDRNARLYNGDEVQRQKKEVLSQRQKQVLSQYQETKSIYHSSADFLAELQLIQRNLKETGLSCSDLENLISQVEIFGFNLARLDIRQESSVHEAAIQEITEYLQILPKSYIEMSEAERTEWLSTELPTRRPLIPTELPFSEKTCEIINTFRMLRELQLEFGEEICQTYIISMSRDVSDLLEVLLLAQEAGLYDPATGASSIHVVPLFETVEDLRSAPRVMHDLFKLSLYRAGLAGGYDKLSKEPINELVNEAPYLQEVMLGYSDSNKDSGFLSSNWEIHKAQKALYKVGEEHGIALRIFHGRGGSVGRGGGPAYKAILAQPGKSISGRIKITEQGEVLASKYSLPHLAMFNLENVTTAVIQASLLHTGFDEIETWNQIMEELAVRSRSHYRNLIYEQEDLVEFFYQVTPMPEISQLQISSRPARRKNDKKKTISGLRAIPWVFSWTQSRFLLPAWYGVGTALQEFVEKEPEEHLKLLQYFYVKWPFFTTAISKVEMTLAKVDLQIAHYYVRELSKPEDRERFETLFEEITIEYHLTRNLVLQISGHQRPLDGDPDLQRSVQLRNATIIPLGMLQVALLKRLRQHDTGTPGVINSRYSKSELLRGALLTLNGIAAGMRNTG

SEQ ID NO: 18345 - protein, 480 aa, Methanosarcina mazei Go1
MAESEKEAALPPKEAFSDWYNELLWMAEIMDVRYPVKGLYVWYPFGFAIRRNTYSIIREILDNSGHQETLFPLLIPENEFMKEAEHIKGFENEVYWVTHGGKDPLDIPLALRPTSETAIYPMYKKWVRSHADFPLKLYQIVNTFRYETKHTRPLIRLREITSFKEAHTVHATWEDAEAQVKEAIGLYTEIYRRLAVPVLRSRRPDWDKFPGADYTDALDAVMPDGKTLQIGTVHHLGDNFAKTFDIKYEAPDGEQRYAHQTCYGISERSIAATISIHGDDKGLVLPPEIAPVQVVIIPIIFKKGAEEVFAACKDVQERLKKAGIRVEVDASDLRPGAKYYKWEMKGVPLRLEIGPRDLQNNVAVAVRRDTGEKDQITLLEIEAGVRLKFEAIQKSLYEKAGSELESRIFDCVDLDEVKEKIQEGVATIPWCGKRECGLAMEDHIGAGILGIPLTPRSKGKEKCPACGEETETRVYVARTY

SEQ ID NO: 18346 - protein, 740 aa, Cucumis sativus
METCYCIEPQWPADELLMKYQYISDFFIALAYFSIPLELIYFVKKSAVFPYRWVLVQFGAFIVLCGATHLINLWTFTMHSRTVAVVMTTAKVLTAVVSCATALMLVHIIPDLLSVKTRELFLKNKAAELDREMGLIRTQEETGRHVRMLTHEIRSTLDRHTILKTTLVELGRTLALEECALWMPTRTGLELQLSYTLHQQNPVGYTVPINLPVISQVFSSNRAVKISPNSPVASLRPRAGRYVAGEVVAVRVPLLHLSNFQINDWPELSTKRYALMVLMLPSDSARQWRVHELELVEVVADQVAVALSHAAILEESMRARDPLMEQNVALDLARREAETANHARNDFLAVMNHEMRTPMHAIIALSSLLQETELTPEQRLMVETILKSSNLLATLINDVLDLSRLEDGSLQLDIGTFNLHAVFKEVLNLIKPVTLVKKLSLTLHLGLDLPVFAVGDEKRLMQAILNVVGNAVKFSKEGSISISAIVAKAETFREIRVPDFHPVPSDSHFYLRVQVKDTGSGISPQDIPKLFTKFAQTTVGPRNSCGSGLGLAICKRFVNLMEGHIWLESEGLGKGCTATFIVKLGIAEQSNESKLPFTSKIHENSIHTSFPGLKVLVMDDNGVSRSVTKGLLVHLGCEVTTAGSIEEFLRVVSQEHKVVFMDICTPGVDGYELAIRIREKFAKCHERPFMVVLTGNSDKVTKESCLRAGMDGLILKPVSIDKMRSVLSELIERRVLFETS

SEQ ID NO: 18347 - protein, 293 aa, Dryopteris caudipinna
  misc_feature (171)..(171): Xaa can be any naturally occurring amino acid
VGILPLSLQYGFSVANKFLQGAQSIDNHFKTAPFEKNIPVLLGLLSVWNVSFLNHPARAILPYCQALEKFAPHIQQLSMESNGKGVSIEGVPLSFEAGEIDFGEPGTNGQHSFYQLIHQGRVIPCDFIGIIESQQPVYLKGEVVSNHDELMCNFFAQADALAYGKTPEELXAEGVPEHLVPHKTFSGNRPSLSILLPKLTPYTLGQLLSIYEHRIAVQGFIWGINSFDQWGVELGKSLASHVRKQINASRSQGKSVAGFNYSTSTLLNHYLKVKSNVYTSTHDSFPPAILPPK

SEQ ID NO: 18348 - protein, 723 aa, Desulfovibrio desulfuricans
ADNRPEKWVKGVCRYCGTGCGVLVGVKDGKAVAIQGNPNNHNAGLLCLKGSLLIPVLNSKERVTQPLVRRHKGGKLEPVSWDEALDLMASRFRSSIDMYGPNSVAWYGSGQCLTEESYVANKIFKGGFGTNNVDGNPRLCMASAVGGYVTSFGKDEPMGTYADIDQATCFFIIGSNTSEAHPVLFRRIARRKQVEPGVKIIVADPRRTNTSRIADMHVAFRPGTDLAFMHSMAWVIINEELDNPRFWQRYVNFMDAEGKPSDFEGYKAFLENYRPEKVAEICRVPVEQIYGAARAFAESAATMSLWCMGINQRVQGVFANNLIHNLHLITGQICRPGATSFSLTGQPNACGGVRDGGALSHLLPAGRAIPNAKHRAEMEKLWGLPEGRIAPEPGYHTVALFEALGRGDVKCMIICETNPAHTLPNLNKVHKAMSHPESFIVCIEAFPDAVTLEYADLVLPPAFWCERDGVYGCGERRYSLTEKAVDPPGQCRPTVNTLVEFARRAGVDPQLVNFRNAEDVWNEWRMVSKGTTYDFWGMTRERLRKESGLIWPCPSEDHPGTSLRYVRGQDPCVPADHPDRFFFYGKPDGRAVIWMRPAKGAAEEPDAEYPLYLTSMRVIDHWHTATMTGKVPELQKANPIAFVEINEEDAARTGIKHGDSVIVETRRDAMELPARVSDVCRPGLIAVPFFDPKKLVNKLFLDATDPVSREPEYKICAARVRKA

SEQ ID NO: 18349 - protein, 630 aa, Helianthus tuberosus
MMASSTTTTPLILHDDPENLPELTGSPTTRRLSIAKVLSGILVSVLVIGALVALINNQTYESPSATTFVTQLPNIDLKRVPGKLDSSAEVEWQRSTYHFQPDKNFISDPDGPMYHMGWYHLFYQYNPQSAIWGNITWGHSVSKDMINWFHLPFAMVPDHWYDIEGVMTGSATVLPNGQIIMLYSGNAYDLSQVQCLAYAVNSSDPLLIEWKKYEGNPVLLPPPGVGYKDFRDPSTLWSGPDGEYRMVMGSKHNETIGCALIYHTTNFTHFELKEEVLHAVPHTGMWECVDLYPVSTVHTNGLDMVDNGPNVKYVLKQSGDEDRHDWYAIGSYDIVNDKWYPDDPENDVGIGLRYDFGKFYASKTFYDQHKKRRVLWGYVGETDPQKYDLSKGWANILNIPRTVVLDLETKTNLIQWPIEETENLRSKKYDEFKDVELRPGALVPLEIGTATQLDIVATFEIDQKMLESTLEADVLFNCTTSEGSVARSVLGPFGVVVLADAQRSEQLPVYFYIAKDIDGTSRTYFCADETRSSKDVSVGKWVYGSSVPVLPGEKYNMRLLVDHSIVEGFAQNGRTVVTSRVYPTKAIYNAAKVFLFNNATGISVKASIKIWKMGEAELNPFPLPGWTFEL

SEQ ID NO: 18350 - protein, 545 aa, Phaeodactylum tricornutum
MAPQQRNPVLNEDGNTGMRRVDSEASDMSELGNDTRAQDYRIRKSSLIGMIDWGHVMVSHLPLLMVVGILTLVAQIVHQVVIELGLQNIDWSVQTVSTICHAIKELFRDLYASIMESRGFDLFSPAVKTTALLLFLGAWWMRRKSPVYLLSFATFKAPDSWKMSHAQIVEIMRRQGCFSEDSLEFMGKILARSGTGQATAWPPGITRCLQDENTKADRSIEAARREAEIVIFDVVEKALQKARVRPQDIDILIINCSLFSPTPSLCAMVLSHFGMRSDVATFNLSGMGCSASLISIDLAKSLLGTRPNSKALVVSTEIITPALYHGSDRGFLIQNTLFRCGGAAMVLSNSWYDGRRAWYKLLHTVRVQGTNEAAVSCVYETEDAQGHQGVRLSKDIVKVAGKCMEKNFTVLGPSVLPLTEQAKVVVSIAARFVLKKFEGYTKRKVPSIRPYVPDFKRGIDHFCIHAGGRAVIDGIEKNMQLQMYHTEASRMTLLNYGNTSSSSIWYELEYIQDQQKTNPLKKGDRVLQVAFGSGFKCTSGVWLKL

SEQ ID NO: 18351 - protein, 337 aa, Synechocystis sp. PCC 6803
MTRVAINGFGRIGRNFLRCWLGRTDSQLEVVGINDTSDPRTNAHLLRYDSMLGKLDADISADENSITVNGKTIKCVSDRNPLNLPWAEWNVDLVIEATGVFVTHEGATKHVQAGAKKVLITAPGKGPNIGTYVVGVNAHEYKHEEYEVISNASCTTNCLAPFGKVINDNFGIIKGTMTTTHSYTGDQRILDASHRDLRRARAAAVNIVPTSTGAAKAVALVIPELQGKLNGIALRVPTPNVSVVDLVVQVEKNTIAEQVNGVLKEAANTSLKGVLEYTDLELVSSDFRGTDCSSTVDGSLTMVMGGDMVKVIAWYDNEWGYSQRVVDLAEIVAKNWK

SEQ ID NO: 18352 - protein, 427 aa, Streptomyces aureofaciens
MVGVDDGRRRVVVTGIGVVAPGEVGTKAFWELLTAGRTATRTISTFDPSPFRSRVAAECDFDPQAAGLTQRQIRQWDRTAQFAVVAAREALDDSGVSGVNDPIRTGVMAGTACGMTISLDREFAVVSDEGRKRLVDDAHGVPYLYDYFVPSSMATELAWLVEAEGPVGVVSTGCTSGIDVIAHACDLIRDDAADVMLAGASDAAISPITVACFDAIKATTPRNDEPESASRPFDLTRNGFALGEGAAMFVLEEREHAIRRGAHIYAEVTGYAGRCNSYSMTGLRVDGNEMAEAIRVALDRSRMNPEDVGYVNAHGSATKQNDRHETAAFKKSLGDHAYRVPVSSIKSMIGHSLGAVCALEFAASALAIEHSVVPPTANLHVPDPECDLDYVPLVAREQRVRTVLSVASGFGGFQSAIVLAEPEWSRG

SEQ ID NO: 18353 - protein, 115 aa, Triticum aestivum
MARSAVAQVVLVAVVAAMLLAVTEAAVSCGQVSSALSPCISYARGNGASPSAACCSGVRSLASSARSTADKQAVCKCIKSAAAGLNAGKAAGIPTKCGVSVPYAISSSVDCSKIH

SEQ ID NO: 18354 - protein, 555 aa, Psychrobacter arcticus 273-4
MNDTKDNKVYSSARHSKYWQQLQTLAESPWSLAALFAQDNTRTQHFSMQAGALYMDYSKQCIDDAVLENLLNLANSCELAARIQSLLQGAMVNTSEERAALHTALRLPATASLQLDTQDVVADVHQSLLQVERLSERVRSGTWRGFSGQAITDVVNIGVGGSDLGPLMATTALDEWADTCVEVHFVSNMDGTQLDNLLKHLNPETTLFIISSKSFGTVDTLSNAKTALSWLLATAKLRAGTEDSVRRRHFIGISANGQKMSAWGIHPEHQLQLWEWVGGRFSLWSAIGLAIAIRIGMSGFKELLAGAHSMDDHFAQADFAKNVPVLLGLIAVWNSTFLQVNAHTVLPYDGRLSYLPSYLTQLEMESNGKSVTQHGDRIDYDTCPILWGEIGSNAQHAFYQLLHQGTQQVSCDFIACVRRYSDEAKNTPLQQQHELSLANCLAQSRVLAFGNAAIAESDGQVACDADKYKYYRGNQPSTTLLLDELTPHSLGALIALYEHKVYVMASIWDINPFDQWGVEMGKQMAESVHDAMQQERGAQFDTSTNQLLKHIKELS

SEQ ID NO: 18355 - protein, 542 aa, Agrobacterium tumefaciens
MIKTIKTTPYQDQKPGTSGLRKKVPVFAQENYAENFIQSIFDALEGFEGQTLVIGGDGRYYNREVIQKAIKMAAAAGFGKVLVGQGGILSTPAASNVIRKYKAFGGIVLSASHNPGGPTEDFGIKYNIGNGGPAPEKITDAIYARSKVIDSYKISDAADIDLDKIGSFKVDELTVDVIDPVADYAALMEELFDFGAIRSLIAGGFKVVVDSMSAVTGPYAVEILEKRLGAPKGSVRNATPLPDFGGHHPDPNLVHAKELYDDVMSPEGPDFGAASDGDGDRNMVVGKGMFVTPSDSLAIIAANAKLAPGYAAGISGIARSMPTSAAADRVAEKLGLGMYETPTGWKFFGNLMDAGKVTICGEESFGTGSNHVREKDGLWAVLYWLNIVAARKESVKDIVTKHWAEYGRNYYSRHDYEEVDSDAANTLVAILREKLATLPGTSYGNLKVAAADDFAYHDPVDQSVSKNQGIRILFEGGSRIVLRLSGTGTAGATLRLYVERYEPDAARHGIETQSALADLISVADTIAGIKAHTADSEPTVIT

SEQ ID NO: 18356 - protein, 609 aa, Streptomyces aureofaciens
MCGIVGVVDYDAPAEHRRDLLQAMTDTMACRGPDAEGLWFGRAAGLGHRRLSVIDPEHGRQPMTAEHEGRGAAITFSGEIYNFRELRAELTSHGHRFRTSCDTEVVLRGYLQWGAALVERLNGMFAFAVWDEHSEELLLVRDRMGVKPLYYWPTAAGVRFGSEPKAVLADRTLSRRVGPDGLCEVLDMVKTPEAAVFSGLVEVRPGQLVRVGRGGVRRQTYWRLEAREHTDDLPTTIGTVRDLLADTVTRQLVSDVPLGTLLSGGLDSSAVTALAARSGPVRSFSVDFRGAADAFASDAVRREADAPYVRELAGHVGADHLEVLLDSPGLSDPAVRSAVLRATDLPPAYWGDMWPSLYLFFRAVRENVTVALSGEAADELFGGYRWFRNPLALRAATFPWLTPGSARYFGGSSLFQAGLLDKLDLDGYRAARYAEALAEVPVLPGESAPERRMREIGHLNLTRFVQTLLDRKDRMSMAVGLEVRVPFCDHRLVEYVFNVPWEMKSFDGREKSLLRAAVADLLPRSVVERVKTPYPATQDPGYEGALRAELAGVLADPDAPVLPLLDRERALAAAARPTGAVSRPYDRGSLELVLWLNSWLAEYEVTLDL

SEQ ID NO: 18357 - protein, 573 aa, Cucurbita pepo
MGNTCVGPSISKNGFFESVSAAMWRSKTPENSVSNHTNGENVREVVASEPESPLPVQNQPPEKVTMPESVAKPEPPMEPKVRPVMKRVGSAGLRGGSVLQTKTGNFKEYYSLGKKLGQGQFGTTYMCVEKATGKEYACKSIAKRKLVNEDDVEDVRREIQIMHHLSGHPNVISIKGAYEDAVAVQVVMELCAGGELFDRIIQRGHYTERKAAELTRTIVGVLEACHALGVMHRDLKPENFLFVSKEEESLLKTIDFGLSMFFKPGEKFNDVVGSPYYVAPEVLRKRYGPEADVWSAGVIVYILLSGVPPFWAESEEGIFEEVLHGDLDFSSDPWPSISDSAKDLVRRMLVRDPRKRLTAYEVLCHPWVQVDGVAPDKPLDSAVLTRLKQFSAMNKLKKMAIKVIAESLSEEEIAGLKEMFKMIDTDNSGQITFEELKAGLKKFGANLKESEIYDLMQAADIDNNGTIDYGEFVAATLHLNKIEKEDHLLAAFSYFDKDGSGFITHDELQQACKEFGIEDLQMEEMMREVDQNNDGSIDYNEFVAMMQKGNVVNTGKKGLQSSFSIGFREALKL

SEQ ID NO: 18358 - protein, 345 aa, Thermus thermophilus
MKVAVLPGDGIGPEVTEAALKVLRALDEAEGLGLAYEVFPFGGAAIDAFGEPFPEPTRKGVEEAEAVLLGSVGGPKWDGLPRKISPETGLLSLRKSQDLFANLRPAKVFPGLERLSPLKEEIARGVDVLIVRELTGGIYFGEPRGMSEAEAWNTERYSKPEVERVARVAFEAARKRRKHVVSVDKANVLEVGEFWRKTVEEVGRGYPDVALEHQYVDAAAMHLVRSPARFDVVVTGNIFGDILSDLASVLPGSLGLLPSASLGRGTPVFEPVHGSAPDIAGKGIANPTAAILSAAMMLEHAFGLVELARKVEDAVAKALLETPPPDLGGSAGTEAFTATVLRHLA

SEQ ID NO: 18359 - protein, 412 aa, Bdellovibrio bacteriovorus HD100
MLVFYATGMILGAGVYSVIGKAAGVAQEGLWLSFILAALAAVLTALSYAELATLFPKAGAEYVYMKEIFPQRKILSFLCGCLMIFAAIITASTVSLSFAAYTQDFFKAPEMLVAIVLLGFFTLVNIWGVRESGWVNIVFTLVELSGLVIFIFVGLRQPDFGKVLSVPVSWGVVTGASLIFFAYLGFESMVNLAEEAKKPDKNIPRAILLSLSLTTVVYVAVSLAALAMMSPGDLQKSDAVLSAALQKHSPEAARALAGIALFATANTVMIALLGASRISLGMARGRDLPKVFSKILPQRQSPWLSSLLVFLLALLFLPLKKIEVLASVSSFVTIVVFIIINGAVVYLRRKEPQRKRPFRVPGAVAGWPVLPILAAGMALFFLFNFEEQVYYVGVGIVIFVLVVYQALHFRRA

SEQ ID NO: 18360 - protein, 170 aa, Mesembryanthemum crystallinum
MASQSTDQPKSIHDFIVKDARGNDVDLSIYKGKVLLIVNVASQCGLTNSNYPELTKLYEQYKDKGLEILAFPCNQFGNQEPGDNEQIMEFACTRFKAEFPIFDKVDVNGSNAAPVYKYLKSSKGGLFGDGIKWNFTKFLVDRDGKVVDRYAPTTSPASIEKDIKKLIGTS

SEQ ID NO: 18361 - protein, 968 aa, Oryza sativa
MAAAAGKAAMERHQSIDAQLRLLAPGKVSEDDKLVEYDALLVDRFLDILQDLHGPHLREFVQECYELSAEYENDRDEARLDELGRKLTSLPPGDSIVVSSSFSHMLNLANLAEEVQIAHRRRIKLKRGDFADEASAPTESDIEETLKRLVTQLGKSREEVFDALKNQTVDLVFTAHPTQSVRRSLLQKHGRIRNCLRQLYAKDITADDKQELDEALQREIQAAFRTDEIRRTPPTPQDEMRAGMSYFHETIWKGVPKFLRRIDTALKNIGINERLPYNAPLIQFSSWMGGDRDGNPRVTPEVTRDVCLLARMMAANLYFSQIEDLMFELSMWRCSDELRIRADDLHCSSRKAAKHYIEFWKQIPPNEPYRVILGGVRDKLYYTRERTRHLLTTGVSEIPEEATFTNVEEFLEPLELCYRSLCACGDKPIADGSLLDFLRQVSTFGLALVKLDIRQESDRHTDVLDAITTYLGIGSYAEWSEEKRQDWLLSELRGKRPLFGPDLPQTEEIADVLGTFHVLAELPADCFGAYIISMATAPSDVLAVELLQRECHIKQPLRVVPLFEKLADLEAAPAAVARLFSIDWYMNRINGKQEVMIGYSDSGKDAGRLSAAWQMYKAQEELVKVAKHYGVKLTMFHGRGGTVGRGGGPSHLAILSQPPDTIHGSLRVTVQGEVIEHSFGEEHLCFRTLQRFTAATLEHGMHPPISPKPEWRALMDEMAVVATKEYRSIVFKEPRFVEYFRSATPETEYGRMNIGSRPSKRKPSGGIESLRAIPWIFAWTQTRFHLPVWLGFGGAFKHIMQKDIRNIHTLKEMYNEWPFFRVTLDLLEMVFAKGDPGIAALYDKLLVAGDLQSFGEQLRNNFEETKQLLLQVAGHKDILEGDPYLKQRLRLRESYITTLNVCQAYTLKRIRDPSFEVMSQPALSKEFVDSNQPAELVQLNAASEYAPGLEDTLILTMKGIAAGMQNTG

SEQ ID NO: 18362 - protein, 534 aa, Gluconacetobacter diazotrophicus
MTMTGTVPRSAGWRRLSRRCLPAAFALLFPLGAPHAADTPQWRPVLHFSPAAYWMNDPNGPILLDGVYHLFYQYAPGSMTWGHPSWGHATSTDLLHWTEHGVAIAATPGEEIFSGSLVPDPLNRSGLGSTDAPPLLAFHTSVFHDNPAHPDGTQAQSVSVSHDGGFTWRPYAHNPVLTLHPDSRQFRDPSVFWYQDGGCWIMTTVVGDAQLVKLYRSTDLLHWSFLSDFQPSGYRKPGMLWEMPTLVPLKLDGNPRATRWVMIVSVNPWSIAGGSGVQYFVGRFDGVTFTPDALPPPGSDPSRYDWLDHGADQYATTLFANTGSGAPVLIGWMDNWDYATDLPTAPWRGQMTLPVDIALKTVDGHPTVIQTPTRAYEDMVRKKGVVTYGDRNLPQDGRVTIPSRGEVLDIRLVLRRGGARRAGIVVRETPDGRTGTSVSYDFVDGTLTVDRGRSGLVGFSPRFSTRHIAYLAAPGGEVALHLVVDRASVELFANDGVLRMTDLIFPPAGSDRISLFAEGGGATIHGLRVAVLAR

SEQ ID NO: 18363 - protein, 427 aa, Mycoplasma penetrans HF-2
MKLKLGRKDKTEKKEVKGTLNQDFISSGILEGNLQKNINRDDLVTAKKKFIKELSSKKRKKNKVVAEEILIYFDRFDLTNDDYLEIFDWLKQEGIEIDRNPFTSNNSDDIKELKSNVASKIDYIVHDVTTPMSSTRDKVDDGIKSFLNVLGSSKMLTSQEEQEIGKMLDSEDKTIREYAINQLMTSNLRLVTSIAKKYLNRGLDLEDLLQEGSLGLMKAITKFDYKLGNKFSTYATWWIRQAITRAIADQARTIRIPVHMVETINKLSKAERQLMQEYGRDPTPEELADAMDGTAAGFTAKKILNIKKLNIDPVSLDKPVGKDEESKFVDFVKDDDNLNPEQFTEKELMGEHIDDILKKFLQEKEEDIIRMRYGLPPYSHPMTLEEVGEKYGITRERVRQIEAKALRKIKHPSKSGILKGFNENNDF

SEQ ID NO: 18364 - protein, 410 aa, Zea mays
  misc_feature (112)..(112): Xaa can be any naturally occurring amino acid
MGSWEENVRQFLLEEEEDDDELFFVILPAIIPYLSEEKRPIHTSSLTGAKKVKEILEGHESWCKSEFRMEKEIFKATSNFLRRENLLRDTRGVSVEKQLGMFMYMISHNASXQMLQKAFQHSGETIHRKISEVFEIVPILTQRFVKLPSSVQTHARIATDSRFMPFFQNCLGAMHDVYVSITIAEDRAPPYRNRKGTLSHNVMVVCDFDLNFTFVSCGWEGSASDAGVLRSAISKRFSVPEGKFYLVDGGYANTPSYIAPYRGVRYHLSQFRRSRSSQSGYANYFFLFNHRHAILRNHIERAIGVLKKRFPILKVDTFHPIENQIKIAAAAITFHNIIRGQNGDEGWLDNQLDYISPSHYIGVTWYLQSAEWKQHMKLTRKRKMDDLLGYVSLSCACCISCYREDRGPGE

SEQ ID NO: 18365 - protein, 476 aa, Mycoplasma penetrans HF-2
MVRLLSNREKTFSKSFNVKIIGIGGAGNNIVKYMVNSREWPSFCNIIALNTDYIALSNLGENMKDIFILGSEELNGNGSGGDPETGKRAAEADIEVLKTMLEGVDVLILVAGLGKGTGTGATPVIAKAAQELGILTIGLFNLPSIGAEGEKTYSNALLGLQNLALCCNGLTTVNNDKIINVDKEKMSIKKAYESANKYIKTIVEEIINIITMPSDINVDFADVRNFFEDKNGFLFMRINVTDYTKDGIKDAIETGIKTGFSDVNIKNSEKALINFKLNENVPSYVLENTRSALKEIVESGNVNIVHGVAYNDVYEDAEVNILLTGSFDISDVPLVDIPEPKLASTESSYLGGASNSTNSVYETLKEMDSNRNQESLWSDSLDNTNVQNSYPSTAKVLGLPDDDTDDVSYVRDRQQPSSTSRFSQEYGSARYNSQNQGYNRPSSRYYDDEDSYYSSRRTPAPKKKRSLFDRIFRRNK

SEQ ID NO: 18366 - protein, 323 aa, Candidatus Blochmannia floridanus
MPITTLKQHCKLLILGSGPAGYTAAIYASRANLNPTLITGLEHGGQLNTTTSIENWPGDPENLTGPQLMNRMKMHAINLNTKIINDHIIKVNFQKYPFHLYGGNTNEYTCDSLIISTGGSARYLGLPSETKYKGKGVSSCATCDGFFFNKQNVAVVGGGNTAIEESLYLSNIANQVYLIHRSMNFRAEKILMDRLMYKVNHENITVHTNCIVQEILGNEKEVTGINIQDKNHNKEHIINVQGVFIAIGHDPNTAIFNNQLTLNNHGYIHVKSGLDGSFTATSVNGIFAAGDVIDYHYRQAITAAGSGCMAAIDAERFLSNIQK

SEQ ID NO: 18367 - protein, 112 aa, Mesorhizobium sp. BNC1
MKKIEAIIKPFKLDEVKEALQEVGLQGITVTEAKGFGRQKGHTELYRGAEYVVDFLPKVKIEVVLIDEMVDAAIEAIRKAAQTGRIGDGKIFVSNVEEVIRIRTGETGPDAV

SEQ ID NO: 18368 - protein, 506 aa, Vibrio vulnificus YJ016
MTQQLEQNLATAQKYLARFRDNTLGHFINGEWTLGSKGETFDNLTPTDNTSLGKVVKGTAEDVDAACEAAQQAFTAWAEMSGAERKKILHKLADKIEQRAEEIALVESMDCGQPLRFMRQAAIRGAANFRFFADKSPEAKNGLSLHQDTHTNYTIRTPIGPVGVITPWNTPFMLSTWKIAPALAAGCTVVHKPAEFSPLTAAILAECAKEAGLPDGVWNMVNGFGEVAGKTLTEHKAIKAVAFVGETVTGSMIQAQGAPTLKRVHFELGGKNPVIVFDDADFERALDAVVFMIYSLNGQRCTSSSRLLIQNGIKPKFIEALKQRVESLQVGHPLDPETEVGPLVHQSHYNKVMSYMTAAEEDGATIAVGGRKLPEKGAGNYLTPTLFTDADNTMRIAREEIFGPVLTCIGFDSEEEALEIANDTDYGLSGYIWTSNTGRAMRMATKVEAGMIWVNSENNRNLPSPFGGVKMSGIGRDGGDWSFDFYMETKNVCIAHDLHRVPTLGK

SEQ ID NO: 18369 - protein, 848 aa, uncultured bacterium
MKIVIVGHGMVGHKFLESLAETGIQNAEVTVLCEEPRAAYDRVHLSEFFSGKTAEDLSLVEAGFFERTGYSLRLAARAASIDRRAHTVTTLDGEVLPYDKLVLATGSSAFVPPVPGRDRPNCFVYRTIEDLEAMTECGARSKTGVVVGGGLLGLECGKALVDLGLETHVVEFAPRLMTVQVDDGGGRVLRNKIEALGVQVHTSRNTVEITDGATARHRMVFADSTWLETDMIVFSAGIRPRDELARQCALAIGPRGGVVIDSECRTSDKNIYAIGECASWNEQTFGLVAPGYDMARVAAKHIAGITDAAFVGADMSTKLKLMGVDVASIGDAQGKTPNSRSYQFVDEVKQIYKKIVVSPDGKQLLGAVLVGNADEYGTLLQMALNGITLPESPEFLILPSSDGQAKPGLGVDALPDSAQICSCNSVTKGQICAAVCDGATDIGKLKACTKAGATCGGCVPLVTQVMKFEMKKQGMEVNNHVCEHFPYSRQELYHLVRVGEIKSFAALLDKHGHGLGCDICKPVAASVFASCWNDFVLKKELAGLQDSNDYFLGNIQKDGTYSVVPRMPGGEVTPDGLIAVGTVAKKYGLYTKVTGGARVDMFGARVEQLPLIWEELIAAGFESGHAYGKSLRTVKSCVGSTWCRYGVDDSVGLAVELENRYKGLRAPHKIKFGVSGCTRECAEAQGKDIGIIATEKGWNLYVCGNGGMKPRHAELFASDLSKEELIRLIDRVLMFYVRTADRLQRTSTWRDNMEGGLAYLQNVILNDSLGLNAELEAQMQHVVNTYQCEWKSAVNDPETRKRFRSFVNSDKLDEHVMFVQERGQIRPARPEERAEAAPSFAPTADSLA

SEQ ID NO: 18370 - protein, 499 aa, Shewanella oneidensis MR-1
MTTQVKHYIDGEFTAGTGTSQIVVTNPANNATIAVINSATADEVHAAIASAKAAFKTWKEVPVSERARVMLRYQHLLKEHHDELATILAHETGKTFEDAKGDVWRGIEVAEHACNIASLLMGETVENVARSIDTYSYTQPLGVCAGITPFNFPAMIPLWMFPLAIACGNTFILKPSEQDPMTPQRLVELFVEAGAPKGVLQLIHGDKTAVDILLADPAVKAISFVGSVAVGQYIYKTGTDNLKRVQAFAGAKNHCVIMPDANKQQVINNLVGASVGAAGQRCMAISVAVFVGAAKEWIPELKEALAKVRPGLWDDKDAGYGPLISPAAKVRVLKLIAQGKEEGAQCLLDGSDFTVAGFESGNWVGPTMFTKVTTDMSIYKEEIFGPVLCCMESDSLEDAIELVNASPYGNGTSIFTASGAAARKYQHEIEVGQVGINVPIPVPLPFFSFTGWKGSFYGDQHAYGKQAVRFYTETKTITARWFESDIAVAAGPNMSINLR

SEQ ID NO: 18371 - protein, 257 aa, Shewanella oneidensis MR-1
MDYLVERIEGHTAILTMNNPPANTWTAQSLQALKAKVLELNANKDIYALVLTGEGNKFFSAGADLKLFSDGDKGNAASMAKHFGEAFETLSQFRGVSIAAINGYAMGGGLEVALACDIRIAETQAVMALPEATVGLLPCAGGTQNLTALVGEGWAKRMILCGERVNAAQALNLRLVEEVVETGEALNAAIALAAKVANQSPSSVTACKTLIQAGRQMPRSQALPIEHELFVGLFDTEDQAEGVNAFLEKRKADWKNR

SEQ ID NO: 18372 - protein, 557 aa, Gibberella zeae PH-1
MAPANTLPAWSDLQSHRDSVGKSFVLKEAFASDPQRFDKFTRTFTSGGVSSEILFDFSKNFLNDETLDLLVKLAEQAGVEKKRDAMFAGEKINFTEDRAVYHTALRNVGGWDMKVEGVDVMNTQGGVNDVLQHMKEFSEQVRSGEWKGYTGKKLTTIINIGIGGSDLGPVMVTEALKHYGADDMKLHFVSNIDGTHIAEALKESDPETTLFLIASKTFTTAETTTNANTAKKWFLEKTDNKGEIAKHFVALSTNEEEVTKFGIDSKNMFGFESWVGGRYSVWSAIGLSIALYVGFDNFHKFLSGAHAMDKHFRETPLKENIPILGGLLSVWYSDFFQAQTHLVAPFDQYLHRFPAYLQQLSMESNGKTITSDGSSAKYTTANQSGPILFGEPCTNAQHSFFQLVHQGTKLIPTDFILAAKSHNPVSDNLHQKMLASNYFAQAEALMVGKTDEQVRAEGAPEELVPHKRFLGNRPTTSILVGGAIGPAELGALIVYYEHLTFTEGAIWDINSFDQWGVELGKVLAKKILKELDEEGNGEGHDASTGGLIGAFKKYGQN

SEQ ID NO: 18373 - protein, 469 aa, Bacillus clausii KSM-K16
MKLFINGEWVSEELDVFDVVNPATGEVVGSVPKGGAKEAKVAADGAYESLPAWAERSAYERSAILEAWHDLIAEQKEELARLMTMEQGKPINEARGEIAYANSFIKWYAEEGKRIYGETIPASSPDKRLFVVKQPVGVVAAITPWNFPAAMITRKVAPALAAGCTVLIKPASQTPLTALKLAELAEKAGLPKGVLHVVVGSTSDISKAWQEDERVRKLTFTGSTEIGRTLMSEAGQTVKKISLELGGHAPVLVFEDADIDNAVQETIASKFRNGGQTCVCANRIYVHESIAEAFITKMKQAVEQLKVGNGLNEETDIGPLIDEEAVDKVLTHIRDAKDKGAEVLTGGNSSDGLFIEPTVIAGVTDDMACMSEETFGPLAPISTFKTEEEVVKRANDTIYGLAAYLFTTDLSRGIRVAEKLDYGVVGLNDGGPSVAQAPFGGFKQSGIGREGGHEGLEEFLESKYVSLKM

SEQ ID NO: 18374 - protein, 500 aa, Desulfitobacterium hafniense DCB-2
MIELKQVSFAYGNGERDSGLEDIELKVEEGEFLLLCGGSGCGKTTLTRLLNGLIPNFYGGVLKGQVWVGGLDVAKAPLYETAGKVGSVFQNPRSQFFNMDTTGELAFGCENMGLPLKEICARVERIALELGLEPLLDRNIFALSGGEKQKIACGAVAALGPQVYVLDEPSSNLDALAIEELRALLTKLKAQGKTVIIAEHRLYYLRELVDRVIYMKKGRIQQEYSGQEFRALPRGELDAMGLRSLSLEGLLEGAPVHLPRTEGAIALSGFSFAYPRGGRSLDIRETSFPQGAVVAVTGHNGAGKSTLARCLCGLEKKCRGRMGMQGESLGRKERLKRSYMVMQDVNHQLFTESVLDEVLISMGHPDVKQGEEILKGLDLLQFKERHPMSLSGGQKQRVAIASAIASRRELILFDEPTSGLDLLHMQGVARSLSQLAGIGKSVLVVTHDPEFILSCCTHILHMQEGKIIDNRPLDACGRGRMLSYFLEAVKEPGERRERVV

SEQ ID NO: 18375 - protein, 190 aa, Brassica napus
  misc_feature (41)..(41): Xaa can be any naturally occurring amino acid
  misc_feature (52)..(52): Xaa can be any naturally occurring amino acid
  misc_feature (99)..(99): Xaa can be any naturally occurring amino acid
  misc_feature (154)..(154): Xaa can be any naturally occurring amino acid
WLPLCFPAAAVVTSPAQATMVAPFTGLKSSAAFPVTRQSKXNDITSIASNGXGELAGMKVWPPVGKKKFETLSYLPDPYRKLNGGKEVDYLLRNKWIPXCLNSSWEAPGFVYPWSTESTPGILTMGRYWDNVGSFPCSGCTGLCSKWLKEVQEXKRSTPNAFIRIIGFDNNRQVQCISFIAYKPPSFTGA

SEQ ID NO: 18376 - protein, 409 aa, Bacillus licheniformis ATCC 14580
MIKRYTCQNGVRIVFENNPTVRSVAIGVWIGTGSRHETPEINGISHFLEHMFFKGTKTRTARDIAESFDRIGGQVNAFTSKEYTCYYAKVLDEHASYALEVLSDMFFHSSFDEEELKKEKNVVYEEIKMYEDTPDDIVHDLLSKASYGSHSLGYPILGTEETLAEFDGDSLRKYMNEYYTPDRVVISIAGNVPETFIKEAEKHFGSYEAKGKRTGMTKPDFHHEKMTRKKETEQAHLCLGFNGLEAGHPEIYDLIVLNNILGGSMSSRLFQDVREDKGLAYSVFSYHTSYEDSGMMTIYAGTGANQLQLLSETIHETLRALKSDGITPKELENSKEQMKGSLMLSLESTNSKMSRNGKNELLLGKHRTLDEIIEKLNAVSLERVNNLANRIFTDDYSSALISPSGELPK

SEQ ID NO: 18377 - protein, 459 aa, Bacillus clausii KSM-K16
MSKSDAYNLKYHITPTHGLLNDPNGLAYFQGQYHVFYQWNPYGTEHKNKSWGHVVSDDLVNWHRKETALVPSEWYDKDGIYSGGSIVHEGKLYLFYTGNVINKDGTRASYQCAAVSEDGHQFQKLGPLFEHPAGYTRHVRDPKVWKDDSGNWWLIVGAQREDLTGDALVYKSEDLISWSCQGSFLEQEHSFGYMWECPDVLQFPEHDVFVFSPQGLPEEGDQYKNPNQSGYIIGRISESGKFLGTLSDFNELDRGFDFYAPQTFKVNNRILMFGWMSAMTEETEQAVPTIEEGWVHALTLPREIVFADGVLYQRPLHELQLLRQHEVHEGISNSGQWSLPSLAAEVVIRFMEQPDSFQLIIRNSVQIDYDHEQNSLTVWRTNWLTNEKEHRRAVLGHSLAELHMFIESSSIELFVNEGEEVFSLRYFLEDTNERSVRFESDCSEAVLSMYRLQESIDEE

SEQ ID NO: 18378 - protein, 551 aa, Oryza sativa
MLTRTITYCMVSVTHRIHHPSIMNKLFSTAWILRHVLRWFKVKMDGNAKGGGHSEALKNYNLGRTLGIGSFGKVKIAEHKLTGHRVAIKILNRRQMRNMEMEEKAKREIKILRLFIHPHIIRLYEVIYTPTDIYVVMEYCKFGELFDYIVEKGRLQEDEARRIFQQIISGVEYCHRNMVVHRDLKPENLLLDSKYNVKLADFGLSNVMHDGHFLKTSCGSPNYAAPEVISGKLYAGPEVDVWSCGVILYALLCGTLPFDDENIPNLFKKIKGGIYTLPSHLSALARDLIPRMLVVDPMKRITIREIREHQWFQIRLPRYLAVPPPDTAQQAKMIDEDTLQDVVNLGYGKDHVCESLRNRLQNEATVAYYLLLDNRFRATSGYLGADYQESLERNFNRFASSESASSNTRHYLPGSSDPHASGLRPHYPVERKWALGLQSRAQPREIMIEVLKALQDLNVSWKKNGQYNMKCRWSVGTQATDMLDVNNSFVDDSIIMDNGDVNGRLPAVIKFEIQLYKTRDEKYLLDMQRVTGPQLLFLDFCADFLTKLRVL

SEQ ID NO: 18379 - protein, 490 aa, Hordeum vulgare
MVVTVAATGPDTAETLHSTTFASRYVRDQLPRYRMPENSIPKEAAYQIISDELMLDGNPRLNLASFVTTWMEPECGKLIMDSVNKNYVDMDEYPVTTELQDRCVNMIAHLFNAPIGEDETAIGVSTVGSSEAIMLAGLAFKRKWANKMKEQGKPCDKPNIVTGANVQVCWEKFARYFEVELKEVKLTEGYYVMDPKKAVEMVDENTICVAAILGSTLTGEYEDVKLLNDLLVEKNKETGWNVPIHVDAASGGFIAPFLQPELEWDFRLPLVKSINVSGHKYGLVYPGVGWVIWRSKDDLPEELIFHINYLGADQPTFTLNFSKGQQIIAQYYQLIRLGFEGYKHIMENCKLNAAVLKEGIDATGRFDVLSKADGVPLVAIRLKDSTNFSVFDISENLRRFGWIVPAYTMPADAEHVAVLRIVIREDFNRSLAQRLLADINKIIGELDAHAVHAIKLSTAAAGGDGASKSAVDAATEAFKDLAGKKKAGVC

SEQ ID NO: 18380 - protein, 594 aa, Bifidobacterium longum DJO10A
MFLRTLREDPADADVDSAKLLQRAGYIRKAAPGIWTWLPLGLRVLNKIEAIIREEINGIGAQEVHFPALLPREPYEATHRWEEYGDNIFRLKDRHEADYLLAPTHEEMFTLLVKDMYSSYKDLPVTLYQIQTKYRDEFRPRAGLIRGREFVMKDAYSFTIDEEGMRKAYYDERGAYERIFQRLDLKYVPVFAMSGPMGGSASEEFLAPMPIGEDTFALAPSGKAWNVEALSTPELPEIDASTTPAASKEATPDAKTIDNMIERANADHPRTDGREWQASDILKNVVITVKHPEDEEHDEPWREVIVVGVPGDRTVDMKRLEAQFAPAELEEATEEDLKQHPELVPGYIGPMVLGPQAEAAGVKNPVRYLIDAHVVKGSAWFTGADENEVDYYNLVYGRDFKADGVVEAVEVRHGDMSPDGSGPLSFERGVEIGQVFQLGLKYSKALDLKVLDQNGKAVPVWMGCYGIGVSRVLACIAETHHDEAGLAWPSVIAPAAVHVVATGKDAVAFEGAEKLVAELEAKGLEVIYDDRKKVSPGVKFKDAELIGVPLVAVVGRDYVNDGTIELRDRNGENKVAVPAAEAADALAERFAALS

SEQ ID NO: 18381 - protein, 418 aa, Thermococcus litoralis
VEQDPFEIAVKQLERAAQYMDISEEALEFLKRPQRIVEVSIPVEMDDGSVKVFTGFRVQYNWARGPTKGGIRWHPEETLSTVKALAAWMTWKTAVMDLPYGGGKGGVICNPKEMSDREKERLARGYVRAIYDVISPYTDIPAPDVYTNPQIMAWMMDEYETISRRKDPSFGVITGKPPSVGGIVARMDATARGASYTVREAAKALGMDLKGKTIAIQGYGNAGYYMAKIMSEEYGMKVVAVSDTKGGIYNPDGLNADEVLAWKKKTGSVKDFPGATNITNEELLELEVDVLAPSAIEEVITKKNADNIKAKIVAELANGPTTPEADEILYEKGILIIPDFLCNAGGVTVSYFEWVQNITGDYWTVEETRAKLDKKMTKAFWDVYNTHKEKNINMRDAAYVVAVSRVYQAMKDRGWIKK

SEQ ID NO: 18382 - protein, 390 aa, Cynodon dactylon
FTAHPTQSLRRSLLQKHTKIRNCLTQLYAKDITEDEKKELDEALQAEIQAAFRTDEIRRSQPTPQDEMRYGMSYFHETIWKGVPKFLRRVDTALKSIGINERLPYNAPVIKFSSWMGGDRDGNPRVTPEVTRDVCLLARMIAANLYISQIEDVMFELSMWRCNDELRALAEQHLASRETKKHYIEFWRAIPATEPYRVLLGYVRDKLYNTRERALQLLTKGYSDIQEEATIGTVEEFMEPLEVCYKSLVDCGDKTIADGVLLDFIRQVNTFGLSLAKLDIRQESERHTDAIDAITTHLGIGSYKEWPEEKRQEWLLSELQGKRPLLVPDMPVTEEVEAVLGCFRVLAELPRDSFGPYIISMATAPSDVLAVELLQRECGIRQPLPVVPLS

SEQ ID NO: 18383 - protein, 1064 aa, Saccharomyces cerevisiae [sequence omitted]

SEQ ID NO: 18384 - protein, 493 aa, Vicia faba
MSNSNNPPPPKPTWVLPYITENIRELYTLGRKLGQGQFGTTYLCTHNPTGKTYACKSIPKKKLLCKEDYDDVWREIQIMHHLSEHPNVVRIHGTYEDSVSVHLVMELCEGGELFDRIVNKGHYSEREAAKLIRTIVEVVENCHSLGVMHRDLKPENFLFDTVEEDAVLKTTDFGLSAFYKPGEIFSDVVGSPYYVAPEVLHKHYGPEADVWSAGVILYILLSGVPPFWAETEIGIFKQILQGRLDFQSEPWPGISDSAKDLIRKMLDRNPKTRFTAHQVLCHPWIVDDSIAPDKPLDSAVLSRLKQFSAMNKLKKMALRVIAERLSEEEIGGLKELFKMLDADSSGTITLDELKEGLKRVGSELMESEIKDLMDAADIDNNGTLDYGEFIAATVHLNKLEREENLLSAFSYFDKDGSGYITIDEIHVACKEFGLDDIHIDEMVKEIDQDNDGQIDYGEFAAMMRKGNGGMGRRTMTSRLNFRNALGIIGNESN

SEQ ID NO: 18385 - protein, 351 aa, Rhodobacter capsulatus
MTIANRILPHAPADHPPVPVPRVGVLLANLGTPDATDYWSMRRYLNEFLSDRRVIDYPIWKWQPLLQLIILSKRPFTSGNNYRSIWNEERDESPLMTITRDQVRKLRAAVETRYGAGNVVVDFCMRYGNPSTRDVLDDMLAQGCERILFLPLYPQYAGATSATANDQFFRALMQVKRQPAARTVPEYFARPSYIEALASSVERVYATLDTRPDVLVASYHGMPKRYHREGDPYHCQCQKTSRLLRERLGWGPDSIDTTFQSVFGTEEWLRPYTVEHVVQLAEAGKKNIAVISPAFSADCIETLEEINGEIREAFEHAGGESFTYVPCLNDDDLHIAALLEVVEENLAGWID

SEQ ID NO: 18386 - protein, 637 aa, Adiantum capillus-veneris
MACTIVWFRRDLRVEDNPALVAAVRAGTVVPLFIWTPEEEGQFLPGRVSRWWLKQSLIQLHQSLTSLGSPLIMRRAQSAISVLSQIIKQTGATQVFFNHLYDPVSLVRDHKVKQELLQAGVTVTTFNADLLYEPWEINDEQGRPFTTFAGFWSLCMDMAIEPEAPLLPPKRITKWPGIAATSPIEDLELENESEKGSNDLLARAWAPGWANADRALEAFVSGPLMEYASNRQKVDSATTSLLSPHLHYGELSVRKVFHSVRMKQVLWVKEGNADAEESVNLFLRSIGLREYSRYLCFNFPFTHERSLLSNLKFFPWRNDEGYFKVWRQGRTGYPLVDAGMRELWATGWLHNRIRVIVSSFFVKFLQLPWRWGMKYFWDTLLDADLESDVLGWQYISGSLPDGHELYRIDNPQLEGYRYDPCGEYVRRWLPELSRLPSEWIHHPWDAPPNVLRAAGIELGSNYPRPIVEVAAARERLEQALAEMMEKEAAATRAAFEGSLQGVGLEPSQADNMDIDRGPSDAPGRNLSDRSPHDQMVPSMFMETGRPAADGVGSHASERGANVQEAHDNGSAPVASREGGSCRRNWQPFKVGTVTPTLLRSHHLRTGITLSLPLQVYQLGRAIGHLIQLCIRMTLRYL

SEQ ID NO: 18387 - protein, 679 aa, Adiantum capillus-veneris
MAAHTIVAHTIVWFRRDLRIEDNPALVAAVRAGPVLPVFIWSPEEEGQFLPGRVSRWWLKQSLVHLNESLTILGAPLVMRRASNVLAALLEIKKATGATQVFYNHLYDPVSLVRDHRVKQGLSQAGIIVNSFNADLLYEPWEVNDDNGQAFTTFSGFWAKCMDMPAEPEAQILPPKRILKFPGPSLSCSIEDLDLEDELEKGSNALLARAWQPGWANADRALESFINGSLMEYAANRQKVDSATTSLLSPHLHYGEVSVRKIFHNVRMKQVLWVKEGRVEAEESVNLFLRSIGFREYSRYLSFNFPFTHERSLLYNLKFFPWRVDESYFKAWRQGRTGYPLVDAGMRELWATGWLHNQIRVIVSSFCVKFLQLPWRWGMKYFWDTLLDADLESDVLGWQYISGSLPDGHELDRIDNPQIEGYKFDPYGEYVRRWLPELSRLPTEWIHHPWDAPPSVLRAAGIELGSNYPRPIVEIAAARERLEQALAEMWANEAADKATLANGLEEGLGDTVEVQGMRNGFPANMDIDRGPGEKALLVRSPHDQMVPNVGVRRSTTGAVQGGAANQGSALQAVLREVPANGHVQAVQAQSQRMAAPPMAMQNGYDDTHSTAESTSARHWSLAIGLPVWSQYVPVCLHMRQDDSQVPLVPDLHHGVMSRRLPHAPPMVNFEATKTSSLSV

SEQ ID NO: 18388 - protein, 446 aa, Porphyromonas gingivalis W83
MKVLKFGGTSVGDAERIRSVARLITSVKGRKIIVLSAMAGTTNSLVEIASHLVKRNVAQAKEVVQVLREKYHREINALYKRPDTLSAAKKAVDSLLDSLGHMCDVEGFTLFEEKRVLILGELMSTTMMQIYLQEMGAVVAMLPALEYMRTDKNAEPDKDYIRKHLLPMIEAHPDEDMLFLTEGYICRNAFGEIDNLQRGGSDYTASLIGAALNADEIQIWTDIDGMHNNDPRVVDVTAPVRRLHFEEAAELAHFGAKILHPTCIKPAKEKNIPVRLLNTMDPDAPGTLISLDTEKDCIKAVAAKDGITVIKVKSSNKLLSWHFMRKLFEIFEFYQEPVDMVATSEVGVSLTIDNDKNLPDIVRALSDIGDVTVDKDMVIICIVGDMEWDNVGFEARIINALKGVPVRMISYGGSNYNVSVLVKAEDKKKALIALSNKLFNSRATKA

SEQ ID NO: 18389 - protein, 89 aa, Glycine max
KFIDTGLVNYCVPAGEAYSKALAIAHDINQKGPVALRMAKRAINEGVETDLTSALELEEDCYDQVLNTKDRLEGLAAFAEKRKPSYTGE

SEQ ID NO: 18390 - protein, 113 aa, Xylella fastidiosa Ann-1
MSDYVLHVSDANFDAMVLLSDQPVLVDFWAKWCGPCKIISTLLDDLAQSYEGRLKIAKVDIDENRALAIKYHVCSIPMLLLFKDGQVQITQIGAVGKGRLTQMIDKVLANTDS

SEQ ID NO: 18391 - protein, 718 aa, Adiantum capillus-veneris
MAKSCTVVWFRRDLRLEDNPALAAAARAGAVVPVFIWSPDEEGQFRPGRVSRWWLKQSLIQLDISLRSLGVSLVMINANDTVSALLELVKTTGASQVVYNHLYDPVSLVRDHRVKQSLVQNGIQVQSFNGDLLYEPWEVLDDHGKPFTYFESYWAKCLTMPFEPESPLLPPRRLTAAPAGIVHSLTPDELGLEDEADKSSNALLARAWAPGWSNADKALEAFLAGPFLNYSRNRHEIDGPTTSLLSPHLHFGEVSVRKVFHSVRRLQVLWAKDGSMLGEESINYFMRSIGFREYSRYLCFNFPFTHERSLLSNLKSFPWRVDEGLFKAWRQGRTGYPLVDAGMRELWATGWLHNRVRVIVSSFCVKFLQLPWRWGMKYFWDTLLDADLESDILGWQYISGSLPDGHELDRMDNPQTEGYKHDPLGEYVRRWLPELVRLPTEWIHHPWDAPPGVLRAAGVELGSNYPRPVVEVAAARERLRDAVTHMWEQEAALKAAGDKGIEEASVGDSIAKVNCQPEVAAQPCKIPKASVSQATNGDMEVSSAGSSRRDQMVPTFAKELKTQADALCGDYGSIALPLPSQQNLPCPSTNFSAIRGVSKLSPGNRGDMVDTTEALRNTHSEPLPPVSDTNPMTESSSSSSPREQISSIKDDPPMIWVPAIAHQRPSSDFGCVPYAGDAEQLRKHLLILQNARTDDKVEDGVQLNGSQWARGSKRKAKS

SEQ ID NO: 18392 - protein, 605 aa, Caulobacter crescentus CB15
MAPSKGEDSRLVRIALTEAYVPIARGYLLAAAIYNSLIAIAHPFYEKGLAFVMLTSLTGATAIYAFSAWFLLRRRRIVGGHLEWLVLGMNALFLGHVTAFHLFHLEPQKLIYFVLLALVFATSAPSRRVANVSVGAALVSLVFIARGAPGDMVNQYLFVGLAGAFAAVGMSTLMRGVVGREVRARLASQALNDELERELTENRRLRTEAQALALAAEKANRAKSEFLATMSHEIRTPLNGVLGMAQIMASGKLQVDQRRRLETITASGQSLLGLINTILDVSRIEDGKMEIVEGPFDLTAQMHTLSLLYGGLARDKHLDFSLEVSPTVAGCRQGDGERLRQVLSNLISNAIKFTDSGAVRVTLDGDDQGLVARVLDTGVGIPEAQRERLFTKFAQLDSSSTRRVGGSGLGLAICKSLAELMGGEIRFLAPAEGGACFELTLPMARIDPPPAVAAPPAPALAPASADEDAAPRILVVDDNQTNRAVLLTLLGHLGADAHFAVDGRDAVAMWEQDRWDVILMDIHMPEMDGLQACQVIREGERQGGRLRTPVVAVTASVLPHERSLYVEAGMDAVVPKPVEVPKLLEVLANVLADADEAAVETRGAA

SEQ ID NO: 18393 - protein, 437 aa, Legionella pneumophila subsp. pneumophila str. Philadelphia 1
MIGNKTMDMDIKHKPLKRELSLFGATMMGLGSIVGTGVFVSIGIAAGVTGPSVILAIALAALVATCNAFSSAQLAANHAVSGGTYEYGYRYLHPAFGFTAGWMFLCAKSASAATAALGFAGYFIHLSGLETVPVIPIALAVSITLILLVLSGLRRTNTVNIIIVMITLITLTVFIISGLPDFMQRGTANLRPFFPVSKQEGLSHFFYATALMFVAYTGYGRIATLAEEVKNPGKFIPAAIIITLMVSAVLYILVGLVAIGAVGVEKLAQVTETNATPLESAARAIGIPGLSVLVSIGACTAMLGVLLNLILGLSRVALAMGRKGDLPKMFCYVSETRHVPVSAVIGVGVVIIALVLTGSVETTWTFSAFTVLIYYAITNLAALHLPKEEQLYPPLFAIGGLLSCLFLAFWVPIGVWITGISLLFLGLLWKVVANRFL

SEQ ID NO: 18394 - protein, 487 aa, Neurospora crassa
MSAKSILEADGKAILNYHLTRAPVIKPSTLPNPTKHNPPPRLASLHFAEDADVNGVLSQAEVTYPWLLQEGARFVAKPDQLIKRRGKSGLLALNKTWAEAKAWIAERAGKPQKVEHTEGVLRQFLVEPFVPHPQETEYYININSVRDGDWILFYHEGGVDVGDVDAKAEKILIPVDLSQYPSNEELASTLLKHVPKGIHNVLVDFIARLYAVYVDCQFTYLEINPLVVIPNEDATSAEVHFLDLAAKLDQTADFECGNKWAIARSPAALGIVAQSSNTGVNIDAGPPIEFPAPFGRELSKEEAYIAELDAKTGASLKLTVLNPNGRIWTLVAGGGASVVYADAIASAGFADELANYGEYSGAPTESQTYHYARTVLDLMLRAPVSEKGKVLFIGGGIANFTNVASTFKGVIKALREYGKALIEHNTQIWVRRAGPNYQEGLKNLKAATQELGLNAKIFGPEMHVSGIVPLALVPGKWEESGAVEFQA

SEQ ID NO: 18395 - protein, 136 aa, Methanosarcina acetivorans C2A
MANFKVVVSDPKEGRAYQIDIKDAEANALIGKAIGDVVDGAIFGLAGYKVQITGGCDGSGFVMKPDLPGPRRQRILTATGVGYVPKLPGQRRRKMMRGKEIAPDIIQVNAKIVEYGSKSIKALLGLETAEEAPAAE

SEQ ID NO: 18396 - protein, 1142 aa, Clostridium acetobutylicum ATCC 824
MRLKQIAVLLLSSIVIVTGNNWVKANTSISSTSAYRREAYRPQYHFTPDIGWMNDPNGMVYYHGVYHLFYQYNPYDTVWGPMHWGHAESKDMINWKQKSIALAPDTNGDIFSGSVVVDWNNSSGLFNKVSDHTGLVAFYTTNSAVASQQYQSMAYSTDDGSTWTKYNGGKPIIAQPENTPDFRDPKVSWDNEHNKWVMVLAAGNQTQFYSSNDLKNWTKTGEFGAEGQASHAGVWECPDLYQMTVSGQNIKKWVLSINLGSSVSPDSPPAGGSGMMYVVGDFDGSKFIADPKFTVSNNIGASDIVKGYYLLPGDTINVYDAKEGGNLLGSATVEDNQSTATVNLTKDLGNGSGKVWVAIVRNKIEKNRQEIDYSSEVASTSTGTSAVAPSGQDIINPDFETGDLTGWTATGNEWSNKNVVDNKTWGGGSGKYHCSGYRDPATGGAGDPGTGTLESTVFTLGGNGSINFLVAGGDLPKSAYVTLEDATTRKELTQFNASGLSTATVRRVNWDASAYLGKKLRIKVVDNATGAFGHIDVDDFHVYNTVPYKPPVNQLPSYPVNWIDYGPDFYAGVTWNDTTQQTNATTSEYGKYVPDGRRILLGWMSNWAYADRTPTTTWRSADSIPREEKLVATNDGYKITQQPIKELSSIRKKPTKTLTNTTITKGNTMSLGSEGIYEITSKFNINSTTSSEFGINVKVGGNQYTTIGYDKATSILFLNRHNSSSLNFLDYMPNKQEAPLKPDAKGNIKLQILVDKDSVEVFGSNDDNASVTITDQIFSDNLNNGIKLYSVGGSTKVNSLAITPLKSAVFTPYINNTLPYNPKSVQKTLPTSDFESGVVPGFWKQAEGYDTTFTVSNSTSWWGGTYNQDGKSFLTTFGENGDTASGILKSNYFKLSGDGKISFLIGGGNHPTSEYLALVDGVNGNKLFSATGADSETLRSVTWDASKYVGKVVYLEIADESQSGWGHINLDDINVPHFNCNIKKYRTTGTWGEIGPYGMKGSSTSAVSNGIYMASQNARNLSYEAKVSNVTSLSKTKSGEAGLVFGASKNLANAYEFNIDTSKGVARLFNKKNGKDLAPEVKETLSSDKSYQLKVLISGTNVKAYLDGTKIFDVNITSYAGRNVGLDVLDGSADFQDVSFQN

SEQ ID NO: 18397 - protein, 140 aa, Thermus thermophilus HB27
MVVTCPKCGAKNRLGTPPPGQVPVCGACKTPLPWVVEADEKGFAQEVAGAPLTLVDFFAPWCGPCRLVSPILEELAREHAGRLKVVKVNVDEHPGLAARYGVRSVPTLVLFRRGAPVATWVGASPKRVLEERLRPYLEGR

SEQ ID NO: 18398 - protein, 483 aa, Vibrio vulnificus YJ016
MNLNYPELFQQRCYIDGQWVAESGQTQAVTNPSTGKVIGEIPVFGEQQAKECITAAQAAFELWKKTTADYRADVLRRWYELMMVNIDDLAAILTLEQGKPFTEAKGEITYAASFVQWYSEEARRAYGEIIPSHRENGKIVVTKEPIGVVAAITPWNFPAAMITRKAAPAFAAGCSMVLKPAQETPFTALALAKLAEDAGLPKGLFNVITGDSRSIGGVFTSDKRVRKVSFTGSTNVGKILMNKSASTIKKLALELGGNAPFIVFEDADIDAAVEGAMIAKFRNAGQTCVCANRLFVHHAVYDEFAEKLANRVKQLKVGDGFADGVAIGPLINSSSVAKVQEHVDDAVAKGAKVLCGGLLNDEQLFVAPYVLTDMSDDMLVAEEETFGPVAPLFRFKDEAEVLERANDTESGLAGYFYTRSLGRAWRVADALEVGMVGINEGLISTAAAPFGGIKESGLGREGSRHGMDEYMEMKYMLMGGLDS

SEQ ID NO: 18399 - protein, 106 aa, Coix lacryma-jobi
VETLQLLLQIAGHKDILEADPYLKQGLRLRNPYITTLNVLQAYTLKRIRDPNFKTTPLPPLSKEFADANKPAELVKLNPASDYPPGLEDTLILTMKGIAAGMQNTG

SEQ ID NO: 18400 - protein, 566 aa, Vibrio parahaemolyticus RIMD 2210633
MTGNSSLERKLKREIASRKAAELLLEQKSYELYESTQKLSVALKKLELRSESDLRKFEFEEKIDATLIRFGRTFLSSTFDETMIASFLEQLTSNSVITASYLYLDPVQLTSLRRHHFGHLDLKSDKPIARTPNWQNEALHLPIIIDERVVGELIFSVSLEQIEQAFISKQMELVSDLVHGVISRHLSLEREVELRKRAEESEKATKEFVAMINHELRTPLNGVLGSADLLSKTQLGEDQRQYLGNLIQSGDLLRVIINDLLDFSKMNAGMMEIIDKVFAWDDLEKAITGVFAAKAAEKRIHFSIDKKLGIPEFLIGDLERITQILVNLIGNAIKFTHLGGVVLRVEWVNGTAFFEVEDTGIGIPLAAQSSLFDPFVQVDRSAKRSFEGSGLGLAICKNLVDLMQGEISFESEERKGTTFKVSIPLKEGQAQGAASGELAVVERSDLAGRSILVVDDIRMNQVIVTQMLKKLDITPDLKANGLEALEAVKNKDYELIFMDCRMPEMDGYEATAHLRQKGFDRPIIALTAGTTIEERQKCIDSGMDDILTKPYTATDIEQIMCKWLEQ

SEQ ID NO: 18401 - protein, 256 aa, Symbiobacterium thermophilum IAM 14863
MEKVILTREGHVAWLALNNPDRHNALSRQVVRDLQEAAHQLAVDRSVRAVVVHGGVSKSFCSGADLKERQGMDEPAVLDTVHALRSAVNSVAQLPMPVIAAIHGMAFGGGFELALACDIRIAAEDAQMGLTEVGWGIIPGAGGCARLPALIGPARAKELIFTARRLAAGEALALGLVNRVVGREELLDAARALAEEIARQAPLAVRAAKRAIDAGPGLAGALAAEWEAYRSIVPTRDRLEGLRAFAERRPPEFRGE

SEQ ID NO: 18402 - protein, 449 aa, Zea mays
PRVRLSTAAMAAAPQPPPLEADQTLALPDVLLLRVLACLPEPQLTGAASLVCRRWTRLAGRLRRRLAVRDWAFVAHRLPYRFPDLADLDLFPASIAAPTTAAPHGTAASPLLTCGAVSLTLDTSADPPLGACRFIDDDALDRGLAAVAASFPNLSRLSATAASESGGLMAIAVGCPTLQELELHRCTDLALRPVSAFAHLQILRIVAASPALYGTAEGGGVTDIGLTILAHGCKRLVKLELQGCEGSYDGIAAVGRCCAMLEELTIADHRMDGGWLAALAFCGNLKTLRLQSCSRIDDDPGPAEHLGACLTLESLQLHRCQLRDRSALHALFLVCEGAREIQFQNCWGLEDDMFALAGLCRRVKILLLEGCSLLTTRGLESVITSWGDLQSLEVVTCNKIKDEEITPTLAELFSNLKELKWRPDNKSLLAASLVGTGMGKKGRVFFKRV

SEQ ID NO: 18403 - protein, 408 aa, Methanosarcina mazei Go1
MQRQNKQQEDSFMIPETSYDIVVVGAGPAGSTAALYAAKKGASVLLLDKKREIGSPIQCAGFLPDASEVKALLPEADLPGALKNYPDSCVLQPIRTQRIIPPNCNAKEFAVKGAVLDRRRYDQYLAEQAAEAGAELMVKTRVTKIQGTTVETSGIFGKHTIRAKAIIGADGPNSLVAKSRGLIMKPEARETSVAIEYQVRNVDIDPDALEMYFGKDYVPGGYAWVFPEGKDRANVGIGIRSCMAEKGVSAKEYLHRFIKKHPVAGPKLKNAVIMNVIAGIIPVNGAPANTATADSLVVGDAAGHIIATNGGGIPPAMIAGKIAGETAAEFAAGKCDLEEYDRRWRAQFGQALETSVQARQIMDGIMKSDALMNAAFRFISPEQMKVMQCGKLPGPVKLGLQALSRGKK

SEQ ID NO: 18404 - protein, 130 aa, Methanosarcina mazei Go1
MEEKSVKEITAIIRMNRVQKTKDVLLECGFPSFTVRRVMGRGKQKGLCFEFNPPLPEPEKEAETCIHFIPKRMFTIVVDDENVNEVVRKIIEVNQTGHPGDGKIFVSSISEAYRIRTGESGEATVNKEMV

SEQ ID NO: 18405 - protein, 404 aa, Bacillus licheniformis ATCC 14580
MKIIVQKFGGTSVKDDRGRKLALNHIKEAVNEGYKAVVVVSAMGRKGDPYATDSLLDLLYGGQDTITEREQDMLLSCGETISSVVFASMLLENGIKAAALTGAQAGFLTDNNHTNAKILEMKPERLVSMLADHDAVVVAGFQGATAKGDITTIGRGGSDTSAAALGAALDAEFIDIYTDVEGVMTADPRIVEKAKPLPVITYTEICNLAYQGAKVIHPRAVEIAMQAKVPIRVRSTYSNETGTLVTSHHNSKAGSDVFERLITGIAHVKDVTQFKVPAKEGQYNVQTEVFKAMANAGISVDFFNITPSEIVYTVAGNMTDRAHSILKELGYEPAVTRNCAKVSAVGAGIMGVPGVTSKIVTALSEKGIPILQSADSHTTIWVLVHEKNMATAVNALHEVFELSK

SEQ ID NO: 18406 - protein, 479 aa, Campylobacter coli RM2228
MTTYLNYIDGKFIPHNGEFIEVLNPATKEVISRVASASLEDTKRAIEAAKKAQKVWEAKPAIERANHLKEIASLIRKNANFLTEVLMQEQGKTRVLASIEINFTADYMDYTAEWARRYEGEIIQSDRANEHIYLYKSAIGVIGGILPWNFPFFLIARKMAPALLTGNTIVIKPSSETPNNAFEFAKLVSQSSLPKGVFNLVAGKGSVVGYELSSNENIGMVSLTGSVEAGTRVMEAAAKNIIKVSLELGGKAPAIVCKDADIDLAVEAIKASRICNNGQVCNCAERAYVHTSIYDEFVDKFVKAMSKVSVGNTLKGDFDMGPLVNQAGVDNALAMLQRATAKGAIVECGGKITDTSGYYFPASVLTNVKHEDEIMQKEIFAPILPIAKFDTLDEAIDMANDCEYGLTSSIYTQNLDIAMRASREIKFGETYINRENFEAMQGFHAGFRKSGIGGADGKHGLEEYLATHVVYLQYNTNKQ

SEQ ID NO: 18407 - protein, 497 aa, Rhodopseudomonas palustris CGA009
MSPTAAARAADQAASLRDRLKDPSLLREQCYIDGAWSGTSTIAVTNPASGQTIAKVPHLGAAEATQAVEAAAQAFPAWAKLTAKQRSNILRKWFELIIANREDLALILTSEQGKPLTEALGEVDIGAAYVEFFAEEARRVYGETIPTQRADARLIAIKQPIGVCGAITPWNFPSSMITRKVSPALAAGCTVVLKPAEETPLSAFALAALAEKAGVPKRVFNVLTGDAPAIGKVLCEHPAVRFVGFTGSTEVGKILYKQASVGVKKLGLELGGNAPFIVFDDADVDAAVEGAMVSKYRNMGQTCVCANRLYVQDGVYDAFVEKLAAKVKAMKVGDGTEQGVTQGPLINEAAVEKTERHIADALSNGAKIITGGKRHALGGTFFEPTVLADVRPDALVAHEETFGPLAPVFRFKDEAEVIKLANNSPFGLASYFYARDLGRVWRVAEALESGMVGVNTGLITTEVAPFGGVKESGLGREGSHHGIEEYVEIKYVMMAGI

SEQ ID NO: 18408 - protein, 155 aa, Brassica napus
  misc_feature (152)..(152): Xaa can be any naturally occurring amino acid
MSDEEHHFESSDAGASKTYPQQAGNIRKGGYIVIKGRPCKVVEVSTSKTGKHGHAKCHFVAIDIFTSKKLEDIVPSSHNCDVPHVNRVDYQLIDISEDGFVSLLTDNGSTKDDLKLPTDEALLTQLKSGFEEGKDIVVSVMSAMGEEQMCAXKEV

SEQ ID NO: 18409 - protein, 972 aa, Azoarcus sp. EbN1
MPNASPASPLNAPLAELEQRDAFIGRHVGPNATEIATMLAAVGAPDLDTLIDQTVPPAIRLAAPLPLEGPKPEHEALADLRAIAAKNVIRKSLIGMGYYGTHTPAVILRNVMENPGWYTAYTPYQAEIAQGRLEALLNYQQMVIDLTGLELANASLLDEATAAAEAMTMARRVAKSKSNVFYVDEACFPQTIDVLRTRAGLFGFELKFGPAHDAANADAFGALLQYPNERGEIIDLSGTVAALKAKGAVVAIASDLMALVLLKSPGTMGADIALGSAQRFGVPMGFGGPHAAFFATREANVRAMPGRIIGVSKDARGKTALRMTLQTREQHIRREKANSNICTSQVLLANMSGFYAVYHGPQGLRTIAARIHRLAAILAQGLRDAGFNVPAGAFFDTLQVDTGARTAELLAACDAAGFNLRPVSDTVLGLSVDETTTGDDVATLLRLFGASGELAALDAKVGAAGGAIPAALLRDDAILTHPVFNTHHTEHEMLRYLKKLQNRDLALDHSMISLGSCTMKLNATSEMIPITWAEFANLHPFAPREQVRGYLEMIDGLAGYLKAVTGFAAISMQPNSGAQGEYAGLVAIRRYHDSRGDTHRRVCLIPKSAHGTNPASAQMCGMDVVVVACDERGNVDLADLEAKVAQHADRLAALMITYPSTHGVFEESIREICASVHRHGGQVYMDGANLNAQVGLTSPATIGADVSHMNLHKTFCIPHGGGGPGMGPIGLAAHLAPFMADHVVAATGDETRPNKGQGAVSAAPFGSASILPISWMYIAMMGDTGLKLATEVAILNANYVANRLAEHYPVLYTGSQGRVAHECILDIRPIKANTGISEVDIAKRLMDYGFHAPTMSFPVAGTIMIEPTESEDLGELDRFIAAMITIRNEIREVENGAWPTDDNPLKNAPHTQADFIAADGAQWSRPYSREQAVFPLPWVAENKFWPSVNRIDDVYGDRNLFCACVPIEDYAS

SEQ ID NO: 18410 - protein, 386 aa, Vicia faba
GGELFDRIIQRGHYSEKAAAQLARVIIGIVEACHSLGVMHRDLKPENFLFVNQKEDSPLKTIDFGLSIFFKPGGIYSDVVGSPYYVAPEVLLKQYGCEVDVWSAGVIIYILLSGVPPFWDESEQGIFEQVLQGDLDFSSGPWPSISKSAKDLVRKMLNRDPGKRLTAHEALCHPWVCVDGVAPDKPLDSAVLSRLKQFSAMNKLKKMALRVIAENLSEEEISGLKELFKMIDTDNTGQITFEKLKAGLKMFGANLNEFEIFDLLNAADVDNSGTIDYREFIAATLHLNKVGREDNLVTAFSYFDKDGSGYITQDEIQKVCKEFGMEDVHLEEMIQEADQNNDGQIDYSEFVAMMLRGNADLGNSGSKCRSTSFNIGLRKIEAQSVC

SEQ ID NO: 18411 - protein, 127 aa, Picrophilus torridus DSM 9790
MAVIVIADKNTGKTYKKEIDQNVIGLLTGRRIGDEIDGSFFEMPGYKLKITGGSANNGFPMKKDLPIAGKKRILITYTHGRKGKNGIRKRVTLRGNIVGSDISQLNMIITQYGPQPLEKPEEQKGEQ

SEQ ID NO: 18412 - protein, 230 aa, Triticum aestivum
MDEGNVAQQLKQMTDFIRLEAVEKAFEIEAAAAEEFQIEKLQLVEAEKKKIRQDYEKKEKQVAIKKKIEYSMQLNASRIEVLQAQDDLVKSMMDSARKELLYQSRDHQSYKKLLRILIVQSLLRLKESAVILRCRKEDLELVESVLESARNEYAEKENVYPPEIMVDHHVYLPPAPSHYKEHDLSCSGGVVMASQDGKIVFENTLDARLEVVFRKKLPEIRQSLIGQIAA

SEQ ID NO: 18413 - protein, 295 aa, Idiomarina loihiensis L2TR
MSDDNPHSANGSSGKSWAARLLQVFAGEPKSREELVDLIQDAEDRDLIDNDTREMIEGVLDVAELKVRDIMIPRSQMVTIDIHQGVDEFLPIVIDSQHSRYPVVTDNKDHVEGILLAKDLLSYGFNMTDEAFSLDKVMRPAVIVPESKRVDVLLKEFRSNRYHMAIVVDEYGGVSGLVTIEDILEEIVGEIEDETDAHGNDEKNNIRRLSPSRYSIKALTTIEDFNQYFDTNFSDEEHDTVGGLVAHGFGHLPQAGEEVKLGNMTFRVTNADKRRIQQLQVSLDSDTDTSPESAQ

SEQ ID NO: 18414 - protein, 199 aa, Candidatus Kuenenia stuttgartiensis
MTEAKQAGSILKKEGYVFDIAFTSVLKRAIKTLWYILDEMDLTWIPVQKTWRLNERHYGALQGLNKAEVAKKYGEEQVFLWRRSYDTPPPPLTLTDNRYPGNDVRYRSLSKEEIPFTESLRDTIFRFLPYWDDAIAPAIREKKRVIVVAHGNSLRALVKYLDDIPDDKIAELSIPTGIPLVYELDEGLKPTSKYYLRGD

SEQ ID NO: 18415 - protein, 473 aa, Deinococcus radiodurans R1
MPIKFGTDGWRDIIAEDFTFENVRTVARAHAQVLRSSGARSVAVGFDTRFQGQAFARVVAEVMAAQGLDVWLAQDYLPTPALSFAVVHHGAGGGVMITASHNPPQYSGYKIKGSYGGSATPAVVAQVEAALATAESYDGPRGEIRPLDIRQAYYEQLDRQLDLETLREYRGKVIHDPMGGAACGWLTGYAQHAGLQLELEEMHGRPDPLFYGVNPEPIPQNLGELTERLTRESAPTLGVITDGDADRVGAITAGGHFFNSHQIFAVLIKHLYGRGVRGRVVKTVSGSRVIELLAETLGLELLETPVGFKYITDAFLEGQQDESKAVLMGGEESGGLSSRGHIPERDGLLNSLLMIEAVAASGQSLDELFAEIEREVGFRHVYDRADLHLSEAFDKSALMQAAQGYREVAGQAVTGIKTTDGVKLALAGDASVMFRASGTEPVVRVYVEAQTPEMVQAVLTEAVQRVRSFDPMS

SEQ ID NO: 18416 - protein, 535 aa, Thermosynechococcus elongatus BP-1
MRIKYPPQTVDRVLIFDTTLRDGEQSPGASLNVDEKLTIARQLARLGVDIIEAGFPFASPGDFEAVQRIAETVGTETGPVICGLARATRQDIEAAAKALKPAYYPRIHTFIATSDIHLEYKLRKTRAEVLEIAQEMVAYAKSFVDDVEFSPEDAGRSDPEFLYEVLERVIDAGATTVNIPDTVGYTTPAEFGALIKGIKENVPNIDRAVISVHGHNDLGLAVANFLEAVKNGARQLECTINGIGERAGNAALEELVMALYVRRQYFNPFLGRPPESEAPLTNINTREIYKTSRLVSNLTGMLIQPNKAIVGANAFAHQSGIHQDGVLKHKQTYEIMDAQLIGLADNQIVLGKLSGRNAFATRLRELGFELSETELNKAFLRFKDLADKKKEITDWDLEAIAKDETQGIDLQGYQLEFVQVSCGDHARPTATVTVRTPSGEELTDAAIGTGPVDAVYRAINRVVQIPNRLIEYSVQSVTAGIDAIGEVTIRLQHQDRIYSGHAANTDIIVASAQAYMNALNRLYRGLEQRALHPQA

SEQ ID NO: 18417 - protein, 378 aa, Oryza sativa
MARRSAPLLQRLLSPTPSPSPSPPHPLAAAAVSRRTVTYMPRPGDGAPRAVTLIPGDGIGPLVTGAVRQVMEAMHAPVYFESYEVRGDMPTVPPEVIDSIRRNKVCLKGGLATPVGGGVSSLNVQLRKELDLYASLVNCFNLPGLPTRHDNVDIVVIRENTEGEYSGLEHEVVPGVVESLKVITKFCSERIAKYAFEYAYLNNRKKVTAVHKANIMKLADGLFLESCREVATKYPGIQYNEIIVDNCCMQLVAKPEQFDVMVTPNLYGNLVANTAAGIAGGTGVMPGGNVGQDHAVFEQGASAGNVGNVKVVEQKKANPVALLLSSAMMLRHLQFPSFADRLETAVKRVIAEGKYRTKDLGGSSTTQEVTDAVIAHLD

SEQ ID NO: 18418 - protein, 541 aa, Triticum aestivum
MESAPAAAFMERERLTAEVTFSGDAQAAASSEGAERLPTSIIIKIRRRLPDFARSVNLKYVRLGLRHGGSLTSYLPMLCVPVLAAAAYSFVRLDVIYLSIDLLSCVAWLGTAMLLLTVYYFKRPRPVYLVEFACYKPEDQNKITKEAFLDMTESTGCFNDETLAFQTKITTRSALGDETYLPPGVQARPPRLNMAEARLEAEAVMFGCLDALFESTGIDPRRDVRILIVNCSLFNPTPSLASMIIHHYKMREDVKSFNLGGMGCSAGLIAIDLAKDMLQANPNAYAVVLSTENITLNWYFGNDRSMLLSNCIFRMGGAAALLSNRRADAGRAKYRLLHTVRTHKGATDECFKCVYQREDDVGKVGVSLARELMTVAGDALKTNITTLGPLVLPLSEQLKFLKSLMMRRVFRAKGVRPYIPNFRRAFEHFCVHAGGRAVLEEVQRSLSLEDKDMEPSRCALHRFGNTSSSSLWYELAYAEAKGRVKRGNRVWQIGFGSGFKCNSAVWRALRDVPAVSPPGPEEKACNPWADCVAKYPPKAYV

SEQ ID NO: 18419 - protein, 173 aa, Pseudomonas putida
MSLNDLNTLPGVTAQADPATAQFVFNHTMLRVKDIEKSLDFYTRVLGFKLVDKRDFVEAKFSLYFLALVDPATIPADDDARHQWMKSIPGVLELTHNHGTERDADFAYHHGNTDPRGFGHICVSVPDVVAACERFEALQVPFQKRLSDGRMNHLAFIKDPDGYWVEVIQPTPL

SEQ ID NO: 18420 - protein, 278 aa, Clostridium acetobutylicum ATCC 824
MGDIINGKAESQKYKDKIIEFINERKKQGLDIPCIASITVGDDGGSLYYVNNQKKVSESLGIEFKSIFLDESIREEELIKLIEGLNVDNKIHGIMLQLPLPNHIDAKLVTSKIDANKDIDSLTDINTGKFYKGEKSFIPCTPRSIINLIKSLNVDICGKNAVVIGRSNIVGKPTAQLLLNENATVTICHSRTQNLKDICKKADIIVSAIGRPGFITDEFVNEKSIVIDVGTTVVDGKLRGDVVFDEVIKKAAYVTPVPGGVGAMTTTMLILNVCEALK

SEQ ID NO: 18421 - protein, 829 aa, Vibrio vulnificus YJ016
MKMTRRAFVKANAAASAAAVAGITLPASAANLIASSDQTKITWDKAPCRFCGTGCSVLVGTQNGKVVATQGDPEAPVNKGLNCIKGYFLSKIMYGQDRLTQPLLRMKDGKYDKEGDFTPVSWDVAFDTMAEKWKASLAKKGPTSIGMFGSGQWTVMEGYAAAKMMKAGFRSNNIDPNARHCMASAVVGFMRTFGIDEPMGCYDDFEHADSFVLWGSNMAEMHPVLWTRITDRRLSHPHVKVNVLSTYYHRSFELADSGYIFKPQSDLAIANFIANYIIQNDAVNWDFVNKHTNFKQATTDIGYGLRDDDPLQKQAKNPNSGNMTSISFEEYKKSVAPYTVEKASEMSGVAQDKLIELAKQYADPNTKVMSLWTMGMNQHTRGVWMNSLVYNIHLLTGKIATPGNSPFSLTGQPSACGTAREVGTFAHRLPADMVVANPKHRAIAEKIWKLPEGTIPPKPGFHAVLQDRMLHDGVLNCYWVQCNNNMQAGPNINGERLPGYRNPENFIVVSDPYPTATAQAADLILPTAMWIEKEGAYGNAERRTQAWYQQVGTVGEAKSDLWQVMEFSKRFKMEEVWPEELLAKAPQYRGKTMYDMLFANGQVDKFPLSEARQLNDDSHHFGFYVQKGLFEEYAEFGRGHGHDLAPYDVYHTVRGLRWPVVDGKETLWRYKEGSDPYAKKGSGWDFYGKPDGKALIISAPYEAPPESPDAEYDMWLCTGRVLEHWHTGTMTRRVPELYKAVPDAVCYIHPEDAKARGLRRGDEVLISNKRGEVRVRVETRGRNRPPQGLVFVPFFDARILINKLILDATDPLSKQTDFKKCPVKITKVA

SEQ ID NO: 18422 - protein, 378 aa, Thermosynechococcus elongatus BP-1
MYDCIVVGSGPAGGAAAYHLAKRGRRVLVLEKEALPRYKPCGGGVSPQVQSWFDFDFSPAISLKVTQMVCTWQGEEAQLLEFPPEQPMWMVRRDVFDYFLIQQAQRQGAELRPQTPVTGLTWGGDRWQVHTPSGDFTAQYLIGCDGAKGSMAKWLGFKDRQQRVGAAIEIEAAMPDHSLTAAHFDFGRLHNGYIWNFPKRDGYSIGVGTVALGRKQNLRAIGAEYAKTFGVDFNQVKVYGHPLYCWQQHQRLHTQNALLAGEAACVVDPFTAEGIRPSLLTGMLAAQAIDRALSGDPEALTNYSQQVQQEWGADMIWAKRLSTLFYRMPRTAYELAVKRLSARQRMGQIFCGQLRYRDVAANGLKLLASGFRLPGVRR

SEQ ID NO: 18423 - protein, 995 aa, Synechococcus sp. PCC 7002
MNQVMHPPSAEAELLSTSQSLLRQRLTLVEDIWQAVLQKECGQKLVERLNHLRATRTADGQSLNFSPSSISELIETLDLEDAIRAARAFALYFQLINSVEQHYEQREQQQFRRNLASANASEANGNSVHTEIAPTQAGTFDWLFPHLKHQNMPPQTIQRLLNQLDIRLVFTAHPTEIVRHTIRNKQRRIAGILRQLDQTEEGLKSLGTSDSWEIENIQQQLTEEIRLWWRTDELHQFKPQVLDEVDYALHYFEEVLFDTLPELSVRLQQALKASFPTLKVPTTNFCNFGSWVGGDRDGNPSVTPDVTWKTACYQRGLVLERYIASVESLSDVLSLSLHWSNVLPDLLHSSYQDQNIFPDVYQSLASRHRQEPYRLKSAYIKRRLENTLERNRRLANMPAWENKVEAADDKVYICGQEFLADLKLIRESLVQTEINCAALDKLICQVEIFSFVLTRLDFRQESTRHSDAIAEIVDYLSIAQILQRPKRRRKNHLGLVQELKTRRPLIPKEMHFSERTVETIQTLQVLRRLQQEFGIGICQTYIISMTNEVSDVLEVLLLAQEAGLYDPLTGMTTIRIAPLFETVDDLRNAPEIMQALFEIPLYRACLAGGYEPPADGRCDETFGDRLVPNLQEIMLGYSDSNKDSGFLSSNWEIHKAQKNLQQVADPYGIDLRIFHGRGGSVGRGGGPAYAAILAQPPNTINGRIKITEQGEVLASKYSLPDLALYHLESVSTAVIQSSLLASGFDDIQPWNRIMEDLSQRSRAAYRALIYEEPDFLDFFMSVTPIPEISQLQISSRPARRKKGNKDLSSLRAIPWVFSWTQSRFLVPAWYGVGTALQGFFEEDPVENLKLMRYFYSKWPFFRMVISKVEMTLSKVDLQMASHYVHELAEKEDIPRFEKLLEQISQEYNLTKRLILEITENEALLDGDRPLQRSVQLRNGTIVPLGFLQVSLLKRLRQYTRETQASIVHFRYSKEELLRGALLTINGIAAGMRNTG

SEQ ID NO: 18424 - protein, 242 aa, Schizosaccharomyces pombe
LFMGLSFETISSTGPNGAVIHYSPPATGSAIIDPTKIYLCDSGAQYKDGTTDVTRTWHFGEPSEFERQTATLALKGHIALANIVFPKGTTGYMIDVLARQYLWKYGLDYLHGTGHGVGSFLNVHELPVGIGSREVFNSAPLQAGMVTSNEPGFYEDGHFGYRVENCVYITEVNTENRFAGRTYLGLKDLTLAPHCQKLIDPSLLSPEEVKYLNEYHSEVYTTLSPMLSVSAKKWLSKHTSPI

SEQ ID NO: 18425 - protein, 196 aa, Triticum aestivum
MSTKLLNSLSLTRLLGLRRNPIDLYTASRAWISSTSFSGVHEKNGMGVEADGDLADSWKDADFRGVYRAIICGSVGQVPVQKKLRNGHTVTVFTVGTGGMFDQRRVGAENLPMPAQWHRIAVHNAQLGAYAVQKLVKNAAVYVEGEIETRVYNDDINNLVKIVPEICVRYDGKIHLVQSGGSDVSKSLEELREGLF

SEQ ID NO: 18426 - protein, 412 aa, Bacillus licheniformis ATCC 14580
MNSKRVVITGLGALSPLGNDVKTSWNNAINGVSGVGPITRVNADEYPAKVAAELKDFKIEDYMDKKEARKMDRFTQYAVVSAKMAVEDAGLDINESNADRIGVWVGSGIGGLETLEQQFETFLTKGPRRVSPFFVPMMIPDMATGQISISLGAKGVNSCTVTACATGTNSIGDAFKVIQRGDADVMISGGTEAPLTRMSFAGFSANKALSTNPDPKTASRPFDKNRDGFVMGEGAGIVVLEELEHALNRGATIYAEVVGYGSTGDAYHITAPAPNGEGGVRAMKEAIKDAGLSPVDIDYINAHGTSTPYNDKFETIAIKEVFGEHAYKLAVSSTKSMTGHLLGAAGGIEAIFSVLAIKEGIIPPTINIETPDEDCDLDYVPDQARRQDVNVVLSNSLGFGGHNATLIFKKYE

SEQ ID NO: 18427 - protein, 340 aa, Magnaporthe grisea 70-15
MSNSRVIKIGTRRSPLAIRQVEHTVALLQKAHPDITFEVNAIATQGDKDKVSPLPSMGKGMWTNELEAMLTTGEVDFIVHCLKDMPTTLPDNCELGAVMEREDPRDVVVIKPKHVQAGCKTIADLPKGSLVGTSSPRRSSQLKRWYPELRFRDYRGNIDTRLRKLDAEDGEFDCIILAAAGLHRMDQHSRIAQYLDSTTEGGGVLHAVGQGALGLEVRKGDIETLKVIECLVDMPTMKAGWAERTVMRTLEGGCSVPIGVETSWSDEGKTLRLRATVVALDGSEAVDADASASVSNQEEAEALGKQVSQVLVERGAKKILDVITQTRLAPPVKTVAGAAA

SEQ ID NO: 18428 - protein, 576 aa, Listeria monocytogenes str. 4b F2365
MKKVKASETLVQTLKNWGIDHVYGLPGDSIDTVVDALRKEQEAIEFIHVRHEEVATLAAAAYTKLTGKIGVALSIGGPGAIHLLNGMYDAKMDHVPMLVLAGQVTTDVLNTGFFQEVNLPAIFEDVAVYNKQIDNAETLADVVDEAIRTAYKEKGVAVLTIPNDIPSQVIKASLEAKPVKFEQENPKLDEAAIQEAVARIEKAEKPVILAGLGTKHAGPELIAFSEKLKIPIIHSLPAKTIVPDNHPNALGNLGKIGTKPAYEAMQETDLLLMFGNDYPYSDYLPKKADCIQIDIDPAKISKRFPATVGLVGDAAEIIGNLTAKTAPVEERKFLQACQENMQEWWKWLEEDIAQTTDPIAPEVVMANIQKIADKDAIFSIDVGTATVWSTRYLHLAPQNDFIVSAWLGTMGCGLPGAIAAKKAFPDRQAIAIVGDGGFSMVMQDFVTAVGLNMPMIVVVLNNQQLSFIKYEQQSAGELNYAIDLPDINYAKFAESCGGIGFRVEKMADLEAAFENAKLATKPVIIDVSVDSAAAPLPGKIVMDEALGYTKFEIQSVLEDHRFAKMPPLKTILRRFL

SEQ ID NO: 18429 - protein, 327 aa, Bacteroides thetaiotaomicron VPI-5482
MDNKYIGILTSGGDASGMNAAIRAVTRAAIFNGFKVKGIYRGYEGLIAGEVKELTTEDVSSIIQRGGTILKTARSETFTTPEGRKKAYKVIQKENINALIIIGGDGSLTGARIFAEEYDVTCIGLPGTIDNDLYGTDFTIGYDTALNTIVECVDKIRDTATSHDRIFFVEVMGRDAGFLAQNSAIASGAEAAIIPEDRTDVDQLETFIGRGFRKTKNSSIVIVTESPENKNGGAIYYADRVKKEYPGYDVRVSILGHLQRGGAPSANDRILASRLGEAAIQALMEGQRNVMIGIRNNEIVYVPFVQAIKKDKPIDKSLIRVLNELSI

SEQ ID NO: 18430 - protein, 561 aa, Synechococcus elongatus PCC 6301
MTLPEDFQFDAIADAIAEIKAGRSVVVVDDENRENEGDLICAAQFATPEKINFMAVEARGLICLAMTGDRLDQLDLPLMVDRNTDSNQTAFTVSIDAAPHLGVSTGISAEDRARTIQATINPLTKPHDLRRPGHIFPLRSREGGVLKRAGHTEAAVDLARMAGLYPAGVICEIQNPNGSMARLPDLIDYARQHRLKLISIADLISYRLQHERFVIRETIATLPSEFGQFTIFAYRNSLDGSEHVALVKGDPSRFSQQPVMVRVHSECLTGDAFGSLRCDCRMQLQAAMKMIENAGQGVIVYLRQEGRGIGLINKLKAYSLQDLGLDTVEANARLGFPADLRNYGVGAQILNDLGVTRIRLITNNPRKIAGLKGYGLEVVDRVPLLIEATPYNSSYLATKGEKLGHLLLKTHLAAIALHLTPELQNNPYRQTLIGQIRSLVQGEGLFLQEELRSVASALFGPQVLTLQVGLAQSEAIAADWYRSPDSPLADQLQHCLEQMAAIDGLEDLEFLLADGHDPLTSLQVQLDRQSLPLPDLSRQFKTLKLQQIYHLQLQERPSFVS

SEQ ID NO: 18431 - protein, 117 aa, Methanosarcina mazei Go1
MVAMKYVIAMIRPERLDAVKRELQKIEVSRLTVSSVSGYGAQKGYMEIYRAMEYDANLLEKIKIEIAVNDEFLEPTIEAIKTGAKGSDGYVGSGKIFVLPLENVIRIRTNETGPEAI

SEQ ID NO: 18432 - protein, 171 aa, Triticum aestivum
MGAAESSSKLASSVHGFSVKDARGNDVELSRYKGKVLLIVNVASQCGLTNSNYTELGSLHKKYGEKGFEILAFPCNQFVGQEPGTNEQIAEFACTRFKADFPVFGKVDVNGGKAAPLYKFLKSERGGLFGERIKWNFTKFLVDKDGHVVSRYAPTSSPLSIENDIQKLLEA

SEQ ID NO: 18433 - protein, 444 aa, Lactobacillus helveticus
MNVTFSYEKEPLINQLNMNIAPGFNLLIGPTGCGKSTLLKIIAGLYPKYAGKLTGKIDLHGQKAAMMFQNAAEQFTMTTPREEIIFALENLQIKAKDYDLHIKKAVEFTKIADLLDQKINTLSGGQQQHVALAVLIAMDVDVFLLDEPFASCDPNTRHFLIEKLASLAETGRTIILSDHVLDDYEKICDHLYQFEGKTVKELSANEKNKLFKQNKQFHEQSYSFALPTGTPVFELNKTQIKQNRLLLKQNKLKIYGKTTLITGSNGVGKTSLFKAMTKMIPYKGNFTYLDNEISKIKYRKYLSQIAQFFQKASDQFLTVTVKDEIELSKKDRNNFFTDAKIDEWLEKLQLKQHLDQVVYSLSGGQQKKLQILLMLMTKHNVLLIDEPLSGLDHESVDLVLQLMQECQEKLQQTFLIISHQIDALADFCDYRLVFADQQLKYVEE

SEQ ID NO: 18434 - protein, 610 aa, Bacteroides thetaiotaomicron VPI-5482
MNVFLPVKQLQTFLICFILMTISVSTRAADSPLLIKNLGEGHCLVRVNTSQNYLLLPVEDASPDVRISMIVNNKEVKNFDVRLAIHKVDYFVPVDLSDFSGKTVSFKFKMNSNDPIRVNLSPDNTACCKEMKLSDTFDTTNREKFRPTYHFSPLYGWMNDPNGMVYKDGEYHLFYQYNPYGSKWGNMNWGHAISKDLVNWEHRPVAIAPDALGTIFSGSAVVDHNNTAGFGAGAIIAIYTQNSDRQVQSIAYSTDNGRTFTKYENNPVLVSEARDFRDPKVFWYEATKRWIMVLAVGQEMQIFSSPNLKDWAFESSFGEGYGAHGNVWECPDLFELPVEGTNEKKWVLLCSLGDGPFGDSATQYFIGSFDGKKFSCDNQPNVTKWMDWGKDHYATVTWSDAPDNRRIAIAWMSNWQYANDVPTSQYRSPNSIPRDLSLFAIDGGIYLQSAPSPELLKLRGVSKKRSFKVNGTRIVKDLIPNNEGAYEIELSLKNQQAEIIGFRLYNDKGEEVDMQYDMKEKKFSMDRRKSGEVNFNENFPMLTWTAIEEDKDEMKLRLFVDRSSVEAFGDGGRFAMTNQVFPSEPYNHISFYSKGGAYKVDSFVVYKLKK

SEQ ID NO: 18435 - protein, 303 aa, Campylobacter coli RM2228
MKLVLFLNMGGATNLQDCETFLKNMFNDPYILGIKNKFIRRFVAWIITKSRVKAMRENYKQMGGKSPLNELTQSLCEKLNAKTKDFKFDFVNLYVPPFANEVLQKYTLSENDEIILFPLYPHHSSTTVTSSLEVLQNEILKQKIKAKIKIVDIFYEDELYNETIVSHILTKKSELDAKTLIFSAHSLPQSIIDKGDLYEKHVNHHVELLKERLKDHFDEIILAYQSKLGPVKWLEPNTSDILGNLDNKALIYPISFCIDCSETIFELGMEYKHLAKCDYDLITCPNDSDEFIHFILKYLSDFN

SEQ ID NO: 18436 - protein, 237 aa, Onoclea sensibilis
ATSATIRWSSSMMGGARLIVPTSSSSPAAPTTPPSTLRVMCSSNKAPSPPGLLSSLKENVDRSTKQELSRADIERTRPRPPQSSSLSGLTRFTPASTVPWPRSELDRRLRQVTLAHYPLSCRWCRPETINGRMAMVGFVWALVIDRFTGVVEKMTGLGVMDQLFNPSTSGLLWFGAVVQLFTLASIIPFVNGESTDARRWGPFNAKAERWNGRLAMVRSPPSSLARWCARLPSSKPK

SEQ ID NO: 18437 - protein, 444 aa, Prosthecochloris aestuarii DSM 271
MPFIANTDDDRRSMLQAIGVGSFEELIPDIPSEFCLKEALSLFPSMSEMEVASLLDRLASANRTSPDYVSFIGGGAYDHYIPAALKTIVSRSEFYTAYTPYQAEVSQGTLQAIYEYQSMICRLYGMSVANASLYDGATAMAEAVSMAMNVTGRSTVLVAGKIHPNTSAVLKTFIEAGGKASVVQNVLTDGVCDIAALESRMSDQIAAVIVQQPNFYGCLEDVEAIGALARSHGALFIVSADPVSLGLLNAPGRYGADIAVGEGQPLGSALNFGGPYLGIFAVAEKYVRKIPGRLVGMTKDRDGEDGFILTLQTREQHIRREKATSNICTNQALNALQAVVYLSLMGKDGLCQVAEHCLQKAHYLADKIADLPGYSLRFAGPFFREFVVNTPVDASVVVNTMMEKGFFAGYDLGIHDDSGLLIAVTEKRSRAEMDSFVENLGAIS

SEQ ID NO: 18438 - protein, 382 aa, Zea mays
PPPPPPPATAAPAPPQPSATAAVDRSSPDPDALYEEGMWQQMAMDSGATMQPGSYPERPGEPDCTYYLRTGLCRFGMSCRFNHPPDRNLAIASARMKGEYPERAGQPECQYYLKTGTCKFGPTCKFHHPREKAGIAGRVQLNTSGYPLRPNEKECAYYLKTGHCKYANTCKFHHPELFNVVPSSRGSPIYTSVHSSASAGPQSYTGTMPSWAFPRASFIPSPRWQSPSNYAPMIVPQGLVQMPSWNSYTGQLQSPGAQQTYGSSQQGEASTGNQGMLSPYRSSSFPVPQYALQRENVFPERPDEPECQYYMKTGDCKFGAVCKFHHPRVRSLPPPDCVLSPMGLPLRPGEELCKFYSRYGICKFGANCKFDHPTVVAPMVYA

SEQ ID NO: 18439 - protein, 102 aa, Glycine max
  misc_feature (85)..(85): Xaa can be any naturally occurring amino acid
MAAYREPMNMNMSDRAPVSPQQPHSPWHSPVPYLFGGLAAMLGLIAFALLILACSYWKLSGYLEGNGETERDLEAGETEQDQKPXKPYEEKIGPNPPPLTFP

SEQ ID NO: 18440 - protein, 583 aa, Agrobacterium tumefaciens str. C58
MASRRPRTAQGGRDMDGKITTISKGMTDASVKYRPYPTINIPDRTWPGKTIDKAPIWCSVDLRDGNQSLVNPMGHDRKARMFKLLLEMGFKEIEIGFPSASQTDFDFARWCVEEGNVPDDVSLQVLVQCRPELITRTFEALEGANKPIIHFYNSTSELQRRVVFGKDVHGIKQIAVDAAKMITDMAAKAGGGFRFEYSPESFTGTELEVALEICNAVVEVVKPTADNKLILNLPSTVEMATPNIYADQIEWMCRNIDNRENVIISLHPHNDRGTGIAATELALMAGADRVEGTLFGNGERTGNVDVVTLALNMYTQGVDPELDCRDIERIKAVYEYSNEMTIPERHPYVGELVYTAFSGSHQDAINKGMKAIKVANHPVWEVPYLPIDPKDVGRSYEAIIRINSQSGKGGIAYILQQDYGINLPRNLQVEFREDIQRITDEEGVELPAKRIYERFIERYVTQPNARIKFVDHHTYPAGDFKGVRIVAAEITDNGEVKRIEGKGTGPIDGFINALSVYLGVDLSVNDYSEHSLQHGSNASAIAYVEMEHPGGKLFGAGVNTNIVAASLEAIVSAANRVLEERAK

SEQ ID NO: 18441 - protein, 231 aa, Glossina tachinoides S-endosymbiont
IGVGGGGGNAVEHMVRERIEGVDFFAVNTDAQALRKTAVGQTIQIGSGITKGLGAGANPEVGRHSAEEDREALRAALEGADMVFIAAGMGGGTGTGAAPVVAEVAKDLGILTVAVVTKPFNFEGKKRMAFAEQGIAELSKHVDSLITIPNDKLLKVLGRGISLLDAFGAANDVLKGAVQGIAELITRPGLMNVDFADVRTVMSEMGYAMMGSGVACGEDRAEEAAEMAISS

SEQ ID NO: 18442 - protein, 587 aa, Zea mays
MGSVAMDADYGAPRELSPLQKARALYRPETPPCLQGPTVSVEYGDAAIAADVAGAHVISHAFPHTYGQPLVHFLTKTANVHDATIVTEHPVVRIGVVFSGRQSPGGHNVIWGLYDVVKAHNSNSKIIGFLGGTDGLFAQKTIEITDEALPSYKNQGGYDMLGRTRDQIRTTEQVKATIGTCQALKLDALVIIGGVTSNTDAAQLAETFAQLKCPTKVVGVPVTLNGDLKNQFVETTVGFDTICKVNSQLISNACIDALSAEKYYYFIRMMGRKASHVALECALQSHPNMVILGEEVSVSKLTIFDITKQICDAVQARAEKDKYHGVVLIPEGLVESIPELYALLQEIHGLHNKGVSVENISSHLSPWASALFEFLPPFIRKQLLLHPGSDDSAQLSQIEIEKLLAQLVETEMDKRLVLGHVCYHIVAAGLNGYMATVTNLKSPVNKWKCGAAPITSMMTVKRWSRGAATSQIGKPAVHMASVDLKGKAYELLRQNSSSFMMEDIYRNPGPLQFEGSGADTKPISLCVEDQDYMGRIKKLQEYLEKVKSIVKPGCSQDVLKAAVSAMASVTEMLTIMSSLSFSGQATI

SEQ ID NO: 18443 - protein, 231 aa, Sitophilus oryzae P-endosymbiont
IGVGGGGGNAVEHMVRERIEGVDFFAVNTDAQALRKTAVGQTIQIGSGITKGLGAGANPEVGRNSAEEDREALRAALEGADMVFIAAGMGGGTGTGAAPVVAEVAKDLGILTVAVVTKPFNFEGKKRMAFAEQGIAELSKHVDSLITIPNDKLLKVLGRGISLLDAFGAANDVLKGAVQGIAELITRPGLMNVDFADVRTVMSEMGYAMMGSGVACGEDRAEEAAEMAISS

SEQ ID NO: 18444 - protein, 253 aa, Triticum aestivum
  misc_feature (31)..(31): Xaa can be any naturally occurring amino acid
  misc_feature (33)..(33): Xaa can be any naturally occurring amino acid
MKLNIANPTTGCQKKVEIDDDMKLRNLFIVXIXRISQEVVGDLLGEEFEGYIFKIMGGCDKQGFPMKQGVLTPGRVRLLLHRGTSCFRGHGRRVGERRRKSVRGCIVSQDLSVINLVIVKKGKNDLPGLTDTEKPRMRGPKRASKIKKLFNLGKDDDVRQYVNTYRRSFTNKKGKTVSKAPKIQRLVTPLTLQRKRARIADKKKRIAKKKSEAAEYQKLLAQRLKEQRDRRSESMAKRRSKLSAATKAPAASA

SEQ ID NO: 18445 - protein, 668 aa, Thermosynechococcus elongatus BP-1
MTLAIAPFPITAIVGQEAIKLALLLAAVDPGLGGVIIAGRRGTAKSVLARGIHALLPPIEVIDQGEIPVPIIANPDPECPQEWDSRLQAWRQSHPHGELKTKVIPAPFVQIPLGVTEDRLLGAVDVSQSVQRGEAVFQPGLLAAAHRGVLYVDEMNLLDEQLANVLMAVLSAGRNQIEREGISLDHPCRPLLIATFNPEEGEVPPHLLDRFAIALSADQVLGLDERVAAVDHATQFADSPQAFLQQYEAELEDLRTQIILAREWLKEVKIQRQQIAYLVTEALRAGVQGHRAELFAVRVAKAHAALNGRSEVNAEDLRRAVELVIVPRATQLEPPPEQPPPPPPPPPENQQSDPNAEPDEPETPPEEQQQTPPIPEEFVFEADGTVLDESVLYFAQLTQRQGKSGSRSLIYSQDRGRYIRPILPRGRGGRIAVDATLRSAAPYQKSRRLRQPQRRVIVENSDLRIKRLVRKAGALIIFVVDASGSMALNRMNSAKGAVLRLLTQAYQNRDMVALIPFRGEQAEVLLPPTRSIEAARRRLETLPCGGGSPLAHGLTQAVRVGLNARQSGEIGQVMIVAITDGRGNVPLSRSLGETLPPQTKPDVKAEVLEIAAKIQALGLKLLVIDTENKFVSTGMGKELAQQAGGKYYHLPKATDQAIAQVTQNALQF

SEQ ID NO: 18446 - protein, 231 aa, Sitophilus zeamais P-endosymbiont
IGVGGGGGNAVEHMVRERIEGVDFFAVNTDAQALRKTAVGQTIQIGSGITKGLGAGANPEVGRNSAEEDREALRAALEGADMVFIAAGMGGGTGTGAAPVVAEVAKDLGILTVAVVTKPFNFEGKKRMAFAEQGIAELSKHVDSLITIPNDKLLKVLGRGISLLDAFGAANNVLKGAVQGIAELITRPGLMNVDFADVRTVMSEMGYAMMGSGVACGEDRAEEAAEMAISS

SEQ ID NO: 18447 - protein, 356 aa, Clostridium acetobutylicum ATCC 824
MYSERIKNLRKAMVNKGIDGVLLISDPNRNYMSGFTGDESFSIITLDKAIFITDSRFTEQAKQQVNENYEVVQYSGPFSSFLGNMVEKLNISKLGFEEDIISVSIYDSYKKSVKAELVPLGGMVEELRMIKDENEVDTIKKAAAIADKAFSHMLKFIKKGMTEREVGLELEFTMKKLGAKDLSFPSIIASGERSCLPHGQATDKILKEGEFLTMDFGCVFNDYCSDMTRTIVIGKPNDKMKEIYDVVLKANKEALKVIKSGVTGREVDKVARDIIASHGYGENFGHGLGHGVGRQIHEGPRVSPASETVLKSGMIVTDEPGIYIPGFGGVRIEDLIVVKDDGCVCLSESPKELICL

SEQ ID NO: 18448 - protein, 301 aa, Zea mays
MKLNIANPTTGCQKKVEIDDDQKLRNLYDKRISQEVVGDLLGEEFKGYIFKIMGGCDKQGFPMKQGVLTSGRVRLLLHRGTPCFRGFGRRNGERRRKSVRGCIVSQDLSVINLVIVKKGENDLPGLTDTEKPRMRGPKRASKIKKLFNLGKDDDVRSYVNTYRRTFLNKKGKKVSKAPKIQRLVTPLTLQRKRARIADKKKRIAKKKSEAAEYQKLLAQRLKEQRDRRSESMAKRRSKLSAATKAPAASALDGYSPLHFVGKIYPLLSVFLGLVIEAVLREHGYFIAVSFVTGSTFFGVCT

SEQ ID NO: 18449 - protein, 249 aa, Bacteroides thetaiotaomicron VPI-5482
MKRIVLLRHGESLWNKENRFTGWTDVDLSEKGVEEACKAGDALREAGFSFEAAYTSYLKRAVKTLNCVLDRLDKDWIPVEKTWRLNEKHYGMLQGLNKSETAVQYGEEQVHIWRRSYDVAPAPVGKDDPRNPGMDIRYAGVPDSELPRTESLKDTIGRVMPYWKCIIFPALMYKDSLLVVAHGNSLRGIIKHLKGISDTDISNLNLPTAVPYVFEFDDRLVLVKDYYLGNPEEIRKRAEAVAKQGMAKK

SEQ ID NO: 18450 - protein, 544 aa, Arabidopsis thaliana
MASLQLYGVKTPGLALSSKRLEFASKGACFSVTLPSSSAVFRDVEHSCRNIGLRVSCEALRVDLLQRKEPETCDSSGTGKELTCVMKFGGSSVGSAERMKEVANLIFSFPDERPVIVLSAMGKTINKLLKAGEKAVTCGVTNVGSIEELSFIKELHLRTAHELGVETTVIEKHLEGLHQLLKGISMMKELTLRTRDYLVSFGECMSTRLFSAYLNKIGHKARQYDAFEIGFITTDDFTNADILEATYPAVSKTLVGDWSKENAVPVVTGYLGKGWRSCAITTLGRGGSDLTATTIGKALGLREIQVWKDVDGVLTCDPNIYPGAQSVPYLTFDEAAELAYFGAQVLHPLSMRPARDGDIPVRVKNSYNPTAPGTVITRSRDMSKAVLTSIVLKRNVTMLDIASTRMLGQYGFLAKVFTTFEDLGISVDVVATSEVSISLTLDPAKLWGRELIQRVNELDNLVEELEKIAVVKLLQRRSIISLIGNVQKSSLILEKVFQVFRSNGVNVQMISQGASKVNISLIVNDEEAEQCVRALHSAFFETDP

SEQ ID NO: 18451 - protein, 1092 aa, Solibacter usitatus Ellin6076
MNTWLNTVIAEFARHPWRYALLVACVAAGICVASLNKPSTAMLLRVGYSDFFPYVARDELGRPIGLAVELVQEAAARSGVELRWIAIDDAEQALRTGQIDLYPILTATAERKRDLYPSIPWWEVTNSLLSLRDHPLKNPAAAAGRRIAIRNRSTSDVLAAVVLPGAAVVRMPTGRVSIGALCAGSVDGVLLDARLIYEAMLDRPEGCADRKFMVVPLPQTSLPLATFARSPYPRAVRRLYAAIEQATLDGTMTAIANRWFAIPQQRYVQQRLAGRQRYLLGLLFAACVLLLTAFTWWHYRRTLRIRRTAENAWTRAVEAERRFETFMAHTPAISFIKDAAGRMIYVNHAFVRFHGFSAAQSIGRLDTELFGESVAGIRERDAEVLQTGRPVQYLLPLPGTDGALYYWLVLKFLLRGEAGETRIGVVAIDISDQQRAAELIARSEERYRMLFEEAPVAIHEIDRDGLVTRINRAGRMLCGYSESEIIGRHASEFVAPHYREESRAAVHAKMKGTRPLAPFERHYQRKDGRLLRVEVHETAIFDHGGEIQGLRSCLIDLTERYEAQERLDAFALQLQQNNSALALALESARQATRLKSQFLANMSHEIRTPMNGVLGMTELLVQSGLTEEQRSLALSVTQSGEHLLAIINDILDFSKIESGKLELEATPFDPTATIEAVIELMAPTAHIKNLELTYWIAAEMPARVRGDAARLRQVLLNLLGNALKFTAEGEIAIQATFDAAADRLRVSVADTGIGIPEAAIPHLFAAFTQADNSTTRRFGGTGLGLTIAKSIVELMDGEIGIESRYGHGSTFWFTASLPAVAQAAAPPAPLPPAAILIVDDNASSRAILERHIALWGLRAETAVDGAHALALLRSHPFDAALIDTQIPGTDVVALLHEIAAESALRSTSIIRLSSIGILPDLGVASSIHKPVKPEVLYECLSRILQPVATLASAARVPAASSPLHAARGRVLIAEDNAVNQRVARLQVAHCGFDSDVVSNGQEALDALSHMNYALVLMDCQMPGMDGYAATRELRRRENGARHLPVIALTANAFATDREACLEAGMDDHLSKPVSLRSLAAILDRWSIAARES

SEQ ID NO: 18452 - protein, 959 aa, Photobacterium profundum SS9
MTDMTLLNALSDDQDFAGRHNGPNAAQQNIMLKAISAESVEQLIAQTVPADIRLPEPMKLDPAQSEADMLTSLKAIASKNIINRSYIGQGYYNNLTPNVVLRNVLENPGWYTAYTPYQPEISQGRLESLLNYQQMIMDLTSMELANASLLDEATAAAEAMTLCLRAGKSKSKAFFVSNDLHPQTVDVVRTRAEYIGIEIITGSVEELDNHDVFGALVQYPGTTGSITDLTDIIEKAHAKKTLVAVASDLLALTLLKAPGEMGADVVIGSAQRFGVPMGFGGPHAGFMATKDKHKRTMPGRVIGVSKDARGNQSLRMAMQTREQHIRREKATSNICTAQALLANMAAFYALYHGPEGLRKIGRRVHHLTAILAAGLRNSGIELASDTFFDTITLNTGKKTDDFYKKALAAGINLRKFDVQLGISLDETTKVSDVEELLAIFTGNKLKASMFTADIAADEFAAIPESCRRTSKYLTHPVFNEHHSETQMMRYMKKLENKDYSLTHGMIPLGSCTMKLNAAAEMIPITWPEFGSLHPFAPADQTKGYQELASKLSEMLCSVTGYDAFSLQPNSGAQGEYAGLIAIQRYHQHNGDSHRNVCLIPSSAHGTNPASAAMVSMKVVVVGCDEKGNVDVEDLKVKIEKHRDNLSCIMITYPSTHGVYEEAVREVCDLVHDAGGQVYLDGANMNAQVGLTNPGFIGSDVSHLNLHKTFCIPHGGGGPGMGPIGVKSHLAPFLPGHVQSTSDEGQQYAVSAAELGSASILPISYAYIAMMGEEGLTEATKLAILNANYVMERLRPHYPVLYRGTEGRIAHECIIDIRPLKEASGISEEDVAKRLMDYGFHAPTMSFPVAGTLMIEPTESEDLAELDRFCDAMIAIRQEIARVQEGEWPIDDNPLVHAPHTQADLMETEWNRAYSREIACFPTDHTRASKYWPTVNRVDNVFGDRNLICSCPSIDSYIED

SEQ ID NO: 18453 - protein, 364 aa, Streptococcus pneumoniae TIGR4
MKKAILMMTFGSPEEIIFEGVADFFTNIRRGVRPQDHEIQTLYDNYVRIGGTPLQKITRQEVALVEARLGSEYSVYFANKFSSPFIPDVIGQMEADGIEQCICLILEPHYSFYSVMGYEKFLESKQIQFLVIKDWYQEEALLNYWADEIAKILKEEVKQDSFKVIFSAHSVPIFALDFGDPYIDQIFENSKLVAEKLGLSSEQYTNTWQSESDIGIPWIKPDVLEYLREQTEHPDHYIFVPISFISEHIEVLFDNDVECYDLCQEFGVNYHRPPMPNTDSRLIDALVNTVRVNENQEFKEFLPEEETFDELVPSDETKNILAESQDLQMPEFVKKLIEKKGRENVKMPYLIKKMLEKAGKLPKE

SEQ ID NO: 18454 - protein, 305 aa, Debaryomyces hansenii CBS767
MSLVTLKNQIGGLLKKSKSDEELERIDASLSNNNRPYGSTNDGDDRTQEIIVEEAMANASKLNGSVSSEDDEKVGFFDKFDPRVMSDIIIGLSDGLTVPFALTAGLSSLGNSKLVITGGMAELVSGAISMGLGGFLAAKSELEYYKSQVKKEKLEFFKKPEMINQDAAEIMFELGASEQTIGSFLKDLDSQPKNLIDFVIRFGKGLEEPAEGREITSALTIGLAYFLGGFVPLLPYFFCTVVKTGLITSVIVMLITLFIFGYIKTSISLGEDCGRGKKFIEGIQMVAIGSVAAGAAWTLVYFIDN

SEQ ID NO: 18455 - protein, 627 aa, Bacteroides thetaiotaomicron VPI-5482
MKTTPWIKLCKGAVLALTVSFGLTYCQSTKSTFTLEQKGDSLTIVHITHPTNYILLPIEEEEADESQVRLDTGNAADTDMDIRLAQTKVDYFVPFALPADTKVATLRIQKKSKDALCWEEIKLSDTFDTTNTDKFRPVYHHTPLYGWMNDANGLVYKDGEYHLYYQYNPYGSKWGNMHWGHSVSKDLMHWEHLAPAIARDTLGHIFSGSSIVDQENVAGYGAGSILAYYTSASDKNGQIQCLAYSKDNGRTFTKYEKNPVLRPSDGLKDFRDPKVFWYAPESKWVMIVSADKEMRFYDSHNLKDWNYLSSFGEGYGVQPCQFECPDMVELPVDGDINYKKWALIVNVNPGCYFGGSATQYFIGDFDGTKFICDNQPNVTKWLDWGKDHYATVCFSNTGDRVVAVPWMSNWQYCNIVPTRQFRSANALPRELGLYTQDNDIYLSAAPVAETKNLRKESKDVPSFTVDKDYHIESLLTDNEGAYELSLNIEAGKAEIMGFSLFNDKGEKVDIYFNLPEKKLVMDRTKSGIVDFGKNSSPHEIEAHDRRKTTSINYIDDFALATWAPIQKENEYKLDVFVDKCSVEIFLDGGKIAMTNLIFPTEPYNRMCFYSKGGTFAVDSFSVYRLGL

SEQ ID NO: 18456 - protein, 498 aa, Schizosaccharomyces pombe
MSTSSKLSTNIKDLSLFDLEEFPARSYIGGKWVTAASGKTFDVENPGLNETLAPVTDMSVEETRKAIKVAHEAFLSYRNSDIKERYAILRRWYDLIMENADDLATMMTLENGKALGDAKGEVVYAAKFIDWFAGEALRISGDSSMSSNPQNRIITIKQPVGVVGIITPWNFPAAMITRKVGAALAAGCTVVIRPAAETPFTALALAKLAERAGVPAGVLNMVTANSPSEHGIELTTNPLIRKVSFTGSTNVGKILAKQSSSTLKKLSLELGGNAPFIVFEDADLEKAADALMACKFRGSGQTCVCANRIYVHSSVYDAFVDLVTERVSKFKLGYGLDAGVTHGPLISEKAISKVKQHVEDAVQKGGVVVTGGKVASNLGPMYFEPTVIINAKQGMLISEEETFGPVGALFKFDTEDEVVAWANDSPVGLAGYLFSKDISRVFRVGEALQVGMVGCNTGLVSDVLSPFGGVKESGFGREGSKYGISEYLDIKSLTISTL

SEQ ID NO: 18457 - protein, 401 aa, Gibberella zeae PH-1
MAEGSGIDRKADERMEFSTSKEVTVHPTFESMSLKENLLRGIYAYGYESPSAVQSRAIVQVCKGRDTIAQAQSGTGKTATFSISMLQVIDTAVRETQALVLSPTRELATQIQSVVMALGDYMNVQCHACIGGTNVGEDIRKLDYGQHIVSGTPGRVADMIRRRHLRTRHIKMLVLDEADELLNKGFREQIYDVYRYLPPATQVVVVSATLPYDVLDMTTKFMTDPVRILVKRDELTLEGLKQYFIAVEKEDWKFDTLCDLYDTLTITQAVIFCNTRRKVDWLTDKMREANFTVSSMHGDMPQKERDSIMQDFRQGNSRVLISTDVWARGIDVQQVSLVINYDLPSNRENYIHRIGRSGRFGRKGVAINFVTTEDVRILRDIELYYSTQIDEMPMNVADLIA

SEQ ID NO: 18458 - protein, 198 aa, Trifolium pratense
MAVSSYQSIMSSSMTSISSRSRVNQFSNIPSVYMPNMRRNASFKVRSMAEEEQKEQPKVPVDPITPTPTPVTPPPKPTYTRSPKISTKFSDLMAFGGPAPERINGRLAMIGFVAAMGVEIAKGQGLFEQISGGGVPWFLGTSVVLSLASLIPFFQGVSVESKSKGVMSSDAELWNGRIAMLGLIALAFTEYVKGTSLV

SEQ ID NO: 18459 - protein, 469 aa, Methanosarcina barkeri str. fusaro
MVKKMERLKKLSIVTFILLIALVSPALAATSDQNAASIEEIKTTLTFMWLLLASGLVFFMHAGFSLVETGLTRSKNTANILMKNFMTVVLGILVYWAVGWGIMYGADAAGLIGTNQFFLAGADNATWNSWFFQMVFAATGATIVSGAMAERTNFKAYLVYCIMMVAVIYPIYGHWVWSGADMALLSGADSPIVKAIGVASHDFAGSGVVHSIGGYSALAGVILVGARIGRFKNGKPIPIPGHNLTITFLGTLILALGWLGFNGGSTLNANDPYMNLVVVNTFLAAAAGALMVMIITWVKTGKPDPSLTANGLLGGLVAVTAPCGSISNWAALVIGLVAGIIIYVGVMFNENKLKLDDPVGAIAVHGYCGSWGLISVGLFSIGMGNGILADATYAAAVPGLFYGGGISLLLIQLVSVLVTMVWGFGISYIIFKILDAVIGLRVSEEEEIMGLDISEHGIRAYPEYLMREE

SEQ ID NO: 18460 - protein, 150 aa, Oryza sativa
MRVSKHTCEVRYGELQGLNKQETADRFGNEQVHKWRRSYDIPPPNGESLEMCAERAVAYFKEHVVPQLTAGKHVMIAAHGNSLRSIIMQLDKLTSQEVISLELSTGIPMLYIFKEGKFIRRGSPVGPSEASVCAYTRKLAQYRQKLDSMV

SEQ ID NO: 18461 - protein, 463 aa, Saccharomyces cerevisiae
MLSRATRTAAAKSLVKSKVARNVMAASFVKRHASTSLFKQANKVESLGSIYLSGKKISVAANPFSITSNRFKSTSIEVPPMAESLTEGSLKEYTKNVGDFIKEDELLATIETDKIDIEVNSPVSGTVTKLNFKPEDTVTVGEELAQVEPGEAPAEGSGESKPEPTEQAEPSQGVAARENSSEETASKKEAAPKKEAAPKKEVTEPKKADQPKKTVSKAQEPPVASNSFTPFPRTETRVKMNRMRLRIAERLKESQNTAASLTTFNEVDMSALMEMRKLYKDEIIKKTGTKFGFMGLFSKACTLAAKDIPAVNGAIEGDQIVYRDYTDISVAVATPKGLVTPVVRNAESLSVLDIENEIVRLSHKARDGKLTLEDMTGGTFTISNGGVFGSLYGTPIINSPQTAVLGLHGVKERPVTVNGQIVSRPMMYLALTYDHRLLDGREAVTFLKTVKELIEDPRKMLLW

SEQ ID NO: 18462 - protein, 869 aa, Mycobacterium leprae
MTRTSETTKSPAPELLTQQQAIDSLGKYGYGWADSDVAGASARRGLSEDVVRDISAKKDEPEWMLQARLKALRVFERKPMPRWGSNLDGIDFDNIKYFVRSTEKQAASWDELPEDIRNTYDRLGIPDAEKQRLVAGVAAQYESEVVYHQIRADLKDQGVVFLDTETGLREYPDIFKQYLGTVIPAGDNKFSALNTAVWSGGCLTADARINVKGKGLVSIADVQPGDEVFGVNIGCELERGKVLAKVASGTKPVYEMHVAGRALEATGNHQFLVARRVEEGKRTRWTAVWAPLEEIESGEPIAVARVLPDDSGTIFFSESELDIKNRTRQCLYFPCQNSVDLLWLLGLWLGDGHTAAPHKHMRQVAFSVPAGDPVHHTAIRVVSEQFGANVTVVNCGFIVSSKAFETWLAELGFSGDEKTKRLPAWIYSLPHEHQLALIGGLVDADGWTESSGATMSIAFASRELLEDVRQLAIGCGLYPDGRLVERTRSATCRDGRIVTSTSWRLRIQGSLDRVGTRTPGKRGKPVSNKGRRQRYVAAAGLNFSSLSTDTVGFARLKSKTLVGEKPTYDIQVVGLENFVANGIVAHNSFIYVPPGVHVDIPLQAYFRINTENMGQFERTLIIADTGSYVHYVEGCTAPIYKSDSLHSAVVEIIVKPHARVRYTTIQNWSNNVYNLVTKRARVETGATMEWIDGNIGSKVTMKYPAVWMTGEHAKGEVLSVAFAGEGQHQDTGAKMLHLASNTSSNIVSKSVARGGGRTSYRGLVQVNKGAHGSRSSVKCDALLVDTISRSDTYPYVDIREDDVTMGHEATVSKVSENQLFYLMSRGLAEDEAMAMVVRGFVEPIAKELPMEYALELNRLIELQMEGAVG

SEQ ID NO: 18463 - protein, 115 aa, Methanosarcina barkeri str. fusaro
MTKMCKIEAIIKPMKLHEVKDALEEAGYPSLTVTDVKGRGQQKGIVQQWRGKKYCVDLLPKTKIEIAAPEDKIEEIIKIIQSSAYTGEIGDGKIFVTPIETVVRIRTGERNGDAL

SEQ ID NO: 18464 - protein, 117 aa, Triticum aestivum
MARAQVLLMAAALVLMLTAAPRAAVALNCGQVDSKMKPCLTYVQGGPGPSGECCNGVRDLHNQAQSSGDRQTVCNCLKGIARGIHNLNLNNAASIPSKCNVNVPYTISPDIDCSRIY

SEQ ID NO: 18465 - protein, 587 aa, Methanosarcina mazei Go1
MEKLAKFKALGLSDSTLKALKKKGFEEPTPIQEKVIPLFLKGEADIIGQAQTGTGKTTAFGAPIIEKIPEKSGHVQAIILTPTRELAIQVSEELNSIKGDKKLYIVPIYGGQSMTQQLRVLKSGVDIVVGTPGRVIDHLERKSLNLEHIAYFVLDEADEMLNMGFIDDIKEILKSTGPNKRMLFFSATMPKAILGIVKKHMQNYEHITIEKEELTETLTEQIYFEVKESDKFEALCRIIDIEDEFYGLVFCRTKTDTSQLAQKLSDRGYLADALHGDLSQQEREKILNKFRKQKINILAATDVAARGIDIMDLTHVINYALPQDPESYVHRIGRTGRAGKQGTAITFVTSTEFRRLTYIKKTSKSEMKKGHIPEIKDVIKAKRARVRTELEETIKTEEYGDCLEMSQKLLEEYPAEKILAALLKFTFKDKFDESMYTEISSGSSYVDRKGKSRLFIAMGKADGMTPDKLSYFIQEELGDGELKVRDAEIFPHFSFVTLPFAQAETLIEIFKNKRRGSKPFVELAQKSRGRSSKDSGETRSDNRGTSRGNSRNGESRGDSRGESRGTKSTNYSRSTRSTRSTKKKDSY

SEQ ID NO: 18466 - protein, 452 aa, Leifsonia xyli subsp. xyli str. CTCB07
MRESQFLLPDVGEGLTEAEIVSWKVAPGDSVAVNQVIVEIETAKSLVELPSPFEGTVGELLVVEGQTVEVGTPIFTVNGGEADHGVTEPAGEAEQAAVDAAASVTHESEEPKAGAVIVGYGSAGHGTSRRRVTHPGAAARPAAFPPAESAAEPGRAPSTPVPPSGGGPVIAKPPIRKLAKDLGVDLSTVTATGAIGEVTREDVLREGTQASVFRNIQTPEWPDDREERILVKGVRKAIANAMVTSAFSAPHVSVFVDVDATRTMEFVKRLKSAPDFVGVKVSPLLIMAKAIVWAVRRNPTVNSTWTDEEIIVRHYVNLGIAAATPRGLIVPNVKEAQGMSLLELAGALEELTLTAREGKTQPADMANGTITITNIGVFGMDTGTPILNPGEVGIVALGTIKQKPWVVDGEVRPRFVTTLGGSFDHRVVDGDVASRFLADVASIIEEPALLLD

SEQ ID NO: 18467 - protein, 261 aa, Picrophilus torridus DSM 9790
MMILRTMDLIIASRMDEASMLMAEKIIDLYDFNRLNENEYQKDGFKLMFIDDLHIYHNMEKLDFDTLIFLSRHSSSAGVKSLTVHSIGNYRKAELGGYDNKTVLSAPYEMSSSLRSIKELYNDDGYNITFEATHHGPYTKNRSYFIEIGTSGEDWHNDKILEIMARSVIEKNVKRFRSGIGIGGGHYAPKISDYFFNNDINIGHIIPKYVSETIKDNQIIESIENTENCSFILIDWKGSPSRLRSLALDAADKCSLELIKI

SEQ ID NO: 18468 - protein, 337 aa, Leifsonia xyli subsp. xyli str. CTCB07
MERAPALAEPEPRVQSLPMVKALNAGLRQALVADPKVLILGEDVGPLGGVFRVTEGLQSEFGASRVVDTPLAEAGIVGTAIGLAMRGYRPVVEIQFNGFVFPGFDQITTQLAKMANRHSGAVSMPVVIRIPHGGHIGAVEHHQEAPEAYFAHTAGLRIVAPSTPHDAYWMIQEAIASDDPVIFFEPMSRYWPKGEVDTLENPLPLHASRIVRSGTDATIVAWAGMVPVALRAAEIAAEEGRSLEVVDLRSLAPIDYAPVLRSVQKTGRLVVAQEAPGIVSVGSEVAAVVGEKAFYSLEAPVLRVAGFDTPFPPAKLESLYLPDADRILEVVDRSLAY

SEQ ID NO: 18469 - protein, 148 aa, Nicotiana tabacum
MEAATKTTKGAGGRKGGGPRKKSVTKSVKAGLQFPVGRIARFLKKGRYAQRVGSGAPIYLAAVLEYLAAEVLELAGNAARDNKKSRIIPRHVLLAVRNDEELGKLLSGVTIASGGVLPNINPVLLPKKSAAAEEKASTPKATKSPKKA

SEQ ID NO: 18470 - protein, 636 aa, Zea mays
MLSTRTAAVAASASPASPWKVGGRSEGGASCDGCRTYRNTLRRRAAPAKVRALPPRRVDAVAMVSNAETETEKEQEEAAAASEELPVMPWATYVASGYTLLRDPHHNKGLAFTEEERDGHYLRGLLPPAVLFQELQIKKFMNTLRQYQTPLQRYIAMMNLQETDERLFYKLLIDNVVELLPFVYTPTVGEACQKYGSIFGRPQGLYVSLKDKGKVLEVLRNWPHRNIQVICVTDGERILGLGDLGCQGMGIPVGKLALYTALGGVDPSVCLPITIDVGTNNEKLLNDEFYIGLRQKRATGEEYDELIEEFMSAVKQFYGEKVLIQFEDFANHNAFDLLEKYSKSHLVFNDDIQGTASVVIAGLLAALKMVGGTLAEQTYLFLGAGEAGTGIAELIALEISKQTNAPLEECRKKVWLVDSKGLIVDSRKGSLQPFKKPWAHEHEPLKTLYDAVQSIKPTVLIGTSGVGRTFTKEIIEAMSSFNERPIIFSLSNPTSHSECTAEQAYTWSQGRSIFASGSPFAPVEYEGKTFVPGQSNNAYIFPGLGLGLVISGAVRVHEDMLLAASKALADQATQDNFEKGSIFPPFTSIRKISAHIAAAVAAKAYELGLATRLPPPSDLVKYAENCMYTPVYRNYR

SEQ ID NO: 18471 - protein, 324 aa, Synechococcus sp. WH 8102
MSGSGYKDYFQVLGVDRSADADSVKRAFRKLARQYHPDVNPGNASAEARFKEISEAYEVLSDPDKRRRYEQFGQYWNQSGASGGAAGPGMDVDFGRYGNFDDFIGDLLGRFGGPAGGGGFQSSGFPGGGFSGGGFPRGNAAARTPVNLDAEASVSITFAEAFRGTERTLSVNNERVQVRIPSGVKNGSRLRLKDKGNLQPGTGRRGDLFLNLNVKDHPVWRLEDDQLKADLPVSLDELALGATVTVMTPDGEAQVAIPACTAPGRSLRLKSKGWPAKGGRGDLLLTLALVMPTSWSPEEQQLLEQLRRQRSESPRHGWLRSAAL

SEQ ID NO: 18472 - protein, 122 aa, Glycine max
  misc_feature (14)..(14): Xaa can be any naturally occurring amino acid
  misc_feature (48)..(48): Xaa can be any naturally occurring amino acid
MLILNFSFLDSKAXLKMGIRGVTVSDVRGFGAQGGSKERQGGSEFSRXEDNFVAKVKMEIVVRKDQVEAVIDKIIEEARTGEIGDGKIFLIPVSDVIRIRTGERGEQAERMTGGRSDMLSAV

SEQ ID NO: 18473 - protein, 855 aa, Brassica rapa
MKGVQNSYTFCFLLVFVVLILVHPALSIYFNILSSTESLTISGNRTLVSPGDVFELGFFRTTSSSRWYLGIWYKKVYFRTYVWVANRDNPLSRSIGTLRISNMNLVLLDHSNKSVWSTNLTRGNERSPVVAELLANGNFVMRDSNNNDASGFLWQSFDFPTDTLLPEMKLGYDLKTGLNRFLTAWRNSDDPSSGDYSYKLENRELPEFYLLKSGFQVHRSGPWNGVRFSGIPENQKLSYMVYNFTENSEEVAYTFRMTNNSFYSRLKVSSDGYLQRLTLIPISIAWNLFWSSPVDIRCDMFRVCGPYAYCDGNTSPLCNCIQGFDPWNLQQWDIGEPAGGCVRRTLLSCSDDGFTKMKKMKLPDTRLAIVDRSIGLKECEKRCLSDCNCTAFANADIRNGGTGCVIWTGHLQDIRTYYDEGQDLYVRLAADDLVKKKNANWKIISLIVGVSVVLLLLLLIMFCLWKRKQNRAKAMATSIVNQQRNQNVLMNTMTQSDKRQLSRENKADEFELPLIELEAVVKATENFSNCNELGRGGFGIVYKGMLDGQEVAVKRLSKTSLQGIDEFMNEVRLIARLQHINLVRILGCCIEADEKILIYEYLENSSLDYFLFGKKRSSNLNWKDRFAITNGVARGLLYLHQDSRFRIIHRDLKPGNILLDKYMIPKISDFGMARIFARDETQVRTDNAVGTYGYMSPEYAMYGVISEKTDVFSFGVIVLEIVIGKRNRGFYQVNPENDLPSYAWTHWAEGRALEIVDPVILDSLSSLPSTFKPKEVLKCIQIGLLCIQERAEHRPTMSSVVWMLGSEATEIPQPKPPVYCLIASYSASNPSSSKQFDDDESWTVNKYTCSVIDAR

SEQ ID NO: 18474 - protein, 106 aa, Glycine max
MAMAKVFCVLLLALLGISMITTQVMATDSAYHLDGRNYGPGSLKSSQCPSECTRRCSQTQYHKPCMVFCKQCCKRCLCVPPGYYGNKSVCPCYNNWKTKRGGPKCP

SEQ ID NO: 18475 - protein, 622 aa, Bacteroides fragilis NCTC 9343
MKTTFMNVSRGVIGALAFSLGISSCQSSQSKMIFEQEGDSLTVIHITNPTQYLLLPVEEKTPEAQVCIASDSVPVDMDVRLSREKVDYFVPFALPKGEKEVAVRIRHLPKEALCWKELKLSDTFDTTNTDQYRPLYHHTPLYGWMNDANGLVYKDGEYHLFYQYNPYGSMWGNMHWGHSVSKDLVHWEHLEPALARDTLGHIFSGSSVVDDANTAGYGAGAIVAFYTSASDKNGQIQCMAYSTDNGRTFTKYEKNPVLTPFDGLKDFRDPKVFWYAPDQKWVMVVSADKEMRFYSSENLKEWTYMSGWGEGYGVQPSQFECPDMVELPVDGNPDHKKWALIVNVNPGCYFGGSATQYFIGDFDGEKFVCDNKPETVKWLDWGKDHYATVCFSNTGDRTIAVPWMSNWQYANIVPTRQFRSANALPRELSLYTQDGDIYMAAAPVEETKSLRKESREIPAFEVGDAYHVDSLLSDNKGAYEIELELAAGSAEIMGLKLFNEKGENVDIYISLPEKKLVMDRTKSGIVDFGKDSAPHAIEAHDRRKQNSINYVDDFALGTWAPVQKTGNYKLDIFVDKCSVEIFLNGGKIAMTNLIFPTTPYNQMSFYSRGGAFKVDRCKIYRL

SEQ ID NO: 18476 - protein, 401 aa, Prosthecochloris aestuarii DSM 271
MKKIGILTSGGDCGGLNAVIKGAAFMALSKGIEMYIIPNGYAGLYNLIDNEKLVLLDQARLDQFSGNFAGSEAGHSRVKIKAISNPEKYNRIKEGMKKFELDGLVVSGGDDSGSVMVDLNSNGIHCIHAPKTMDLDLQTYSVGGDSTINRIAQFVQDLKTTGRTHNRILVTEVFGRYAGHTAFRSGIAAEADCILIPEIPVDWDVVYEHIVGRFTRRIRQSDVSAGTYTIVVAEGMKNADGTDIIDESAGVDAFGHQKLAGAGKYVCQEMKKRLKADPDMPIFMKETGMFVEGIYEIPEIREIHPGHLVRSGNTSAYDVNFGYEAGAAAVILLSEGKSGVTISKVKGRKIEYIESTKAIEQRFVDLDQVALYESIGVCFGRHVAAYEPILREVDGVYDRIY

SEQ ID NO: 18477 - protein, 369 aa, Halobacterium sp. NRC-1
MPDFESRTRDCQRTLRDAGAAGAVLFPSPNLYYLSGFDETPSERLLVLVVPADGEPAFVAPALYETQLAAETWVDDIRTYTDSQDPSAVVRAVAADRGLTDGRLLVDPTMWAQFTQLLRDTLPDATWGLADAVLGSLRVRKDDAELDALRRAGGAADAAMADVRGLGADAIGMTEHELADFIADRLAAHGGTGVSFDVIAGSGPNGAKPHHTHDAREIQRGDPVVCDFGTVVDRYPSDQTRTVVFAGDPPAAFRTVHEVVRDAHRAAVDAVEPGVSAGAVDAAARRVIADAGYGDAFVHRTGHGVGLDVHEAPFIVADSDRKLDVGMVFSIEPGVYRPGEFGVRIEDLVVVTADSCEPLTDTARGWRVD

SEQ ID NO: 18478 - protein, 847 aa, Brassica oleracea
TFCFLLVFVVLILVHPALSIYFNILSSTESLTISGNRTLVSPGDVFELGFFRTTSSSRWYLGIWYKKVYFRTYVWVANRDNPLSRSIGTLRISNMNLVLLDHSNKSVWSTNLTRENERSPVVAELLANGNFVMRDSNNNDASGFLWQSFDFPTDTLLPEMKLGYNLKTGLNRFLTAWRNSDDPSSGDYSYKLENRELPEFYLLKSGFQVHRSGPWNGVRFSGIPENQKLSYMVYNFTENSEEVAYTFRMTNNSFYSRLKVSSDGYLQRLTLIPISIVWNLFWSSPVDIRCDMFRVCGPYAYCDGNTSPLCNCIQGFDPWNLQQWDIGEPAGGCVRRTLLSCSGDGFTKMKKMKLPDTRLAIVDRSIGLKECEKRCLSDCNCTAFANADIRNGGTGCVIWTGHLQDIRTYFADGQDLYVRLAAADLVKKKNANWKIISLIVGVSVVLLLLLLIMFCLWKRKQNRAKAMATSIVNQQRNQNVLMNGMTQSNKRQLSRENKADEFELPLIELEAVVKATENFSNCNELGQGGFGIVYKGMLDGQEVAVKRLSKTSLQGIDEFMNEVRLIARLQHINLVRILGCCIEADEKILIYEYLENSSLDYFLFGKKRSSNLNWKDRFAITNGVARGLLYLHQDSRFRIIHRDLKPGNILLDKYMIPKISDFGMARIFARDETQARTDNAVGTYGYMSPEYAMDGVISEKTDVFSFGVIVLEIVSGKRNRGFYQVNPENNLLSYAWSHWAEGRALEIVDPVIVDPLASLPSTFQPKEVLKCIQIGLLCIQERAEHRPTMSSVVWMLGSEATEIPQPKPPVYCLMASYYANNPSSSRQFDDDESWTVNKYTCSVIDAR

SEQ ID NO: 18479 - protein, 490 aa, Thermobifida fusca YX
MRRGEEQVSLTERPQLFIGGRWVDSKGGRKVDVHNPATGAYVGSTVLASTADIDAAVASARASFNSGVWANTPPEERAAVLHRAADLLEERAPELAKLITSELGCPIWFSERAHVPNPIRHLRYYGTLAKDFAYDERRSDGTNTSLVTQVPVGVVAAITPWNGPLSTPSLKVAPALAAGCSVILKPPPETPLTAYNLADALSQAGLPDGVLNIVPADREEGAYLVSHPDVDKVAFTGSSAAGKKIMAACAERIARVTLELGGKSAAIILDDADVDTVVPALLPMAFMVNGQACIAQTRLLVPRSRKDEFIDAFAQAVAAQRVGDPIDPATQIGPMVSRRQQERVEGYIATGRQEGARVVVGGERPSLPSELAGGWFVAPTLLAEVHNSMRVAQEEIFGPVLAVIEYDGDDEAVAIANDSVYGLSGSVWSSDEERALAIARRMRTGMVSINGRPQAANSPFGGFKQSGIGREMGPEGFHAYLETMSIAVGS

SEQ ID NO: 18480 - protein, 544 aa, Nostoc sp. PCC 7120
MTKNPSPHIWLYDTTLRDGTQREGLSISTEDKLRIAHRLDQLGIPFIEGGWPGANPKDVQFFWQLHEDPLKHSQIVAFCSTRRPHTHAADEPMLQDILAAGSSWVTIFGKSWDLHVTTGLKTTLEENLAMIRDTIEFFRSQGRCVIYDAEHWFDGYKHNRDYALQTLKAAMTAGAEWLVLCDTNGGTLPHEVSQIVQDVVEVTREDLTQLPIPQIGIHTHNDSDMAVANALAAVMAGATMVQGTINGYGERCGNANLCSLIPNLQLKLGYSCITEHQLGQLAEASRFVSEVVNLAPDEHAPFVGRSAFAHKGGIHVSAVERNPLTYEHIQPEQVGNRRRIVISEQAGISNVLAKARTFGIELDKQTPEAKQILQRLKELESEGYQFEAAEASFALLMYEALGGRQQFFEVKGFQVHCDLVEGKEMTNALATVKVAVNGKNILEAAEGNGPVAALDAALRKALVNFYPQLATFELTDYKVRILDGHTGTSAKTRALVESGNGYQRWTTVGVSPNILAASYQAVVEGLEYGLLLHAQAEAAVKASG

SEQ ID NO: 18481 - protein, 121 aa, Listeria monocytogenes
MSGLTKIEIITRPNRFHLFQKELAKIGVSGLTVTKALGTGLEKGFIELYRGTKKESNIHERMKIEIVVSTVPVEDVLRVVKETLRTGEPGDGKVFIYPLAEVVKISTGETGIDALQDKPSK

SEQ ID NO: 18482 - protein, 497 aa, Zea mays
  misc_feature (218)..(218): Xaa can be any naturally occurring amino acid
  misc_feature (227)..(227): Xaa can be any naturally occurring amino acid
  misc_feature (235)..(235): Xaa can be any naturally occurring amino acid
MASKRANAGDEQQKLSPSGLPVHKIPGSYGVPFFTPLRDRLDYFYFQGAEEYFRFRVAKHGGATVLRVNMPPGPFLSGDSRVVAVLDARSFRVLLDDSRVDKDGTLDGTYMPSLALFGGHRPLAFLDGADPRHAALKRVMIRLAAAGMQHVAPAFGAAFTATFDAVEAGMAGGASAVEFNKHNMRHMLDFTCASLFGGKLPSKAIGDGAAAKAFKWLXPWPLEDLLXHTFRLPPXLVRRDYAELTAYFADVAAGVLDDAEKAEPGAVPRDELLHNLIFLAIFNAYGGYKIFLPHVVKWLARSGPELHARLADEVRAVVPPGSASAGDAITLSDVEKMPLVKSFVWETLRMNPPVEFQYGRARQDMVVESHDAAYEVKKGEMLFGYQPLATRDERVFRRGREFVPDRFAVCSDDERRRLLDHVVWSNGPETGAAAERNKQCPGKNAVVAVGRLMVAELFRRYDTFVASVHETPVEPVVTFTSLTRASSAAGHGSSVKP

SEQ ID NO: 18483 - protein, 497 aa, Bacteroides fragilis NCTC 9343
MAKELKDLTKRSENYSQWYNDLVVKADLAEQSAVRGCMVIKPYGYAIWEKMQRQLDDMFKETGHVNAYFPLLIPKSFLSREAEHVEGFAKECAVVTHYRLKNAEDGSGVVVDPAAKLEEELIIRPTSETIIWNTYKNWIQSYRDLPILCNQWANVFRWEMRTRLFLRTAEFLWQEGHTAHATREEAEEEAIRMLNVYAEFAEKYMAVPVVKGVKSANERFAGALDTYTIEAMMQDGKALQSGTSHFLGQNFAKAFDVQFVNKENKLEYVWATSWGVSTRLMGALIMTHSDDNGLVLPPHLAPIQVVIVPIYKNDEQLKLIDAKVEGIVARLKQLGISVKYDNADNKRPGFKFADYELKGVPVRLVMGGRDLENNTMEVMRRDTLEKETVTCDGIETYVQNLLEEIQANIYKKARTYRDSRITTVDSYDEFKEKIEEGGFILAHWDGTVETEEKIKEETKATIRCIPFESFVEGDKEPGKCMVTGKPSACRVIFARSY

SEQ ID NO: 18484 - protein, 219 aa, Zea mays
  misc_feature (80)..(80): Xaa can be any naturally occurring amino acid
  misc_feature (107)..(107): Xaa can be any naturally occurring amino acid
VSGIPVEDCLVWDSRFPAPVPETALDDEARAAAARRIAERKARKRSERRTYLVAAVISSLGVTSMAIAAVYYRFSWQMEXGAVPVSKMFGTFALSVGVAIGMEFWAXWAHQALWHASLWHMHESHHRPREGPFELNDVFAIVNAVPAISLLGDVASRYTTWTSLRASRMGSSWDQRSCMRSVACTCFAQARANGQVHLMDSWGFGPKGAGEVWWPGRAC

SEQ ID NO: 18485 - protein, 292 aa, Oryza sativa
MSGELKRDYEIGEEIGRGRFGVVHRCTSRATGEAFAVKSVDRSQLADDLDRELAELEPKLAQLAAAGNPGVVQVHAVYEDDAWTHMVMDLCSGPDLLDWIRLRRGAPVPEPVAAAVVAQLAEALAHCHRRGVAHRDVKPDNILLDVVDDGIDGGGTPRARLADFGSAAWVGESGGSAEGLVGTPHYVAPEVVAGGEYGEKADVWSAGVVLYVLLSGGALPFGGETAAEVLASVLRGSVRFPPRLFAGVSPAAKDLMRRMMCRDTWRRFSAEQVLGHPWIVSGGGARAMEQPT

SEQ ID NO: 18486 - protein, 230 aa, Streptococcus pneumoniae
MVKLVFARHGESEWNKANLFTGWADVDLSEKGTQQAIDAGKLIKEAGIKFDQAYTSVLKRAIKTTNLALEASDQLWVPVEKSWRLNERHYGGLTGKNKAEAAEQFGDEQVHIWRRSYDVLPPNMDRDDEHSAHTDRRYASLDDSVIPDAENLKVTLERALPFWEDKIAPALKDGKNVFVGAHGNSIRALVKHIKGLSDDEIMDVEIPNFPPLVFEFDEKLNVVSEYYLGK

SEQ ID NO: 18487 - protein, 582 aa, Glycine max
MVLFNVSRVETTPFDGQKPGTSGLRKKVKVFVQPHYLHNFVQSTFNALTVEKVRGATLVVSGDGRYFSKEAIQIITKMSAANGVRRVWIGQNGLLSTPAVSAVIREKLGADGSRATGAFILTASHNPGGPNEDFGIKYNMENGGPAPEGITDKIYENTTTINEYLIASDLPDVDITSTGVTSFTGPGGPFDVEVFDSASDYIKLMKSIFDFESIRKLLSSPKFTFCYDALHGVGGAYAKSIFVDELGAQESSLLNCTPKEDFGGGHPDPNLTYAKELVARMGLGKSEPQEEPPEFGAASDGDADRNMVLGKRFFVTPSDSVAIIAANAVEAIPYFSAGLKGVARSMPTSAALDVVAKHLNLKFFEVPTGWKFFGNLMDAGLCSVCGEESFGTGSDHIREKDGIWAVLAWLSILAYKNKDKLEDKLVTVEDIVRQHWATYGRHYYTRYDYENVDAGAAKELMAYLVKLQSSLSEVNQIVKGIRSDVSNVVHGDEFEYNDPVDGSISSHQGIRYLFEDGSRLIFRLSGTGSEGATIRLYIEQYEKDPSKIGRLSNEALAPLVEVALKLSKMEEFTGRSAPTVIT

SEQ ID NO: 18488 - protein, 525 aa, Corynebacterium diphtheriae
MTTSNVVFDPQKSELLAGCFSDSNKPATLYINGTWQPADSGEVRTITNPADGSVVGVVSEAGEHDTERAIAVARETFDRGEWLAVPAVERGKILLKVGALLREHKDEFARAESADTGKRLAESELDMDDIANAFDYFGTLAQHEAGRVVDPGDPNVRSRIDVEPVGVCGLITPWNYPLLQVSWKVAPALAAGNTFVLKQAELTPHTAMMLMTLFERAGVPAGVANLITGAGANCGNPLSTSPLVDMVSFTGGLVTGRLIARNAAETVKRVALELGGKNPNVIFADADFDAAVDNALNGAFVHSGQVCSAGSRIVVEESIHDRFVEELTRRAAQIKLGGPLDTAAETGPLISLEHRDKVDAYVVAAKEQGATITTGGRVADASDNEGSHATGNTDLAAGAFYLPTIIDNCTRDMDCVHDEAFGPTVTVETFRTEEEAIAIANDTEYGLAGAVWTQDAGKAERVARKLRHGTIWINDFHPYLPQAEWGGMKQSGNGRELGPTGLAEYQEHKHVYQNIAPAVTGWFAG

SEQ ID NO: 18489 - protein, 740 aa, Silicibacter pomeroyi DSS-3
MTPSIKEGPAMDRAQIVHENFLSRVAARDLPKGAPPRPGLTQAQAVSLYRAQVLSRALDRTSRAMQKAGQGFYTIGSSGHEGMAAVAQALRPTDIAFLHYRDAAFQIARAEQVPGQQIAWDMLLSFACSKEDPASGGRHKVLGSKALMIPPQTSTIASHLPKAVGAAYSLGAARRHPPEHRQLPEDGIAMCSFGDASANHSTAQGAINTAGWTSVQSIPLPLLFVCEDNGIGISTKTPRGWIQASMEHRPGIRYFQANGLDIYETYAVAQEAADYVRNRRKPAFLHLKTVRLYGHAGADVPTTYLTRAEVEAEEAMDPLLHSVRLLAEDGALASEEALAIYEQTCARIDRIAVEAATRPHLASAAEVAASLIPPKRECKPTNGPGAEMRAATFGGDMRAMDEPQPMSRLINWALTDLMLEHGEIVCMGEDVGRKGGVYGVTQKLQQRFGPDRMIDTLLDEQSILGLAIGMGHNGFLPIPEIQFLAYLHNAEDQIRGEAATLPFFSNGQFTNPMVLRIAGLGYQKGFGGHFHNDNSLAVLRDIPGVIIACPSTGEDAAQMLRECVRLAREEQRVVVFLEPIALYPMRDLHGVQDGGWMTPYPSPDRRIALGEVGVHGNGTDLAIVTYGNGHYLSQQAVPEIEAAGIRARIIDLRWLAPLPIEALRAATKDCKHVLIVDECRRTGSQSEALMTFFCEESRATSTARVVAEDCFIATGPAYAAPLPSRDGIVAAALSLTGVAK

SEQ ID NO: 18490 - protein, 510 aa, Candida albicans SC5314
MSEPTQDQPQEQQSQEQQQQEQQQQQQQQQQQEHQPEQQQSTESSENESQQAQQPSSQDDEKQVNAASAKEGGREVSNKILYVGNLPKSASEETIQELFSVGGNPVKTIKILNDKNKAGFNYAFIEYDTNEVADMALNTLNGRLVDDVEIKVNWAFQSAAIAGNPNNTEEPLFNIFVGDLSPEVNDEGLRNAFSKFESLKQAHVMWDMQTSRSRGYGFVTFGNQSDAELALQTMNGEWLCGRAIRCNWASHKQQQQQQHYNNQHGGGYSRGYRNNNGGNNNNRQFRQFNNINNGNNNGFSQPLVNNNPQFIGQQPPQPDQHQHQQQQQQQQQQQSVNGANGVPQQMLQGLTNGNLGPGTPINGSNNAAGGFNNNGTAGNVAGAPVAGGPGAIPVMSPQSYDIVLRQTPSWQTTVYLGNIAHFTQQQELIPLLQNFGFIVDFKFHPERGCAFVKYDTHERAALAIIQLAGFNLNGRPLKCGWGKERPPQFQNFPRNGNMHQVPMYGPGGRP

SEQ ID NO: 18491 - protein, 470 aa, Burkholderia thailandensis E264
MTRSPSSLQCSRALFASPARDRRVAAAPENASGCRANIRRRLPEGRRPAIPPRRRRSRRRPSGQRGRPSRRVRLKPAARGVKYALSLPPDPFMTLASTPDIIAELKAGRMVILVDEEDRENEGDLVLAAEFVTPEAINFMARYGRGLICLTLTQERCKQLNLPLMTYRNGTQYGTAFTVSIEAAEGVTTGISAADRARTIATAVAHDVRPEHIVQPGHVFPIMAQPGGVLVRAGHTEAGCDLTALAGLTPAAVICEIIKDDGTMARLPDLIEFGKEHGLKIGTIADLIHYRSRTESIVERVAERTMQTAHGPFKAVLYRDHPTGSPHIALVRGTPAPHDETPVRVHEPLSVLDLLETGVSTHSWTLDAAMKEIAARELGVVVLLNCGDTKEHLVDVFLAFDEKEKAAELKRRPVDFKTFGIGAQILRDVGVGKMQVLSNPRKLGSMSGYGLEVTGFAPMPGSATSASDAA

SEQ ID NO: 18492 - protein, 111 aa, Brassica napus
  misc_feature (90)..(90): Xaa can be any naturally occurring amino acid
MAFVTTAEVCDANQDLIRSGQLRALQPSFQIYGRRQIFSGPVVTVKVFEDNGLIRQFLEEKGNGRVLVVDGGGSLRCAILGGNPVVQAQXNNGWAVIIVNGCIRDVVRITV

SEQ ID NO: 18493 - protein, 1090 aa, Silicibacter pomeroyi DSS-3
MVLLSIPRYAKRAVRRRRMGIRFFSDRDRPVHMGPYPLERLARREAVADLSTVPQIPVLSFHRPERPESIVNAMGEFQAMLDAIRDGLVNPARAEISADPLERANHLKAFGYFNDASMMGCGPLPAEALLPAPRRNPDIDRLAEALRTRQTKTLASGIDVIMADLKESMEAPPRPIDSHRHAIVFLYEHHRDPEADEPGAEWIHDAQDHRACLLASENAVVIANYIRLLGYDARAHTAMSSDVDLGRLALAAGLVTLEGGQLAAPWLGRRFGLAAVTTEMELAHDRPLAPLAAQSWAATRGPAWWLGKGFAKSALNRDPYARRRYVDGAHPFERLNRVETPTTYIDEANVARVPKRADMFARAQFGDMGKALQEGAKGGHYVRKAAPSFAQRRALGAFVLLQDGDRADVPRPIDPRRNAANLKAASYFLGIDAVGLSRCPTWAWYSHDATGEAITPPHDQAISMIVDQGYETMEGSSGDDWIAVAQSMRAYLRFSLLGGVIAQQIRNLGYKAKAHTVMDGEVLQPPLLLLSGLGEVSRIGEVILNPFLGPRLKSGAVTTDMPMSHDKPIDFGLQRFCEACNKCARECPSGAITAGPKRMFNGYEIWKSDSQKCATYRITTQGGAMCGRCMKTCPWNLEGLFAERPFRWAAMTVPAAAPALARLDDALGHGGLNEVKKWWWDIELQPDGAYRPTTGPVNRRGLQRDLDLKYEDQTLAVYPAPLAPHPWPYPFPMDREAGIAAYQAMIGADEYRARLAAGDLSVVHRYTVPDADTAPVIRVEVTRAEKMTGEITKYEFAAPDGAPLPEWTAGAHLDVLVAPEFLRQYSMSGDPTDRTTYQIGVLREEEGRGGSKLMHRIFAPGRRVFISKPINHFELDEGATRSFLMGGGIGITPMIAFAHRLHALGADFELHYSVPSRTSAGYLEDLDAMPWADRVHLHVSDEGSRADLDAVLAGFQPGWHVYTCGPERFMDGVMQAAERQGFPEEARHLEYFSVPEQPAYENHPFTLKLARTGREIAVPADKDAAQVLNENGIHIDVKCSDGICGVCKCGLIAGAVEHRDFVLSGKQREGAIILCQSRAAEPGGVVEIDL

SEQ ID NO: 18494 - protein, 437 aa, Photobacterium profundum SS9
MKRLLLAIALCLGMTGVAQAMKVEDVKTLTLENGMKILVVEDYTIPNANMYLFWKVGSRNEALGITGLSHFFEHMMFNGAKKYGPKMFDRVMESAGGANNAYTTENTTVYTNWFPSSSVEKIFDLEADRIAHLDINEEMLESERDVVMSERRTGLENSNWRVLNEEVKAAAFRVHPYSWSVIGHESDILNWKLDDLVKYHKTYYAPNNAFVVITGAVKFDEIKTLAEEYFTPIPSQPEPRKVTAVEPEQKGERRVYIQKSSVTTPNIMLAYHVPQTTHQDYYALSLLESILGWGGSSRLERNIVDKGLAISADTHMPMSIDPNLFYFYLVASEGTSSDELEKAFITLLDDVIKKGVTEQELTKAKNMKLMDFYRELETIDGKSNTIGTYELYFGSYKALFDAPSEFENVTVDDIKRVAHIYFRQSNRTVGVLDATEQ

SEQ ID NO: 18495 - protein, 364 aa, Clusia hilariana
SDSGKDAGRLSAAWQLYKAQEDLIKVAKQFGVKLTMFHGRGGTVGRGGGPTHLAILSQPPDTIHGSLRVTVQGEVIEQSFGEEHLCFRTLQRFTAATLEHGMHPPDSPKPEWRALLDEMAVVATEEYRSVVFKEPRFVEYFRLATPELEYGRMNIGSRPSKRKPSGGIESLRAIPWIFAWTQTRFHLPVWLGFGAAFKHIIKKDIRNLHVLQEMYNAWPFFRVTIDLVEMVFAKGDPGIAALYDKLLVSEDLWAFGEDLRTNYEETKKLLLQIAGHKDLLEGDLYLKQRLRLRDSYITTLNVCQAYTLKRIRDPSYNVKFRPHISREIMETSKSANELLILNPSSEYAPGLEDTLILTMKGIAA

SEQ ID NO: 18496 - protein, 420 aa, Bradyrhizobium japonicum USDA 110
MRRIVVTGMGAVSPLACGVELSWRRLLAGQSGLRPLPEWAQALPARIAGLVPDKAGDADGGFDPAQAAAPKDQRKMDRFILFALLATAEAVAQAGWTPQDASALERTATVIGSGVGGFPAMAEAVRITEQRGVRRLSPFTIPSFLANLAAGHVSIKYGYKGPLGTPVTACAASVQAIGDAARMIRAGEADVAICGGAEACIDIVSLGGFAAARALSSSFNEEPRRASRPFDRDRDGFVMGEGAGILVIETLEHALARGATPIAEIVGYGTTADAYHMTSGPPDGDGARRAMEITLRQARLEPGELQHLNAHATSTPAGDESELGAIGALFGRSRSIAVSATKSATGHLLGAAGGLEAIFTVLALRDQVAPPTLNFENPDASADGIDIVSGSARPMPMRHAISNGFGFGGVNACVIFRRMD

SEQ ID NO: 18497 - protein, 635 aa, Oryza sativa
MRGFLAAALLVFGILLNLDTAASAWEDKDFFSYCPPSRCSEHGPEVRFPFQLESNNTTQSSCGLPFMKLSCSGQDTILDNKCLGRPYKVTAIDYKHPVLTAVPLADEGNSSSPCPLLKSISIRPSLKADNGYHYMMYQKPSETYVEHYYAALVSCSTEFAPASIPDATDDIVGPISCLSNQTHLSYLVEVHASMSLLTLDCEVISDGPIPIPVFHYSIYDLPTFRGSAERILNFSDTTVWWYRYDCPQCEQLGGRCAFSSQRNQTFCMRRGSHVKVIAATSSVAAFVVLLLMVATALYLSLKTRYNEEIHLKVEMFLKTYGTSKPTRYTFSEVKKIARRFKVKVGQGGFGSVYRGELPNGVPVAVKMLENSEGEGDEFINEVATIGRIHHANIVRLLGFCSEGTRRALIYEYMPNDSLEKYVFSHDSDTSQEVLVPSKMLDIAIGIARGMEYLHQGCNQRILHFDIKPNNILLDYNFSPKISDFGLAKLCARDQSIVTLTAARGTMGYIAPELYSRNFGEISYKSDVYSFGMLVLEMVSGRRNSDPSVESQNVVYFPEWIYEQVNSGQDLALGREMTQEEKETVRQLAIVALWCIQWNPKNRPSMTKVVNMLTGRLQNLQVPPKPFLSTDSYPVL

SEQ ID NO: 18498 - protein, 364 aa, Clusia hilariana
SDSGKDAGRLSAAWQLYKAQEDLIKVAKQFGVKLTMFHGRGGTVGRGGGPSHLAILSQPPDTIRGSLRVTVQGEVIEQSFGEEHLCFRTLQRFTAATLEHGMHPPVSPKPEWRALLDEMAVIATEEYRSIVFKEPQFVEYFRLATPELEYGRMNIGSRPSKRKPSGGIESLRAIPWIFAWTQTRFHLPVWLGFGAAFKHIIKKDIRNLHVLQEMHNAWPFFRVTIDLLEMVFAKGDPGIAALYDKLLVSEDLWTFGEKLRTNYEETKTFLLQIAGHKDLLEGDPYLKQRLRLRNSYITTLNVCQSYTLKRIRDPSYNVKVRPHISKEIMETSKSANELLILNPSSEYAPGLEDTLILTMKGIAA

SEQ ID NO: 18499 - protein, 468 aa, Thermus thermophilus HB8
MSELEIRQIGEEYRWHFIDEIRPVFKAEKGLTRRVIEAISYHKGEPEWMLKFRLRAFEIFQKKPMPTWGPDLSGLNLDDLVYYVKPAEVRDAKSWEEVPEEIRRTYERLGIPEAERKVLAGVGAQYDSEMVYHRVREELERQGVIFVAIEEGMKKYEDLFKEYFAKVVPPEDNKFAALNSAAWSGGSFVYVPPGVKVELPLQAYFRVNTPEFGQFERTLIIVDEGAEVHYIEGCTAPMYSTESLHTGVIEIVVKRGARSRYTTIQNWSTNMYNLVTQRALVYGDAYHEWVDGNLGSKVTMKYPSSYLLEPGARSEILSIAFAKTGQHQDTGGKLILAAPHTSGTIVSKSISKGKGRASYRGLVKVMEGARHGKVNVECDALLIDPESRTDTYPYIEIEEETAHVGHEATVSKINDEQIFYLQSRGLKEDEAAALIVRGFIEPIAKELPLEYAVELNKLIELEMEGSVG

SEQ ID NO: 18500 - protein, 131 aa, Zea mays
  misc_feature (35)..(35): Xaa can be any naturally occurring amino acid
  misc_feature (48)..(48): Xaa can be any naturally occurring amino acid
  misc_feature (81)..(81): Xaa can be any naturally occurring amino acid
MQWQGKTKERMASPIPSEWIGLQQFPAGTQTKLHXLLGKLKEEDVSTXTILAMGKGGVGKSSTGNYDRWERAAYVSGFQGXTLNIIDTPGLIVGGYINEEADDIIERLLLSMTIDVLLDLDRMDAYIMDTL

SEQ ID NO: 18501 - protein, 364 aa, Clusia hilariana
SDSGKDAGRLSAAWQLYKAQEDLIKVAKQFGVKLTMFHGRGGTVGRGGGPTHLAILSQPPETIHGSLRVTVQGEVIEQSFGEEHLCFRTLQRFTAATLEHGMRPPVSPKPEWRALLDEMALVATDEYRSIVFKEPRFVEYFRLATPELEYGRMNIGSRPSKRKPSGGIESLRAIPWIFAWTQTRFHLPVWLGFGAAFKHVIKKDIWNLNMLQDMYNSWPFFRVTIDLVEMVFAKGDPGIAALYDKLLVSEELWPFGEKLRTNYEETKKFLLQIAGHRDLLEGDPHLKQRLRLRDSYITTLNVCQAYTLKRIRDPSYSVNVRPHISKEIMETNKSASELLILNPTSEYAPGLEDTLILTMKGIAA

SEQ ID NO: 18502 - protein, 160 aa, Arabidopsis thaliana
RVNTCSLGSVSAIGFSLPQISSPALGKCRRKQSSSGFVKACVAVEQKTRTAIIRIACRTDDDKMATYLASLNHEETRLAISCERAFLETLDGSCRTPIAGYASKDEEGNCIFRGLVASPDGTKVLETSRKGPYVYEDMVKMGKDAGQELLSRAGPGFFGH

SEQ ID NO: 18503 - protein, 372 aa, Schizosaccharomyces pombe
MASATSTPTIADGNSNKESVATSRSPHTHDLNFELPEEYEMINLIGQGAYGVVCAALHKPSGLKVAVKKIHPFNHPVFCLRTLREIKLLRHFRHENIISILDILPPPSYQELEDVYIVQELMETDLYRVIRSQPLSDDHCQYFTYQILRALKAMHSAGVVHRDLKPSNLLLNANCDLKVADFGLARSTTAQGGNPGFMTEYVATRWYRAPEIMLSFREYSKAIDLWSTGCILAEMLSARPLFPGKDYHSQITLILNILGTPTMDDFSRIKSARARKYIKSLPFTPKVSFKALFPQASPDAIDLLEKLLTFNPDKRITAEEALKHPYVAAYHDASDEPTASPMPPNLVDLYCNKEDLEIPVLKALIFREVNFR

SEQ ID NO: 18504 - protein, 511 aa, Magnetospirillum magnetotacticum MS-1
NALAEAHAELALKNRDLEKAVTQARDAERAKSEFLAVMSHEIRTPMNSILGMVHLLMDRPLAAEDREKLSVVHDSGAALLGIINDILDFSRLEADGVQFEDAPFHLGNTVEGVVSLLRGRATEKNLTLALDAPSPLPGWVSGDGARLRQVLINLVGNAIKFTTQGGVVLRLRRDGEGNRYEFSVIDTGIGLEAEQAKNLFQPFHQADASISRRFGGSGLGLAICKKLVDAQGGKIGVDSTKGLGSRFWFHLDYPDTAAPAAQSPRAEISNLPSLSILLAEDNVFNQKVAAGLLNREGHRVTLANNGLEALEKLQDGRFDLILMDMQMPEMDGPEATRRIRGLPGALAAIPIIALTANAMADDVARCRAAGMDGHVAKPIDPLLLRAAIAEVLPRHAPEARAGERSSYSIARMAEQLGSDNAAILARTFIESGEDICNRLENAGGDIQVTGAALHELKGLAAYSGTPWLEALAISMSKALEDSDMPQVEGLLHRLRRDWNNTRAELTRQFGL

SEQ ID NO: 18505 - protein, 328 aa, Leifsonia xyli subsp. xyli str. CTCB07
MRQIIIIGSGPAGYTAAIYAARANLKPLLIASSVEAGGELMKTTEVENFPGFPDGVMGPDLMVKMQAQAERFGTEVILEDVVSVDLSGDAKTVTLGSGAVHEALSVIFATGSAYRKLGLEDEERLSGHGVSWCATCDGFFFRERTIAVVGGGDSALEEATFLTRFADKVYVIHRRDSLRASKIMQDRAFANNKIEFIWNSEVVAINGSEQVEGITLRNRENDDQSDLDVQGLFIAIGNDPRVHLVHGQLDLTPEGTIAVAGRSSKTKLTGVFAAGDVVDSSYRQAVTAAASGTVAALDAEHYLSDLPQDLLDNATDIAPGDLELTTTA

SEQ ID NO: 18506 - protein, 108 aa, Leifsonia xyli subsp. xyli str. CTCB07
MSATRSVTDVSFEQDVLNSEKTVLVDFWAEWCGPCRAVGPILDQIAAEHSEKIEIVKLNVDENPQTAAKYQITSIPAMKVYQGGEVVKTVIGAKPKPALEADLAAYLA

SEQ ID NO: 18507 - protein, 247 aa, Arabidopsis thaliana
  misc_feature (150)..(150): Xaa can be any naturally occurring amino acid
  misc_feature (162)..(162): Xaa can be any naturally occurring amino acid
  misc_feature (221)..(221): Xaa can be any naturally occurring amino acid
HWSKEDEHKLVSMTTSSSSYGTFSTVFNSSRPNSSATFLVPSLKFSTGISNFANLSNGFSLKSPINPGFLFKSRPFTVQARAAAEKTVHDFTVKDIDGKDVALNKFKGKVMLIVNVASRCGLTSSNYSELSHLYGKFKTQGFEVLGFPCXIRFGFQEPGVNXSGIKQFACTRFKAEFPIFDKVDVNGPSTAPFFEFLKSNAGGFLGGLFRWDFEKFLIDKXALVVERYPATSSPFQIEKDIQKLLAA

SEQ ID NO: 18508 - protein, 218 aa, Barbula unguiculata
MYSRSMWTTVAVLLVVGLVPMAMAGDEDGLQDFCVRDTTPGVAVVNGFPCKPAAMVTADDFKFAGLKNPGNTNNVNKANVTAATVIQWAGLNTLGISAVRIDYAKGGINPPHIHPRATELLILLKGELYVGFVSTANVLFATTIYPGEAFVFPKGLIHFQLNVGKEHALAFAGLSSQNPGVQQVAPALFTPDIKDEVLEKGFRIDTKTVDMIQAQFRV

SEQ ID NO: 18509 - protein, 487 aa, Deinococcus radiodurans R1
MTTTDLRTTYSSVTRSQAYFDGEWRNAPRNFEVRHPGNGEVIGEVADCTPTDARQAIDAAEVALREWRQVNPYERGKILRRWHDLMFEHKEELAQLMTLEMGKPISETRGEVHYAASFIEWCAEEAGRIAGERINLRFPHKRGLTISEPVGIVYAVTPWNFPAGMITRKAAPALAAGCVMILKPAELSPMTALYLTELWLKAGGPANTFQVLPTNDASALTQPFMNDSRVRKLTFTGSTEVGRLLYQQAAGTIKRVSLELGGHAPFLVFDDADLERAASEVVASKFRNSGQTCVCTNRVYVQRGVAEEFIRLLTEKTAALQLGDPFDEATQVGPVVEQAGLDKVQRQVQDALTKGAQATTGGQVSSGLFFQPTVLVDVAPDSLILREETFGPVAPVTIFDTEEEGLRLANDSEYGLAAYAYTRDLGRAFRIAEGLEYGIVGINDGLPSSAAPHVPFGGMKNSGVGREGGHWGLEEYLETKFVSLGLS

SEQ ID NO: 18510 - protein, 587 aa, Nostoc sp. PCC 7120
MSQPKNTQQSSTNPLNGENPGTGVVPQIFASSTEKFMFDSIDAALSDLKAGRAIVVVDDENRENEGDLICAAQFATPDMINFMAVEARGLICLAMTGDRLDELDLPLMVTNITDPNQTAFTVSIDASPHLGVSTGISAEDRARTIQITLNPATKPSDLRRPGHIFPLRAKAGGVLKRAGHTEAAVDLSRLAGLYPAGVICEIQNPDGSMARLQQLIEYAKHHNLKIISIADLISYRLQHDRLVYREVVTKLPSQFGQFDIYAYRHTLDNTEHVAIVKGNPENFRDEPVMVRMHSECLTGDALGSLRCDCRMQLQAALKMIETAGQGVVVYLRQEGRGIGLINKLKAYSLQDMGLDTVEANERLGFPADLRDYGMGAQMLMDLGVKKIRLITNNPRKIAGVKGYGLEVVDRLPLLIEANDYNSYYLATKAKKLGHMLLQTYLVTVAIHWQDDPQLVTKRYERLEKLRHLVRGYDLLLQEEARPLAIALFDKPSLTVHLGFDQEKVASCDWYSQSGHPYVQAILPILDNLATLPYVQKLEFLISPGSDPLSNLQVQLDRQTISPDKLPSSVSNELETQKIYSLSKELED

SEQ ID NO: 18511 - protein, 309 aa, Prochlorococcus marinus str. MIT 9312
MTATISRPTISNWETSDIPNLNGKTALITGANSGLGYYTAKALAEKNAHVILACRSLEKANKSIQKLRASNPEGIFSPLELDLSDLNNVVEIQPKIFDDFENLDLLINNAGIMHPPKTLSAQGYEIQFAVNHLAHMLLTLKLLPIIEKKEESRIVTVTSGAQFFGKVGWKNLKAENYYNKWESYSNSKLANVMFALELNENLKPKNILSLAAHPGIAKTNLFTAQKPKPSPIETFSMELFSPIFQSAEMGALPQLFAATSPEARGGDHYGPKFNFRGYPKLSPTSPVAINKKERKNLWEKSLQILSNFL

SEQ ID NO: 18512 - protein, 193 aa, Glycine max
  misc_feature (4)..(5): Xaa can be any naturally occurring amino acid
  misc_feature (8)..(10): Xaa can be any naturally occurring amino acid
  misc_feature (12)..(13): Xaa can be any naturally occurring amino acid
  misc_feature (15)..(15): Xaa can be any naturally occurring amino acid
  misc_feature (22)..(22): Xaa can be any naturally occurring amino acid
  misc_feature (24)..(24): Xaa can be any naturally occurring amino acid
  misc_feature (28)..(30): Xaa can be any naturally occurring amino acid
  misc_feature (35)..(35): Xaa can be any naturally occurring amino acid
  misc_feature (38)..(40): Xaa can be any naturally occurring amino acid
  misc_feature (52)..(54): Xaa can be any naturally occurring amino acid
  misc_feature (59)..(60): Xaa can be any naturally occurring amino acid
  misc_feature (62)..(62): Xaa can be any naturally occurring amino acid
TPAXXTKXXXEXXQXPAEETPXAXTKTXXXGGAGXRGXXXEEETAKPTGKGXXXEDKAXXTXGAKRKGKSAAELPDSREPYRDINKGPAEKLNRGPKPRTLDGREYERKAPDNCAAHTESAGTYSEAKQKANEELTNAHKDQNLPPGSTGLYKQSPTGTKGLSHPKDETKPKNEQAAKDNKHPSEGRRETSTG

SEQ ID NO: 18513 - protein, 108 aa, Oryza sativa (japonica cultivar-group)
MAGVWVFEDGMVRRADSEAPSRGRGVGGGGGGGKVLVHVPSSEVVTSYEVLERRLRELGWERYLNDPCLLQFHQRSTVHLISVPRDFSRLKLVHMYDVVVKTRNVFEV

SEQ ID NO: 18514 - protein, 130 aa, Lycopersicon esculentum
LSLKPTFTLEKISVKGLPSLTRSSSSFKVVARGVKKLKTDKPYGINGSMALRDGVDASGRKPKGKGVYQYVDKYGANVDGYSPIYNTDEWSPSGDVYVGGTTGLAIWAVTLLGILAGGALLVYNTSALAQ

SEQ ID NO: 18515 - protein, 478 aa, Oryza sativa
MELGVPLPRRPVPGSYGVPFVSAVRDRLDFYYLQGQDKYFESRAERYGSTVVRINVPPGPFMARDPRVVALLDAKSFPVLFDVAKVEKRDVFTGTFMPSTSLTGGYRVCAYLDPSEPNHAKIKQLLLSLLVSRKDAFVPVFRSNFGALLDTVQSQLASGGGKSDFTALNDATSFEFIGKAYFGVRPSASSSLGTGGLDQGRLWLLWQLAPLTTLGLPMIIEDPLLHTLPLPPFLISSDYKALYAYFAAAASQALDAAEGLGLSREEACHNLLFATVFNSYGGFKLLLPQILSRVAQAGEKLHERLAAEIRSAVADAGGNVTLAALEKMELTRSVVWEALRLDPPVRFQYGRAKADLEIESHDASFAIKKGEMLFGYQPCATRDPRVFGATAREFVGDRFVGEEGRKLLQYVYWSNGRETENPSVDNKQCPGKNLVVLVGRLLLVELFLRYDTFTAEAGKKVVITGVTKASTSAVNRTA

SEQ ID NO: 18516 - protein, 603 aa, Phanerochaete chrysosporium
MPSSIDFPDRLVLRVIAYELVFLFYPAVPAAAGLVLLRRLTDIWLPTWAIVLLSVCSLPVVHGLSIWRNHWRAARKAARMGAVLPPRLKGRWPGSIDLLMRLTDAFETGFMSDLLWEYMHTIGQTFEVYVLWDSNYVTSDANVVKAILATDFTSFVKGKKFDVCMRSVLGTGVFNSDGDMWKFHRTMTRPFFTRERISHFDLFDRHADDAMAKMKARFAEGYAVDFQDLISRFTLDSATEFLFGQCVHSLASVLPYPHNAPAHLQTTSASAAEDFARAFAEAQTVLNFRIRMGWLWPWFELFGSRTKAPMAVVDAFLDPILKAAVERADKIKHANGGKVPEAKEEIDEDETLLDHLVKYTNDPKILHDEVLNIMIAGRDTTAGTLTSAVYFLSQYPEVLRRLREEILEKVGPTRRPTYDDIREMKYLRAFINETLRLYPAVPWNVRYPVKDTTIPGPEPDKPYFIPANTPVSYSVHCMHRRTDYWGPDAEAFDPDRFLDARVQRYLTPNPFIFLPFNAGPRICLGQQFAYNEMSFFVIRLLQHFDEVQLCEDALAPDCRVPDAWRGAPGRKGVERFWAKAHLTLYAKGGLWVKMREAPTSEAV

SEQ ID NO: 18517 - protein, 486 aa, Burkholderia thailandensis E264
MSSFDSTAPAVVWFRDDLRVSDHPALARAAESGRPVIGVYVFDERAGGRALGGAARWWLHGSLRALDAALAGLGGRLVLLRGDEADTFVSFVAALGAGAVYWNRRYAFAQRALDNAVQTALDARRVAVETFNASLLFEPDDIVNGDGRPYQVFGAYWRAALRRGAPPPPLAAPRRLNGGALPEALARRRVELDALGLEPTRPDWAGGLRDAWRFGEDAAHSLLRAFVDSRLGGYATERDRPGIASTSRLSPYVRFGNLSVRQIWQAAVDAHAHRAATQADLDKFLSELGWREFCWAQLYRFPDLPRRNLRHTLDGMPWRDDPAGLAAWRRGATGYPFVDAGMRELWATGWMHNRARMVCASFLVKHLLIDWREGEAWFWDTLVDADAASNAANWQWVAGCGADAAPYFRIFNPVAQGKKFDPDGAYVRRWVPELAGLPPAAIHEPWAAPPAQLAAAGVRLGDTYPVPVVAHDAARRRALDAFATAG

SEQ ID NO: 18518 - protein, 505 aa, Ralstonia eutropha JMP134
MNIAENRQIAEIHHYIGGTVRPGASARFADVFNPATGEVAARVALGTAQEVSDAVAAAKAAFPAWADTPPLRRARILFKFKELLDKHHDDLAALITREHGKVFSDAKGEVTRGVEIVEFACGIPNLLKTDFTDNVGGGIDNWNLRQPLGVVAGITPFNFPVMVPMWMFPVALACGNTFVLKPSERDPSPSLLIADLLKQAGLPDGVFNVVQGDKVAVDALLANPDVQALSFVGSTPIAEYIYTEGTKHGKRVQALGGAKNHLVVMPDADLDQAVDALIGAGYGSAGERCMAISVAVAVGDVADKLVPRLAERAAALKIRNGMEADAEMGPLVTGAHKAKVEGYIAKGVEEGATLVTDGRGHKVEGHENGFYVGGTLFDHVTPDMTIYKEEIFGPVLSVVRVHDFAEAVALINAHEYGNGVSCYTSDGGIARAFARQIQIGMVGINVPIPVPMAWHSFGGWKRSLFGDHHAYGEEGVRFYTRYKSVMQRWPDSIGKGAEFMMPVAK

SEQ ID NO: 18519 - protein, 465 aa, Ralstonia eutropha JMP134
MSLFRTKNIDAMLAVAHNDGLKKVLGPMDLVMMGIGAIIGTGIFVLTGTGALTAGPALTVSFVIAAMACGFAALCYAEFASAIPVSGSIYTYSYATLGEIIAWMIGWDLLLEYGLATSAVSVGWSGYFQSLVSGFGVKLPAALTAAPGAVPGVETMVNLPAVLIMLAITWIVSYGVKESARLNNVMVAIKIGVVLLFIAVGVWHVKPANWEPFAPFGMTGVFNAAALVFFAFIGFDAVTSAAEEVRNPSKDLPIGIIGSLAVCTVLYVVVAAIMTGIVPFAKFAGVDHPVSLALQYAGKNWVAGFVDLGAILGMTTVILVMTYGQTRIIFAMSRDGLLPERLSSVHPVHATPYFATWTVGIVFAAIAGFVPLNVLAELINIGTLAAFTLISIAVLVLRRTRPDLPRAFRCPGVPVVPLLSAGFCLFLMAHLQALTWIAFLVWLVIGLAIYFLYARRNAVLHNHGG

SEQ ID NO: 18520 - protein, 500 aa, Thermoplasma volcanium GSS1
MDIFHIFSDKRLNTVYLSKNMEYHEVIEKLDFSKVTRFYWLLTLLATIGGFLFGYDTSNIGTALVFIPYPVQGFIEGYLVAGASLGAAVGALIAAGLTDRYGRKYLLIADAAIYAAGAILSAFTIDLAMLLLSRTLIGLAVGADSGIATAYISEYAPKDRRGSLGILQQWMITIGILGAYIVGMATLYAAPGLASVLDWRIMLGVAAIPALIGLGFRFMMPESPRWLMINGKYKEASEAFKKLGLNLSVDELKEVKFRQRAKITNGVKRAFLVVALFFVFQQITGINIPFYYGPIVIEKLHLFGSATQSLVFTQIYAVAAATILAVINVAATYIGFRYIDTVGRRKLALLGYSGMTFFGLLGGLLLYLKFDVGLLIAFAGFIIFFAFGVGGTGWMIQGEYFPTNMRGLYASLGAFVDWIANFAIIEIFPVLEALITIKNVMFVFGILSLIAVLIFYYIMPETKELSVEQISDLFENNGLSSLRKASMSYNKSSSGSSGKK

SEQ ID NO: 18521 - protein, 351 aa, Bacillus clausii KSM-K16
MKIVNIASIPGDGVGREVVPEAERVLKAIAELHGGLTFEFTSFPWSCEYYLENGSMMPEDGLEQIKDFDSIFLGAVGNQRLVPDHISLWGLLIKIRREFEQVINVRPAKLIKGINSPLSNPKDFDLLVVRENSEGEYSSIGGRIYNEDEELAIQNAVFSRRGTERAMRYAFELAKTRRGHVTSATKSNGIVYSMPFWDDVFKEISKDYPSVEVDSQHIDALAAFFVTQPERFDVIVASNLFGDILTDIGAAIMGSIGIAPAANININGKYPSMFEPVHGSAPDIIGKGIANPIGQIWTAKMMLDHHGETELGDHLLDSIEEVTSRGIRTPDIGGTSSTTEVTSEIIKTLLR

SEQ ID NO: 18522 - protein, 327 aa, Glycine max
MAEGKGRVCVTGGTGFLGSWIIKRLLEDGYAVNTTIRSDPGRKRDVSFLTNLPGASEKLKIFNADLSDPESFDPAVEGCVGIFHTATPIDFAVNEPEEVVTKRAIDGALGIMKAGLKAKTVKRVVYTSSGSTVSFSSLEEKDVVDESVWSDVDMLRSVKPFGWSYAVSKVLTEKAVLEFGEHNGLEVATVIAPFIVGPFVCPKLPDSIEKALLMVLGKKEEIGVIRYHMVHVDDVARAHIFLLEHPNPKGRYNCSPFIVPIEEMGELLSAKYPEFQLPTVDELKGIKGAKQPHLTSKKLVDAGFEFKYSLEDMFQDAIECCKEKGYL

SEQ ID NO: 18523 - protein, 519 aa, Zea mays
MATATYLPSSFSFSSPPPPPSSRARLRRQTTRAGASAATDRPREVLSPKRRLPLREVPGDYGPPVLGAVRDRFEYFYGPGGRDGFFASRVRAHGSTVVRLNMPPGPFVARDPRVVALLDAASFPVLFDTSLVDKTDLFTGTFMPSTDLTGGYRMLSYIDPAEPSHGPLKALLFYLLSHRRQHVIPKFREVYGDLFGVVENELARVGKADFGHHNDAAAFSFLCQALLGRDPAESALHGDGPKLITKWVLFQLSPLLSLGLPKHLEDSLLHSFRLPPALVRKDYGRLADFFRDAARTVVDEGERLGIAREEAVHNILFATCFNSFGGMKILFPSLVKWLGRAGARAHGRLATEVRDAVRAHAGEVTMKALAEMPLVESAVYEALRIEPPVAMQYGRAKRDMVVESHDYGFEVREGEMLFGYQPMATKDPRVFARAEEYVPDRFLGEDGAQLLRHVVWSNGPETASPTLQDKQCAGKDFVVLIARLLVAELFLRYDSFDVQVGASALGSSVTITSLKKATF

SEQ ID NO: 18524 - protein, 334 aa, Pseudomonas aeruginosa PAO1
MTIRLAINGFGRIGRNVLRALYTGHYREQLQVVAINDLGDAAVNAHLFQYDSVHGHFPGEVEHDAESLRVMGDRIAVSAIRNPAELPWKSLGVDIVLECTGLFTSRDKAAAHLQAGAGKVLISAPGKDVEATVVYGVNHEVLRASHRIVSNASCTTNCLAPVAQVLHRELGIEHGLMTTIHAYTNDQNLSDVYHPDLYRARSATQSMIPTKTGAAEAVGLVLPELAGKLTGLAVRVPVINVSLVDLTVQVARDTSVDEVNRLLREASEGSPVLGYNTQPLVSVDFNHDPRSSIFDANHTKVSGRLVKAMAWYDNEWGFSNRMLDSALALAAARD

SEQ ID NO: 18525 - protein, 419 aa, Gibberella zeae PH-1
MPLVLFLGVLENGIPDAVRQYTRTIIYTILTITFLTLLKIWTSGRNNPTQRLLHGKVVMMTGGTSGIGAAAALGLASQGAQLVLLTQTPPNDPFLVEYIQDLREKTNNHLIYAEQVDLSSFYSIRTFATKWIDNAPPRRLDMVYLGAAVLTPPGGKRRESEEGIEETWMVNFLANFHLLGILSPALRAQPIDRDVRVIIPTCSSYIGSPSLKDPVSRESWTPGKAYARSKLAMNVFGHAFQKHLDSYDRPDKAPMNTRVIFVDPGLARTPSTRRWLTRGSLWGLAIYTAGYIVPWFLLKSPNMAAQSILYAAMDPEFARGPGGKFIKECLEVDFARKEIKDDEVAKKLWEESDKLIEKVEKIEAKKRAAKKAADEKDKKEKTEKEKEAEIEELVEAIKKGKEKAAAKEKTSGKKKKGKN

SEQ ID NO: 18526 - protein, 741 aa, Malus x domestica
MLACNCIEPQWPADELLMKYQYISDFFIALAYFSIPLELIYFVKKSAVFPYRWVLVQFGAFIVLCGATHLINLWTFSIHSRTVAMVMTTAKVLTAVVSCATALMLVHIIPDLLSVKTRELFLKNKAAELDREMGLIRTQEETGRHVRMLTHEIRSTLDRHTILKTTLVELGRTLALEECALWMPTRTGLELQLSYTLRQQNPVGYTVPIHLPVINQVFSSNRAVKISANSPVAKLRQLAGRHIPGEVVAVRVPLLHLSNFQINDWPELSTKRYALMVLMLPSDSARQWHVHELELVEVVADQVAVALSHAAILEESMRARDLLMEQNIALDLARREAETAIRARNDFLAVMNHEMRTPMHAIIALSSLLQETELTAEQRLMVETILRSSNLLATLINDVLDLSRLEDGSLQLEIATFNLHSVFREVHNMIKPVASIKRLSVTLNIAADLPMYAIGDEKRLMQTILNVVGNAVKFSKEGSISITAFVAKSESLRDFRAPDFFPVQSDNHFYLRVQVKDSGSGINPQDIPKLFTKFAQTQALATRNSGGSGLGLAICKRFVNLMEGHIWIESEGLGKGCTATFIVKLGFPERSNESKLPFAPKLQANHVQTNFPGLKVLVMDDNGVSRSVTKGLLAHLGCDVTAVSLIDELLHVISQEHKVVFMDVSMPGIDGYELAVRIHEKFTKRHERPVLVALTGSIDKITKENCMRVGVDGVILKPVSVDKMRSVLSELLEHRVLFEAM

SEQ ID NO: 18527 - protein, 274 aa, Gibberella zeae PH-1
MTKTLTPPEVPNVVLSYPEPHILLVRLNRPEHLNAMQRQMSFDLDRLWKWYDNEPSLRCAVITGTGRAFCAGADLKEWNVKNSESSTTNLDKWADNGFGGLSNRRGKKPVIAAVNGLCLGGGMEMILNLDMVIASETAKFGLPEVKRGVVAIAGALPRLIRTVGRQRASEIALLGRMYTAEQFLSWGVVNKVVKLEEVVSEALRWAVEMSNNSPDSVIVSREGLLGGWEAEGPKDSTNRIEHGVFKTMEGGDNMKEGVLSFVEKRSAVWKNSKL

SEQ ID NO: 18528 - protein, 517 aa, Haemophilus somnus 2336
MQNNIIIFDTTLRDGEQALKASLTVKEKLQIALALERLGVDVMEVGFPVSSAGDFESVQTIARHIKNSRVCALSRAVDKDIDIAADALKVAEAFRIHTFIATSALHVEAKLRRTFDDVVEMAIQAVKRARRYTDDVEFSCEDAGRTGVDNICRIVEAAIKAGATTVNIPDTVGFCLPTEYGNIIDQVMNRVPNIDKAVISVHCHNDLGMATANSLTAVQNGARQIECTINGIGERAGNTALEEVVMAIKTRQDIFKGLDTRINTQEIHRVSQMVSQLCNMPIQPNKAIVGSNAFAHSSGIHQDGMVKNKNTYEIMSPETIGLKKEKLNLTARSGRAAVKSHMDAMGYQQNDYDLDKLYAAFLKLADKKGQVFDYDLEALAFIDMQQGDEDRLSLDVITSQTISNLPASAFVQVELDGKKISQVSNGGNGPVDAVYNAILAITDMDITMLHYNLTAKGEGAEALGQVDIVVEHKGRRFHGVGLATDIVESSARALIHAINAIYRANKVADLKSHKISQ

SEQ ID NO: 18529 - protein, 403 aa, Glycine max
MAATLFQGLGVVTPSFSSSHSNKFMLSSLSERKDGIFVVRSDADARILKTGARKHELLVTNAVATKGASSAASTSKSGSGHELLLFEALREGLEEEMERDPCVCVMGEDVGHYGGSYKVTKGLAPKFGDLRVLDTPIAENAFMGMGIGAAMTGLRPVVEGMNMGFLLLAFNQISNNCGMLHYTSGGQFKIPIVIRGPGGVGRQLGAEHSQRLESYFQSIPGIQMVACSTPYNAKGLMKAAIRSENPVILFEHVLLYNLKERIPDEEYVLSLEEAEMVRPGEHVTILTYSRMRYHVMQAAKTLVNKGYDPEVIDIRSLKPFDLHTIGNSVKKTHRVLIVEECMRTGGIGASLTAAITENFHDHLDAPIVCLSSQDVPTPYAGTLEEWTVVQPAQIVTAVEQLCQ

SEQ ID NO: 18530 - protein, 634 aa, Lactobacillus sakei subsp. sakei 23K
MCGIVGFAGGLFDLPKKKEVLNQQMDVIKHRGPSGAGDFIDDKVALGFRRLSIIDLTKGGQPIYNEDHTKLIFFNGEVYNYREIRKELEPLGHEFKTDSDTETILHAYEQWGKDVLKKIRGMFVFVIYDLQTKTLFGARDFFGIKPLYYTTLDDGTFMFSSEIKTFMRHPEFKRTLNKKALKSFMMNQYNDLQETFFEGVFRFPAGHYFTYKDGQLDIEKYWDMQFDPSNLSFEEEVKKIDASVEESIKMHNVADVPVGAFLSEGVDSSYVTSILQPQEVFSVGFDDQTYNEVTAAHALADELGLNFNETKVKADDAFAEFDKIQYYLDEPDGNPSCVPLWFLSRFAREKVTVALSGEGADELFAGYVNYGMHSHNTTIKAFTSSLKKLPKGARAKLAKTVKKMPAFPGRVHLYTNLANPKEFYAGQSVIYDIENPSIFGSDEANQYLKPAYQNDTTIQENYQADFDRVKDADPVSQMQYIDMHHFMLNDILQKADKLSMAHSLELRVPFLDPEVAKTAGQVPTEYLINSKDTKYAYRQASAKHLPAAWANRPKLGFPVPIKQWLETDKYYEQVKALFSEDFVSEFFDQGQLLALLDANKEQRINGRRKIWTIYTFLTWYKVYFINIEDYLVLG

SEQ ID NO: 18531 - protein, 291 aa, Wolbachia endosymbiont of Drosophila ananassae
MSVLVNKDTRLICQGFTGAQGTFHSEQAIDYGTKMVGGVTPGKGGSTHLNLPVFNTVAEAKEKTGANATVIYVPAKFAAAAILEAIDAKIELIICITEGIPILDMVKVKRALIGSKSRLIGPNCPGIITPEECKIGIMPGHIHKRGHIGIMSRSGTLTYEAVAQTTAVGLGQSTCIGIGGDPIHGMTFVDCMELFLKDNDTHGIVVIGEIGGNEEEDVSHFVKAEKTKKPIVGFVAGQTAPPGRRMGHAGAIISSSGGSAGAKLEVMRSAGIAIAETPAVIGKKVLEVMHH

SEQ ID NO: 18532 - protein, 376 aa, Arabidopsis thaliana
MPMPNLPKELVEEILSFVPATYLKRLSATCKPWNRLIHNDKRFARKHYDNAAKEFLVFMMRKNFRIIRRGVNLHGADPSAEVKGELTLPDPYFKNSADEFHIDRVFHCDGLLLCTSKLERRMVVWNPLTGETKWIQTHEEGDNFFLGYSQEDKNISCKKSYKIMGFYRSGSKVWEYDFNSDSWRVLNGILPNWYFDKSYKCVSLKGNTYMLAGAVTDMGFDLSLQSYDFSTEKFAPVSLPVPSQARSLNGANRLSVVRGEKLALLYRRDKRSKAEIWVTNKIDDTTEGAVSWTKVLELDLSRELHALFTSNFLVDEEKKVFICCVSWKEDEDENKSNKVYIVGEDNIVKEIDSGEDATSGCEPTILSLYVPSLVYM

SEQ ID NO: 18533 - protein, 414 aa, Legionella pneumophila str. Paris
MSVKNAIYAQSGGVTAVINASACGVIQTAKLFPEQIGKVYAAKNGIIGALNEELIDTSLESEEDIAKLMQTPSGAFGSCRYKLKDNGEEYQRLIAVFKAHNIGYFFYNGGGDSQDTAHKVSQLGKTMGYPITCIGIPKTVDNDLPFTDNCPGFGSVAKYIAISTKEAGFDVASMAASSTKVFILEVMGRHAGWIAAASGLAEQNPGEPPHIILLPEVPFEPTRFLKKVKDCVNSYGYCVIVVSEGIRNKEGKFLSEAGLRDAFGHAQLGGVAPVIAQLIKSELGFKYHWAVADYLQRAARHIASQADLDQAYALGKAAVEYAVKGYNAIMPIVIREQDEPYQWSIGQVPLAEVANQEKAMPPEYIAEDGMGITDACKRYLSPLIQGEAYPNYKNGLPDYVRLKNQLVAKKINQD

SEQ ID NO: 18534 - protein, 91 aa, Prochlorococcus marinus str. MIT 9312
MKVLITSPCSASLIIQYGIKSWPIWECEPSKFQWNYDDKEICLVIEGQAIISTQKGDIYLIKAGDLVEFPAGLSCEWEITKSIKKHYRLGS

SEQ ID NO: 18535 - protein, 320 aa, Xylella fastidiosa Ann-1
MNHTSDTALLIVNLGTPEAPTAAAVRRYLGEFLSDRRVVSIPPLFWKPLLHMVILPIRGPRSASKYAKVWLQEGSPLSVYTRRIAEGLTQHLPDWRVAWAMRYGAPALTKALDALQAQQVRRIVILPLYPQYSTTTTASVQDVVEAWCKRTPQVQVECIQDYAEDPAWVAAVAASIRRHWQAHGRSEKLMFSFHGLPQRVANNGDPYPQRCQVSASLIAAALNLNESEWVLGYQSRFGTERWLQPYAEPTLWALAESGIRRFDLVCPGFSVDCLETLEEVALGFSETLAARGATMRYIPCLNDDPAHVQALAGLAQRALL

SEQ ID NO: 18536 - protein, 322 aa, Arabidopsis thaliana
MWFFGSKGASGFSSRSTAEEVTHGVDGTGLTAIVTGASSGIGVETARVLSLRGVHVVMAVRNTDSGAKVKEDIVKQVPGAKLDVMELDLSSMQSVRKFASEYKSTGLPLNLLINNAGIMACPFMLSKDNIELQFATNHLGHFLLTKLLLDTMKSTSRESKREGRIVNLSSEAHRFSYPEGVRFDKINDKSSSSSMRAYGQSKLCNVLHANELTKQLKEDGVNITANSLHPGAIMTNLGRYFNPYLAVAVGAVAKYILKSVPQGAATTCYVALNPQVAGVSGEYFQDSNIAKPLPLVKDTELAKKVWDFSTKLTDSQSGESSS

SEQ ID NO: 18537 - protein, 1340 aa, Aspergillus nidulans FGSC A4
MDRAIRWSPSSTPAEQRFLSVDVAGKVFRLCKVTSFTNSILSHSVLSTHTKVPAFRAFDWSPVDETLVAVGQSSGDATILRMREGDDSQESFSFPVRHQRYCNAIAFSTHGLLAAGLDRVRNDFCLNVWDVNQRLAMKGAKGHVEPLRKLASSEPITSVKFFRDQPDTLVTGVKGQFVRIYDLREGPGLPSLQFPTRCVHNLAIDWLDENYIASGLTSHDSTVCVWDRRVGARLSAAATPGLETGQMEPALEFKNVIAPKSAIWSLRFSRTKRGCLGVLSSNGHLKTYNIVKEYVVEEYRSPIDRTLGQNSVSNYPEQIYTKSVRDVFSPYDHPSRGYEVSQRVVSFDFLNMSSSNEPSVLTLSADDQVKIITVKPPPPPVRLSSQGTLICGRFDEHRDFKAIYPLGTEGSSIAQIAKSLRDNALERQEEQAETRGLRENPEQPLSSRENRERMLSVGTLGSPLTAEEALTLLTVNRLRCKEGYLFNGMRNKQILADDPSLQDFWDWIERARSYSADDSMIMNHLDLNYLGVFDVWTGDLGVSLEARWLGPSAAHYPDINDTIVDLVQEKLNLPSSESLHSRYPEQRRLGLRICGAAQSRRELEELVKTLSAESQHTKAAALAVFQGEPKLAYLALRSHTPTQAHKLLAMAIAGAAKEKPDPDWEETCAEIAKELTDPYARAIIAFVSKGDWRSVIQETTLPLKYRVEVALRWLPDDDLTTYLTETTKRAIQQGNIEGIVLTGLGHSAMELFQSYINKFNDVQTPVLAMSHTVPRLVNTPANKHRFETWRETYRWQINSWKLQLERARFDVGSRKFAATWDGRRLVEPPRQQVSLTCNYCTRPLTQHDASSQLSPSTSGEVVHATPGNPLGSAAMSGSPDPMSKACVAAETATATDQRKLSEAEFMRRFIVFCINCNHGFHAHHAREWFDKHNLLDFHQPLLATLEIFKIKLNLNRIFSHHLLHLPRRVLRDNFNPAQPLHTLRPPQPPIMPNSGPSAEKRKEGGGKGGGKGGRGRERKPPSREVTVSKALSLLLRHAAEREGLKIDSQGYANVADVLAWRKLKSLKVTFPEIISAVETSDKKRFALLYQPPSEQTDTLPTKVEEPASAQDEPITATSTGTATATTAALAASKTDQTPAHYLIRATQGHSIKTVEAESGLLERLTLDNPDKLPETVVHGTYHSTWPLILESGGVKCMGRNHAHFATGPAVQDVLSAIDSSVSRGEEGDEKSGSGAGSHGMVISGMRADAAVLIYIDIRRALAGGCPFWRSENGVILSEGMEVNVATGTGTEKGVIPVEYFDVVVERRKGLGKIWEGGKMLRSEQCNTDLANYFDGRATKR

SEQ ID NO: 18538 - protein, 262 aa, Corynebacterium efficiens YS-314
MTTDLIIRDDTDGVAQLTINRPEAMNAMNRSVIDRLNEHLDVIDIDESIDVVIITGAGDKAFVAGADIKELAKRGPLDGLEAYMQRTYDRLGSFSKPLVAAVNGYAFGGGNELALACDIRVGSTNAQFALPEAGLGILPSAGGTQRLPNIVGRGLAADMIITGRRIEAEEARASNLITYLVEPEDLLPTAHKVAQRIRRKGPLAVSLIRQLLIRGGRVDHETGILLERLAQSVLFASPEKQEGTEAFVEKRPADFQSVRHDR

SEQ ID NO: 18539 - protein, 202 aa, Triticum aestivum
  misc_feature (65)..(65): Xaa can be any naturally occurring amino acid
  misc_feature (74)..(74): Xaa can be any naturally occurring amino acid
MAARAVTMLALVVAAAVLAGGASAQSPTSGCTQTLIGMSPCLNYITGNETAPSKSCCSQLASVVXSKPECLCVXLNADPAALGLGTVNKTRAFGLPEQCGVKTPPLSNCRSGPTTSPSFGGPGGKTPNSSGRRSQVNTPRRTWGTGRPSPPKLGRDSSPVFHGAAGFPPLPPRCFVNVMAGETRSFFFCVSYMEVAFHFGKL

SEQ ID NO: 18540 - protein, 558 aa, Photobacterium profundum SS9
MYENNKTLYLPYAGPTLLENALLNKGSAFSPEERQNFSLMGLLPAAIESITEQEERAYSQYQTFNDDMDKHIYLRNIQDTNETLYYRLIDNHIEEMMPIIYTPTVGAACEQFSNIYRRGRGLFLGYPDKGNIVDILNNAARQDVKIIVITDGERILGLGDQGIGGMGIPIGKLALYTACGGINPANTLPIVLDVGTNNTQLLSDPMYMGWRHPRITGQEYDDFVEEFIQAVKSRWPNALIQFEDFAQKNAMPLLNRYKDKVCCFNDDIQGTAAVTVGSLLAACKAAGSELSEQRITFVGAGSAGCGIAEAIVAQMIAEGLSDSAARARIFMVDRWGLLTDNMQNLLDFQQKLAQKSATVSQWNETGNISLLDVVSNGKPTVLIGVPGLFSQEVIMEMHAHCKRPIVLPLSNPTSRVEATPSDIIRWTEGDALIATGSPFDPVIFNEKTYPIAQCNNSYIFPGIGLGVLASGATRVTDEMLMESSRVLAECSPLAQNGNGALLPPLKDIHQVSHCIALAVAKKAVEQNKAPQRTEKQLLEKIESYFWKPEYLKYKRTAL

SEQ ID NO: 18541 - protein, 180 aa, Spinacia oleracea
MASSVLSSARVATVSRTPAQASMVAPFTGLKSTVGFPATKKNDDITSLASNGGRVQCMKVWPTQNMKRYETLSYLPPLTTDQLARQVDYLLNNKWVPCLEFETDHGFVYREHHNSPGYYDGRYWTMWKLPMFGCTDPAQVLNELEECKKEYPNAFIRIIGFDSNRQVQCVSFIAYKPAGY

SEQ ID NO: 18542 - protein, 154 aa, Brassica napus
MAQRTEKEETEFKVLETLTTTTTPTLCSNNCGVTASPSTNNMCQKCFNAGIDPTPIAKRSARSVSLRSTPAKAAIRPRETDPVKRDHHQQTVNRCSGCRKKVGLTGFRCRCGDLFCSEHRYSDRHECSYDYKTAGREAIARENPVVKAAKTVKV

SEQ ID NO: 18543 - protein, 310 aa, Pisum sativum
MASQQQTVREWSGINTFAPATQTKLLELLGNLKQEDVNSLTILVMGKGGVGKSSTVNSIIGERVVSISPFQSEGPRPVMVSRSRAGFTLNIIDTPGLIEGGYINDMALNIIKSFLLDKTIDVLLYVDRLDAYRVDNLDKLVAKAITDSFGKGIWNKAIVALTHAQFSPPDGLPYDEFFSKRSEALLQVVRSGASLKKDAQASDIPVVLIENSGRCNKNDSDEKVLPNGIAWIPHLVQTITEVALNKSESIFVDKNLIDGPNPNQRGKLWIPLIFALQYLFLAKPIEALIRRDIATETKPAWETRDVGDRK

SEQ ID NO: 18544 - protein, 441 aa, Erythrobacter sp. NAP1
MKKPLLTGAALLAGSAFAAQPALAAVPDAEVVSAGTAYIFNTLLFLIGGFLVMWMAAGFAMLEAGLVRAKNTSTQCIKNIGLYSIAGLMFWVIGYSIAYPGFAEGSLGLFGIGAAPYSMQGVGEADTGTGYSVASDWFFQMVFCATTASIVSGTVAERVKIVPFFIFVTILTGIIYPVVVSWEWGGGYLDTVHGFSDFAGSTLVHSTGGWAALVGAVIIGARAGRYGADGKVNVFPGANIPLATLGTFILWLGWFGFNGASQLAMGTVGDASDVSKIFVNTNMAACAGVVVAIILTQVMYKKADVTMALNGALAGLVSITAEPLAPTVGQSILIGGIGGVIVVLTVPMLDKLKIDDVVGAIPVHLFAGIWGTLIVAWTGDATFLGQLVGVLLTAVWVSLASAVVWLALKYTIGVRPTEEEEMAGLDHAEIGVEAYPEFART

SEQ ID NO: 18545 - protein, 435 aa, Ralstonia metallidurans CH34
MSSAAPTQNVSNGHTLPSYLNADNLGPWGIYLQQVDRVTPYLGSLARWVETLKRPKRAMIVDVPIELDNGTIAHFEGYRVQHNLSRGPGKGGVRFHQDVTLSEVMALSAWMSVKNAAVNVPYGGAKGGIRVDPRTLSHGELERLTRRYTSEINIIIGPSKDIPAPDVNTNAQVMAWMMDTYSMNSGSTATGVVTGKPISLGGSLGRHEATGRGVFVVGSEAARNLGMDVKGARVAVQGFGNVGAVAAKLFHEAGATVVAVQDHRTTLFDPAGLDVPKMMEYASHSGTIEGYRAEVISTEQFWEVDCDILIPAALEGQLTASNAPKIKAKLVIEGANGPTTPEADDILRERNILVCPDVIANAGGVTVSYFEWVQDFSSFFWTEEEINERLVRIMQEAFRAIWQVAQDNKVTLRTAAFIVACTRILQAREMRGLYP

SEQ ID NO: 18546 - protein, 112 aa, Erythrobacter sp. NAP1
MKFIIAIIKPFKLDEVREALGSIGVAGMTVSEVKGFGRQKGQTEIYRGAEYSTNMLPKVKLEIAASDDIAPQVVETIQQTANTEAIGDGKIFVLDLASATRIRTGEAGETAL

SEQ ID NO: 18547 - protein, 358 aa, Haemophilus somnus 2336
MKSYTIAVLSGDGIGPEIMAEAIKVLDAVQKKYNFKLNYRTFDVGGIAIDNHGTPLPASTLNGCEESDAILFGSVGGPKWEHLPPNQQPERGALLPLRKHFKLFCNLRPAILYQGLEKFCPLRADIAAKGFDMMTVRELTGGIYFGQPKGRDGEGMQTRAFDTEVYYKYEIERIAKVAFETAMKRRKHVTSVDKANVLISSVLWRETVNEVAKNYPDVTLDHIYIDNATMQLIKQPEFFDVLLCSNIFGDIISDEAAIITGSMGMLPSASLNEHGFGLYEPAGGSAPDIAGKGIANPIAQILSAAMMLRYSFNLNEEADSIENAVKQVLSQGYRTADLADEHPPISTAEMGNLIANAI

SEQ ID NO: 18548 - protein, 172 aa, Campanula carpatica
ECALWMPARSGSILQLSHSLHNLIPFGSTVPMNLPIVHEVFNSAEAIRIPHTCPLARIRPPVGRYNPPEVVAVRVPLLHLSNFQINDWPDLSAKDYAVMVLILPLNGVRNWRDHELELVEVVADQVAVALSHAAILEESMRARDQLMEQNIALDLARQEAELAIRARNDFLA

SEQ ID NO: 18549 - protein, 332 aa, Ralstonia metallidurans CH34
MDATARRFGIDFQWDHFDFSSYAYYERHGKMLPDDWFDTLVKYDAIYFGAVGWPAKIADHVSLWGSLLQFRRSFDQYVNLRPVRLMPGIKSPLADRKPGDIDFYVVRENTEGEYSSIGGRMFPGTEREIVMQETVMSRHGVDRILKFAFELAQKRPKKHLTSATKSNGISITMPYWDERVEAMAANYPGMKVDKYHIDILTAHFVQHPDWFDVVVASNLFGDILSDLGPACTGTIGVAPSGNINPDKVYPSLFEPVHGSAPDIAGQGIANPIGQIWCGAMMLEHLGHAEAGAAVLAAIEQVLAAGPGHAPLTRDIGGTASTADLGQAIAEAL

SEQ ID NO: 18550 - protein, 1021 aa, Cryptococcus neoformans var. neoformans JEC21
MRISRPLGQLNLYARTSPRISFPLPSARVISAPLRQSLPPPRLRVNTPLASRSFSISSTHLAKMSADVEMTSQSAKIIDGTAIAKQIRTSISQAITDLHASNPTFHQPHLVIFQLGSSAASSTYIRMKLKAAEESGMTVEHIKIPSDEESGALKGTGVKRVLEAVKKANQDEKVSGILVQLPLEGAGKAEEKAVVDSVDVTKDVDGFHPENIGLLSSRISEPFFTPCTPAGAIKLIESTGFNLAGSNVVVLGRSDIVGTPVCALLRKKDATVTQCHSRTKNVERIISQADVIVAAIGQAEFVRGEWLKPGAIVIDVGTNYIPDASKKSGQRLVGDVHFESASKVASYITPVPGGVGPMTVAMLMNNTFEAAKRQWSSRRAKQLIPLPLEIKEKVPSDIEIAVAQTPKPVAEIAEEIGVHPDEVESYGRYKAKIELSVLDRLKERKDGKYIVVAGITPTPLGEGKSTTTIGLAQALGAHLHKTAIACVRQPSQGPTFGIKGGAAGGGYSQVIPMTEFNLHLTGDIHAITAANNLLAAAIDARMFHEATQTDKGLFNRLCPPKKGVRTFSKPMIARLHKLGINKTNPSDLTEEEAARFARLDIDPATLTWNRVLDTNDRYLRQITVGQAPTEKGLERKTAFDIAVASECMAVLALSKDLADMRARLGRMVVASSKAGEPITAEDIGCAGAMAVLMKDAIKPTIMQTLEGTPVFVHAGPFANIAHGNSSIIADRIALKLAGVEEGDDESRNGYVITEAGFGADIGMEKFCNIKTRVSGLKPSAVVLVATIRALKMHGGGPAVTPGKPLDQVYVEENLELLEKGCANLGKHIENAKKFGLKVVVAINKFSNDTAAEMALVQEYALKVGADYAVPADHWARGGAGAVDLANAVIEACATPSTFDFLYDLNQPLTKKIEIIAKEMYGADGISLSAEAQAEIDRYEKQGYGGLPICMAKTALSLSDDPSKKGVPTGFTLPIRNVRLSAGASFVYPLVGDMSTMPGLTTRPGFYDIDLNPDTGEIEGLF

SEQ ID NO: 18551 - protein, 178 aa, Campanula carpatica
ECALWMPARSGSDLQLSHSLHNLIPFGSTVPINLPIVNEVFNSAEAIRIPHTCPLARIRPPVGRYNPPEVVAVRVPLLHLSNFQINDWPEMSAKDYAVMVLILPLKGVRNWRDHELELVEVVADQVAVALSHAAILEESMQARDQLMEQNIALDLARQEAEMAICARNDFLAVMNHEM

SEQ ID NO: 18552 - protein, 118 aa, Zea mays
MAGVMKLACLVLACMIVAGPITANAALTCGTVNSNVAPCIGYITQGGPLPRACCTGVSKLNSMARTTPDRQQACRCLKTAASALGPNLNAGRAAGIPKACGVSVPFPISTNTNCNNVK

SEQ ID NO: 18553 - protein, 865 aa, Lotus japonicus
MWSHHGFHLPQNCAAKEQIWGLVATVRHHRNHLFLLRSAVFHSIIFSFSYVVCNGNGSLTLEDSSWKSGNYRCSSKKYEQCTLSQGMTVHDGTFEAGFFHFENPQHHYFGVWYKSISPRTIVWVANRDAPLRNSTAPTLKVTHKGSILIRDGAKGVIWSTNTSRAKEQPFMQLLDSGNLVAKDGDKGENVIWESFNYPGDTFLAGMKIKSNLAIGPTSYLTSWRNSEDPASGEFSYHIDIRGFPQLVVTKGAAITLRAGPWTGNKFSGAFGQVLQKILTFFMQFTDQEISLEYETVNRSIITREVITPLGTIQRLLWSVRNQSWEIIATRPVDQCADYVFCGANSLCDTSKNPICDCLEGFMPQFQAKWNSLDWAGGCVSMEKLSCQNGDGFMKHTGVKLPDTSSSWFGKNMSLDECRTLCLQNCSCTAYAGLDNDVDRSVCLIWFGDILDMSKHPDPDQGQEIYIRVVASKLDRTRNKKSINTKKLAGSLVVIIAFVIFITILGLAISTCIQRKKNKRGDEGEIGIINHWKDKRGDEDIDLATIFDFSTISSATNHFSLSNKLGEGGFGPVYKGLLANGQEIAVKRLSNTSGQGMEEFKNEIKLIARLQHRNLVKLFGCSVHQDENSHANKKMKILLDSTRSKLVDWNKRLQIIDGIARGLLYLHQDSRLRIIHRDLKTSNILLDDEMNPKISDFGLARIFIGDQVEARTKRVMGTYGYMPPEYAVHGSFSIKSDVFSFGVIVLEIISGKKIGRFYDPHHHLNLLSHAWRLWIEERPLELVDELLDDPVIPTEILRYIHVALLCVQRRPENRPDMLSIVLMLNGEKELPKPRLPAFYTGKHDPIWLGSPSRCSTSITISLLEAR

SEQ ID NO: 18554 - protein, 149 aa, Picrophilus torridus DSM 9790
MKGYSIKEFPERSARARIREIDISLKDAVNVAHFLKGMDLDSAKNVLDNVIEKKVPVPYFRYMDSVSHRKGIGPGRYPVKAARAFKKLLEDVSANAEFKGLSDSLEIVHIAVSKGRMIKKYTPKAYGRAGAFFKDLVNLEVVVRESGEE

SEQ ID NO: 18555 - protein, 420 aa, Mycobacterium leprae
MTTSPELVTGKAFPNVVVTGIAMTTALATDAETTWKLLLDNQSGIRMLDDPFIEEFNLPVRIGGHLLEEFDHQLTRVELRRMGYLQRMSTVLSRRLWENAGSPEVDTNRLMVSIGTGLGSAEELVFSYDDMRARGMKAVSPLAVQKYMPNGAAAAVGLEHHAKAGVMTPVSACASGSEAIAHAWQQIVLGEADSAICGGVETKIEAVPIAGFSQMRIVMSTKNDNPAGACRPFDRDRDGFVFGEAGALMLIETEDSAKARSANILARIMGASITSDGFHMVAPDPNGERAGHAIARAVHLAGLSPSDIDHVNAHATGTQVGDLAEAKAINKALCNNRPAVYAPKSALGHSVGAVGAVESILTVLALRDQVIPPTLNLVNLDPDIDLDVVAGKPRPGDYRYAVNNSFGFGGHNVAIAFGCY

SEQ ID NO: 18556 - protein, 826 aa, Lotus japonicus
MAQKQSIQDDETLVSPEGTFEAGFFRFGNSLRRYFGIWYKSISPRTIVWVANRDAPVQNSTATLKLTDQGNLLILDGLKGIVWSSNASRTKDKPLMQLLDSGNFVVKDGDKEENLIWESFDYPGDTFLAGMKIKSNLATGPTSYLTSWRNAEDPASGEFSYHIDTHGYPQLVVTKGATVTLRAGPWIGNKFSGASGLRLQKILTFSMQFTDKEVSLEYETVNRSIITRTVITPSGTTQRLLWSDRSQSWEIISTHPMDQCAYYAFCGANSMCDTSNNPICDCLEGFTPKFQAQWNSLDWTGGCVPIKNLSCQNGDGFPKHTGVQFPDTSSSWYGNSKSLDECGTICLQNCSCTAYAYLDNVGGRSVCLNWFGDILDMSEHPDPDQGQEIYLRVVASELDHRRNKKSINIKKLAGSLAGSIAFIICITILGLATVTCIRRKKNEREDEGGIETSIINHWKDKRGDEDIDLATIFDFSTISSTTNHFSESNKLGEGGFGPVYKGVLANGQEIAVKRLSNTSGQGMEEFKNEVKLIARLQHRNLVKLLGCSIHHDEMLLIYEFMHNRSLDYFIFDSRLRIIHRDLKTSNILLDSEMNPKISDFGLARIFTGDQVEAKTKRVMGTYGYMSPEYAVHGSFSVKSDVFSFGVIVLEIISGKKIGRFCDPHHHRNLLSHSSNFAVFLIKALRICMFENVKNRKAWRLWIEERPLELVDELLDGLAIPTEILRYIHIALLCVQQRPEYRPDMLSVVLMLNGEKELPKPSLPAFYTGNDDLLWPESTSKNCERVIKHVILNGFMVPTANLHFCKFLGGRDRDDPMTFKPEGHEQP

SEQ ID NO: 18557 - protein, 341 aa, Aspergillus nidulans FGSC A4
MNSSLYVIPVGATILVTGANGYIASHVCNILLSMGYRVRGTLRSPKPWLTAFFDAKYGTGRFESFILPDLTQRGAWQVAVEGVQGIAHVASDMSMKPNPEQVVPQMVQGVQNALKAAMQQPQVKRVVYTSSSTAAYISVPNKEGVRITRETWHDACIDAAWDKDTPENERGYLVYSASKTSAEKEAWNWVQQNQPHFGFNSIVPNTNYGRILCPEIPATSMTETANLLHGNDSVIRRFPPQWFVDVEDTARLHVVALLSPSAVGKRIFAFAQAFNWTDILTILHELRPDNIHLPPCPKNEGRDLSEIEDAPEAEALMNEFFGTKGWVSLKESLAAGLEGYW

SEQ ID NO: 18558 - protein, 463 aa, Burkholderia sp. 383
MDNDSPGRYASAAATHDFGAHAMRGDADERRKPHLLGLATLVIFGLAYMLPMTVFTTYGIVTSETNGHLTAAYAVTLVAMLFTARSYGHMARLMPSAGSAYTFASRNFGTSAGFMVGWALLMDYLFIPMISYLAIGIYMKQIFPGVPAGVWIVGSIVLITGLNIVGIRLVNRVNLILIASQLVFIAIFFVASARVAAGEGLSMAVALPSSGDARAIFAGSAILCLSFLGFDAVTTLSEETREPKRTVPRAILLCTLASGVLFMLVAYVGQVVFPDWHAFKDLDSASLELMRRIGGGTLSAFFVAVYVAGCFASAMAGQASVTRVLFAMGRDRVLPERVFGHLHARLRTPVRATLAVGIVSLSALFITLDLASTMISFGALVAFAVVNLCVMRSYLCRPEHRRFAGWITFGVMPAIGFAMNVWLWSGLSRQTFYVGTGWLVLGLCQLVWLTRGFTRPAPTLSMN

SEQ ID NO: 18559 - protein, 75 aa, Glycine max
MLEFNCMQHILYRQREQLGEGIGYGWIDGLKTHAEKHATDLMLLIAAYMFPFNTPTSREAYYYRMKLERNFRQVH

SEQ ID NO: 18560 - protein, 332 aa, Arabidopsis thaliana
MKGTLRYLAGIAGPNGFGSRSTAEQVTQHSFFPCSHLTAIITGGTSGIGAETARVLAKRGVRVVMAVRDMKKAEMVKERIIRENPEADIILFEIDLSSLSSVARFCSQFLSQDLPLNILINNAGVFSPNLEFSEEKIELTFATNFLGHYLLTEMLIEKMIDTAEKSGIEGRIINLSSVIHNWVKPDCFSFPKLLHPIRYNGTRAYAQSKLATILHAKALSKQLKDRNANVTINAVHPGIVKTGIIRAHKGLFTASKLLKSISQGAATTCYVALSNETKGLSGKYFADCNETNCSDLANDEYVALKLCTQSRALIHDHLHEFQIHALPNLCFL

SEQ ID NO: 18561 - protein, 317 aa, Methanosarcina acetivorans C2A
MDFEASARDLTTPVKGAKIVPNMSVDELVREYAGCAFGAGRLAEAVDIYYEMLASEKTTKFFGLAGAMTPAGMRGIIADLIRDGHIDVLVTTGANMVHDTVEALGLHHYKGSDCANDIQLRHECIDRIYDVYLPDQHFTDLEEFLQSVYAGLPQEKLSIRQVLTEIGKNLDDDSSILKTAAEMGVPVYCPALQDSVIGLQAWLYKEGNLLHVDAFADMHEFMEICYEAESAGAMLLGGGVPKNYILQSMLVTPKSFDYAIQLTMDRPETGGLSGATLDEAQSWGKVGEDAKSVTVYADATITLPLIVSAVRTRLSKR

SEQ ID NO: 18562 - protein, 333 aa, Aspergillus nidulans FGSC A4
MGGLFGQLFTKLTLPPASAVDGKTILITGGNTGLGREAARHALALGAATVILGVRTLSKGEEAKADIESSTGNSGRNKVLVWPIDLESFASVQAFAERARNYVAGENGRLDLAIMNAGIASVMWAVTPDGWERHLQINVLSTALLSLKLLPLLRHTAEQHPQDWQRPHLVIVTSDSHESVKFPERTADRIFPVLNDQGQWAKSQRLGGPIERYGVSKLMAILMTEDIARLVPRSTQGDPLVVVNSVAPGFCKSELLTRESVPWFLKVIEALVARSAQEGSKTLLDSATRGIASHGKWLENQAITTPGKLVTDPNEAAYKKKEARHSQSTSEHS

SEQ ID NO: 18563 - protein, 99 aa, Triticum aestivum
GRCGGKKIKVDKPLGLGGGLTVDIDANGRKVGKKGVYQFVDKYGANVDGYSPIYTPEEWSESGDRYAGGTTGLLIWAVTLAGLLGGGVLLVYNTSALAG

SEQ ID NO: 18564 - protein, 496 aa, Thermus thermophilus HB27
MPLITTETGKKMHVLEDGRKLITVIPGDGVGPECVEATLKVLEAAKAPLAYEVREAGASVFRRGIASGVPQETIESIRKTRVVLKGPLETPVGYGEKSANVTLRKLFETYANVRPVREFPNVPTPYAGRGIDLVVVRENVEDLYAGIEHMQTPSVAQTLKLISWKGSEKIVRFAFELARAEGRKKVHCATKSNIMKLAEGTLKRAFEQVAQEYPDIEAVHIIVDNAAHQLVKRPEQFEVIVTTNMNGDILSDLTSGLIGGLGFAPSANIGNEVAIFEAVHGSAPKYAGKNVINPTAVLLSAVMMLRYLEEFATADLIENALLYTLEEGRVLTGDVVGYDRGAKTTEYTEAIIQNLGKTPRKTQVRGYKPFRLPQVDGAIAPIVPRSRRVVGVDVFVETNLLPEALGKALEDLAAGTPFRLKMISNRGTQVYPPTGGLTDLVDHYRCRFLYTGEGEAKDPEILDLVSRVASRFRWMHLEKLQEFDGEPGFTKAQGED

SEQ ID NO: 18565 - protein, 1072 aa, Vibrio vulnificus YJ016
MTESISLTLTNNESSRFLIRQRLLSILQAFGYDACRCDIHMLRIGEFVRITLADIQRFTLSFELDDDSLKVILASSELDPQTCSFPACVHTFQREKAIGVSIPSLIPLSDEILNQLTQFLAKPSRDELMSELKAKNQELAVHQAGLEKEIELRTADLKASEELSRTIIDGAPSSVAIVNESLFISLWNSTAQNVYGYSSEEATGENILTLLNMSLPDALSHVLSAPLALQNQPDVEGGFFEVETTTKEGHMVPIDLGVSIFELNGACHAALFLRDVTSRKAVEKELNDAKAKAEEAVEVKSMFLANMSHEIRTPMNAIIGMSHLALKTDLTPKQHDYVSKIHSSATLLLGIINDILDFSKIEAGKLSIETTEFYLDDVFHNVSMVTGQKAFEKGLELIFDLPRETPRCLLGDPLRLGQIIINLVNNSVKFTEKGEITVSVHHIRNVEDLVELEFRISDTGIGMTDKQMKSLFTAFTQADGSTTRKYGGTGLGLSICRRLVELMGGQIRVESEAGKGSHFIFNVLVKADPANSSAPSIVPQSLEKIRILVVDDNEHALEIMQEMLSTLPGKVALANSGQQAVDCIRKASEQREKFDLIFMDWNMPEMDGIETSRLIRESFASEYQPQIVIVTAYDKEDVLDATNDLDIAGFLSKPVGQSYLFDLLVELFGRDRNPTTQIRKKELPTHDSKNDLKGLKVLLTEDNEINQQIAVELMEGNGLLVTVANNGQEALDHLEAMAKGESHFDIIFMDLQMPVMDGYEASHRIRANSSYDTIPLIAMTAHAMVEERERCLNLGMNDHISKPIDPEILFNTIRKWCPRTLNEKDESPVDAEQSQTQQLDSSIESAATPKSTERAAAEKRTLETLESLDYKNGLLRVAGNQTLYRRLLSQLMDKEISAPERLTIALDKQDTEQAIIIAHSLKGSASNLGAIRLSDIASRLEMAIQHGKERAEIDKLNKELDGYLEHFFQDLALALGRPKPSSDKRLELKDEELMIIHTLDSLLDSLDAYAIEFLDEHYVLLNTLLKSEDFEACCRCVNDCDFESASKSLRKAVSIYPLDLGKLSGEKNGRES

SEQ ID NO: 18566 - protein, 367 aa, Brassica napus
MALSAIGFEGYEKRLEVSFFEPSFFQDSKGLGLRALTRSQLDEILTPAACEIVSSLSNDHLDSYVLSESSFFVYPYKVIIKTCGTTKLLLSIPPLLKLAGELSLSVKSVKYTRGSFLCPGGQPFPHRSFSEEVSVLDGHFTKLGFHSVAYLMGNDDENKKWHVYAASAQTSSDCNNNVYTLEMCMTGLDKEKASVFYKNETGGENGSMTDNSGIRKILPKSQICDFEFEPCGYSMNSIEGDAISTIHVTPEDGFSYASFEAVGYDFSTLDLSQLVTRVLSCFEPKQFSVAVHSSVGANAYKPEISVDLEDYGCRERTFESLGEESGTVMYQTFEKLGKYCGSPRSTLKCEWSSNNSCSSEDEKDEGI

SEQ ID NO: 18567 - protein, 524 aa, Aspergillus nidulans FGSC A4
MSKTKSVVKKGAESAGKLADKALSKVKDAGVTKATQSPKAKSKQIAREIASKEKKPKSKKKEPTPSSSSESESESESESDSSSSESESEDEKPVKKEVKKEAKKAESSSESESDSSDSDEEMKDASSSESDSESESEEEKKPAKSAKAEPKVVKKAESSESESSDSSDSDSDDESSEEEEVPKAKAKAAESSDSEDSDSESEEEAPAKAKGDAKTSKEESDSDSDSSESSSDSDEESGSSGSESEDSDKPADSKKRKAEEEPAAASKKSKTEEGASANLFVGNLSWNVTEEWLHQEFEQFGELSARIMTERDTGRSRGFGYVEFTNAADAAKAYEAMKEHEIDGRKINLDYATGRPANKDQGGFKERAQNRARSFGDQTSPESDTLFVGNLPFSANEDSVHEVFGPQGNVLGIRLPTDMESGRPKGFGYVQYSSVDEARKAYNELQGAEIDGRPIRLDFSTPRANNGGGGGGRGGFGGRGGRGGPRGGGRGGRGGFGGRGGGAGGAPNRARGGIPEFKGTKMTF

SEQ ID NO: 18568 - protein, 504 aa, Cryptococcus neoformans var. grubii
MDAKKATIAIIALAAAATAYKVMSTTQEKKNTEGVCPATGQKRAGSTGCPFSSGLPLPDPGHRCDPNSIQEEYKVPEVPPLTEAQKDIIKSTAPILEQHGVTITTHFYKNMIRAHPELRDVFSESAQKLGHQPAALAAAVYAYACNIHDLTPILPVVERIAHKHTSLHITANQYGIVGKHLIQAIVDILGDAVTPEVGDAWYNGYWNLAHVFIKRERQLYDSAIEAGGWEGWRQFKVAKRVKESNEITSFYLKPVEGSGAPLPKFRPGQYTAVQIDIPGLGYKQARQYSLSDAPNGEYFRISVKREDGVPVPTLSNPEVPFHPGWMSNVLHKDYQEGSIVNVASPFGDFYYAPSDSSPTAPLVLLSAGVGQTPVMAMLNAQLAKNNEPNSPIKPITYVTVARSPKVRAFKDHVKKLSDVHENVKSRIFYSRPTDDVVEGQDYDFKGRMDLEKIKEDLYLGDKTAEYYICGPSKFMLNTRDKLQSLGVDPSRIHYELFEAGNLSA

SEQ ID NO: 18569 - protein, 411 aa, Chlamydophila pneumoniae CWL029
MIPTMLMFFIICFTLCSGFISLSQIALFSLPTSLISHYKRSKSKKQQRVATLLLHPHHLLITLIFCDIGLNIAIQNCFAILFGDAASWWFTVGLPLAITLILGEILPKAVALPFNTQIASSVAPLILCVTKIFKPLLHWGIVGINYVVQWILSKQQIDIIQPQELKEVLQSCKDFGVVNQEESRLLYGYLSLSDCSVKERMQPRQDILFYDIQTPLENLYLLFSKQHCSRVPICNDNLQNLLGICTARSLLLHDKPLQSSDDLLPLLKKPYYMPETISAKMALCQMAAEDETLGMIIDEYGSIEGLITQEDLFEIVAGEIVDQRDNKILYTTSGADVIIASGTLELREFSEIFDINLPTNNNIATIGGWLIEQIGTIPTTGMKLSWNNLLFQVLDAAPNRIRRVYIRKLYD

SEQ ID NO: 18570 - protein, 365 aa, Cryptococcus neoformans var. neoformans
MADFVKLSIFGTVFEVTTRYVDLQPVGMGAFGLVCSAKDQLSGTSVAIKKIMKPFSTPVLSKRTYRELKLLKHLRHENIISLSDIFISPLEDIYFVTELLGTDLHRLLTSRPLEKQFIQYFLYQILRGLKYVHSAGVVHRDLKPSNILVNENCDLKICDFGLARIQDPQMTGYVSTRYYRAPEIMLTWQKYDVAGDIWSTGCIFAEMLEGKPLFPGKDHVNQFSIITELLGTPPDDVIQTIASENTIRFVQSLPKREKVPFSTKFPNADPVSLDLLEKMLVFDPRTRISAAEGLAHEYLAPYHDPTDEPVAAEVFDWSFNDADLPVDTWKVMMYSEILDFHNLGDISQNEAEGPVTGEVPAAPAS

SEQ ID NO: 18571 - protein, 206 aa, Mesorhizobium sp. BNC1
MSGTLILVRHGQSEWNLKNLFTGWRDPGLSELGHEEATSAGRKIKDRGLRPDIAFTSVLSRAKVTNTHILEVLGLPALETIEDVALNERDYGDLSGLNKDDARKKWGEEQVHIWRRSYDIPPPGGESLRDTGARVWPYYLREILPQVLRGKTVLVSAHGNSLRSLAMVLDGLSGEEIVKMEIATGVPIVYRLNPDSTVASKEILEG

SEQ ID NO: 18572 - protein, 949 aa, Bacteroides thetaiotaomicron VPI-5482
MKTDLLASRHIGINEEDTAVMLRKIGVDSLDELINKTIPANIRLKEPLALAKPLTEYEFGKHIADLASKNKLYTTYIGLGWYNTITPAVIQRNVFENPVWYTSYTPYQTEVSQGRLEALMNFQTAVCDLTAMPLANCSLLDEATAAAEAVTMMYALRSRTQQKAGANVVFVDENIFPQTLAVMTTRAIPQGIELRVGKYKEFEPSPEIFACILQYPNSSGNVEDYADFTKKAHEADCKVAVAADILSLALLTPPGEWGADIVFGTTQRLGTPMFYGGPSAGYFATRDEYKRNMPGRIIGWSKDKYGKLCYRMALQTREQHIKREKATSNICTAQALLATMAGFYAVYHGQEGIKTIASRIHSITVFLDKQLKKFGYTQVNAQYFDTLRFELPEHVSAQQIRTIALSKEVNLRYYENGDVGFSIDETTDIAATNVLLSIFAIAAGKDYQKVEDVPEKSNIDKALKRTTPFLTHEVFSNYHTETEMMRYIKRLDRKDISLAQSMISLGSCTMKLNAAAEMLPLSRPEFMSMHPLVPEDQAEGYRELISNLSEDLKVITGFAGVSLQPNSGAAGEYAGLRVIRAYLESIGQGHRNKILIPASAHGTNPASAIQAGFETVTCACDEQGNVDMGDLRAKAEENKEALAALMITYPSTHGIFETEIKEICEIIHACGAQVYMDGANMNAQVGLTNPGFIGADVCHLNLHKTFASPHGGGGPGVGPICVAEHLVPFLPGHSIFGSTQNQVSAAPFGSAGILPITYGYIRMMGTEGLTQATKIAILNANYLAACLKDTYGIVYRGATGFVGHEMILECRKVHEETGISENDIAKRLMDYGYHAPTLSFPVHGTLMIEPTESESLAELDNFVDVMLNIWKEIQEVKNEEADKNDNVLINAPHPEYEIVNDNWEHSYTREKAAYPIESVRENKFWVNVARVDNTLGDRKLLPTRYGTFE

SEQ ID NO: 18573 - protein, 347 aa, Anthurium andraeanum
MMHKGTVCVTGAAGFVGSWLIMRLLEQGYSVKATVRDPSNMKKVKHLLDLPGAANRLTLWKADLVDEGSFDEPIQGCTGVFHVATPMDFESKDPESEMIKPTIEGMLNVLRSCARASSTVRRVVFTSSAGTVSIHEGRRHLYDETSWSDVDFCRAKKMTGWMYFVSKTLAEKAAWDFAEKNNIDFISIIPTLVNGPFVMPTMPPSMLSALALITRNEPHYSILNPVQFVHLDDLCNAHIFLFECPDAKGRYICSSHDVTIAGLAQILRQRYPEFDVPTEFGDMEVFDIISYSSKKLTDLGFEFKYSLEDMFDGAIQSCREKGLLPPATKEPSYATEQLIATGQDNGH

SEQ ID NO: 18574 - protein, 233 aa, Wigglesworthia glossinidia endosymbiont of Glossina brevipalpis
MNNNFFISPSILAANFANLGEEIRKVIDAGADIIHFDAMDNHYVPNLSIGPIVLKSIRKDGIIIPIEVHLMAKPIDELVVSFIKTKANCIIFHPESTKNVNFLLKLIRKNNCKAGLAFTLTTSLNYLKNKNIVKNLDIVLIMSVSPGFSGQKFQKSAIKRLKIARKLIDDSGYNILIGIDGGVNDDNIYDVAYAGADIFVIGSSIFSKNNYFKTIKNMKKKIKSAKINILKNL

SEQ ID NO: 18575 - protein, 595 aa, Zymomonas mobilis subsp. mobilis ZM4
MCRQLSGAAIVLETLKDMGVDLIFGYPGGAVLPIYDALYQDEGIRHILARQEGGAVHAAEGYARSTGKPGVVIVTSGPGATNAVTGIADAMLDSIPLVVFSGQVATNLIGTDAFQEADTIGITRHCTKHNYLVRDPKDLAQTIVEAFHLATSGRPGPVVIDLPKNVQTAVIDYIKPDPNKRMHRGYRPRVKADPVEITNALDMIAKAKRPVFYTGGGVINSGPDASKALRELADLTGVPVTSTLMGLGAFPASSQQWLGMLGMHGTYEANFAMHDADLVVALGSRFDDRVTCRVDSFSPHSKKIHVDIDRSSINRIIHVDLPIVGDVGSVMQDMVALWKEKHYQMQDISAWWVQIDEWRAKQCLNFTKQGNEIMPQQAIRSLWEATKGKNPIVSTEVGQHQMWTAQYFGFDSPNHFLTSGGLGTMGYGFPSIIGAQVGNPDSLCMTIAGEASFQMNIQEMATVAQYRLPVKIFILNNRFMGMVRQWQDLLYDHRRSQSYSEALPDFVALAKAYGWNALKIEKPSQLEDGIKTMLETPGPVLVDCQVAQLANCLPMVPPGAGQTEMILESDITDNHVKKPEYTPSAAPSSATTIRG

SEQ ID NO: 18576 - protein, 126 aa, Triticum aestivum
  misc_feature (113)..(113): Xaa can be any naturally occurring amino acid
  misc_feature (115)..(116): Xaa can be any naturally occurring amino acid
  misc_feature (120)..(120): Xaa can be any naturally occurring amino acid
MAASMITSPIVAPTSVPSLSRRGSSFAVVCSGGKKIKVDKPLGLGGGLTVDIDANGRKVGKKGVYQFVDKYGANVDGYSPIYTPEEWSESGDRYAGGTNGLLIWAVTSPGLLXGXXLLVXNTTLSR

SEQ ID NO: 18577 - protein, 724 aa, Saccharomycopsis fibuligera
MLKSSLYRGAALRAAIKSSSGSRASLYKAAAITLHNTNASSFAIRSNSSQAALREEPSPAFNQTTPEESRKALNSFLSQQQSKSASASASASSAASAAAAGAESAAEKNASAAAAAMDDSFVGLTGGEIFHEMMLRHKVDTVFGYPGGAILPVYDAIYESKNFNFVLPRHEQGAGHMAEGYARATGKPGVVLVTSGPGATNVITPMADALMDGVPLVVFTGQVPTSAIGTDAFQEADVIGISRSCTKWNVMVKSVSELPRRINEAFEIATSGRPGPVLVDLPKDVTAAILRDPIPTNSTLPSKTLASITKHAVTQFAEESIKEASDLLNVAKKPVLYVGAGILNHPDGPKLLKELSEKAQIPVTTTIQALGAFDQRGEKSLDMLGMHGSAFANLAMQNADLIIALGARFDDRVIGAVSKFAPNAKLAAANHRGGIIHFEISPKNINKVVEADVAVEGDVTRNLRKFLPLINQVEATDPARAAWFKQIASWKAQYPYAYLKETPESKIKPQTLIQELSDKCLELDKDVVVTTGVGQHQMWAAQHFTWTQPRTFITSGGLGTMGYGLPAAIGAQVGRPDAVVIDIDGDASFNMTLTELSTAAQFNIPVKIIVLNNEEQGMVTQWQSLFYEHRYSHTHQSNPDFVKLAEAMGVKAMKLTKQGELHSTLDEFLQYSAGPVLLEVEVEKKVPVLPMVPGGKGLDEFIYFDPEVERQQNELRRKRTNGKH

SEQ ID NO: 18578 - protein, 367 aa, Arabidopsis thaliana
  misc_feature (271)..(271): Xaa can be any naturally occurring amino acid
MSRQSSSLLKNLRSIASRSKIQTRSVTYMPRPGDGKPRPVTLIPGDGVGPLVTNAVQQVMEAMHAPVYFEPFEVHGDMKSLPEGLLESIKKNKVCLKGGLKTPVGGGVSSLNVNLRKELDLFASLVNCFNLPGLASRHENVDIVVIRENTEGEYAGLEHEVVPGVVESLKVITKFCSERIAKYAFEYAYLNNRKKVTAVHKANIMKLADGLFLESCQEVAKKYPSIAYNEIIVDNCCMQLVARPEQFDVMVTPNLYGNLVANTAAGIAGGXGVMPGGNVGAEYAVFEQGASAGNVGKDTTEEQKNANPVALLLSSAMMLRHLQFPSFADRLETAVKRVIAEGNCRTEDLGGNSTTQEVVDAVIANLD

SEQ ID NO: 18579 - protein, 289 aa, Zea mays
MGAPKWVVAPLALLLLLQLAGASHDVRRSLEAEAASPSVPASILSPLLRTGYHFQPPMNWINDPNGPLYYKGWYHLFYQYNPKGAVWGNIIWAHSVSRDLINWIALDPAIKPSIPTDQFGVWSGSATILPNGTVAMLYTGIDRPGTNYQIQNIAFPKDPSDPLLREWVKPGYNPIAVPEAGMNATQFRDPTTAWHAGDGLWRMLVGGLKPGTLRGMAILYRSRDFKHWVRAKHPLHSALTGMWECPDFFPVREPGDPDGLDTSEFGPHYKYVLKNSLDLTRYDYYTVGT

SEQ ID NO: 18580 - protein, 182 aa, Mesembryanthemum crystallinum
MASSMVSSAAVATVNRTPAQASMVVPFNGLKSVAAFPVTKKNNDITSVATNGGRVQCMQVWPPLGKKKFETLSYLPPLSEESLMKEVQYLLNNGWVPCLEFEPTHGFVYREHGNTPGYYDGRYWTMWKLPMFGCTDPSQVVAELREAKKAYPEAFIRIIGFDNVRQVQCISFIAYKPASYDA

SEQ ID NO: 18581 - protein, 307 aa, Erythrobacter sp. NAP1
MTTSGITDWTPDELPDLTDKRFLITGGNSGIGFEAAKILASKNGDVVIACRSEEKGKQALAKLVNEGEGRCELLRMDLADMSSIRAAADEAKDRFGAIWGLVNNAGVMQTPKFKTKDGFELQLGTNHLGHFLWTALMMDQVDGRGGRVVTVASIAHKFGRIDFDNLMMERGYDRSRAYLRSKLANLLFAMELHRRLDAAGSKVKSVACHPGYSSTPLLSKTQNPLSRIVNGVSSAVFAQSPVRGSWPTALAAADDRAESGGYYGPTGFFDARGPVGDSDVEARALDETVAKRLWGVSEELVGETFSI

SEQ ID NO: 18582 - protein, 372 aa, Triticum aestivum
MMASDSDRLRALKAFDNTKAGVKGLVDTGITTIPSIFHHPLPLHRLHADQEHHFTIPVIDLAAAMGATTTTTAPSERAELVAAVKAAVETVGFFQVVNHGVPKAVMSEMLAALQGFHEETVEAKAPYYSRDSRRRVRYQSNFNLFRSPAATWHDTLFMETAPEPTPPEEIPPACRTIVPEYTRLVQQLGRTLLELLSEALGLHRGHLEEDAACLEGLAGHYYPSCPEPHLTLGTTAHSDPCFLTVVLQNAVGGLQVLVDGLQEDDKKKSDAVWVDVPVVAGALVVNVGDFLQLVSNGKFKSVEHRVVAKSVGPRVSVACFFRPQGAATSTRVLQPIVTNGEARYRSTTMAELVRRYRAKGLYGSSLLQHLSL

SEQ ID NO: 18583 - protein, 291 aa, Citrus x paradisi
MAEASPAAANAELLEWPKKDKRRFLHAVYRVGDLDRTIKFYTECFGMKLLRKRDVPEEKYSNAFLGFGPEQSHFVVELTYNYGVTSYDIGTGFGHFAIATEDVYKLVENIRAKGGNVTREPGPLKGGTTHIAFVKDPDGYIFELIQRGPTPEPLCQVMLRVGDLGRSIKFYEKALGMKLLRTVDKPEYKYTLAMLGYAEEDQTTVLELTYNYGVTEYTKGNAYAQVAISTDDVYKSAEVVNLVTQELGGKITRQPGSIPGLNTKITSFVDPDGWKTVLVDNEDFLKEIQSE

SEQ ID NO: 18584 - protein, 406 aa, Frankia sp. EAN1pec
MAGPEVSISGVGLVTPGGVGVAASWAAVCAGRPTASLDPSLADGLVQIACRVPDFAPDLLLGGQRAHRLDPFVQFALVAAGEAIADAGLDPASWDGARVGVVLGCADGGPGTVEAQHRVLIERGLAQLSPLLLPMQLPNMLAGQAAIEFGATGPNLVVSTACASGATAIGVARDLLAMDRCDVVLAGGSEAMITPLVMAGFARMRALSRRAHDPASASRPFDVDRDGFVAGEGAGVLVLERLADARARGARVRARLVGYGASADAHHITSPHPSGRGIEAAVLAALADADAAPEQVRHVNAHGTGTPLNDLVEGQLLSRLFTSGPLVTSTKGTTGHLLGAAGAVEAVFSTLTVEQGLVPPTTGLRTLDPRLDIDVATVATAAAPDFVLSNSLGFGGQNAVLAIAKA

SEQ ID NO: 18585 - protein, 249 aa, Triticum aestivum
MASTNGGFVSPLAAAVPVEAVLFDIDGTLCDSDPLHHIAFQELLLAIGYNNGVPIDDEFFINNIAGRSDAEAAQNLFPDWPLEKGLKFLEDKDVKYRSLAMERLEPVKGLHKVVQWVKDHGYKRAAVTNAPRINAELMIKLLGLSDFFQAVIVGGECEKPKPAPFPYLKALKELEVSAAHTFIFEDSASGTRAGVAAGMPVVAVSTRNPEKSLQEAGAALIISDYEDQKLWNALEEIDREEAKLKTGGA

SEQ ID NO: 18586 - protein, 474 aa, Frankia sp. EAN1pec
MSIDRLPTAGHTGAQAPGPGRATPAFLRELLADPLRLFTRLRTSYGPIVRVPVGRGGFHLVCGPEAVEQVLVGEQRAYAKGLRRRTMPPGEGIQPLSLLLGSGLLTSGGDLHRTRRRLIQPMFHRERIAGYGAAISELSRATALGWADGSRREVHTDMSELTLAIVARTVFGVDVDSEVVRRVRRAVAANMRLSQLAVLPGAIRLQQHLPIGPLRAARDARDDLTAVVMEMIEQRRSLDAAGSDLLSTLLATRDADTGAPLDDTSIRDEALTILLAGHETTANAMAWAYHLLATNPQARDRMHTELDDVLNGRKPTTADLAELPYTRAVFSETLRLYPPAWILLRRTTRDVTLTGYHLPADTNVLLSQWVIHRDPTWWPAPEEFRPQRWLTPDPTRPKYAYFPFGGGTRQCIGNTFAEMEGALALAAISSIRTLTPTPGRPVTPIPRVTLRPQPLQMTAHPRTPHPTPATHKPH

SEQ ID NO: 18587 - protein, 438 aa, Alkaliphilus metalliredigenes QYMF
MVEFKFPDIGEGISEGILTKWMVKAGDNIKEGESLCEVETDKVTTELPSPATGLVNSLKGEEGDTIYVGDVIVKIDTGDHAEEESKNRTTSESNEKKLEKVEEEENAGVVGALEVSDEVMGASQEARGEKAVKGQSKKVLATPVARQMAYDLGIAIGTIKGTGPLGRVMKADIKVAHERKQQNGPLESQPKKSSMEPKEAQGQLSDKEERIKLSMLRKTIGKRMTESFYTAPHALCIDEVDVTDLVAYREEMKNHFVEEKEIKITYLPFMIKAVMLALKDYPRFNAQLDEENQMLILKKYYNIGIAVDTPEGLTVPVIKDVDQKGLMSLMEESVRLSQSAKDKSLKLNQLKGSTFTITNLGSLGVKSGMPIINYPEVAIIGIGQIEQKPVVVDNEVVIRWMMPLSLSFDHRVLDGGDVGRFLNQFKKYIKDIKGLLLR

SEQ ID NO: 18588 - protein, 359 aa, Synechocystis sp. PCC 6803
MVDEFDLPPEIIDRRVRKMKMISPSNIEVNIGQTLKDDEYIGMCRREVLDGFLRERAEKLGTKVINGTVYKLDIPSKDSDPYTLHYADHSVGGTTGEMKILKVDVVIGADGANSRIAKAIDAGDYNYAIAFQERIRLPEDKMAYYDELAEMYVGDDVSPDFYAWVFPKYDHVAVGTGTMKVNKARIKDLQAGIRTRAAKKLEGGEIIKVEAHPIPEHPRPRRVVGRVALVGDAAGTVTKSSGEGIYFAAKSARMCAETIVATSNNGQRVPTEADLKQYIKQWDKRYGATYLVLDILQRVFYRTDATREAFVEMCSDIDVQKLTFDSYLYKTVVPANPLVQMKITAKTIGSLLRGNALAP

SEQ ID NO: 18589 - protein, 418 aa, Methanopyrus kandleri AV19
MTVVFAPRFARRAPSRTRGSEAMEFDVVVVGAGPAGSVAAWAAAEAGCDVLILERKAEIGVPKQCAEGISAHGLEHAGIEPQDEWIATEISRALIYAPNGKEFEVPGDGYVLERRVFDKWLVVRAVEAGAEVELLAHARRALLDEGRVVGVEYEGEDGVHEVRARIVIAADGIESRIGRTAGLVPSLKPVEMCTCAQYEMVGVDVEEDATHFFVDAEFFPGGYFWIFPKGEGRANVGLGIRGSESEPGDALKVLNRALEDHELISEAVADAVPVEVNVGGVPVCGPVERTYGDGILLVGDAARQVNPLTGGGLHTSLVCGRIAGEVAAEAIEEDDTSASFLKRYQDRWEEEFGKTFKYALKASKIFSEMSNEELNALAEALDREDILRLVKGEEVVKVAKKVISRKPSLLKYAKHLMK

SEQ ID NO: 18590 - protein, 428 aa, Zea mays
  misc_feature (276)..(276): Xaa can be any naturally occurring amino acid
MEDEDAGLGDGGEASPPHHAAASGDRARDLAASPTSSRSVTQTVNGSHRFVIQGYSLAKGMGVGKHIASDTFTVGGYQWAIYFYPDGKNPEDNSGYVSVFIALASDGTDVRALFELTLLDQSGKGKHKVHSHFDRSLESGPYTLKYRGSMWGYKRFFRRNALEQSDFLKDDCLKINCTVGVVVSTMDYSRPHSIEVPESDIGYHFGTLLDTLEGVDVIFSVAGEKFHAHKLVLAARSSFFRSEFFDHESDEEKNETGTGDEIKEIVIDDMDPVVFXAVLHFMYRDNLVNDDELMASSSDCSIFDSLAGKLMAAADKYELPRLRLLCESYLGKHVSVNSVATTLALADRYHAIELKSVCLKFAAENLSAVIRTEGFDYLKDNCPSLQSKILRTVAGCEEQCSSGVKSQSVWGQLSDGGDTSGRRVRPRV

SEQ ID NO: 18591 - protein, 117 aa, Phaseolus vulgaris
MATLNSACVVAVLCLVVLTAPTAHAAISCGQVTSSLASCIPFLTKGGAVPASCCSGVRSLNAAAKTTPDRQVCNCLKSAAGAIPGFNANNAGILPGKCGVSIHYNISTSTNCATIKF

SEQ ID NO: 18592 - protein, 336 aa, Oceanospirillum sp. MED92
MALRIAINGYGRIGRNILRALYESKHRNNLQIIAINDLCDPEVNAHLTEYDSVHGKFKHKVSSSDNKLIVDGDQITVFREKALSALPWGGLDIDIVFECTGLFTDKTTAMQHIHNGAKRVLVSAPAKDADATVVYGVNHTSIKTEDIVISNASCTTNCLAPMAKVINDRFGITSGTMTTIHAYTNDQHLTDAFSGDLYRARAAATSMIPTRTGAAQAVGLVLPELEGKLSGMAVRVPTSNVSLVDLSFIPNKPCSVEDLNQLLLEAASNQFKEIIAYNDKPLVSVDFNHHSESCIFDATQTISCDNLKKVFAWYDNEWGFSNRMLDTASYLGRFLR

SEQ ID NO: 18593 - protein, 285 aa, Campylobacter upsaliensis RM3195
MILLDGKALSLKIKEELKNMSLTLKTKGVEPCLAVILVGDDAASQSYVNAKAKACEVCEIKSLVYKLDFNTTQNELLALINTLNYDDSVHGILVQLPLPLHINKNLILESILSSKDVDGFHPINVGYLNLGIESGFLPCTPLGVMKLLKAYEIDLESLDTVVIGASNIVGRPMATMLLNAGASVSICHIKTKDLSFYTKKADLIIVATGCVNLLKEDMVKEGVIVVDVGINCIDNRLVGDVDFDKVSKKASFISPVPGGVGPMTIAMLLENTIKSAKNRLSNPQI

SEQ ID NO: 18594 - protein, 169 aa, Synechocystis sp. PCC 6803
MTAQANNTIYGFSANALDGSPVALRDFEGKVLLIVNTASQCGFTPQYQGLQALYNRFGDRGFTVLGFPCNQFGQQEPGGSGEIKNFCETRYGVTFPLFEKVEVNGPNAHPLFKFLTAASPGMAIPFLGGAEDIKWNFTKFLVDRQGKVVKRYGSIAKPDEIAADIEKLL

SEQ ID NO: 18595 - protein, 484 aa, Legionella pneumophila subsp. pneumophila str. Philadelphia 1
MLIFELSKTGRQAKAQIPRAVSKNYSIPEEFQRKSPPRLPACSELQVVRHFTCLSQKNFSIDTNFYPLGSCTMKYNPRGVHKAASLPGFINRHPLAMDNESQGFLETLYKLQNYISEITGMPGVSLTPMAGSQGEFAGVAMIKAYHQSRGDTARDEILIPDAAHGTNPASAVMCGFKVVEIATAPDGDIDLDELKRKVGPRTAGIMLTNPSTLGLFMRQIKEIASLVHQAGGLLYYDGANLNAILGKVRPGDMGFDVMHLNLHKTFATPHGGGGPGAGPVAVGKRLIPYMPLPVVKKTDSGYHWATRQDYPQSIGRLSCFMGNAGILLRAYFYMLVLGKEGLLRVSEFATLNANYLLKELTKVGYTAAYPDRRASHEFILTLNSEKKNYDVTAMDFAKRLLDYGVHAPTTYFPLLVPECLLIEPPETESKEELDAFVAVMKIIREEASKQPDILKAAPHTLPVKRLDDVKAARELDLNYFATHE

SEQ ID NO: 18596 - protein, 539 aa, Frankia sp. EAN1pec
MAAPQNYLAVIKVVGIGGGGVNAVNRMIEVGLKGVEFIAINTDAQALLMSDADVKLDVGRELTRGLGAGADPEVGRQAAEDHREEIEEVLKGADMVFVTAGEGGGTGTGGAPVVANVARSLGALTIGVVTRPFTFEGRRRATQADTGIDTLRNEVDTLIVIPNDRLLAMTDRDISVLDAFRSADQVLLSGVQGITDLITTPGLINLDFADVKTVMSHAGSALMGIGRARGDDRATVAAEQAIASPLLEASMDGAQGVLLNISGGSDLGLFEINAAAELVADAAHPEANIIFGAVIDDALGDEVRVTVIAAGFDTVQDRRTRTLATQRRPPGPGGAAGGPPQPGAPGQPVAQPGSGGVPNTTALPPIPNVPAPPRPAPAHSTYLPATRHQDGHYVPDPLPHNRAPIQAGAPVVRSAGDQRSHELAVPAGAPRHCTVRAAYPPSAPDCRPTWAFANRGPGSLGSGPCRGPDHVVVCPGYCPAARFVPSPESPSWQVLPGAAPRSPLRNQMEFPSSRARAVYPFKLYSLQCSSLLNLYPSMV

SEQ ID NO: 18597 - protein, 181 aa, Triticum aestivum
MAPTVMASSATSVAPFQGLKSTAGLPVSRRSNGASLGSVSNGGRIRCMQVWPIEGIKRFETLSYLPPVSTEALLKQVDYLIRSKWVPCLEYSKVGFIFREHNASPGYYDGRYWTMWKLPMSGCTDATQVINEVEEVKKEYPDAYVRIIGYENMRQVQCVSFIAFKPPGCEESGKAYTAHSR

SEQ ID NO: 18598 - protein, 456 aa, Legionella pneumophila subsp. pneumophila str. Philadelphia 1
MPYIPHTPDDTKEMLEAIGAQDIQDLFDEIPASLQYAGFQNIPAGINEMEMLKEAQNQAQKNRNGICFIGAGCYEHHIPAAVWDIASRGEFLTAYTPYQAEASQGTLQLLYEYQTMICELTGMEVSNASMYDGATALAEAVLMAVRLNKHSKTNRVLIAGTVHPFYRETIETIVRNQHIEVITLPFDEQQGITNLGSLNQYTGEDITALVIAQPNFFGCLEQVDKMTSWAHHNKTISVACVNPTSLALLKPPGSWGEHGVDIVCGEGQPLGSPMASGGPYFGFLSTRMAHVRQMPGRIIGRTVDKDGKTGFSLTLQAREQHIRRAKATSNICTNQGLLVTAATIYMSLLGPEGLSQVATQCHQNTHELITALTQIEGVELAFKAPFFHEALIKLNQPVQSVLQQLADAGIAGGYAPEQHYPQLANTLLVCATEVRTAEDIAKYAKTLKTIMSKRGA

SEQ ID NO: 18599 - protein, 101 aa, Arabidopsis thaliana
  misc_feature (19)..(19): Xaa can be any naturally occurring amino acid
  misc_feature (26)..(26): Xaa can be any naturally occurring amino acid
  misc_feature (53)..(53): Xaa can be any naturally occurring amino acid
  misc_feature (62)..(62): Xaa can be any naturally occurring amino acid
  misc_feature (92)..(92): Xaa can be any naturally occurring amino acid
TSPQTRVATTVTLKYFTGXLRNYQRXHTYLVSHVPSSLSLPQRRTFLRVTRTXATFKLFNRXLRVAVIDCGPAGGAACESLAHGGIVTILIXSMMDNCKPL

SEQ ID NO: 18600 - protein, 309 aa, Listeria monocytogenes
MKRKIIVGSRRSKLALTQSNWVINKLKENYPEFDFEIKEIVTKGDRILDVTLSKVGGKGLFVSEVEQALSDEAIDFAVHSMKDVPSSLKEGLIIGAIPKRESPLDCFVFNQVNSLDELPQGSVIGTSSLRRAAQLLKHRPDFVIKPIRGNIDTRLQKLHAENFDAIILAKAGLARMGWLENTTLKLEDIPPEVCLPAVGQGALAIECRESDQQIRDMLTSIHHEETGICVEAERVFLKKLNGGCEIPIAGFATRANEFVQFKGLVGNADGSIILESEQVGANPSEIGNKVAEDLLSEGADTIIKELRNV

SEQ ID NO: 18601 - protein, 593 aa, Campylobacter upsaliensis RM3195
MNIFAKRVGKLREAMQEKGLDAYLVVSADPHLSEYLSDYYKVKDYLSGFQGSVGTLVFTQKEAYLWVDGRYWLQAQKQLEGSGIALQKQNKDNTFQNWLKRNLKQGQILGSDFAVLNLALKQELENFCMLKHCDLIALMWSDRPSLPKAQIYAHEKAYCTLSAKEKIALVRQKMCELGAENHLISSLDDIAYLTNLRGADVEYNPVFLSHLLIKQNETLLFVDEGKISSALKEELESEEILIYAYESVIEELKRLENTTLLIEPAKMTALLVEALNFSVKLVEEINPSTHLKAVKGAREISHIEDAMVEDGVALCRFFAWLEEALEQKQKINEVDIDTRITEFRAKSPFYISNSFATIAAFKGNGAFPHYKAERQNCLDIEGDGFLLIDSGGQYKNGTTDITRVVPVGVLCEEQIHDYTLVLKAHIAISRAIFPKNIAMPLLDAIARQPLWEEQLDYIHGTGHGVGYFLNVHEGPQVLSYFAPVLEKTRAKEGMLSSIEPGIYKAGKWGVRLENLVVNTKVENPKNSAYGEFLYFKPVTLCPFELSCIDVKLLDEKEKRWLNAYHQKVRDKLASRLKDEPKVLKWLEVRTKII

SEQ ID NO: 18602 - protein, 63 aa, Arabidopsis thaliana
  misc_feature (10)..(10): Xaa can be any naturally occurring amino acid
  misc_feature (16)..(16): Xaa can be any naturally occurring amino acid
  misc_feature (21)..(21): Xaa can be any naturally occurring amino acid
  misc_feature (37)..(38): Xaa can be any naturally occurring amino acid
  misc_feature (47)..(47): Xaa can be any naturally occurring amino acid
  misc_feature (50)..(50): Xaa can be any naturally occurring amino acid
  misc_feature (53)..(53): Xaa can be any naturally occurring amino acid
  misc_feature (59)..(62): Xaa can be any naturally occurring amino acid
MASSMLSSTXVVTSPXQATMXAPFTGLKSSASFPGTXXANNDITSFXSKXGRXSCMKVXXXXL

SEQ ID NO: 18603 - protein, 536 aa, Corynebacterium efficiens YS-314
MTTTVIVGGVAGGMSTAARLRRRDEEMEIIVLEASGYVSFANCGLPYHVSGVIPERDSLLLQTPESLAQRFNLDVRVNTRATSIDRENKTVTTENGEVISYDYLVLSPGAAPIMPPIPGIERALTLRTVEDVDTVIAALSEDVKTAAIIGGGFIGLEMAENLRHRGLEVTVIERAPQIMTPLDEEMALIVEKHLVDNGVTVITGGDTTDIAADHLTLSDGRTVPADVVIASIGVKPASDLAADAGLEVGERGGIKVDDQQRTSDPSIFALGDAAEKLDAVSGEDTLVPLAQTANRHGRLVADIITGRDVRRTPTLGTAIVGLFDMAAGSVGWNERRARAAGKNIRVIHTHPSDHAGYYPGAEMLHLKLVVDADTDAILGAQAVGGAGVDKRIDVIATAMRGGLTATDLADLELAYAPQFGSAKDPVNLLGYVNDNMVSGEKTVQWHELNDALSDGWTLVDVRTPGEFNAGTIPGAVNIPVDDIRDRIDELEGRKALAFCRVGQRGHVAASLLTHLGVESANLDGGFITWELSPANK

SEQ ID NO: 18604 - protein, 180 aa, Mesembryanthemum crystallinum
MASMMSNAAVVGRTTPAQASMVAPFTGLKSVSAFPVTKKSNDITSIASNGGRVQCMQVWPPLGKKKFETLSYLPPLSEESLMKEVQYLLNNGWVPCLEFEPTHGFVYREHGNTPGYYDGRYWTMWKLPMFGCTDPSQVVAELEEAKKAYPEAFIRIIGFDNVRQVQCISFIAYKPASYDA

SEQ ID NO: 18605 - protein, 107 aa, Mesorhizobium sp. BNC1
MATVKVDSGNFQSDVLQACEPVVVDFWAEWCGPCKMIAPALEEISSEMQGKVKVAKLNIDENPELAARYGVRSIPTLMLFKNGEVADMKVGAAPKTALSAWIGGSIA

SEQ ID NO: 18606 - protein, 545 aa, Wigglesworthia glossinidia endosymbiont of Glossina brevipalpis
MCSIFGILNIKNNSISLRKKALKCSNLMKHRGPDSNGIYCDEDVILVHERLSIIDVKSGNQPLFNNSKTNVLIMNGEIYNYEEIKKNLIHDYSFNTNSDNEVVLALYKKFGLNFLNKLNGMFAFILYDIEKKIYLIGRDHIGMIPLYMGYDCDNNLYISSEMKALIPVCNYIKEFPIGSYLCNLNKKIIKYYKRNWFEFDSIKNCLLSYKKIKHSLKKSVLNHLKSEVPFGILLSGGLDSSIIASIASKELNYKNLNKKLKSFSIGLENSPDLHSSRICARYLNTDHCEVKFTEQDGLDVIKKVIYYVETYDITTIRASIPMYLISQKIKSSGIKMILSGEGADEIFGGYLYFHNAPSEKDLHDELVRKLKSLHIYDCARANKSMLAFGIEARFPFLDKKFLDVAMRINPKHKMCNKNRIEKYILRKSFINYLPNNILWRQKEQFSDGVGYKWIDSIKNFSKKIISDKKFNNAIHKFPYNTPLSKEEYLYREIFENFFPLPSAAECVPQEKSIACSSEIASKWSKYRNLNFDPSGRSLDIHISKN

SEQ ID NO: 18607 - protein, 183 aa, Mesembryanthemum crystallinum
MASSLMSNAATTMAAATTTAQANMVAPFNGLKSVSAFPVTRKNNDITSVASNGGRVQCMQVWPPLGKKKFETLSYLPPLSEESLIKEVQYLLNNGWVPCLEFEPTHGFVYREHGNTPGYYDGRYWTMWKLPMFGCTDPSQVVAELEEAKKAYPEAFIRIIGFDNVRQVQCISFIAYKPASYDA

SEQ ID NO: 18608 - protein, 336 aa, Symbiobacterium thermophilum IAM 14863
MTIRIGINGFGSIGRRVFRIALSRPDIEIVAINDLTPPATSAHLLKYDSNYGILDAEVSATENSIIVNGKEIRVYAEKDPAQIPWKEHGVDIVMECTGRFTDKQQAEVHITSGGAKKVIISAPAKNEDITIVMGVNHEQYDPANHHVISNASCTTNCLAPVVKVLHDKFGVVKGMMNTIHSYTNDQVILDYPHKDLRRARAGALSIIPTTTGAAKAVALVIPELKGKLTGFAMRVPTPVVSVVDFTAELATPTTKEEINAALKAAAEGPMKGILAFEEAPLVSVDFKGNPNSSIVDGPSTLVLDGNLVKVVSWYDNEWGYSNRMVDLAAYIASKGL

SEQ ID NO: 18609 - protein, 477 aa, Zymomonas mobilis subsp. mobilis ZM4
MLKKYFGSRKKFRSLSSQQSHPHKKDQALSRNLSWPHLIALGVGAIVGTGIYTLVGVGADRAGPAVVIAFIIAGLICATAALGYAELSTLIPEAGGAYTYAYMAIGRHMAWIVGWSLILEYSLASSTVAVGWSAYLVGWLHSFGINLPAALLAGPHDGGIINLPAVIVALSIALLLTAGAKESATLTLALVILKLSALVLFVVLTMPAFHFEYYHPFMPYGFVSHISPDGKVRGVMAAAAILFFAFYGFDTVATAAEETKNPKRDLTIGIIGSMTISVLIYIGVAACLLGAAPFSEFIKSGEPLALILRNLHHETAAKWIAAAALVALPSVIMAMIYGQSRVFFVMARDHLLPPFLAKVNKHGTPSQVTLFTGIVIALIAGFFRLDELAELANAGTLVAFIAVGLSLIILRVREGERTRRFSCPFPFVIGSVTVIGCLYLFTSLPLHTTIRFLLWNAIGLVFYGSYNLYKRKKQKSL

SEQ ID NO: 18610 - protein, 396 aa, Arabidopsis thaliana
MRKTMVISDLPHEIESEILSRVPTKSLAKLHTTCKRWYALFRDPRFVKKNFGKSERRLMLHSNFGVYKITDDLHGILNSGDPSLEFTSKLSNLKISEDLTITKIFHCDGLILCSTKENTRLVVWNPCTGQTRWIKPSKRYRSDDSYCLGYVNSKSSYHNYKILRYCFYYNDQDACVSEFEIYDFSSESWRVLDDYCTREWGLFCHGMSLKGNTYFVAGEKETGFFMLYFDFKTERFERLPLPYQSFDSEDTAVLSIVGGEKLAVLHQNIQSFSNEMRIWVTNKIDEAKDLTWSNFFLAVDYDIFNLPSVNNVTSFLLDEENKVAVCCDRHIDDEDKTRIYIVGVDLYKEVYKERTKGAHFNWPLLISYLPSLVHIQEKYPKDKRKGNKRRLVKRIT

SEQ ID NO: 18611 - protein, 815 aa, Wigglesworthia glossinidia endosymbiont of Glossina brevipalpis
MRVLKFGGTSISSLKCFSKVVNIIKKNYKKDQIAVVLSAPKKVTDNLFYMIEKSCQTKDIKEIFNNTKDIFFYLIKSLFDSNENYYYLNIYNFIELKFNRLLYLLNIVFNLKFCPNSINAEIVCMGEIISVKLMELYLKNKNIDVFVIDPKKIFLSKGQYLESFIDIKESERRIKKINFPKNKVILMAGFIAKNKYGELVALGRNGSDYSATALAACLKANVCEIWTDVDGIYTGDPNKIKNTKLINKLSCKEAISLSYLGAEILHKRSIFPILEFNIPCIIKNTNNSNSYGTSILNIVNDEKEIIKGITFLKDIAMISIFICYNIKTINIYNRILVAFKKSNIKIIFMMQSSSESNINIFIFQNNLSESKCIIEYEFCFEINNKLFESIHYKSDLFILSMIGSNIFKNKNIFINIVKFFNFIHKKMISILYGGYLSNAFSVVLESCNIVNDLNNMHKIFFEKKNFIEIFIIGNKNIKNCLFNLFYKKKFFFKKKHIELKICGISDAKKLLINENGINLKHWKYNLSNSKIIFDSDIIIECLKKNNFLNPVIVDCTQNKIISKKYADFLIQGFHIVTSNKQPNISSIDYYKKIRNMSIISNKKFLYNANFNTQFPIIENIKSFLNLSENKNYYFSGVLSSAISFIFERLNKGMSFYKIIVLALQSGFSLKDIYHAILGKDSAENLLIIARELGYNIEIKDIEIKPIISKKFLKKNIKKEIFNISISVDNKFKKKLQKAKIQGNVLNYVSNIKNGKFIIKIQEASPNNPLFKVKSKENIFIFYTNSHKSFPIILKSFSYKKNIYIFNILNDLLKLT

SEQ ID NO: 18612 - protein, 517 aa, Parvularcula bermudensis HTCC2503
MLEALDCLPNGFVIYDPTLHLIYGNQVARDRNAQMFELLEAGVPLDQIVRRQLKLILPDLPPDEFEESAEDYIYRLRTGLPVEFHTENGRTAQSNFFEMESGERVAVTVDITAIRANEQRLRLARSEAEAANKTKSAFLANTSHEIRTPLNGILGLTEHVLKLDLPTEARQHLNTIHDAGTTLLTLLNDILDLSKIEAGAFELAPDEKALSETVGKVERLWSGPAKQKGLSLDVVIGPGVPEKVIADHHRLYQCLSNLVSNAIKFTEEGSVHIRVDASKPKAGQSVVTVAVSDTGPGISDDIKTQLFKPFTQADSSTSRTYGGTGLGLSIVQGLMDLMGGSVDLESKVGVGTTFRVRLPVKVPGEIHGPKPQTAVHMRSIPAGLKVLIVDDIGLNRQVARLLLQSSGCVCSEAENGQEALDMLAGGPIDIVLMDLHMPTMDGFEAVRRIRESSEAWGDVPVIALSADEAARRDGELGEKGFNGFIAKPVSEARLLEAISDVLNGENYRNGRVFADIG

SEQ ID NO: 18613 - protein, 535 aa, Rhodotorula sp. CBS 8446
MLALVCVGLFLYLLCKYRSHAIATSDRTDLAGPKGWPLMGVFKFPLPTLSVTYVVVDVTEKTLSGNLIFYATQSSTRGLEWGVRFVKTYGHAWTLSVPGLRLIDISTRPDWIEYVQKTNYHNYVKGSAFRNRLSDIIGNGIFVTDGRVWQFQRKVTSHIFTGRSFQDAICPAIAEELRSLNKLLDNYADTGETVDLQDVFYRFTFQAFGRFAFNLDLRNLEIDHKPVPFTTAFDQCQKPSLDASSTRSGAFASALPLPAVEYQTPPSCFRLCLRNDDKRAALLAKKDAKVPSDLLTMFMTARYDDSRPLSRVEIRDAIINLLLAGRDTTAQSLTWALYRLVDNPAHQRLVREEICGQLAGGTEPVTLENVKNLVQTQAAHLESLRLHPPVPRIVKQAVKDDALPNGGPLIKAGEFIRLSDWALGRNEEVWGADAKEWKPSRWIDDEGRPIQYSQWKAHFFNGGPRICLGKSLATLEGVAVIANLLHRYNIAFAPGWWENVEKTGRIAGDLEETPLYGPALTLPMKSPFWVTISRR

SEQ ID NO: 18614 - protein, 163 aa, Triticum aestivum
MKEGGQKKNILAKTLQKCRSLGHRRQPAAYGGGGAGSSASAPASPRAADGRAAWAVPAGYVAVLVGPEKERFAVRARCANHPLFRALLDEAETEYGFAGCVGPLELPCAVDDFMEVVWEMEQGGGVASSPSCARFAGRGHHQQQQRHGYHLLSPGTFVVAGRS

SEQ ID NO: 18615 - protein, 399 aa, Phytophthora infestans
MLRLGRSAASEVSSIRNSLQLQLEQRGARPMQCAYQTQSHSNPEGAKRGRSPMSLAVMGAAALSVGLELQTDGIAQARAAMEPGTQLQRHKWQLFDQIGAGAFGVVRLGMHEESGEVAAVKIVPLENPNDQRSYPALEREIAALKLVKALGGHNSIVDLRDVYVEGRKLFLVTELARGGELFEQIVAYGSFPELKARDVAREMASALSFMHRHGLVHKDVKPENILMSARVVDHNSGVYRKSNRHESSSLVKLADFGSAGPASVNTNLEDIGTAAYLPPEVLNSGMCTSACDMWALGCVLYIMLSGSHPFDLDGMSADSVVEHRVKSEPVTFDFSAWDNVSPHAKDLISKLLVKDPTLRLTADQMLQHPWMNASAEAAAAGLRRPSPLLAGQPIPRGPA

SEQ ID NO: 18616 - protein, 220 aa, Glycine max
MKAAYFLVAILDLTSTVVSAYDPSPLQDFCVAAKEKDGVFVNGKFCKDPKLVKPEDFFLHVEPGNTDNPNNAQVTPVSVDQLPGLNTLGISLARIDFAPKGINPPHTHPRASEILIVLEGTLYVGFVTSNQDGNRLFTKVLNKGDVFVFPIGLIHFQLNVGYGNAVAIAALGSQNAGTITIANALFKANPPISPEVLTKAFQVDQKIIDELQKKSWYNTN

SEQ ID NO: 18617 - protein, 563 aa, Zea mays
MQADEQAEAPRRAKEAGNDAYRKSLLEEAVEHYTLGALLDPSDIAFLTNRAAAYLRMGKYEECVRDCDEAVKRGRELSSGSELIAKALSRKASALLELACCAADYAPAIGALKLSLAENYSEETLEKLNDAQSVRKEVEEQERLDQEAANQCREEGNEFFRQKKYNEAAIQYTRAIKMNPKDPRAFSNRAQCHIHLGAFPQGLEDAEKCIELDPTFLKGYVRKAKVQFLMESYENALATYLEGLKCDPNNMEVLDGLRRCAACVKRSNAGDVEIEDLKYVDIDLKYFSGGGPNTVHQQRRSGVMTSECQCNFIVFPHFALSVHSTKDIDESSAERLYDAVKYTTDNMMLIQVSNIWIGSNGSVKLRGVSFTGQGFSTERVRDDYKRMSRILMALITLSGGDRSKLPPDYKEFLLLLESDTLTMEDEFLIVNNAALLPIKNRTEVFLMLHDRIVDYLGSTDKTKKKKKKRILSSLPYKEDWLDTAKANTKINQWVANVQNEYRATPHDLLRLNRNVRSHMHRYSDGDDIEEVLYCEWPELLMVMQKMLHLEGELEGTDIQNKFG

SEQ ID NO: 18618 - protein, 327 aa, Oceanobacter sp. RED65
MSQVKIGVLLVNLGTPEAPTAKAVRKYLAEFLWDRRVVDVPRPIWWLILNGIILRFRPGRVAKGYQSIWTEDGSPLMAISKRQQRALQDALDQQGLDIPVELAMTYGEPSMETAGRNLRQKGVEKMLVLPLYPQFSASTTGAVFDRLAKGLKRCPHLPEMRFVNEYHQHPLYIQALTNSVKEYWKEHGKGDKLMMSFHGIPQRYADNGDPYPRQCKATADALAHALDLKENEYLCTFQSRFGREEWVKPYTDHTLEDWGKSGVKRVDIISPAFSADCLETLEELEEENRENFLEAGGKEYHYIPCLNDRSDHIEMMSELVKTHICNW

SEQ ID NO: 18619 - protein, 573 aa, Streptomyces coelicolor A3(2)
MANRQQPSPMPTAKYRGYDQVDIADRTWPNQRITTAPRWLSTDLRDGNQALIDPMSPVRKRAMFDLLVKMGYKEIEVGFPASGQTDFDFVRSIIEEPGAIPDDVTISVLTQAREDLIERTVESLKGARRATVHLYNATAPVFRRVVFRGSRDDIKQIAVDGTRLVMEYAEKLLGPETEFGYQYSPEIFTDTELDFALEVCEAVMDTYQPGPGREIILNLPATVERSTPSTHADRFEWMGRNLSRREHVCLSVHPHNDRGTAVAAAELALMAGADRIEGCLFGQGERTGNVDLVTLGMNLFSQGVDPQIDFSDIDEIRRTWEYCNQMEVHPRHPYVGDLVYTSFSGSHQDAIKKGFDAMEADAAARGVTVDDIEWAVPYLPIDPKDVGRSYEAVIRVNSQSGKGGIAYVLKNDHSLDLPRRMQIEFSKLIQAKTDAEGGEITPTAIWDVFQDEYLPNPDNPWGRIQVANGQTTTDRDGVDTLTVDATVDGAETTLVGSGNGPISAFFHALQGVGIDVRLLDYQEHTMSEGASAQAASYIECAIGDKVLWGIGIDANTTRASLKAVVSAVNRATR

SEQ ID NO: 18620 - protein, 180 aa, Ustilago maydis 521
MRPLTEEETKTLFEKLANYVGKNLVNLIDRPDEPHVFRLHRDRVYYVSESSMRLAISIARPNLMSLGTCFGKFSKTGKFRLHVTALDYLAQYAKYKVWIKPNGELPFLYGNHVVKAHLGRITDDTPEHAGVVVLSMSNTPLGFGVTARSTVDTRKQDPTSIIVFHQADVGEYLRDEDTLF

SEQ ID NO: 18621 - protein, 278 aa, Arabidopsis thaliana
MTREFELENNYQLCDEIGRGRFGTITRCFSPATKEFYACKTIDKRVLIDALDRECIETEPRIMAMLPPHPNIIRIFDLYETEDSLAIVMELVDPPMTIYDRLISAGGRLSESESASYAKQILSALAHCHRCDVVHRDVKPDNVLVDLVSGGVKLCDFGSAVWLGGETAEGVVGTPYYVAPEVVMGRKYDEKVDIWSAGVVIYTMLAGEPPFNGETAEDIFESILRGNLRFPPKKFGSVSSEAKDLLRKMICRDVSRRFSAEDALRHSWMMNVGNLQSN

SEQ ID NO: 18622 - protein, 107 aa, Thermosynechococcus elongatus BP-1
MSSALSVTDATFEEEVLNSDIPVLVDFWAPWCGPCRMVAPVVDEIANEYQGRVKVVKVNTDENSKVATDFGIRSIPTLMIFKGGQKVDILVGAVPKTKIEATLAQFL

SEQ ID NO: 18623 - protein, 337 aa, Thermosynechococcus elongatus BP-1
MVRVAINGFGRIGRNFMRCWLQRKANSKLEIVGINDTSDPRTNAHLLKYDSMLGIFQDAEITADDDCIYAGGHAVKCVSDRNPENLPWSAWGIDLVIEATGVFTSREGASKHLSAGAKKVLITAPGKGNIPTYVVGVNHHTYDPSEDIVSNASCTTNCLAPIVKVLHEAFGIQQGMMTTTHSYTGDQRLLDASHRDLRRARAAAMNIVPTSTGAAKAVGLVIPELQGKLNGIALRVPTPNVSVVDFVAQVEKPTIAEQVNQVIKEASETTMKGIIHYSELELVSSDYRGHNASSILDASLTMVLGGNLVKVVAWYDNEWGYSQRVLDLAEHMAAHWA

SEQ ID NO: 18624 - protein, 80 aa, Zea mays
  misc_feature (20)..(20): Xaa can be any naturally occurring amino acid
IHLQALSNGKPTVVEFYANXCEVCRELAPDIYKVEQQYNWDPSCCTTDRTSEHHGQRRQAGPLIALGRQELQQRWCHDRH

SEQ ID NO: 18625 - protein, 410 aa, Bacillus cereus ATCC 14579
MKIIVQKFGGTSVRDDNGRKHALHHIKKSLAAGYKVVTVVSAMGRKGEPYATDTLLSLVNQEESTISKREQDLLLSCGELISAIVFSNMLNENGIKAAALNGAQAGFVTNDDFTNAKIIEMNCDRIHEELENVDVIVVTGFQGQTKKGDTTTLGRGGSDTSASALGVALHAEYIDIFTDVEGVMTADPRIVKDARHLQTVTYNEICNMAYQGAKVVHPRAVEIAMHAKVPLRVRSTYSDSEGTLISAYDGATRGRDVEERPVTGIAHVSNVTQIKVLAKETAYDLQQHVFKEMANEGISVDLINISPTGVAYTVSDNVSSHAVKLLQNLGYEPIVTEHCAKVSIVGAGMAGYPGVTAKIVTALAEKGIQILQSADSHTTIWVLVKETDLVEAVNALHSAFELSKEKQLEQ

SEQ ID NO: 18626 - protein, 355 aa, Arabidopsis thaliana
MSEFDKHVQNHIKNEKPFNSIKPSEIDSTLSLSDSLLLKIIEKLPESQSNDVSLVCKRWLNLQGQRLRSLKLLDFDFLLSERLTTRFPNLTHVDLVNACMNPRVNSGILFCHKSISFHLSSDSSNWEFLEENLLHSDVIDRGLRILSRESFDLLNLKVINASELGLLSLAGDCSDLQELELHKCNDNLLHGIAACKNLKGLRLVGSVDGLYSSSVSDIGLTFLAQGCRSLVKLELSGCEGSFDGIKAIGQCCEVLEELSICDHRMDDGWIAALSYFESLKILRISSCRKIDASPGPEKLLRSCPAMESLQLKRCCLNDKEGIKALFKVCDGATEVNIQDCWGLSDDCFSLAKAFR

SEQ ID NO: 18627 - protein, 1057 aa, Glycine max
  misc_feature (356)..(356): Xaa can be any naturally occurring amino acid
MERARRLANRAILRRLVSEAKQHQKNESVLHSSTTPILLYSSSRCMSSVSSPVLRSRGSKTETLLGRNMNISRSVVAGAGSARSISVEALRPSDTFPRRHNSATPEEQSKMAESCGFGSLDSLVDATLPKSIRLKDMKFGKFDAGLTENQMIEHMKDLASKNKVFKSYIGMGYYNTHVPPVILRNIMENPAWYTQYTPYQAEISQGRLESLLNYQTMITDLTGLPMSNASLLDEGTAAAEAMSMCNNIQKGKKKTFIIASNCHPQTIDICKTRADGFDLKVVTADLKDIDYKSGDVCGVLVQYPGTEGEVLDYGEFVKKAHAHEVKVVMASDLLALTVLKPPGEFGADIVVGSAQXRFGVPMGYGGPHAAFLATSQEYKRMMPGRIIGVSVDSSGKTALRMAMQTREQHIRRDKATSNICTAQALLANMAAMYAVYHGPEGLKNIAHRVHGLAGAFALGIKKLGTVEIQDLPFFDTVKVKTSNAHAIADAALKSGINLRVVDGNTITVAFDETTTLEDVDNLFKVFAGGKPVSFTAASLAPEVQSAIPSGLVRKSPYLTHPIFNTYQTEHELLRYLYRLQSKDLSLCHSMIPLGSCTMKLNATTEMMPVTWPSFSDIHPFAPVDQAQGYQEMFNNLGELLCTITGFDSFSLQPNAGAAGEYAGLMVIRAYHLARGDHHRNVCIIPVSAHGTNPASAAMCGMKIVSVGTDAKGNINIEELRKAAETHKDNLSALMVTYPSTHGVYEEGIDEICNIIHDNGGQVYMDGANMNAQVGLTSPGWIGADVCHLNLHKTFCIPHGGGGPGMGPIGVKKHLAPFLPSHPVIETGGIPAPDKPQPLGTIAAAPWGSALILPISYTYIAMMGSKGLTDASKIAILNANYMAKRLENYYPVLFRGVNGTVAHEFIIDLRGFKNTAGIEPEDVAKRLMDYGFHAPTMSWPVPGTLMIEPTESESKAELDRFCDALISIRQEIAEIEKGKVDINNNVLKGAPHPPSLLMADAWTKPYSREYAAFPAPWLRTAKFWPTTGRVDNVYGDRNLICTLLPASQAVEEQAAATA

SEQ ID NO: 18628 - protein, 508 aa, Legionella pneumophila subsp. pneumophila str. Philadelphia 1
MPFNTRSLKMGYNVPHYIGGQLINETDTEAQAIYNPALGEIIGQVHFASKATCDRAVAIAKAAGNEWSQTPAIKRARVLFRFRELLEKYQMDLARIVTREHGKTLDDAKGSVARGIEVVELHCGLVNELKGDFSAEVASHIDCHTFRQPLGVCAGVSPFNFPVMVPIWMMIPAIACGNTFILKPSEQDPSAPVRLLELLSDAGLPPGVANCIQGNKTTVEHLLAHPDIAAFTAVASTPVAEYIYTTAAAYGKRAHTFGGAKNHCVVMPDADLDQAANAIVGAAYGSAGERCMALSVVVTVGQHTADALINKISPLIRAIRVDAGDVEGTDMGPLVSQAHRQRVLAAIEKGVNEGARLIIDGRTFQHPQYPQGFYLGPCLFDEVTEEMSVYQNEIFGPVLVIVRVNHFEEALALVNKHQYGNGTAIFTRDGFTAREYSQRVQAGLVGINIPIPVPIANHPFGGWKRSVFGDTNMHGEESIHFYTRRKTVTSKWPITELKDSSFAMPTHD

SEQ ID NO: 18629 - protein, 498 aa, Bradyrhizobium sp. BTAi1
MTPTAATRTTPSATASLRERLKDGSLLREQCYIDGSWVGVPVFPVNNPATGAELAKVAQLGAAETTQAVEAAARAFPAWAKLTAKQRSNLLRKWFELIVANREDLALILTSEQGKPLNEALGEVDIGAAYIEFFAEEARRVYGETIPTQKPDARLLALKQPIGVCGAITPWNFPNSMITRKVSPALAAGCTVVLKPANETPLSALALAVLAERAGIPKGVLNIITGDAPPIGKVLCEHPAVRFVGFTGSTEVGKILYRQSAGTVKKLGLELGGNAPFVVFDDADVDAAVEGAIVSKYRNMGQTCVCANRLYAQDGIYDAFVEKLAARVAAMKIGDGTEAGVVQGPLINEEAVEKVERHIADAVKGGATIVTGGKRHALGRTFFEPTVLSNVKADALVAHEETFGPLAPVIRFQSEADVIAMCNASPFGLASYFYARDLGRVWRVAEALESGMVGVNTGLITTEVAPFGGVKESGLGREGSHHGIEEYLEIKYVMMAGV

SEQ ID NO: 18630 - protein, 291 aa, Tropheryma whipplei TW08/27
MLDGLAVSAGIFERLHRACCELENNGVCPKLATVLVGNNPASRSYVLSKHRDCNNIGIQSTLIELPANTSEKELISKVEILNASSDVSGIIVQLPLPESIDQNKVIEAINPDKDADGLHPLNLGYLVTGKQGIVPCTPAGIVKLLEAHRITLEGKTIAVIGRGTTVGRPLGILLSGKGVNATVINIHSRSRNISGLSRIADVVVACAGVKHIVEPSWIKPGAVVVDVGINQSGVSSSGKMILTGDVHPLTKNIASYISPVVGGVGPMTRAMLMSNVINLSERDFRKRLYAS

SEQ ID NO: 18631 - protein, 246 aa, Pachyrhizus erosus
DAPESWDWSKKGVITKVKFQGQCGSGWAFSATGAIEAAHAIATGNLVSLSEQELIDCVDESEGCYNGWHYQSFEWVVKHGGIASEADYPYKARDGKCKANEIQDKVTIDNYGVQILSNESTESEAESSLQSFVLEQPISVSIDAKDFHFYSGGIYDGGNCSSPYGINHFVLIVGYGSEDGVDYWIAKNSWGEDWGIDGYIRIQRNTGNLLGVCGMNYFASYPIIEKSETLKFGRVKADPRVEHSPL

SEQ ID NO: 18632 - protein, 255 aa, Bordetella parapertussis
MAIKVSQPDNGVVTLLMDRPAKHNAFTWEMYEAFGAACDALQADDSVRCVIVRGAGGAFCAGSDIGGFDENRSGVEQARAYAAFTLAMFDKFKHLRHPTIACIEGVCVGGGLEIAALCDIRIAQADARFGIPVNRIGLTLDHQELADLVAVVGHGVALEILLEGRVFGAQEALAKGLLSRVVDDAWSDADETARRIARLAPLSNRWHKQFIRQLQSGQLLTQAQRDEAYACFDTQDYQIGSRAFLEKQRPQFIGR

SEQ ID NO: 18633 - protein, 454 aa, Streptococcus pneumoniae TIGR4
MKVVKFGGSSLASASQLEKVLNIVKSDSERRFVVVSAPGKRNAEDTKVTDALIKYYRDYVAGNDISKNQSWIIDRYAAMVSELGLKPAVLEKISKSIHALATLPIEENEFLYDTFLAAGENNNAKLIAAYFNQNGIDARYMHPREAGIVVTSEPGHARIIPSSYDKIEELTNTNEVLVIPGFFGVTKENQICTFSRGGSDITGSIIAAGVKADLYENFTDVDGIFAAHPGIIHQPHSIPELTYREMRELAYAGFSVLHDEALLPAYRGKIPLVIKNTNNPDHPGTRIVLKHSNDEFPVVGIAGDSGFVSINMSKYLMNREVGFGRKVLQILEELNIGWEHMPTGIDDLSIILRSRQLTPIKEEEILRQLVQKAKVDHAEIEHDLSIIMIVGEKMKSHIGVTATATRALSENKINIQMMSQGSSEVSIMFVVNKDQEKAAIKALYNAFFGESKED

SEQ ID NO: 18634 - protein, 375 aa, Pneumocystis carinii
MEDEIAALVIDNGSGMCKAGFAGDDAPRAVFPSIVGRPRHQGIMVGMGQKDSYVGDEAQSKRGILTLKYPIEHGIVSNWDDMEKIWHHTFYNELRVAPEEHPALLTEAPLNPKSNREKMTQIMFETFNTPAFYVAIQAVLSLYASGRTTGIVLDSGDGVTHTVPIYEGYALPHAILRLNLAGRDLTDYLMKILTERGYNYTTTAEREIVRDIKERLCYVALDFEQEIHTASSSSSLEKSYELPDGQVITIGNERFRAPEALFQPSLVGMETCGIHETTFNSIMKCDVDIRKDLYSNIVMSGGTTMYPGIADRMQKEITALAPSSMKIKIVAPPERKYSVWIGGSILASLSTFQQMWISKQEYDENGPSIVYRKCF

SEQ ID NO: 18635 - protein, 548 aa, Wigglesworthia glossinidia endosymbiont of Glossina brevipalpis
MKNINPTKTKSWNLLKKHFNNMKKVNIKDLFEKDKNRFSSFSICFDDIILIDYSKNIITKETIKKLIQLAKECDLNNAILSMFCGKKINYTENRAVLHTALRNHKNISIEIDGINIIPKIKKVLNKMKNFCSDLIDGNWKGFTGERITHIVNIGIGGSDLGPYMVTEALKFYKNHLNVYFVSNIDGTHITEILKYLSPKNTLFLIASKTFTTQETITNAYSAKDWFLKYAKDKKYLSRHFIALSSNIDEVKKFGINTENIFELWNWVGGRYSLWSCMGLSIALSIGFNNFEKLLRGAYAMDQHFLKQPFEKNIPIILGLISIWYNNFFNFETESILVYDQYMHLFSSYFQQVNMESNGKSIDRNGNLVNYQTGSILWGGYGTNSQHAFYQLMHQGTKIVPCDFIVPIISHNPVSDHHQKLLANFFAQTKALAFGKKSENNHIKLYKYDSNKIKILPFKILPGNRPTNSILIKEINPYNLGSLIAMYEHKIFTQGVVLNINSFDQWGVELGKQLSKKLFSILRKEKILNTSSYDSSTNGLINFYKLWKK

SEQ ID NO: 18636 - protein, 37 aa, Clostridium symbiosum
KFLGFEQAFKDSLTTLPMGGAKGGSDFDPNGKSDREV

SEQ ID NO: 18637 - protein, 484 aa, Saccharomyces cerevisiae
MADKIERHTFKVFNQDFSVDKRFQLIKEIGHGAYGIVCSARFAEAAEDTTVAIKKLTNVFSKTLLCKRSLRELKLLRHFRGHKNITCLYDMDIVFYPDGSINGLYLYEELMECDMHQIIKSGQPLTDAHYQSFTYQILCGLKYIHSADVLHRDLKPGNLLVNADCQLKICDFGLARGYSENPVENSQFLTEYVATRWYRAPEIMLSYQGYTKAIDVWSAGCILAEFLGGKPIFKGKDYVNQLNQILQVLGTPPDETLRRIGSKNVQDYIHQLGFIPKVPFVNLYPNANSQALDLLEQMLAFDPQKRITVDEALEHPYLSIWHDPADEPVCSEKFEFSFESVNDMEDLKQMVIQEVQDFRLFVRQPLLEEQRQLQLQQQQQQQQQQQQQQQQPSDVDNGNAAASEENYPKQMATSNSVAPQQESFGIHSQNLPRHDADFPPRPQESMMEMRPATGNTADIPPQNDNGSLLDLEKELEFGLDRKYF

SEQ ID NO: 18638 - protein, 334 aa, Xylella fastidiosa Ann-1
MAIKVGINGFGRIGRNILRSAVQNFGSNIDIVAINDLLEPDYLAYMLQYDSVHGRFKGEIAIEGTALILNGKKIRLTAERDPGNLQWADAGAEIVIESTGLFLTQESAGKHLAAGAKKVIISAPSKDETPMFVYGVNHNSYNGEPIVSNASCTTNCLAPLAKVINDKWGITRGLMTTVHAATATQKTVDGPSNKDWRGGRGILENIIPSSTGAAKAVGKVIPSLNGKLTGMSFRVPTSDVSVVDLTVQLNTPATYKEICTEVKQQSEGPLRGILGYTEDKVVATDFRGETCTCVFDADAGIALDPTFIKLIAWYDNEWGYSNKCLEIAKVIAAK

SEQ ID NO: 18639 - protein, 152 aa, Solanum tuberosum
MSSFSEEQEALVVKSWGSMKKDAGEWGLKFFLKIFEIAPSAKKMFSFLKDSNVPLDQNPKLKVHAKSILVMTCEAAVQLRKAGKVVVRDSTLKKIGATHFKYGVADEHFEVTKYALLETIKEASPEMWSVEMKNAWGEAYDQLVSAIKTEMK

SEQ ID NO: 18640 - protein, 342 aa, Zinnia elegans
MAFIFSSKKTSAFLCICIGFGMFGFSHEFSILGYAPEDLTSIHKVIHLFESSLVKHSKIYESFDEKLHRFEIFMDNLKHIDETNKKVSNYWLGLNEFADLTHEEFKNKFLGFKGELAERKDESIEQFRYRDFVDLPKSVDWRKKGAVSPVKNQGQCGSCWAFSTVAAVEGINQIVTGNLTVLSEQELIDCDTTFNNGCNGGLMDYAFAYVTRNGLHKEEEYPYIMSEGTCDEKRDASEKVTISGYHDVPRNNEDSFLKALANQPISVAIEASGRDFQFYSGGVFDGHCGTELDHGVAAVGYGTSKGLDYVIVRNSWGPKWGEKGYIRMKRNTGKPMGCVAYI

SEQ ID NO: 18641 - protein, 624 aa, Oryza sativa (indica cultivar-group)
MAAHRWAVWAVLLLRLLVPAARVLANMEGDALHSLRTNLVDPNNVLQSWDPTLVNPCTWFHVTCNNDNSVIRVDLGNAALSGTLVPQLGQLKNLQYLELYSNNISGTIPSELGNLTNLVSLDLYLNNFTGPIPDSLGNLLKLRFLRLNNNSLSGSIPKSLTAITALQVLDLSNNNLSGEVPYKHGFSLFTPISFANNPSLCGPGTTKPCPGAPPFSPPPPYNPPTPVQSPGSSSSTGAIAGGVAAGAALLFAIPAIGFAWYRRRKPQEHFFDVPAEEDPEVHLGQLKRFSLRELQVATDTFSNKNILGRGGFGKVYKGRLADGSLVAVKRLKEERTPGGELQFQTEVEMISMAVHRNLLRLRGFCMTPTERLLVYPYMANGSVASRLRERPPSEPPLDWRTRRRIALGSARGLSYLHDHCDPKIIHRDVKAANILLDEDFEAVVGDFGLAKLMDYKDTHVTTAVRGTIGHIAPEYLSTGKSSEKTDVFGYGIMLLELITGQRAFDLARLANDDDVMLLDWVKGLLKEKRLEMLVDPDLQSNYIDVEVESLIQVALLCTQGSPTERPKMAEVVRMLEGDGLAERWEEWQKIEVVRQEVELGPHRNSEWIVDSTDNLHAVELSGPR

SEQ ID NO: 18642 - protein, 630 aa, Oryza sativa
MGTILATAFLLSVLSHGSYIAMASSSWDDQDFFKHCPPSRCSKHGPEIRFPHRLQSSNTPSSCGSSHAKLICSGQDTILHHPFLGPCKVTAIDYKKAVMKIIPFGGSSSPCLLHKFNSTNLSADVNDQNQLYLTEPGRIVRCSKEFTTSRASMIDGYNTVIADKVVRLIPCLRDTTSHFSYLVSTRLYLYALPLDCMVVSKGNIPIPNPYTAGLTFKQMAERIINSAEITLDLLLGSIPYNCTRCEQQGQRCAFSSQRNQTFCMHHGSRVKVIAATSVAAFVAVSLVVATVLYLSLKQRYNEEVHLKVEMFLRTYGTSKPTRYTFSQVKKITRRFKEKVGQGGFGTVYKGKLLNGVPVAVKMLENPTGDGEDFITEVATIGRIHHANIIHLLGFCSEGTRRALIYEFMPNESLEKYIFLHDHNTPQELLSPNKMLDIALGIARGMEYLHQGCNQRILHFDIKPHNILLDYNFSPKISDFGLAKLCPRDQSIVTMTKARGTMGYIAPELYSRNFGEISYKSDVYSFGMLVLEMVSGRRSWDPSIKNQNEVYFPEWIYEKVITGQEFVLSREMTEEEKQMVRQLALVALWCIQWNPRNRPSMTKVVNMITGRLQNIQVPPKPFVSYESHPMP

SEQ ID NO: 18643 - protein, 345 aa, Thermus thermophilus HB8
MKVAVLPGDGIGPEVTEAALKVLRALDEAEGLGLAYEVFPFGGAAIDAFGEPFPEPTRKGVEEAEAVLLGSVGGPKWDGLPRKIRPETGLLSLRKSQDLFANLRPAKVFPGLERLSPLKEEIARGVDVLIVRELTGGIYFGEPRGMSEAEAWNTERYSKPEVERVARVAFEAARKRRKHVVSVDKANVLEVGEFWRKTVEEVGRGYPDVALEHQYVDAMAMHLVRSPARFDVVVTGNIFGDILSDLASVLPGSLGLLPSASLGRGTPVFEPVHGSAPDIAGKGIANPTAAILSAAMMLEHAFGLVELARKVEDAVAKALLETPPPDLGGSAGTEAFTATVLRHLA

SEQ ID NO: 18644 - protein, 369 aa, Polytrichum commune
SDSGKDAGRLSAAWQMFKAQEDLVKVAKQYGIRLTMFHGRGGTVGRGGGPTHLAILSQPPDTINGSLRVTIQGEVIEQSFGEEHLCFKTLQRFTAATLEHGMHPPIAPKLEWRNLMDSMAVAATEEYRSFVFQNPKFVEYFRAATPEMEYGRMNIGSRPSKRKPSGGIESLRAIPWIFAWTQTRFHLPVWLGLGAALRHAIDTDSQNLAMLCRMYDQWPFFRVTIDLVEMVFAKGDPRIAALYDNLLVSEELRPLGDELRRKYEETRNLLLRVARHSDILQGNPTLKQRLRLREPYITALNVQQAFTLKKMREQNSCKLETSQPGSPLKPVKRAMELVTLNPTTEFPPGLEDTLILTMKGIAAGMQNTG

SEQ ID NO: 18645 - protein, 336 aa, Neisseria meningitidis Z2491
MLPFLPEPSLSYTQQNRTAVLLLNLGTPDAPTAQAVRPYLKSFLTDRRVVELPKWLWYPILHGLVLTLRPKKSAHAYEKIWFKEGSPLEVYTARQAAALAKRMPDLIVRHAMTYGNPSVADVLSELKAQGAGRLLVIPMYPQYAASSSGAAVDKVCEQLLLQRNQMSVRTVSRFYDDTGYIDAMKNHILRYWAEHGRGKKLMLSFHGVPQKHYDLGDPYPDECRHTAKLLAEALELTEDQYVVSFQSQFGRAKWVTPSTQDLFGKLPKQGVTELDVFCPGFLADCLETMEEIALMGREQFYEAGGKSYRYIPCLNDNPDWIDALVALAEENLGGWR

SEQ ID NO: 18646 - protein, 162 aa, Leifsonia xyli subsp. xyli str. CTCB07
MSLMDIPFRTIDGEPTSLAAFAGKVILVVNVASRCGLAPQYEKLEGLQKTYGDRGFTVIGFPSNQFLQELNSTDAIKEYCSTTWGVTFPMMEKVKLNGRSAHPLYAELTTYPDAAGKAGKVKWNFEKFMITPGGAVHRFRPTTEPDAPEIIGLIEQALPTAV

SEQ ID NO: 18647 - protein, 1633 aa, Staphylococcus epidermidis ATCC 12228
MKKRRQGPINKRVDFLSNKVNKYSIRKFTVGTASILVGATLMFGAADNEAKAAEDNQLESASKEEQKGSRDNESSKLNQVDLDNGSHSSEKTTNVNNATEVKKVEAPTTSDVSKPKANEAVVTNESTKPKTTEAPTVNEESIAETPKTSTTQQDSTEKNNPSLKDNLNSSSTTSKESKTDEHSTKQAQMSTNKSNLDTNDSPTQSEKTSSQANNDSTDNQSAPSKQLDSKPSEQKVYKTKFNDEPTQDVEHTTTKLKTPSISTDSSVNDKQDYTRSAVASLGVDSNETEAITNAVRDNLDLKAASREQINEAIIAEALKKDFSNPDYGVDTPLALNTSQSKNSPHKSASPRMNLMSLAAEPNSGKNVNDKVKITNPTLSLNKSNNHANNVIWPTSNEQFNLKANYELDDSIKEGDTFTIKYGQYIRPGGLELPAIKTQLRSKDGSIVANGVYDKTTNTTTYTFTNYVDQYQNITGSFDLIATPKRETAIKDNQNYPMEVTIANEVVKKDFIVDYGNKKDNTTTAAVANVDNVNNKHNEVVYLNQNNQNPKYAKYFSTVKNGKFIPGEVKVYEVTDTNAMVDSFNPDLNSSNVKDVTSQFTPKVSADGTRVDINFARSMANGKKYIVTQAVRPTGTGNVYTEYWLTRDGTTNTNDFYRGTKSTTVTYLNGSSTAQGDNPTYSLGDYVWLDKNKNGVQDDDEKGLAGVYVTLKDSNNRELQRVTTDQSGHYQFDNLQNGTYTVEFAIPDNYTPSPANNSTNDAIDSDGERDGTRKVVVAKGTINNADNMTVDTGFYLTPKYNVGDYVWEDTNKDGIQDDNEKGISNVKVTLKNKNGDTIGTTTTDSNGKYEFTGLENGDYTIEFETPEGYTPTKQNSGSDEGKDSNGTKTTVTVKDADNKTIDSGFYKPIYNLGDYVWEDTNKDGIQDDSEKGISGVKVTLKDKNGNAIGTTTTDASGHYQFKGLENGSYTVEFETPSGYTPTKANSGQDITVDSNGITTTGIINGADNLTIDSGFYKTPKYSVGDYVWEDTNKDGIQDDNEKGISGVKVTLKDEKGNIISTTTTDENGKYQFDNLDSGNYIIHFEKPEGMTQTTANSGNDDEKDADGEDVRVTITDHDDFSIDNGYFDDDSDSDSDADSDSDSDSDSDADSDSDADSDSDSDSDSDSDSDSDSDSDSDSDSDSDSDADSDSDADSDSDSDSDSDSDSDSDSDSDSDSDSDSDSDADSDSDADSDSDADSDSDADSDSDSDSDSDADSDSDSDSDSDADSDSDSDSDSDADSDSDSDSDSDADSDSDSDSDSDADSDSDSDSDSDSDSDSDSDSDSDSDSDSDSDSDSDSDSDSDSDADSDSDSDSDSDADSDSDADSDSDSDSDSDSDSDSDADSDSDSDSDSDSDSDSDADSDSDSDSDSDAESDSDSDSDSDSDSDSDSDSDSDSDSDSDSDSDSDADSDSDSDSDSDSDSDSDSDSDSDSDSDSDADSDSYSDSDSDSDSDSDSDSDSDSDSDSDSDSDSDSDSDSDSDSDSDSDSDSDSDSDSDSDSDSDSDSDSDSDSDSDSDSDSDSDSDSDSDSDSDSDSDSDSDSDSDSDKNAKDKLPDTGANEDHDSKGTLLGTLFAGLGALLLGRRRKKDNKEK

SEQ ID NO: 18648 - protein, 429 aa, Anabaena variabilis ATCC 29413
MVSMPTLPLEGASPAHICPFDQACSYLEAAAKELRLDQGTLEILSHPRKVVTVSIPVRLDNGDIRVLAGHRVQHSDILGPYKGGTRYHPAVTLREVSALAMLMTWKCALLGIPYGGAKGGIAINPQHYSVGELEKITRRYTSELIKDIGPAVDIPAPDVGTSAREMAWMMDTYSVNVGHAVPGVVTGKPISIGGSRGREMATGRGVMIIVREALADMGRTLEGVKVVIQGFGNVGGAAAELLYQAGAKILAVSTGAGGLFAADGLDIPALKAYAAENHRSIVGFPQAVAISNAELLTLPCDVLIPAALENQITEENVDQIQAQIVAEAANGPVTLEANRVLEGRGVTVLPDILANAGGVVVSYLEWVQGLSYLFWDEERVNREMEHLMVQAYHQVIKQSQMRQVPLRLAAYTLGVGRVAQALSDRGLYP

SEQ ID NO: 18649 - protein, 369 aa, Polytrichum formosum
SDSGKDAGRLSAAWQMFKAQEDLVKVAKQYGIRLTMFHGRGGTVGRGGGPTHLAILSQPPDTINGSLRVTIQGEVIEQSFGEEHLCFKTLQRFTAATLEHGMHPPIAPKPEWRNLMDSMAVAATEEYRSFVFQNPKFVEYFRAATPEMEYGRMNIGSRPSKRKPSGGIESLRAIPWIFACTQTRFHLPVWLGLGAALRHAIDTDSQNLAMLCRMYDQWPFFRVTIDLVEMVFAKGDPRIAALYDSLLVSEELRPLGDELRRKYDETRNLLLRVARHSDILQGNPTLKQRLRLREPYITALNVQQAFTLKKMREQNSCKLETSQPGSPLKPVKRAMELVTLNPTTEFPPGLEDTLILTMKGIAAGMQNTG

SEQ ID NO: 18650 - protein, 323 aa, Desulfitobacterium hafniense Y51
MTNTVRKIAVLTSGGDAPGMNAAIRAVVRKGIYHGLEVLGIRKGYEGLIHGEFITMHLGAVADIIHRGGTMLMTARSQEMLTPEGQKNAAAQLRYRGIDALIVIGGDGSFRGAQTLSAQGIAIVGIPGTIDNDITGTDLTIGFDTAVNNVVQAVSKIRDTATSHDRTFLVEVMGRDCGNIALQSGVACGAESILVPEIEPDLDDIVAKLERGHQRGKHHSIIMVAEGAMSAWNLGEELRQRTGFETRVTILGHIQRGGNPSALDVVLASQMGGKAVEILCAGETDRMTACVNQEIQSLPLEVAYGERKPFNKVLYDLANQLAI

SEQ ID NO: 18651 - protein, 507 aa, Yarrowia lipolytica CLIB122
MKFQLGYYRNKTHTKKMLRGIKRVPRLNVGASKRLYSTEAGDTKIHTLSNGLRVAVRPSPGFFSALGLYVDAGSRFEPRNLSGVSHIMDRLAFKQATQRRSADEVADTIESLGGNFFGSSARESIIYQATVFNKDVETALALLAESVIVPQITEEDVGEKKKTMEFELDQLWKEPSLILPEVVHMTAYDGTLGNPLVCPYEQLPHINARAVNEYRDLFYHPERFVLGFVGVPEENAIELAEKYFGWMKRSDKQLENPASVYVGGEQFMDAADTEFAHIHVAYEGLPADDPDVYALSCLQTLLGGGGSFSAGGPGKGMYSRLYLNVLNRFGYIESCQAFNYHHSDSGIFGISASCVPNAAPYMADVIGRQLALTFTEGEGSLTHQEVERAKNQLRSSLLMQLESKVVQLDDMGRQIQLHGRTVPVTEMCKNIENLTVKDIKRVAQRVLTGNSNNPGNGSGKPTVVMNGVRAWFGDVELVLAKYGLGKQSKGGIHTSSRARNEARKNWW

SEQ ID NO: 18652 - protein, 367 aa, Preissia quadrata
SDSGKDAGRLAAAWSMFKCQEDLVKIAKQYGIKLTIFHGRGGTVGRGGGPTHLAILSQPPDTIHGSLRVTVQGEVIEQSFGEEHLCFRTLQRFTAATLEHGMHPPISPKPEWRELMDEISRVSTEEYRSIVFKHPKFVHYFRAATPETEYGRMNIGSRPAKRKPSGGIESLRAIPWIFAWTQTRFHLPVWLGFGGAFKHAFEKSNQNVVLLRQMYNEWPFFRVTIDLIEMVFAKGDPRIAALYDELLVDEELKPLGEKLRTMYAETRDLLLKVAGHEDVLQGNPTLKQRLRLREPYITPLNVQQAFTLKKIRDQSFHVSPGTPKGENSGKQSSELVGLNTTTEYPPGLEDTLIITMKGIAAGMQNTG

SEQ ID NO: 18653 - protein, 308 aa, Triticum aestivum
RIGTRGSPLALAQARQTRDELKAAHTELAEDGAIEIVIIKTTGDMILDKPLADIGGKGLFTKEIDDALLQGSIDIAVHSMKDVPTYLPEGMILPCNLPREDVRDAFICLTAKTLGELPAGSVIASASLRRQSQILYKYPSLKVVNFRGNVQTRLRKLKEGDVHATLLALAGLKRLGMPETATSVLSVDEMLPAVAQGAIGITCRSNDDKMMEYLSSLNHEDTRLAVACEREFLSVLDGNCRTPIAAYAYRDKDGNCSFRGLLASPDGSIVYETSRSGTYSFDDMVALGQDAGHELKSKAGPGFFDGLQ

SEQ ID NO: 18654 - protein, 110 aa, Arabidopsis thaliana
  misc_feature (20)..(20): Xaa can be any naturally occurring amino acid
  misc_feature (37)..(37): Xaa can be any naturally occurring amino acid
MAVPLLTKKVVKKRSARVIXPQRDRRISVKESWRRPXGIVSRVRRKFKGVTLMPHVGHGSDKNTRRYLPNGFKKVAAHKTRELEMLMMHNMTYCAEIAHNVSTRNRKAFR

SEQ ID NO: 18655 - protein, 371 aa, Rhytidiadelphus squarrosus
SDSGKDAGRLSAAWQMFKAQEDLVKVAKQYGVRLTMFHGRGGTVGRGGGPTHLAILSQPPDTINGSLRVTVQGEVIEQSFGEEHLCFRTLQRFTAATLEHGMHPPIAPKPEWREIMDKMAVISTKEYRAVVFQNPKFVEYFRTATPELEYGRMNIGSRPSKRKPSGGIESLRAIPWIFAWTQTRFHLPVWLGLGSALKEVLQTDPRNIAILRRMYNQWPFFRVTIDLVEMVFAKGDPRIAALYDNLLVSDEVKPLGDELRRKYNETREYLLRVAGHEDILQGNPTLKQRLRLREPYLTALNVQQALVLKKMRDSSSQFCALQNGNSGEVPKSPRRAAELVELNPTTEFPPGLEDTLILTMKGIAAGMQNTG

SEQ ID NO: 18656 - protein, 547 aa, Synechocystis sp. PCC 6803
MATKKTSLWLYDTTLRDGAQREGISLSLTDKLTIARRLDQLGIPFIEGGWPGANPKDVQFFWQLQEEPLEQAEIVAFCSTRRPHKAVETDKMLQAILSAGTRWVTIFGKSWDLHVLEGLQTSLAENLAMISDTIAYLRSQGRRVIYDAEHWFDGYRANPDYALATLATAQQAGAEWLVMCDTNGGTLPGQISEITTKVRRSLGLDGQSDRQPQLGIHAHNDSGTAVANSLLAVEAGATMVQGTINGYGERCGNANLCTLIPNLQLKLDYDCIEPEKLAHLTSTSRLISEIVNLAPDDHAPFVGRSAFAHKGGIHVSAVQRNPFTYEHIAPNLVGNERRIVVSEQAGLSNVLSKAELFGIALDRQNPACRTILATLKDLEQQGYQFEAAEASFELLMRQAMGDRQPLFLVQGFQVHCDLLTPAENPAYRNALATVKVTVNGQNILEVAEGNGPVSALDQALRKALTRFYPQIADFHLTDYKVRILDGGAGTSAKTRVLVESSNGDRRWTTVGVSGNILEASYQAVVEGIEYGLRLLTCGLTNQEAISS

SEQ ID NO: 18657 - protein, 432 aa, Bacillus cereus ATCC 14579
MLSLNNSTYLEKLAVGGKFLIKKYTCKNGVRIVMENIPTVRSVAIGIWIHAGSRNENEKNNGISHFLEHMFFKGTETRSAREIAESFDSIGGQVNAFTSKEYTCYYAKVLDEHAKYALDVLADMFFNSTFDEEELKKEKNVVCEEIKMYEDAPDEIVHDMLTKATYETHPLGYPILGTEETLNTFTGDTLRQYIKDHYTPENVVVSIAGNIDEAFLQTVEQYFGSYEGTTNREQVHSPIFHFNKVARKKETEQAHLCLGYKGLQMGHEDIYNLIVLNNVLGGSMSSRLFQEVREQRGLAYSVFSYHSSYEDTGMLTLYGGTGSQQLDTLYETMQETLETLKNTGITEKELMNSKEQLKGNLMLSLESTNSRMSRNGKNELLLRKHRSLDEIIESVNTVTKENVDGLIRNMFTDEFSAALISPDGKLPKGIKL

SEQ ID NO: 18658 - protein, 655 aa, Cryptococcus neoformans var. neoformans JEC21
MACFLPSSRAPGPIRLEDSLSDIILEKSTNLELPTYDTLDGSEELEQRLKALKDEIQDAKVDWYIVPSEDEHQSEEVGDSEKRRQYISGFTGSAGTALIPSSTSQSALLFVDSRYWIQAEQQVPKGWKVVRVGSSSGGGSGRADAQSGWMDWVVNKLEDGSRVGIDPKLISLDLVHLIQSRLSSIDSSITLVPLSTNLIDKIRNVPARSLGPISPYPLALSGEDTPSKLSRVRKAISQAVGGNRKSKVKEWVYILPTLPAIAWLLNYRCPSDIPFCPVAYAYLVLTPSQCAVFVDKRKVENELDERWKGEDVEVRDYGVEEVGKFVKAFVNENSEERNVRVFSPAECSWALAEACSPQNFRNAYLRDGRAMVRWLAWLEKMLLKNGKKVGEWAAAQGLTRERRKEDYFAGLAYEDISASGPNSALPHYAPQRGKDRLIDPDTTYLIDSGAQYQDATIDTTRTFYFGSTPSPELKRAYTRVLQGHIAVSMAKFPRGMPGDRLGMLARKALYDDGLDFGHGVGHGIGSYLGVHENPMYSHDIAFKPGHITTVEPGYYKEGKWGIRIESVLLCKQVETPEDGEASQFLEWERITQVPIQTSLVDWSLMAKYEMRWLNEHNKTVQEALEPLLQGDEDAEAREWLKKACKPHKVWPWDGV

SEQ ID NO: 18659 - protein, 344 aa, Erythrobacter sp. NAP1
MTWQKQHLPNDHPPVSSGSIGVLLVNLGTPDGPDAGSVKRYLKQFLSDRRVIEIPAIAWQPILRGIILNTRPQKSAQAYSKIWTDRGSPLADITARQAEAIADDFGENVIVDYAMRYGQPSIEKRLKELTEKGCDRILIAPMYPQYCAATTATVFDEVARVLREMRWQPALRFLPPYHDDDLYLTALADDLTRQVNALSFKPETMLLSFHGMPQRTLERGDPYHCHCHKSARLLRERLETRPEFEGVEFKTTFQSRFGPAQWLEPATDDTLIEEGEKGTKRLVVAAPGFAADCVETLEELALEGRDEFLEAGGEQYAVLDCLNVSQSGVVMLDAMIRRELSGWI

SEQ ID NO: 18660 - protein, 90 aa, Triticum aestivum
  misc_feature (1)..(1): Xaa can be any naturally occurring amino acid
XDCGHVDSLVRPCLSYVQGGPGPSGQCCDGVKNLHNQARSQSDRQSACNCLKGIARGIHNLNEDNARSIPPKCGVNLPYTISLNIDCSRV

SEQ ID NO: 18661 - protein, 475 aa, Erythrobacter sp. NAP1
MATLAKSPEDNTTQEAASEEAAPKHWSEGVPEDDALDHIPGEKGWPLVGNTFRTLADPHAFTSYMVENYGKVYKTHAFGGWNVALIGAEANELVLFNKDKIFSSEQGWGPVLDQLFPRGLMLLDFDHHRIDRRALSIAFKPGPMRHYAGSLNSGISREVAKWEGEMKFYPAIKSLTLDLAADSFLGIPWGPEADAINTAFVDMVQASVAPVRSPLPFTKMKKGVDGRKFMVEFLTAETIRRRKEGGGQDMFSQFATATREDGELLPVDEVVDHMSFLLMAAHDTITSSATSLIYYLAINPEWQEKLREEIVAVTGGPDGDGNPRPLDYDDLGKLELTDMAFKEALRMMPPVPSMPRRALKSFEFGGYRIPAGTHVGINIYWTHYSDEYWDDPQTFDPMRFTPEKVKARHKYAWVPFGGGAHMCLGLHFAYMQVKVLMAQLLQRYRIEAPEGYAPDWQPWPIPQPKDGLKVTFKPL

SEQ ID NO: 18662 - protein, 475 aa, uncultured archaeon
MSLTPKQKMEIAHQLDKLGVDVIEAGFPISSAGDKESVKSIANAGLTLDVCGLARVLTKDLDTCLDCGVDMIHTFVSTSDIQRIHTIKKSREEVIDMAVAAVDHIKDHGVKCMFSAMDATRTDLDYLLEVFKAVENAGCDIINVPDTVGVMVPSAMYTLIKNIDENVNIPIDVHCHNDFGLAVANSLLAVEAGARQVQVTINGLGERAGNADLAQTVMSLHSMYGAKTNINTEYIFETSQLVERYTGVRLQPHMPIVGENAFAHESGIHTHGVLERSDTFEPGIMTPEMVGHTRRIVLGKHAGKHAVKQSLESADIHPTDEQLTEILNRIKIIADKGKRITDADLYAVASVVLGKTEGEERIKLKELSVMTGNITTPAAVVKLIINGEESVTAKTGVGPVDAAINAVQNMIGEHTKIKVHDFRIEAISGGSDALAEVTIGVEDEKGRIVTAHSASADIVLASVDALITAINMLYK

SEQ ID NO: 18663 - protein, 243 aa, Glycine max
KKESYSDKFLQQVALNFILAGRDTSSVALSWFFWLVIQNPKVEEKILREICTVLMETRGNDDMAKLFDEPLAFEEVDRLVYLKAALSETLRLYPSVPEDSKHVVADDVLPDGTFVPAGSSVTYSIYSAGRLKSTWGEDCMEFRPERWLSLDGTKFIMHDSFKFVAFNAGPRICLGKDLAYLQMKSIAAAVLLRHRLVLVPGHQVEQKMSLTLFMKNGLKVNVHERDLRGIITSLKKRKGGRCC

SEQ ID NO: 18664 - protein, 283 aa, Lactobacillus sakei subsp. sakei 23K
MELLDGRALANELTHAQQTAVETLKEQGVTPKLVVIMVGDDPASAIYTQSKQKRATKIGMASELKRLSAETTEAELLALVKTLNDDRTVDGILVQLPLPKQINEDHVIQAIDAKKDVDGFSPVNIGQLWLNQPGLVACTPNGIMRLLAAHKIDVAGKNVVIVGRSNIVGRPLAALMLNANATVTIAHSRTANLKALTKTADILVAAIGKPHFFGIDAVKEGAVVIDVGINRLEDGSVTGDVDFEALQTHVSAMTPVPRGVGPMTITMLMEQTIEIAKERVKRG

SEQ ID NO: 18665 - protein, 323 aa, Burkholderia sp. 383
MPATFAVKVTRKWNETPDICVLELHAVREDQKLPAFEAGAHVEVHLRGLPSRQYSLCNTPGPTDCYQLGIFLEPESRGVSRAIHQTVEVGHTLDISPPKNHFPLAEGATHSLLLAGGIGVTPVLAMAEALASRSASFDFHYCTRSAERMAFQTRIGQSGWRQNAHLYFDDAPDDRRLDLNAVLSSPAAGTHLYVCGPSGFVTWVKQAATQSGWPDTHVHSESFTGTAVEVQDGDRAFDVEIAETGQIIHVGKDQTALNALVEAGIDIPSSCEAGNCGTCQTMVVSGAIDHRDQYLTAAERVANKSFIPCCSRAADDMIVIGLE

SEQ ID NO: 18666 - protein, 100 aa, Oryza sativa
MQAEDPNWEKQWCIADEQTPDDVLQQALSWACGPGGANCTMIQPNKYCYFPNNVKDHASYAFNSYWQKFKKQGGSCYFNAAAMVTDLDPSHDSCHFEVVP

SEQ ID NO: 18667 - protein, 105 aa, Clostridium acetobutylicum ATCC 824
MIQEINDKSFVNVISNSKKVVVVDFWATWCEPCKMIAPILEEIAGELKESLEIIKINDDKNREAVDKYGISNIPTMLIFKNGELQESLTGFNPKNKLKEVFSKYI

SEQ ID NO: 18668 - protein, 393 aa, Burkholderia sp. TH2
MLSAEHRAIVKATVPLLESGGEALTTHFYKTMLAEYPSVRPLFNQAHQQSGDQPRALANAVLMYARHIDQLEQLGGLVSQIVNKHVALNILPEHYPIVGACLLRAIREVLGAEIATDAVIEAWGAAYQQLADLLIGLEENVYVEKETATGGWRGTRAFVVARKVKESDEITSFYLRPADGGELLEFHPGQYIGLKLIVDGEEIRRNYSLSAAANGREYRISVKREPNGKASNYLHDSVNEGATLDLLTPSGDFTLEHNDKPLVLISGGVGITPTLAMLNAALQTSRPIHFIHATRHGGVHAFRDHIDELAARHPQLKRFYVYEKPRHDDEAHHAEGYIDEARLIEWLPATRDVDVYFLGPKSFMQAVKRHLKTIGVPEKQSRYEFFGPASALD

SEQ ID NO: 18669 - protein, 291 aa, Clostridium acetobutylicum ATCC 824
MDRYDIAIIGSGPAGLSAAINAVIRNKKVILFGSDNLSNKLLKAPKINNYLGIYDVSGKELKEKFLEHLKYMNIEIKNEKVNSVYSMGDYFALSLNQKMYEATSIIIASGVEFSKPLNGEDELLGKGVGYCATCDAPLYKGKTVAIVGYTKEAEEEANYVSELAGKLYYIPMYKDKVSLKEVIEVVEDKPISILGKDKVSGLQMSKGEINTDAVFIIKDSVSPGKLVPGLLMNGEHIAVDIDMKTNIEGCFAAGDCAGRPYQYIKSAGQGQIAALSAVSYIDKIKLNKKII

SEQ ID NO: 18670 - protein, 310 aa, Rickettsia typhi str. Wilmington
MKITTKVLIIGSGPAGLSAAIYTARSSLKPILINGMQPGGQLTMTTDVENYPGFAKTIQGPWLMEQMSIQAKNVGTEIINDYVERVDLSKRPFKIFTGTGNKYEADSIIICTGAESKWLGITSEQEFRGFGVSSCAICDGFFFKNQDIVVVGGGNSALEEALYLTNHANKVTVVHRRNSFRAEKILQDRLFKNPKISVIWDHVIDEIVGSNQPKTVTGVKIKNVYTNEINLVNCSGVFIAIGHTPNTTLFNGQIAIDDDNYIITQTGSTRTSVEGVFAAGDVQDKIYRQAITAAASGCMAALEVAKFLNK

SEQ ID NO: 18671 - protein, 80 aa, Arabidopsis thaliana
  misc_feature (18)..(18): Xaa can be any naturally occurring amino acid
  misc_feature (23)..(23): Xaa can be any naturally occurring amino acid
  misc_feature (54)..(54): Xaa can be any naturally occurring amino acid
IIKTCGTTYFLLSIPPLXIVSVXLCLNIKFLKYTLGSLLYPGGQPFPHRSFSEXVSDLDGHYTNLFLNIVSYFIVFDILY

SEQ ID NO: 18672 - protein, 126 aa, Glycine max
MSSSSSKGGGGIEVRASHILIKHEGSRRKASWKDPEGRIIKSTTRENAVSQLKALRDDIVSGKASFEDIASRFSDCSSAKRGGDLGPFGRGQMQKPFEEATFALKVGEISDIVDTDSGVHIIKRTK

SEQ ID NO: 18673 - protein, 351 aa, Zea mays subsp. mexicana
MEGGAGASEKGTVLVTGASGFVGSWLVMKLLQAGYTVRATVRDPANVGKTKPLMDLPGATERLSIWKADLAEEGSFHDAIRGCTGVFHVATPMDFLSKDPENEVIKPTVEGMISIMRACKEAGTVRRIVFTSSAGTVNLEERQRPVYDEESWTDVDFCRRVKMTGWMYFVSKTLAEKAALAYAAEHGLDLVTIIPTLVVGPFISASMPPSLITALALITGNAPHYSILKQVQLIHLDDLCDAEIFLFENPAAAGRYVCSSHDVTIHGLAAMLRDRYPEYDVPQRFPGIQDDLQPVRFSSKKLQDLGFTFRYKTLEDMFDAAIQTCQEKGLIPLATAAGGDGFASVRAPGET

SEQ ID NO: 18674 - protein, 252 aa, Zea luxurians
MEGGAGASEKGTVLVTGASGFVGSWLVMKLLQAGYTVRATVRDPANVGKTKPLMDLPGAKERLSIWKADLAEEGSFHDAIRGCTGVFHVATPMDFLSKDPENEVIKPTVEGMISIMRACKEAGTVRRIVFTSSAGTVNLEERQRPVYDEESWTDVDFCRRVKMTGWMYFVSKTLAEKAALAYAAEHGLDLVTIIPTLVVGPFISASMPPSLITALALITGNAPHYSILKQVQLIHLDDLCDAEIFLFENPAA

SEQ ID NO: 18675 - protein, 291 aa, Geobacter metallireducens GS-15
MSILINKDTKVITQGLGATGLFHANGAREYGTQMVGGVTPGKGGTVIDGFPVYDTVREAVAKTGATASVIYVPPPFAADSIMEAVDAGLDLVICITEGIPVLDMVKVKQYMQGKKTRLVGPNCPGVITPGQCKIGIMPGYIHKPGKVGVVSRSGTLTYEAVWQLTNVGLGQSTCVGIGGDPVNGTNHVDVLRMFEEDPDTEAVIMIGEIGGNSEEEGARFVKEHMTKPVAAYIAGVTAPPGKRMGHAGAIISGGKGTATEKVAILEECGISVAQSPADMAKALLKIYKPRN

SEQ ID NO: 18676 - protein, 404 aa, Thermoplasma volcanium GSS1
MIEQIRDLINDRRNDGLHEYRQDNFIQFMKSPVQPYKESPTRLRYVDFTDDLVEKMVLGEPEDDAKGYGQGDEDFAFVNGKLMVYNGKGCIVEPIREAERKYPNLIFDYTDKENVDDRYEYLINAGFYDGFLVYLPPNKSSEIKAVDFAKSTSSFAAKNLIIVGEGSSLNFTRYIVGGGEGNGAQGDNTYIFLSRNSSIVYSQVQDRPKTVDGIQFLKTFMEDNTQATIHHVENGYNKSIIMTESYQKGNFTNYQLRGVSFTRGLQQMDLRDNTIQIGTHSIANIYVRGIVREKSLTMHRGNIDIKESGRKAEGYYDTRILLLSKEAYANTKPALLINNNDVKSKHASAVTNIDEESLFYLRSRGIDEETAKNLIIEGFTEHVVEGAPDAVRNAVRKFAGISED

SEQ ID NO: 18677 - protein, 481 aa, Thermoplasma volcanium GSS1
MESTYVNKDEEIDRLISDLKNGKALDYGFHDNIKPVYSTGKGLNSKVVEEISEIKKEPDWMRRIRLHALEIFNSKPVPTWGPDLSSIDWDNMTYYSSPDDVKATNWDEVPKEIKDTFEKLGVPEMERKYLAGSIAQYDSEGVYNSLKKEWEEKGVVFMDLDSALQRYPDLVKEYFAKAVPPSDNKFAALNVAVWSGGAFLYVPRGVHIDMPLQTYFRINGEATGQFEHTIVVADEGSSVHYLEGCTAPVYSKDSLHAAIVEYYVMKNAHGRYTSVQNWSNSVYNMPTKRAWVEENGNMEWVGGSLGSKVTMIYPSSYLRGRNATTSNLNIALASPGTVKDTGAKAIHMAPNTSSKIIAKSVSLGDGKSIYRGLVRINKDALNAKSYVQCDALLINDESVSYTMPHDEIYEPTANFTHEATVGKIGTEELTYLRSRGLSEDEASSLIVLGFLDDVMKEIPMEFAVEMNRLVKLEMSKMGAVG

SEQ ID NO: 18678 - protein, 375 aa, Symphyogyna brongniartii
SDSGKDAGRLSAAWEMFKCQEDLVKVAKEFGIKLTIFHGRGGTVGRGGGPTHLAILSQPPDTVHGSLRVTVQGEVIEQSFGEEHLCFRTLQRFTAATLEHGMHPPRSPEPEWRVLMDEMALVATEEYRNVVFKHPQFVEYFRAATPETEYGRMNIGSRPAKRKPSGGIESLRAIPWIFAWTQTRFHLPVWLGFGGAFKHVLAKNNSNVVLLRKMYNEWPFFRVTIDLIEMVFAKGDPRIAALYDELLVSDELKPLGEKLRAMYGETRELLMTIAGHEDVLAGNPTLKQRLRLREPYITPLNLIQAFTLQKIRDQSNHISVREAGDRPSTPPKAGESGKQSSHLVTLNKKTEFPPGLEDTLIITMKGIAAGMQNTG

SEQ ID NO: 18679 - protein, 407 aa, Pseudomonas putida
MAIEIKAPTFPESVADGTVATWHKQPGEAVKRDELIVDIETDKVVLEVLATADGVLGAIVKGEGDTVLSDEVLGSIVEGGAAAAAPAAAPAAAAPAAAAADAGEDDPIAAPAARKLAEENGIDLAAVTGTGKGGRITKEDVVAAVANKKSAPAAAPAAKPAAAAAAPVVVAAGDRTEKRVPMTRLRAKIAERLVEAQSSMAMLTTFNEVDMTEVMALRSKYKDLFEKTHNGVRLGFMSFFVKAATEALKRFPAVNASIDGNDIVYHGYADVGVAVSSDRGLVVPVLRNAESMSLAEIENGIATFGKKARDGKLAIEEMTGGTFTITNGGTFGSMMSTPIVNPPQAAILGMHNIIQRPMAINGQVVIRPMMYLALSYDHRLIDGKEAVTFLVTIKNLLEDPSRLLLDI

SEQ ID NO: 18680 - protein, 297 aa, Polaromonas sp. JS666
MSIYINQHTKVITQGITGKTGQFHTRMCRDYANGKECFVAGVNPKKAGEDFEGIPIYANVTEAAQATGATVSVIYVPPAGAAAAIWEAVEANLDLAICITEGIPVRDMLEVRNRMKAKEAAGGKRTLLLGPNCPGLITPEEIKIGIMPGHIHRKGRIGVVSRSGTLTYEAVAQLTEIGLGQSSAVGIGGDPINGLKHIDVMKAFNDDPDTDAVIMIGEIGGPDEAEAAVWCKANMKKPIVGFIAGVTAPAGKRMGHAGALISGGADTADAKLAIMEECGFTVTRNPSEMAKLLKALL

SEQ ID NO: 18681 - protein, 422 aa, Yarrowia lipolytica CLIB122
MGSKSASKGVSKPSKTDKKSKVSSKKAEAIEKSIAELSKKKKDESSSESSDSSDDEDEEMSDASSSSDSDSDSSSDSDSDSDSDSDSSDDEKKEDKKVEEKVVKKAKKEDSSDSSDSDSDSSDSDSDSGSDSDSDSDDEKTEEKTEVKAETKAEPAAEPEAAAEPEFKTVFVGGLSWNVDDDWLTKEFADAGAVSARVITEKATGRSKGFGYVDFASGADAQKCVEEFQDKEIDGRTVRLDISTNVRQTPEQKQRDRSSQYGDQLSEPADTLFVGNLSFDTNRDDLFGIFGEYGSVVSIRLPTHPETEQPKGFGYVQFGSVDEAKAALEGLSGYEYLGRSFRLDYTSPKPAGGFNGGGRGGRGGFGGNRGGRGGFGGDRGGRGGFGGRGGRGGFGGRGGRGGFNTGANTAPLGEFKGKKTTF
